United States Patent Application Publication US 2005/0228172 A9 - sequence listing, part 187

SEQ ID NO: 842896 - DNA, 370 bp, Homo sapiens
aaccttggtggcagctgattctgcaggtgtgcagaatgcaagagctatgggcccatagcagtctccatctagacttcaaaggatgttttagacagtatgagggcccaggcagggactcagtgcagggcggagccactgcagagcccccgctagggcaatgctcagtgaatccttaggagcaaggctgctggggacctcagggcaatgctcagtggaactgcagagtgggcagccctgagatcccagaactctagggccactggcwtacagctccagcccgcaggactctgccctcactaatggattaacacagttatctttgagaatgggttagttatttcaggaatgggtttctgataaaaggatgagt

SEQ ID NO: 842897 - DNA, 608 bp, Homo sapiens
aaaatgttaatgatgcaggttaaacttacaagtagctgttacattgtgaatagcatgaaacaatcgaggaaatattctttcggtttccaaaaactattatccaattcagcaaagaagcactgacaaataagcaaagttctgacattcacttaaattttgcttttgtcttattaacataaataatatcaaccaagatcccattagaacaatacctgctcatcaattataacgatagcttgtccacagaccagatgtttggcaaaaattacgtactgtgaaagtcaattgattatgtggaatttacagtaaacactgttgtatattttgtgatcatttataaattatatgctataatcctttaggtcagtaaaatccatgagcgtatggacatacacaggtatgttgctggagagctggttgttaaacatttactagcacaccactgcccagagtctaccgttctgtttccatcatggagcttacctactgtgctctaatggcctgtttgcttgcctgtgtycccctcagggctgttgctctctgtggggagggtcatttgcagctcatcttgttcacctgtggatcccccaatcactagcatagggccc

SEQ ID NO: 842898 - DNA, 631 bp, Homo sapiens
ctgtgacaagatgtaataatttaagacaaaagtcaaagctggccgggcrcggtggctcatgtctgtataattccagcactttgggaggctgagatgggcagatcacctgaggtcgggagtttgagatcagcctgaccaacatggagaaaccctgtctctactgaaaatacaaaattagctgggcgtggtggcacatgcctgtaatcccagctactcgggaggctgaggcaggagaatcgcttgaacccagggggcggaggctgcggtgagttgagttcatgccattgccctccagcctgggcaacaagagcaaaactctgtctcaaaaaaaaaaaaaaaaaagtcaaggctgaacacggtggctcaagcctgtaatcacagcactttgggaggccaaggcaggcggactgcttgaacccaggagtttgagaccagcctgggcaacatagtaagacctcgtctcttaaaagaaaaaaaaattggcaggcatagtcccagctatgctggaggctgaggtgggacgatcccttgaggctgggagatggaggctgcagtgagccaagatcatgccactgtactccagcctgggtgactgagaccctgcctcaaaataataataataagacaaaag

SEQ ID NO: 842899 - DNA, 599 bp, Homo sapiens
cttctggccatggagtactagaggctggatttatcttcctgctgtaaacaataggaaactggacaaagtacataaacaatgacttttagacwttgaaccacggggaatgccagactgtgctgcctgaaggcaggttgcaggctgctgcacagggaaggagggcccagtcttgccagctgaggacatctgagattggagtggagagtggtcagttgagatcagagctggggaggctgcgggggctagaatttgttgggcagtgtacaggagcagggaggtggggtgcgatgagagagctttagagatctgctgaagggtccctttgaactttgggaagggtactgatttctatacgcatgaaaagaaactagcagaggctggggaaaagatccatcagaaagcaataggccaaacaattcctgcactcacatggagctgggaatagtttgtatttttgtccaccaaaatataaagatcttataatatgtgggttatctaacagagtcctcagaaggggactctactcctatcaccttagtagtggagataaatgaaccctagactaaaaattggtctgaacccaccctaaccttaaaagc

SEQ ID NO: 842900 - DNA, 526 bp, Homo sapiens
agagggtatgtaggatagtaagagtaaagcctcccatctataaacaagaaaattccatagaaagtgagccagggtcgttctcatggcatatgtatcaaacacactaaaaaagtgtccatggaaaccacacaccagccagctctgcctattagtaaacctgactatttattttaggaaaaaagctcaagaaaaacagcacgtttggctgctaggtggacttatgcaatgtttcaagaaaagaaagacttaccaaggctggtgccatcctgccccatgatgcacttcatggaggtgatgatctgctccactacaggaggtgacaatgacgtggcatacactgcactatgagaatgtgttcgcaggtagtctatcagctcctggggagttcacagaggcagataagtagagacaattcttgcattcacyggcaatgtcagtcctttccttctaagttctagaggactcctcacttcaatggcactggaatagggacactaatctgagatacaaggtcaaccaacatggt

SEQ ID NO: 842901 - DNA, 658 bp, Homo sapiens
ttaaccctcattttatttatttatggagactaggtaacacatatgtaatgtatacaactccagaagtgagcttcaagtcaataacaagtaaaaaaaacaaaaaaactggccaggcacagtggttcacacctgtaatcccagcactttgggaggccgaggtgggtggatcacaaggtcaggagattgagaccatcctggctaacacagtaaaaccccgtctctactaaaaacacaaaaaaaattagccgggcacggtggcaggcacctgtagtcccagatactggggaggctgaggccagagaatggtgtgaacccgggaggcggagcttgcagtgagccgagaccgagccactgcactccagcctgggcgacagagcaagacttgtctcaaaaaaaaaaaaaaaattagccgggcgtggtggcaggtgcctgtagtcccagctacttgggaggctgaggcagaagaatggtgtgaacccaggaggcagagcttgcagtgagccgagatcgcaccactgcactccagcctgggttgacaaagcgagactstgtctcaaaaaataaacaaacaaacaaacaaacaaaaaacccttcagaggtacaaaggaacatgcagagaaaagtgaagtgaatgaagaagccctcttccccagacaac

SEQ ID NO: 842902 - DNA, 609 bp, Homo sapiens
tatcacttacaacatattgtctgtctaccacactaaaacggtagctgcaggagaacagggaccctggctgtcttgcccastgctgtctttgctgcatcccacagagggtctggcacttatagggacacaagtaatatctgtgggtgataaataacagctttgcccttgtctagtctacaggggtatttgttttttgttattcattttttaatttttatttttttgagacagagtctcactcagtcacccaggctggagtacaatggcttgatctcagcttactgcgacttccacctccagggttcaagcaattcttgtgcttcagcctccagagtagctggaattacaggtgcacgccaccacacccagccaatttttgtatttttaatagagacaggagtttcaccatgttgtccaggctggtcttgaactcttgacatcaagtgatctgcccacctgggcctcccaaagtactgggattacaggtgtgagccactgcacccggcccctacaggggtatttggaatccagtcctccttggaaacagaaagatggacatgaaaactgcctaagggcctcctgaacccaatcagaggaggagtgcatgta

SEQ ID NO: 842903 - DNA, 632 bp, Homo sapiens
aagttttattcctggcatcaaggagatgagttttttcttccagatgagattgaaattgagccagtacgacagagcagcgataaaatgctctactgtgaggccgaatccccgccgactgttgaaaaagtgaaaccagcccgggagaattcggaaacagacctggagattgaaggcgagcatgggcatttgggggcagtcagggcagcttctcctcagaaactggagaaatctggtttccaggagctgtcatctcactcctttccagagtctgccctgcggatggcctgtggaggaaatgtggcagaaaggcctgctcgattttgcctggagtcctcctccgggctggcaggggagagcagctgcagcttcccacgcttgtcacctgcctcaggagcagtgccctcacgtcgtcttgttaaaagcggaatcaatacacaaacaaggttttctaatcttctaaatgtttccacgtggggcatcctatgcaatctttgcaatagtcctaggaggtaggcatctttgccagttttcaacagaagaggaactgggccttaaagagattataggcattgcccagggacagcgggagtttgcccagcacrttggctgatcccgtgtttgactcactctga

SEQ ID NO: 842904 - DNA, 609 bp, Homo sapiens
taaattgtagaaaaatcttatattacagtctgtttggagacactcactttctgggtaccacagaaagcactttcagttacatctctctttccacatgactgaacaaagtgacagagtggaaagaccaaccccagggacccctgtgcagacaggatacagggtgggggcaccgaggctctgcagggaaggtgctgggggctgcaccacaggtccttggtgaccatgctgctgaggactcagaaatattgaaaacagttgtgaccacagtgcagaattcatgtagatttcactcctcaaagggagctctgtccagatccaggtgcccacaggggttctgggcacccacaggctgtgctgccacctctggtcctcaagggctttccgcctttggcagcagcccacagttaggcttctgcccgtgtcaggtggcatctggggtccttgtcctcccagctgtctttataaatggcaactcagaagctactgctgaaacattttgtggtcaagctaaaaatagtctgctggaattgtgataatccagcaagtccacatttcagatgctctstgctcagtgcagggcaaaaccacatgaccctggttccaacccca

SEQ ID NO: 842905 - DNA, 595 bp, Homo sapiens
aaatcttttgttactctggtatggtttcacagttaattgtgatcctcttttatcaagtgtttaaacattttgacatttttgacaactttctgaaatcaaatttttcttttcttttttcttttgagaaggagtctcgctctatcgcccaggctgaagtgcagtggcgcaatctcagctcactgcaacttctgcctcggggtttaaggattctcctgcctcagcctcccaagtagcagagattacaggtgtccaccaccacacccagctaatttttgtattttagtatagacggggtttcaccatgttggccagggtggtctcgaactcctgacctgaagtgatccacctgcctcagcctcccaaagtgctgggattacaggcgtgagccactgcacccagccagaagtgttcaaaatgggaccctgaaatgtctgaaaagcatttatcctctcaccttataaaaagagagatcctaaactaattagacttatttgggatgctraacgtacatgggatgcactgttaaataagagattatatttaacccttctttgagctatatttgttatgttattaatatgactatttccaaaat

SEQ ID NO: 842906 - DNA, 575 bp, Homo sapiens
gggagactgaattaaagggtagagtttttattagttttctttttgcttgcttgtttgtttatgcaatcagtgttaagttgtcataagttcaaaataatgggtaataagatgttatttgcaagcctcatggtaatctcaaatcaaaaaacatacaatggacacacaaaaaaacaaaaagcaagaaattaaaacataccactagagaaaatcaccttcactaaaaggaagacaggaaggaaggaaagaaggaagagaagaccacaaaggaaccagaaaacaataaaatggcaggagtgagaccttacttgacaatagtaacattgaatgtaaaaggactaaaatctccaatccaaagacatacagggctgaatggataaaaacaagacacaacaatctgttgcctactagaaacatacttcacttataaagaaatacatagactgaaaataaaaggattcaaaaagatattccrtgaaaatggaaaccagaaaagagcaggaatagatatacttatatcagccaaaatagatttgaagacaaaaactataaaaagagacaaaaaagctcattatata

SEQ ID NO: 842907 - DNA, 625 bp, Homo sapiens
ggctacaaaacaagtctcaacaattttgtttaaattgaaaacatatcaggtataatttctgaccacmatggaataaaactacaaatcaaaaccaagggaacttttgaaacaaattaaaaacacagaaattatgcaacatgctcctgaatgaccaatgggccaatgagaaatttaataagaaaatatttaaaatttcttgaaataaatgaaaatataaacataatatgtcaaaacctatacacaaaccaatagcagtactaagaggggaatttataagcacctacatcaaaaacatagaaatatttcaaataaacaacttaacaatgcacatcgagaatgggaagaacaaaaataaaccaaacccaaaattagtagaaggaaaaaaataatataaatcagagcataaataaatgaaatggacactaaaaaaaattacaaaggatcaacaaaacaaacagtcagttttcagaaaagataaacaaaattgacaaaccattaggtacactaataaagacaaaaagagagaagacctatataaataaaatcaaaaatatgaaaggaagcattacaactgatagtgcagaaatacaaagaatccttagagattattatgaacaactattca

SEQ ID NO: 842908 - DNA, 593 bp, Homo sapiens
cccaaaacccaggcaagggacacaacaacaaactacaagctaatttcccccaatggaacaccaggtgccaaaatcttcaagaraatactagcaaacaaaatccaacagcacattaagatcaaatgagctttacctcagggaagtatgaatgattcaacatatgcaaattaataaacatgatacatcccataaacagaataaagaacagaaatcatatcatcatatcaatagaaacagaaaaggcacttcataaaattcagcatcgttttatggttaaaaactgtcaataaattaggtatggaaggaatgtatcttaatacgataaagaccacatgtgacaaactcacagctaacagcatactgaacaaggaaaagttgaaagcctttcctccacgaacttgaataagtcaagcttgcccaatttcagcgctgttattcaacatagtactggaagtcctacacagagaaagtagttcagagaaagaaataaaaagcatcacagttggaaagaaagaagtcaaactgtcccggtttgcagatgacataatctaacatatagaaaaacctccaccaaaaacctcttagaactgata

SEQ ID NO: 842909 - DNA, 568 bp, Homo sapiens
gataaattattttgcctgcctcccctctaatccaaagggttagacaatgatttcaggtgaccactccagaaatgtcctatgtgaccaagcaatcagctgtgtcacctataagaatgtaaccagctgagtagcacactacctggtatttgctcttcttcctccacggccaaatttactttattcttgctgccccaggattgaagtcctcaataaaacaatagcatgtaaactttgcctcagaatcctttcttttttttgtaggaaacttgggctaagacatagattaatgaataatatgactcctgcctctcctccagggaagaggagacatacacaggctggagagatcctattctttttagcttgaaatcagaaatgtatctggtaagaatgtcaattcattattatcactgaccactctgctgcccttccctcatctgcttctctcatctcccctcttgcttccctcccttttttcctctctccctctcccctrtctgctcttctcttcctgcctctctctcagcaacccaagaaaagatttcctacagtcagataagaggtggta

SEQ ID NO: 842910 - DNA, 665 bp, Homo sapiens
cttatctctcagcgcatgtcacttggaaggagactgaatgaataatgcttgtatatttttttcccatgaagcagtattaaaggtacatattaccttgtttccaataagagatctttccccagttagtttctcactggactcataagaaatgtaggaaagtatagtattgaggaaacctgatattttttaggtctctttcccttaggaaataaatgtaataagcccaagatgaatgaacagaaccaggcgtaaaattcctgctgtcaatctgaaaaaatggaaagcaggcttattcatattttctgaagttttcattttcttccaagaaatgttgttaatagctcataatgtgacagataaatatgatttatattataattgtcagtactaacataaaacctctcaaggcccgtagaaacagaataaattgtattattttcagggtatcattgtgggtatttatgcagtctatttgagctgtgcatttgcaagattaaaatatattaacaattcataatttttattcagttcctgcaatgtgccagaaactgtgctaagsgcagtgaaatggggaatggtgtcttcccaccaactgggtcttagtacctcattgtccactaatctggacttttagtatctgattatagaataaaaattcaggtcac

SEQ ID NO: 842911 - DNA, 623 bp, Homo sapiens
atataataatttaagcattgatgatactaaaatttcagaatttaaatagtcatttggttgaccctttataacaaagaggtgtgattctattattttccttgtttgaatacttaacaaaattatttgtgttgtatagtataactagaggaaggatttaatttttgtaaatgtaagcaaaatatttttcataaacagcctaatatttctctactcttgaccagattaggaagaaacagcaagaagtagtgggttttttggaagcgaataaaatcgactttaaggaattagatattgctggagatgaagacaacaggaggtggatgagagagaatgttcctggagagaaaaaacctcaaaatgggattcctttgcctccccagatcttcaatgaggagcagtactgtggggtgagtatgtgcttctattaaaaatcctgctgtgtgtgtgtttattagaaattttctaaagcagattaagtttgagtcagcatttgaaattattcacaactgtcaggtcatggtctatttctgccatccaatagctggatggtagatccrttatgaataatcaatatttaagatttagaaaaggacagaaacaatatcatgatgattcagaagttt

SEQ ID NO: 842912 - DNA, 555 bp, Homo sapiens
aaatttgcttgattgttctctctaggtatttattctgttttcgagtttctcttttatttcactaaatatattaaatatagctgttttatattctttgcctgataattccaatatctgattctgatttttaattccaccttctgttatttcttcatgctctcactatgttttctttttattcccttatttatattgtaacttttggcttcaaactgctcatttttaaaaactttattagtggctatcttagtctgttttgtgctgctaaaacagaataccacagactgggtagtttataaacaatagaagtttatttggctcatagctctggaggtggaaagtccaagatcgaggggcagcatttgatgagggctttctggctgcatcaaacatggctgaaggtatcccaggagcaagagaaagggagagcccaaactcacagcctcaagcctttttataaatgtcatcaatcagttcaygagggtggtccccttatggcctcaacagctccccttaggccccacctcccaacactgttgcattggggattaagtt

SEQ ID NO: 842913 - DNA, 585 bp, Homo sapiens
ccacccttatgaaaatgacaataagcattgctgttgaaggtgtgatgaaataagctatctctgacacaaaacrtgggattgtaaattggcatagttctggaaactaatttaactctatcaataattttaaagtgagaaatgttttgacatataattctaattaaaagagttaaagaatatagttaagatataattccaagccgggagtggtggctcatacctgtaatcccagcattttgggaggctgaagcaggtggattgcttgagctcaggagtctaagaccagcctgggtgacatggtgaaaccctgtctctactaaaaatacaaaaattagctgggtgtggtggcacgtgcctgtagtcgcagctacttgggagggtgaggtgggaggatcacttgagcctgggaggtcaaggctgcagtgaaccatgatcacaccactgcactctagcctaggtgacagagtgagaccctgtctcaaaataataataataaaattaaaaaaattaaaaagttaaaatgcagtatttgaaaaaagaaaaaaagatatagtaccaaagacaaaataaaagaaaacaataacc

SEQ ID NO: 842914 - DNA, 608 bp, Homo sapiens
ttaggtcatttctggtattttgcaattacaagcaatgttgcaatgaataatgttgtgtatgttcatatttatggaggtgtagcttttgggtaaattctcagaagtaggattgctaggtcaaaagctacgtgtgtatgtagttttgtcacggattgccaaatttccctccagcaaggttgtacaatttgcatgcttaccagcaacacatgagagttcccgtttccccacagcctggccaacagggtgtcatcatactgtttagtttatgccaacctggaaagtaagtaaataagaaatggtatctcagcatagttttgattctatcttattataagtgaggttgaactactgttccatctttttgtatgattgagaacaatttttatatgtttttataacttgtcattctatatcttttgctcattattttctctctcagatttttgggctttttactccttctaattttaagaattcttttgatgttaggacygatggccccctttatctgcgttttgagtcataggaagtatttccttatatggaagtttttttctggtgcttatatcttatatggtttcatttatttgtctttctaggttttattc

SEQ ID NO: 842915 - DNA, 540 bp, Homo sapiens
attatatgtcataagggaaatgcaaaatgttcttaggcctatgcctaagttacaacagtgacatacmactacacttcaattcaaatggctaaattcagaatactgacaataccaaatgctttcaacagtttggagcaatcaaaactctaatttattgctggtgagaatgcaaatggtatagctactttggaagatcatttgatttttacagaactaaacatactcttaccatacaatccaccaattgagttccttggtatctacccaaaggagttgaaaagttatgtccacacaaaaatctgcacatggatgtttataacagctttattcacaactgacaaaacttgcaagaaaccaagatgtccttcagtaggtaaactgatgaataaactggtataaaatagaatattatccagtgctttaaaaaaagcagctatcaagccatgtgaaagatatggaggaaatttcaatgcattttcaatgcattttactaagttaaagaggacaatctgaaaagactacatcatacatcatatatca

SEQ ID NO: 842916 - DNA, 643 bp, Homo sapiens
tgatatagtgatattctattttgatcaccctaataagtctcttgtttttaaagttggctctgtgggattgtttcatttattttaaaaaatccaaaagaaggaaatacatcaacctgaagattttaagaacataagggagaggcttaaaaatagagacctacaaataccagagggctgggaaagcctttcatcctctaacagtaaatactttgagttgcctttggtggtttcctttttccattgagacataatattagtagaatctcatatcttgttaaccatgcgtcattcatcaaatgcttttaaagcacttgctaatataaattaatattgattaatctatagttattcaaatctatatttaatccttttaatttatatttttcatatttatttttgggttttcccctccaaacttcattggcttccttctctaattctacacattcagccttgtatgttttgcccttctcaaatatattatttattaatggatatgtttttgacacatttaccagataatccttttttttatttgtatacttccacttatcaatattttgttataycaaaattatgtgatctgatcaagctatttttatatacttatataagccatattcaatgaatgctgtgttctcaa

SEQ ID NO: 842917 - DNA, 510 bp, Homo sapiens
caggaaaaatggttatagcagagcacgaaattggaatgagtcagggtggagcaggtaatcggaatgactcggggtggagcagatgattgaaaaaggttgctttaygaggaagttaagtttaaaagtagagggcaaagaattgagcacactgacatattgattctttgaagagaaatttagaattcatatctaacaggaccaaacacctactgaattctcaacaaaatagaaaatagaagaccttcaccaagacacgttatcataatacttcccatttttggagcaaataaaataaaaatttaaacacagttcagagagaaaagaatcaagaatgaaaatggcaccggagtttgtcaacccaagtctgagaagtaggtggtgccagagaaatgctttctagatcctgagggcagatattttcaatctggtattccatacccaggaaaactaatatttgacttgaatgtacctcagaatttgtagacttgcaaggtctaagacatttatatc

SEQ ID NO: 842918 - DNA, 642 bp, Homo sapiens
tcccaaaatcctacctctccaaactccgctggtatatctttctttcccaycacagccaaagatgccccacttctgagaccaatcattgactttcattttgcattgatttgtttaatcagcttcctctgtgaagaatgctcctctccctggctgcccgaagaaatcaagttagtaatttaaatctcactcaaatgtaactctacagtatcttctcctgccactcccttgccaccccactgagctccatggcactttgctcttatggctaaccaatatcataaggcttctggctatgctcaaggtgacttacaaaagttacaaaattgtaatccagcaacccaagtcttctggtttctttggctccttgttctagtctctttccacagacacttctaaaaataaataaataaaaaataaaaaaaataaaaaaaaacccaagaaactaaattaccccaggatctgtgggagactctgatgaatacccaagacattcatttcatgtttaataaagctaatctacccagccattctaataaaattgtagaaatgcaattgactagacctcatggctggctctgtctcttcagataaggcaaagaaagctgagtacggtgcttccagaaaataaacaaaagcaagaat

SEQ ID NO: 842919 - DNA, 618 bp, Homo sapiens
caactgacatttaatgcactttaaagttgttaaaaccaagagcaggaaatgttacacttgtagtatcaagcctggctcatgagaaagttccatccactattctggaaaaaaaatagaactagcctgcaggacacaaagctacctgtggtgatccgaactatgcttctcaaaaatctttcttttgtttggccacctttataataggagttctccaacagagaaagagctgcttacagcttcagagtacagatggataattgttgctgtgccatctctgaacatcttagattgagggtcccagagaacctcatgtatgtgaatgttagcacagtacaaaagatgggacagagctttccagagcagtaacagacagctgtgcccagcactttcttctaaaagttggagatgctggatggaaaatttgtcattgtttacatagcacccacacacacacaaaaaatcctgactcactagcttctgtgttgtcattttttkgtccatggttctattgctgcctaattttcatacgggaccctcacagtggttagtctgcacagtaaggagtcaactgtgacatcctcatccttgaatgctagactccccactttctcagctcaa

SEQ ID NO: 842920 - DNA, 603 bp, Homo sapiens
ggtacatatgcaattagggattcaaggatcaattgtgcttttaattacttagcacatcaggaacttgatctcaataatccaaaccatgtagacagatcttgattctatggcaaaaatgatctgagaaactggaataattaaaactcacagataatcccaaaccgttatggcaacaattcattaagatctccttccttagagaaatggttttataagagctacaaatcattacaaaactggctggcttatgtctcctctcctttgatgattccactgaaatctccggggaaggccatgcaaagcagtgaaatagccaagtcaggaaggaagagaaaagggacagagcttcaaggagaagccataaaacttccaaatgcactagactgtcagtggtgagtgtgtcctcgagaatagttgaaaacaggatttgcatcattccacgtaaaacaggagtgagtgagtaacctatgggagaaggtgtgtgctgatccaggtggcaatccccaagctagaacatgaataatttatagtttggtaactaygtagaaagacgttttagacatcatttttcccttattttctgcctcccttctattagcctca

SEQ ID NO: 842921 - DNA, 638 bp, Homo sapiens
cttttttctttttgagatggagtcttactctcacccaggctggagtgcagtggtgcaatctccactcactgcaacctctgcttcccaggctcaagcaattcttctgccttagcctcctgagtaggtgggattacaggggcacaccaccacgtccagctaatttttgtttttttttttaatagagacagggttttaccatgtcagccaggctggtctcgatttcctgaccccaggtgatctgtccgccttggcctcccagagtgttggggttacaggcatgagccaccacacctggcctagtctggatttcttcacttgccgattaatgaagagcaaacagcagaaagagagaaagccacacgcccttttcgagcctttgcttgcatcacgtttgctaatgtctcattggctaaggcaagtcacatggccaagcccaggttcaaaggttagagaaaaatactccgcctttttcttgtagggtctgcaaaatcacattgcaggaatgggtagaatttatggctatgttgcaagcaatcacagargtggaactagtaaaccattaaaatgttttgcaacccagaagttcctggctcaatttctggcaaagcatttaaaagatgtattaaaagatggcatgc

SEQ ID NO: 842922 - DNA, 642 bp, Homo sapiens
ctatagcacttggagtagcaataaataagcaaagaagcaaagcctgctttggattcaggaatagaatttgttcaggctgaaaaacatatctaatgaaatacctgtttttgttcattttcaaatatgggcacctacaaggcacaaatgccacccagaaggcacacagaaaggctcacactacaactgcacttgcgctgttgaaatagatttgaagcctgagattggtgtcctgcttggctgagttgtatctggctcattttgggacaagcacatttggagtttcttgccttggcctggccccagcaaaccagaaattatagattcctaatccagagttctgcttgtatttcttactttctgtaaaaaaagtaagtaaaaaaaggtaaaaaattatacatttctttctgtaaagaaatgtctaatttctttacagaaattatagattcctaatccagagttctgcttgtatttccctggagtgacactccaggaaaagtcactgtattagtctgctagggcttccataatgaartgccacagactaggtgccttaaacaacagaaagttgtttccttatgattctggaccaaggtcaaggtgtctgcagagctggtttttttcggagggtctctcccttggcca

SEQ ID NO: 842923 - DNA, 603 bp, Homo sapiens
tcagagtttctcacaccttgagcagcatggccagcctgcagctctgggcttctgttttctctccctgaaatttcttactttccatrccttgccctggtcctgccctgccaatgtctgctccattacagtggtttcacctcccagaagacaggtttgctccaaccctccaatgtccctggcagttctgcaccccagagggatgaatacccttctctccaggataactcatttcttagacaggaaaaaatttaatttcatcttctctaatctaactcttcctgaaagatgcgtagctgaatcagaatgattccaggcatttcctctcactttcttaatagaaaactgtaccataaagacacatgcacgtgaatgttcattgcagcactattcacaatagcaaagacatggaatcgaactaaatgcccatcagtgacaaattggattaaaaaatgtggtacatatacaccatgaaatataatgaagccataaaaaagagcaagataatgtcttttgtgggaacatggaaggagctggaggccattatccttagcaaactaaactaggaacagaaaaccaaatacaacatgtcctcagctatgagtt

SEQ ID NO: 842924 - DNA, 554 bp, Homo sapiens
aacaggaatggctaccttattgtttgtttcaaggtccttcattgcatctttttattttcttactaaaacatttgtttttagattactatttaatcgtttgttaactacttgagcaaaaggtcatgaaaatagtttaagtaaatttatacttttacatcctaaaataaagggccgaacaattagagttgtgcaaagagaaggctggtttttacttgttctgttgttgttcttccacttctcctgcccaacagggcagtctcattcagtcttggacactaaatgaaagtcttaggcactaaatgaaaggagactggaatacatcagcttgaatgaaacctcaccagtaaggagtgttttctgtgcagcagcttaaggaagaattcagaatctcaaatacacatatttattgttcatttttcttgggatggtgagagcagcctccctcttgactmcttagtaagtggtggcatctgtttgtgaaatggtggttgaggtaagggggcagaggaaagtgaacttaaatcacgaggtatctgtcagtcgaatccagtagg

SEQ ID NO: 842925 - DNA, 516 bp, Homo sapiens
acataactaacttcatttttgtttaagggacctttacctattcccacrgataggcaaggataattatagagcagtgagatcatacacaaaaacagcaatcatgtagtttttcagaaagaactctgagtttaaaggacaagtaactatgttttgttaaagatttatggaaatactgtgacctgaccagggaaaagaagttcccaacatcctcacaccctcgctggtgcccagatatctgcagtcatcagttacctcttgccctgagccctccatcttcctcctgccgttgacataaaaagagccaaaaatttggaatgacttaagatggtactttagcatgatagtgtgccatcatctgggtttgctggctttctgaataaacgtgcttttcctcccaccaacccttgtctcttgagtttggcctttcaagcagtgaggagccaaacttgggtttagttacaggggtactactgtacatattatacaaaatagctataattttatatatatcttaat

SEQ ID NO: 842926 - DNA, 516 bp, Homo sapiens
acataactaacttcatttttgtttaagggacctttacctattcccacggataggcaaggataattatagagcagtgagatcatacacaaaaacagcaatcatgtagtttttcagaaagaactctgagtttaaaggacaagtaactatgttttgttaaagatttatggaaatactgtgacctgaccagggaaaagaagttcccaacatcctcacaccctcgctggtgcccagatatctgcagtcatcagttacctcttgccctgagccctccatcttcctcctgccgttgacataaaaagagccaaaaatttggaatgacttaagatggtactttagcatgatagtgtgccatcatctgggtttgctggctttctgaataaacgtgcttttcctcccaccaacccttgtctcttgagtttggcctttcaagcagtgaggagccaaacttgggtttagttacaggggtactactgtacataytatacaaaatagctataattttatatatatcttaat

SEQ ID NO: 842927 - DNA, 605 bp, Homo sapiens
gtttcaggcatctacagggggggtcttggaatgtatccacctcaaataggtgtaacaccaaagcagcaaaaaactaacataactaacttcatttttgtttaagggacctttacctattcccacggataggcaaggataattatagagcagtgagatcatacacaaaaacagcaatcatgtagtttttcagaaagaactctgagtttaaaggacaagtaactatgttttgttaaagatttatggaaatactgtgacctgaccagggaaaagaagttcccaacatcctcacaccctcgctggtgcccagatatctgcagtcatcagttacctcttgccctgagccctccatcttcctcctgccgttgacataaaaagagccaaaaatttggaatgacttaagatggtactttagcatgatagtgtgccatcatctgggtttgctggctttctgaataaacgtgcttttcctcccaccaacccttgtctcttgagtttggcctttcaagcagtgaggagccaaacttgggtttagttacaggggtactactgtacatattatacaaaatagctataattwtatatatatcttaattatatgtgtgtgt

SEQ ID NO: 842928 - DNA, 478 bp, Homo sapiens
atgtaaatgtaagacctcaaactatgaaaatcctagaagaaaacctaaaaaacaccagtcaggacatcagccttaagaaataatttatgactcagtyctcaaaagcaattgtaaataaaacaaaaattgacaagtaggacataattaaagagcttctgcacagcaaaacaaactataaacagagtaaagagtgtaaactttttaaaaatctatttaaccatctcacaccagttagaatggtgatcattaaaaagtcaggaaacaacagatgctggagaggatgtggagaaataggaacacttttacactgttggtgggagtataaattagttcaaccgttgtggaagatagtctggtgattcctgaaggatctagaaccagaaataccatttgacccagcaatcccgttactgaatatatacccaaaggattataaatcattctactataaagacacatgcacacgtatgtttattgc

SEQ ID NO: 842929 - DNA, 592 bp, Homo sapiens
tttctgcttgtatttcaaccttacataagaaaaatatattttgttgtcatattaaattctttagttcttgcttaatgtgacctttctcatcttcaattggaaatgttttgatttcagaaattatagcgcatgttgaaagaagttactgatttttgtcatcatatgtatgcttatctgtctaattaggatgatcgtactaaatttactaagatatgtgtgcatttcaatgcaatattaggctttaattttttttcctgggaaagaatgatgaaaaattgccacaaaattgcattgccggaaagataaattctatttgttttaataaagcacgttttaggcaatttggaaatgactcacccctcactgttcacttcgtgcactggttatgatgaccaacattatgaaggtaactaacctcatgaaggtaaacttttagaagagaggagtgaacatcaacactgaccttggtcttatatttaattctctgtcttctttgagccaatattaccataagttgtttactgaatcacacgtttacctaaaataaatcctttttatgccgcagttrttgcaggtgacatagtatacacct

SEQ ID NO: 842930 - DNA, 431 bp, Homo sapiens
agcccaatacaacagccttatatagtcggtggaaaaaaaaacctaacaggactggattttcacaggagtcatcaacttgaattcagttattgctcccaacacgtcagccgttgcggrtgttgcaaaggtgattgaattcattacacagattgatagcacttgctgtgttgtcttagacactgctgaaacccattttgacataggcccagcaccaaggcatctagaatagttctcattcatgtggtaaggtctccaatgtatggttgctgtactccccgactgttgcctaaacttccctgccatttgccacaaggagcaggtcaggatttagcacgagtgcttctgttctttaatttccaatgtttttcctatctgtgtcatgttgccaagtcagaatgttcatcctcagtggccctgactgtggcattatc

SEQ ID NO: 842931 - DNA, 590 bp, Homo sapiens
gtcatcaaattgaaagataatccacagaatggaagaaaatatatgcaaatcatataactgatgaagatatactatacagcatatattaaaaccctttgaagtcagcaataagataaactaaccaaattgtttttaatggactaaagatttaaaggtacttcaccaaagaagacatgtgaatgtttggtaaacacataaaaagatgctcattgtcatccactaaagacatgaaatactagtaaaatcacaatgagatcacattacacactcactagaatagctatattaaaaaaaaaaaagactgaaaaaactcaaaggttggggaggacaggaagaaactgaaactctcctccattgctggtgagaatgtaaaaatggcataaccacttgaaaaacagtttggtggtttttcaaaaagttaaacatacatgaatgtataaccttgcaatgacccactaattgtacactggagtacctaagagaaatgaaaaatatatgtccacaaaaaatctgtctacaaatggtgatatcagcrtcaatcataataaccaaaaactgtaaacaaaacaaatgcccatcaactattaaag

SEQ ID NO: 842932 - DNA, 293 bp, Homo sapiens
aacataagaaaactcagaagacatgggcagagaagcaaaatggccaggtacgatgtaaaatgtaaygaggctagctagcacatccaacctggtgctaaaagtcttttaaggacttgaagctagcttgtggaaagatcagctattaatgtttgccagaggcaacccttaggcctttagagaaaattgtagttttccaatgataagaaaattaccccatggttctattcttgaattattttatcaattagctaagggaaaatacaatctcagacaatgcactgtacctgcactgc

SEQ ID NO: 842933 - DNA, 599 bp, Homo sapiens
caaactattttctagtttaaaaatttacagtgatcaactagttacacactgaatcatgggagaaaggccataggctgattgtcactttgagttatgccttaattaccctgtttctagtgcactaacttgcyagccaccttcttttttgtcccctttatttttctaagaagggcaaaacatccttgaagatcactgttatattcatagcaatgtgttttacgtttatggaaaacctaaaaaccagagaaagcccacaaaataacagtcatttcaaaccagagacaatgcattttttctcatttattcaaattcactgcaggaagtaaacactaaaagattaaaaaacaaaacaaaaaaattcacactgcagtatgtacagtttcatgacatcacatgaagaaattaaatttctaataaaaatggcaaattatattactgagcagatcgcatcaaatttggttgtgtaaacaccagaattcttactatgaatggtaatgtgcctatattccagtattgctaatactgggatactcttggaataatgtttgcaatgggattaaaaaattcatgaaagtagttgtgtgaattctttatgttta

SEQ ID NO: 842934 - DNA, 583 bp, Homo sapiens
taaaatcaccctaaattcaaattgggaacattctctagtaaatcagaacagcattcttygtggtcatgtttatttaagtattacatattctcattcctttgttaacaacaacgaaaacaaccagccaaccaaaaaaacaaaacaaaacccacacacacacacacaaaagtagcaatgctggcccttggtcttttccctgacctaaatttcactctcttgtaaaaaggtcatttccccctacccaagggagaataccaacatattttttctgacatacctctaaggctccaaaccttccacaacgatcaagaaaaatgacttgtttaaaagcttatttatatagtgttgacaataagattgtcatagtatggacatggaatagaatatattcaactggccagtggaattttatgtcagaataagcctatgccttcacttctccatgatgttgcataatacccactcctattactgtataatatttccagtagctatttacaaatcattctgaggaaaaataaccatttagggttttagatcatattaggaaatcacacctatttttaatataaaaatcttagaa

SEQ ID NO: 842935 - DNA, 630 bp, Homo sapiens
gggtgcagcactccaatatggcacatgtatacatatgtaacaaacctgcatgttgtgcacatgtactctaaaacttaaagtataattaaaaaaaagaaagaaaatacarctgtaagaaagaccataacaaaataaaaaaataaaataaaaaataaaatgcattgaaaagaaaaaaagcttacgtataaatttaactaagaaggtgaatgatctgtatactaaaactacaaaacaataataaaaaattacattggacacagtaagtggaaagatgttccatgttcacagattagaagaattaatattgttaaaatgtccatactacccaaagcaatctacagattaaatgtaatccttatcaaaaattccaagggtatttttcatagaaaaaaaaatcctaaaattaatatgtaactacaaaagacccttaacacccaaatgaatcttgagcaagtgtacaagaaagctgaagacatcacacttcctgatttcaaattatgttactaacctctagtaatcaaaatagtatggtactggcataaaagagacatagaccaatggaacagaatacataacccagatataaacccatgcatatatggtcaattaattttcaacaagggatccaaa

SEQ ID NO: 842936 - DNA, 649 bp, Homo sapiens
aggccacttcttttgtgtgctcccgtatgcatatataaataaactttagtttttatttctcctgctaatctgtcttttgtcagtttaatctgcaggcctccaagccaggaaccaaagtgagtacaagaakagttttccctccgcaacactttggcaatgaagatgggatggttgggactccccagtcactctgaaggctgcagctgagatctcaggatctcttgaccaagccagcaaaggtaaatttccttgctgatctctgctcagcatccagctgagtgcgtgcagtaagaacttgtctttgttcaaacaggaaaagttccctgatcctctcacagggcatgtgatgggggtgtggcttgcttcttcgtgccccactgctcaaacctctagggaaacttacagacgggcaggctgtggggctctgactcctcggcagtgtctaggggtggatgtttacagctcctgaagcctcagtgggcgtgtgtcagagggtgcttagaggtttgccgtctatccgtctacgggtggcttatgttaaccagctcaattagaccctctaccttgtcacaaggacagagggctgtttcctgagttcttgccttggtgtagtggaagaattggaccacacgtgggcttggagaatgag

SEQ ID NO: 842937 - DNA, 627 bp, Homo sapiens
taatttaaataaaataaaaatatatataaaataaacattaaaatcaatataaaaggcaactaggaaagtttaacaatttctaacatttcaaagacttcttttttcccttattgttttttccttattgtttgtcaatttctaatttaaatacattaagaattagggccaggcatgctgactcatgcctgtaatcccagcactttgggaggccgtcacggccagatcacgaggtctagagatcgagaccaccccggacaacatggttaaaccccgtctctactgaaaatataaaaaattagctgggcgtgatggcacacacctgtagtcccagctactcgagaggctgaggcaggaaaatcacttgaacctgggaggtggaggttgcaatgagctgagattgtgtcactgcactccagcctgggccacaagagagagactctgtctcaaaaaaaaaaaaaaaaaaaaaattagaaaatcacacatatctcaaattytacattacagatcaaactgtctttcaataattctttggtttatctttatcttagccaataattcctcttttatctattgttattaaattccatttgattttcttatcttttgtatccaatagaattagtttct

SEQ ID NO: 842938 - DNA, 573 bp, Homo sapiens
tatctcaaattctacattacagatcaaactgtctttcaataattctttggtttatctttatcttagccaataattcctcttttatctattgttattaaattccatttgattttcttatcttttgtatccaatagaattagtttctactgtatataatatactaacaaaaagtagcacagcttaaacaaaatagaagtctatttccctgcaatgtgaaaaaatccgcatgtagctagtcgttattttcttagagagggtacaaaaaattatcatagttcctgatgacttctgtctcacagctctgtcaattttatatttgtttttcaagatagcttccaggactctgacatatgtgaatattctgttgactgtatagctacaaaatagaaagtttcctaagagttttaaaaatatagtaatctgtacgttcctggtgctgtatgccctaaagtcaaaaagacctttctttttatttacttatttttwtttttttatttttgcgggtacataatatgtgtatatatttatggggcacatgatatattttggtacaggcatgaaaaacagctttct

SEQ ID NO: 842939 - DNA, 708 bp, Homo sapiens
cacattcaaaaagaataaaattggatccttattttataycatgcacaaaaatcaactcaaaatagattaaagacttaaacataagacatgaatttataaaactccaagaaggcaacatagggtaaaattttcataacatttgtcttggcaattaattcttggatatgacaccaaaagcacaagtaacaaaagcaaaaatagacaaatggatttacatcaaatgaaaaagccagaaactaaaaatcttctgcatagtgaaggaaataatcaaccgagtacaaaagcaacctacagaatgagagaaaatatttgtaaaccatatatctgacagggggttaatataaaaatatacaagaaactcaatagcagaaaataaaaataaaaataactatcttcaaagaagagatacaaatgaccgacaggcatatgaaaagacattcttcactaatcattagagaaatgcaaatcaaaaccacactgaggtatcatctcacactcattatgatggtcattataaaaaattaaaaattaaaaaaataaagtgttggcaaggatgtggaaaaatttgaaccgtgtgcactactggtaagaatataaaatgatgttgccactataaaaaaaacagcatagagattgatagaaaaattaaaaataaaaactaccatttgatccagcaatcccacttctgggcatttatccaaaagagct

SEQ ID NO: 842940 - DNA, 501 bp, Homo sapiens
aaccttagagagatctattgttttagatatgagaacactgctatttctgcaaaaatcatccaggtcattagtggctgattcattcacatttctgcagtagctcagtatgtagagcaggctttgaaccagatacaaccagacttacaatcgattctcaatctttctaccactctgaacctcagttttacaaattaattgataatagaatcaaatgtagatacctggtctagtgcctggcacatcacataaactttaaactagtggttctttgtccttagccagttgtatttcatgaaacttgtaggcaagaacattgttgtacttacttccgtgcaaaatattctccaatgccatagtatattttgcccccctcattcacttttgcctttcaattaccatgtttcttasaggctaagtcagtttaagagccctccttcctccccaaatatgaaagccttcaaactggaatgggcctctgaggtaactaggaactgtgtcata

SEQ ID NO: 842941 - DNA, 611 bp, Homo sapiens
tcagaccagaatatttcttaataacccccataacttcaaaacaaagttattaaacttagagttactagattgaagataaamccttttcatgtattattataatcatatattgatgtcatagattatatccaaagtttattagcattataagaaaaaattgataatgatttcaattaatctgagctagttaataaaactaagtatttttttgtagaaagttgaaaacctatagaaaagcatagaaaccaaaatagaaggggttacctataatcccaccatctagttataacagtgattactattttggtcttagccttttttcctatatgtatatgtatgtatgcatgcatgtgtatatatggatatatataactctgtttatgcatgtgtgtgcatctgaattttttagtagaacatacttctatgcagatggttttttacatcacagttaccactgttttgtgtggcttgagaacatatctcaataatacatgatattttaaagcttcagttctgaattctgactgcctgagatggagtgctgattcatcttttgctagttgtgtggacttgacaaggtaaagggtctttgaaccctcagattcttattt

SEQ ID NO: 842942 - DNA, 556 bp, Homo sapiens
tttcaggaatgtaaaactaaaatgtggaagaaaatggtacccataatttgtggctactttgtaccttctaaagatcaaataaccacccatgattttcatctatttattttcatgtctataaattctatttttctcctttacaacaagttgctttctgattgagatatactttatggattcaaatcaaattagaagcaagaacacagagaattttttttctcactcacagcagttgtaaactatcatgcttatattaaaattcttcaaaatgtaaaacttaaaactggtctcactttttcataattctgaactcagaataaatgaattcagctagcttggcttcctagagaaattctacaattaatttcagagtaaactcctacccccgcatagaaacccacctagcaagaaggctgctcaagtstcaacatttatgagccatgaatgcaagtgttgactgaaagttttttgctaaccccaggtggagaagtgaggcatttgtgtggcatgagaggtctacgccagtcatgcctctggtaatgcgattctcagctct

SEQ ID NO: 842943 - DNA, 594 bp, Homo sapiens
tgatggaagcctgtcaaatgtgacctgtaggttatcaacgatgagaactgtgtcttacagatctttgagtctccaacactggtcacagactcaggtacccagggaggttcaaaatgtttagctggatgctcaatagatctacaggtgacagacaatccaggtgccaaagctaagccagaatccccattattttcatttccttctgtattcatcagcttgggctgcgacaacataataccatagactggctcacttaaatgactgaaacttattttctcccaggtctgaaggctggaagtccaagatcaaggtgctagccaatttggttcctggtcagggctctcttcctggcttgtggactgctgccttcctgctatgtcctcacatggtgaagagagtgcttgagcactctcctgtctcttcttataaggacactgatcctattggatcaagccctgcccttatgagtccacttaaccttaattacctctgtaarggccctttctcctagtacagtcactttgagggttagtgcttcaacatgtgaattttggggggacacaaacatttggtacataaccacttcttcaacaa

SEQ ID NO: 842944 - DNA, 515 bp, Homo sapiens
gctagggtccctcttccctggatcccttcagcgatgaactggtcagcctggtgctaccatttgttttcccctttggcatctgggaaggcttgacagtgccaccccgggctatttgacagtgtgcttggggggggaaatgttagcttctgagggatggccttgtgtgcttgctgggatcatggggacttggccagcgtttctccaacctgcttactttttctctttagctccggtctgatatacaaaaacgactgcaggaagaccccaactacagtccccagcgcttccccaatgcccagcgggcctttgctgatgatccttagctctttgctctatggcccttcctcatcaggggaccgtttcccccctcttccttcacagtatttaagaaataaaagtcggatttttctggctgctttctctctacattgtctccattaggtagtgtgtcccttaatcttgtgtgaactttttwaaattaatacttccttggaacactgttgtgttctactcag

SEQ ID NO: 842945 - DNA, 571 bp, Homo sapiens
caggagcacctaggacctggggccaccttcctgcccgctttattggatggagcactgcctccccagtttctgggacaccktggggtgtggccttggtgagtgaaacttggggtgctgcctgctgggaaggaaatccggaaacgcagagaggactctctggtggtgacccaggccttgtcagatctgagattcttggaatctcagattgtgggggtgtggatggtgaatgaatttgggtatgcccccctttaccccagaactgaagaggaagcaaactacttgccacacttgaggctgcatgactattcagagaagggaggagccacttctgaattcagagtaggactgcatcaccaggcaaatacctgttctgagccagaaagactctggcttctgaggagatcctgagagtctgagtagtgccaggaagcagcctcagaatttgggggcccattacacaccccagccatgttcctgcgacggcttggtggctggctacctcgcccttggggccgccggaaaccaatgaggcctgacccgccttacccagaacccagacgggtggacagct

SEQ ID NO: 842946 - DNA, 496 bp, Homo sapiens
catttattgaatgaatataaattgtttgccactaactgctagacttattgaattctactcaactagtgagatctagtttaaggggaaaacaatagaaagtccctaggtctatctagtcattgttttatttgttcttcaccataacctgttaggtggataaagttcctttatttttatcattttagagaataaggagtagaagctcagagagtttgtgtaacttgctcaagtagtggaactaggactccaacccatttcttttgattcagagtacagtgatcttttgcctgtacttgctgtctccccattcaatgtacccacaggatgctgtgtgaagttctgtaggtaatttgtagattcaccacgggatgtgctctcaaagaactttctttgtgaaacatcaaactrtcatactcctcaccctcctcactctgcccctactgaagcctacaggtgcagaaatggatatgcacatccacactcatgatgtcttata

SEQ ID NO: 842947 - DNA, 643 bp, Homo sapiens
aatgaaacaccaaactagaaatttattgccattcctcaaactgacatcattcaatgatcaaaataaaakgcatccataatatcctagaaaatttacatgtcccattcttaaaaagaaaggcaaactatttttaacgtttaacgtgacatgcatttgtttttaaatgtctcagttttatataaccatatactcaaggtctttatcattcaaggtacaggaaggttgtgcgtttaatctttagcatggttgtaggagatatgattcacagagtagaaaatagataaaaataagcatgcagccagtatggtgccaaatcatcagaactcgacatcttattgacaaatggaagtcattcttctttatttcttgagcaaagcagtttcataaaagataaatagctttcagtcagaatagcctaacctgcaatatgcatctttttgacatgtatattctaatactactctagaccataagattaaaataagaaaaatcttagagtagtgtgttgacaagaagcactggttgaatctgtattttttttttccatttttcatctcccagaatttggctctgtgtatgtttgtaccttactggctgtcattaagtaatcaacttctagtgaccttcaagcatcattttctaa

SEQ ID NO: 842948 - DNA, 616 bp, Homo sapiens
ttcactgagacatctgcttaaataagtctttggagcccyttgtttattgttagatatttttagagaccacattaacgtattaagactaataaaattatttttactaaacactgcctaaaagccccaaaccatgtaattccatctgaaagagaataaaaatcacttttgcattacacaagtcacaacttacttgattgcctattgccactttaaagctgattaacttgttcatttttattctggaattttctagatggtagataaatggcatggatttttaagtgtccttcactctatttcagagtcactatttggtacaatccttgaaagagagcatttttatattggcaattatccccatatatcattgaacttaatctttgggaattgaaactcaatcattttttcatatgactattaattgtatttgttcaagatactgtaatttaagaagagtgaaattttgtgaaacatgataatttctacttaaaatacattcattattcagctaataatgaaaaaacaggagtgtttgctcttcttgctaacattttgagaattctattcacatatcccactagtaatgtacctttgttattataaactatgattactg

SEQ ID NO: 842949 - DNA, 629 bp, Homo sapiens
aaaataattatacaactcatcataatgtagaataagctcagtgggagccctgagcttactgtcctgcaactagacagtcccatctagggttggtgggagacagtgatagatcatcagacattagagtytcaaaaggagcacgcaacctagatcccttgcatgtgcagttcacaatagggtttgtgctccagtgagaatctaatggtaccgctggtgtgacaggaagtggagctcaggtggtaatgtgagcagtggggagtggatgaaaatacagatgaagcttcactggcttgcctacagctcacatcctgctgtgtggcctggtttctaacaggccactgtaccaagtctatggcccaggagttggggactcctgctctagacattcaacttagatatttttaaatatcttctatgtctccacttagtattttgcacatatggaacacagtcacatatgttttaatacccttttctgctaattctaatacctgtatcagttctgggtcagtttcaattgagtgactgaacttcactattggttgtattttcccatttcttgcatgttggtaatctttggttgtatgtcagatactgtgaattttaccttgttccatgcttgttatgtg

SEQ ID NO: 842950 - DNA, 637 bp, Homo sapiens
ccctccaagtttctctctcgtcttccctgcacacccctgacctaaatatgaatgatttatttgagaaaattttttkggggggatagataacccatgaaattgtgggatgtttatactggctattttctcagcatttcatcttacctgaagttgataattcattgtttctagagttctccacaaatacaactttccattgacatgaaaaacacatgaaaccaaccaaaaggaactataaaatgtgaatttttactttggaagtgatgtctcctgtttatatcctttccagtatgtactcagacatggttactcaaatgagcattgttttttaagataaatgtacttacaaaaaatgactctgacctataataaaaatgtttaaaaaataatctgttttccatgtgcttaggatcgaagccacctacagtaatagcttttgttttcattaacaggggcgagttagttttgcaagtatttcttgagcatgtgttagagaactcattggaatgacctaagcaagactgccttataactataaaaaactgaaatatatttagtatagtagaaaataattgaatagcataactaaaaggtcatctttcttctatataatttgcttgaacagaaagacatcttg

SEQ ID NO: 842951 - DNA, 606 bp, Homo sapiens
atgtagaggtctcaaattatagcaagagaaacatccatatatacatgaatctccgtatctctgcatgtcacatgtacatatgaaggctaaattcacaccaattcagtgaaattatgttacagctttagagtagatgcaataacctttgaagaacattttaagtgagtaaatagcatttctataacatataaagtatgcaattttagtgtccataatattacttatgtaaagccttaattttaattaactgtcagtaaatatagaaagagtttataaccaaagaaacagattatgaacagttttatcataaagatttttttcctgattggcttttgtttagagtggtctgcagttgttagaatattaatcttccctgatatattgctgcttcacattttttacatttaaaaaatttttaatttttaaggcttattaagtgcaattgcaaattatgtttccataagtaaggtgagcctagaaataaaaatctataatttctgggtttttttktttttttcttggtagaactcagctctcttatggaacctgatttaattgagagcaggctatattcactgacatcatcatagctcatttatatttttt

SEQ ID NO: 842952 - DNA, 492 bp, Homo sapiens
tatatgaaagtatgtagataaaattcttcactaagccttggggatccagctgcttaaggactaagaccgtatctagctccttttagtatttccacagcatgccatggagatacatgtttctgattatatatgayacatggaaattatatgttgttgaatgagtgattgagtaaatgtgtactagggcagctaatcataaatatttctactattgctaaaatgactggatttatccattccttctgagagtttatactgattgcttatattgtatcaaataccgtaactgagggcaatgtttactcaaactaatagcaccattcaaatttatgcaaacaataacactatatctttaaaatgttttcactaaaagctgcataaagagtgtattcaacaacaatagaataattttacaatcttttttcttgcttaatggccatttgtgccttctgacatgctgctagccattcaaaggtcacactaccttgaagt

SEQ ID NO: 842953 - DNA, 606 bp, Homo sapiens
atgtagaggtctcaaattatagcaagagaaacatccatatatacatgaatctccrtatctctgcatgtcacatgtacatatgaaggctaaattcacaccaattcagtgaaattatgttacagctttagagtagatgcaataacctttgaagaacattttaagtgagtaaatagcatttctataacatataaagtatgcaattttagtgtccataatattacttatgtaaagccttaattttaattaactgtcagtaaatatagaaagagtttataaccaaagaaacagattatgaacagttttatcataaagatttttttcctgattggcttttgtttagagtggtctgcagttgttagaatattaatcttccctgatatattgctgcttcacattttttacatttaaaaaatttttaatttttaaggcttattaagtgcaattgcaaattatgtttccataagtaaggtgagcctagaaataaaaatctataatttctgggtttttttgtttttttcttggtagaactcagctctcttatggaacctgatttaattgagagcaggctatattcactgacatcatcatagctcatttatatttttt

SEQ ID NO: 842954 - DNA, 573 bp, Homo sapiens
agagcttggcggtcagccagagttagaagtatagcgttgtctctagccttttctgagcaggcatcctgctgtgggtatttgcttggccttctcaattcttcagcatttgtggaagtttttaaaagcctttgtactccatatatctcctttctcaacttcttttccaggctttttgatatgtttattgcctatgctgattattgtccctatattgacctgatatagccaatactgtgcctctaaattctttcagaaaatgccacatgggaagctacttcatccttggtagtgttctgagtccggtaaaacaaaggtaagtccttgtgctggaccttcagggagatatcagaaaggttgaaacagataaccacaattcttagagcacgaggtccatattgctgttttgacgctaggaatttgcaccaagagtccaactgctgtcctcatggctgctaatttgggsattggagatgttaggttagcaacagagaatggcataatatagttttactgcaggcagcagcttctttcttaaccaaatttttcctttcttattgtgagtttttgactaga

SEQ ID NO: 842955 - DNA, 391 bp, Homo sapiens
ggatggatgttgccaagatccgaaagcacaactytagggggtgctgaagtgaggaagcaataggcagggtgggcagataatggacaagctggggctggacaaaggcaagtaggaaacaactaggaaatctcagcaggaccagtagcaggagcagtagcggtagctgcagcagaagtggtagacgaatctgttgtagttttactgtcaagagagtttggcagaactttcataactagaggagggatttcagaggtggagccaaagcacttcaggtcacagtgacctgctctgtgaagaaaatttgagactgtttctgtacagcctagcaactaagaagtcagccctgcttgacaacttggaaacacactcaccacactgacctattatgttt

SEQ ID NO: 842956 - DNA, 598 bp, Homo sapiens
aagaatattacggcatccaaaaagaaactattgtagaaaaagaagaaatacttgaaacttgaaagtgtgatagctgaaattagtaattcaatagaactggttgaatgctaaatcaagaattctctcagaagtagaacaataaacagaaggtggatgataaaaaaaagaaaataattaaattagaagctcctgtccaggagatgcaacacccaataaataggatctcacacaaaagataaaatggtggtgataagaaacagggaattttcaaagcaataatataaaaaaattttttgatgctgaagggcataacccttctactgaacatccagactaataagtgagaaaaacaacggcaaatcattgtaaagtcttagagtatcagaaatggtaaaaatatatatcctaaacatccctagggattaaaaaaattagtcacagatcctagggaatccaattgatatcagtattctcaagggcaatcttgacmaatagaatatgataatgtattaaaaacttcctaatgacatgaaattcaacctaaaatgctctagtcattcagtccatcaggcaagggtagaaaaatgacaatttcaaa

SEQ ID NO: 842957 - DNA, 649 bp, Homo sapiens
tcgttctttgaaacagtaaaaagggcttyccacatcatgtctaaccatactggataggtacactggtttttcaaagtcctggtgctgatgcaggatcactacagattttaaactctacaaatctcatgacaattaacagatttagcgaaattcagagcctgcctattcagaagattcgtcactaccaatatcagtgctaacgtaggatgagaggtttatgaatacacagagcactttggaagcttacttaccacctgaacaattgggtggcaaaatggcaaatgacttacttttacagtagtaagcaaaacatttgtcccatgtacaaagtcagttacaaacgttaccaggaaggaattgggaccctcaccaattaatctgtccttgtgacactcttacaatttctaccttataataatttctgtacctgtctgatctccctagaagataatgtgctataacagaaatctaggattacaggagaacagatctctgctgatttgccattttcctcactggcggctgcacggctctccctttgctgggatgctggcttggatgatttctctggacagtgtttctaaaatgagcagagctctctccttactgttattacactttcttagtaggctccgaaagtgtattattc

SEQ ID NO: 842958 - DNA, 641 bp, Homo sapiens
aaagccaccgcagccatgagccaagctttctacagcccttcaagacaattgtcgtcattcctttgtgtagctagtgggtttttcttggaagctaaatgataaacctaaagttcatttcaytgagacctgtttgagatttccattttacaagtaaagaacacaggtgacctctccgagttaaatgctcttccagccaacagatttaaatctgcggacagatttaatatcacaaactttgagtttccagcccacgcctcctaggctgctctgggacttcatacacacgcacactgacttccattataatccccctatttttagttacacataacttttaaagaagtttctcttggaaagtttgaggattttcagcagttatttttgtgattcctaccaagcaagacctagctttttccacctcagaaatgccaggttttttttttctttttacgtctgactcaagcagctgaattgtaacatgtcctaattccttctcatgtggttcttcttcattcaagacgagcagttttattgaatccaaaagaaaaaaaaaatctcatttaaaaataatttcctcccatgtacagaaaaaaaaattgtctaataaggttcatttacattgttacctgaggccacagaga

SEQ ID NO: 842959 - DNA, 593 bp, Homo sapiens
tgattaaataaacagtctgaatcacttagcaggtcaaagctgagaagtgctggcagaacaagtcccgcagtggaatagacaggctgtgtgtgtgtgccccagactcaccaacatgacctgcaatttaacaacagcacatcccacaattcatctggaaatgccaaaaaagcctgttcaaatcagtggataccacctaagagggaggccacttctaaaatatttagaattttcaggctgctgttcccgatgtgccaatagcttattggctccatctgaataaagcaaaattgccaatcttcctgttgactctagcactgtttccaatctgcttagatatgagtgtgctatgcaatattggaaacataaacctctccccagagcagacaaccaatggcctaatcgtttacttttgttataagaattgaaagtacgtatggaaaaagcttttttttttttcttcccctctgacattttgctccatttgacagctgacaaaamtcagttttgttcattctggcaaatacaaagaatgtagagaaaatgcattgcaagaaagcagctttcaaaagacttggacaattaccctggaacct

SEQ ID NO: 842960 - DNA, 570 bp, Homo sapiens
tgaagaaagctgtttttcatgcctgtaccaaaatatatcatgtgccccataaatatatacacatattatgtacccgcaaaaataaaaaaawaaaaataagtaaataaaaagaaaggtctttttgactttagggcatacagcaccaggaacgtacagattactatatttttaaaactcttaggaaactttctattttgtagctatacagtcaacagaatattcacatatgtcagagtcctggaagctatcttgaaaaacaaatataaaattgacagagctgtgagacagaagtcatcaggaactatgataattttttgtaccctctctaagaaaataacgactagctacatgcggattttttcacattgcagggaaatagacttctattttgtttaagctgtgctactttttgttagtatattatatacagtagaaactaattctattggatacaaaagataagaaaatcaaatggaatttaataacaatagataaaagaggaattattggctaagataaagataaaccaaagaattattgaaagacagtttgatctgtaatgtagaattt

SEQ ID NO: 842961 - DNA, 502 bp, Homo sapiens
tcccattggttcatttctatccctttcattttacttgttcttttaagcacttattaaaatattaataattctgctgccaagtgagtcttaytcagaagaataccctgctccccatttgtccttcttgaaagtttggacttcgtcttttttctatataaacttaggttcatattgtcaaattatatgaatacctttgatgggattttgactgaaatgaacttgaattttacaccatttttaggggaaattgacttcattatggtgctaggtcttttcatccacaaacatagataactctttattcaattctttcatagccttcaataatattttgtaattttctctatgatatcttgcttaccttttgataattttattgttaggcatccaagaattttggatgccattgtgaatttttctccaagtttgttgatgctgatttagagacacattattagtatattgatatccaaataaataattttgctgatcttgaagaatt

SEQ ID NO: 842962 - DNA, 502 bp, Homo sapiens
tcccattggttcatttctatccctttcattttacttgttcttttaagcacttattaaaatattaataattctgctgccaagtgagtcttattcagaagaataccctgctccccatttgtccttcttgaaagtttggacttcgtcttttttctatataaacttaggttcatattgtcaaattatatgaatacctttgatgggattttgactgaaatgaacttgaattttacaccatttttaggggaaattgacttcattatggtgctaggtcttttcatccacaaacatagataactctttattcaattctttcatagccttcaataatattttgtaattttctctatgatatcttgcttaccttttgataawtttattgttaggcatccaagaattttggatgccattgtgaatttttctccaagtttgttgatgctgatttagagacacattattagtatattgatatccaaataaataattttgctgatcttgaagaatt

SEQ ID NO: 842963 - DNA, 507 bp, Homo sapiens
aattttatgtgtggctagtgtaaataggattactttttaatttcttttttatattgttgcctgttctcatagaaatgctactggtattttatgttgaaattgtatcctgcaacgttgctaaatttgtttattagttctaacagttttcctgaggaatttttagggttttccaaatcatatcatatcatctgcaaacaggtataatttgacttcttcatttctaatttggatgccatgtatatctttccttgtctaatttctctagctaggacttccagtactatgtggaataacactggtgagccaggttatattccagatcttagaggaaaggctttcatcttttccccagtcagtatgatactagctgtgggtctattgtataaggcttttattatgttgaggtatgttccttstagactcagtttttttaggtatttttttatcatgaaggaatgtcaaattttttaaaatgattttttagtataaattgatataataatattg

SEQ ID NO: 842964 - DNA, 635 bp, Homo sapiens
atatgttctgatatctagagaacacagtgaaaagaacttgagatgggtgaatagacttacattttatttctgctctcagaytgggaacggtgtctttgggaatgtgattgaatttctctgaccctaagttttctgagcaatagaatatgaataaaaatttatgtctcttgcagaaatccaaaacactgcatgttctcactcataggtgggaattaaacaatgagaacacttggacacagggcagggaacatcacacaccagggcctgttgtggggtgggggactgggggagggatagcattaggagaaataccaaatgtaaatgatgagctgatgggtgcagcaaaccaacatggcacatgtatacaacgttgtgcacatgtaccctagaacttgaagtataataataataataataataaattctgtctcttggtttgcagcgagcatcaaatgttgttgtaaccctctttaagcacctggcatggtgcatgttaatgatcattgcctttccttctgcaaaccaccacacccgggcagagtaatcttttaatttagtatccttgattaaatgactttaagtcaaactctcacttaatcttggatgttattttaaaataactgcttaaaataatt

SEQ ID NO: 842965 - DNA, 635 bp, Homo sapiens
atatgttctgatatctagagaacacagtgaaaagaacttgagatgggtgaatagacttacattttatttctgctctcagactgggaacggtgtctttgggaatgtgattgaatttctctgaccctaagttttckgagcaatagaatatgaataaaaatttatgtctcttgcagaaatccaaaacactgcatgttctcactcataggtgggaattaaacaatgagaacacttggacacagggcagggaacatcacacaccagggcctgttgtggggtgggggactgggggagggatagcattaggagaaataccaaatgtaaatgatgagctgatgggtgcagcaaaccaacatggcacatgtatacaacgttgtgcacatgtaccctagaacttgaagtataataataataataataataaattctgtctcttggtttgcagcgagcatcaaatgttgttgtaaccctctttaagcacctggcatggtgcatgttaatgatcattgcctttccttctgcaaaccaccacacccgggcagagtaatcttttaatttagtatccttgattaaatgactttaagtcaaactctcacttaatcttggatgttattttaaaataactgcttaaaataatt

SEQ ID NO: 842966 - DNA, 627 bp, Homo sapiens
aaagtgagatttgagatgatttggcagccaacttaccgtgactgtgaccaggtgattccctggacaaggccctttaattcataccaagaggaccttcggaaactttgagayctggtacctctaggattaagcctgctgtgtcctgtatacacgctcacttatcgtattgtcctatacagctaggtatcacttgccaaaaagatacactcattcagccattcccctaaccgtgtaatgatccggaattacggggcaaatactgagggtgctgggaaaacaaattgacgagacatccttttatcttcctaacagggagaacttaaaattacaatgtttacgataatctataaaaagagaagggacatagatagaaaagtggttccgcgtgcgaactctgaggtcagcagtgtgactctgagcctgtcaatgaattcctcagtgcttcagtttccttatatgtcaaaagagagtagtagtatctgcagtataatgtggctatcggaatatgtggcctaatggtaaaatggctacagctgagtctagcactcgctgtttgctaccgctactactgctaatggtactgctgttattattagtaataatactaacatcaagagaaatcaatag

SEQ ID NO: 842967 - DNA, 432 bp, Homo sapiens
ctcaatctcagctcactgcaacctccgccttccgggttcaagcgattctcctgcctcagcctcctgagtagctgggactacaagagcccatcaccatgcccgcctaattttggtatttttagtagaaayggggtttcaccatattggccaggctgttctcttactcctgaccttgtgatccccccacctcggcctcccaaaatgctgggattacaggcatgagccactacgcccagccaagaaatgagatctttaaaagtgattaggccgtgagggttgggtggaattaatgtcattataaaagggcaagttacaccccattttgtcttttttcctcctaccttccaccatgtgaaaacatggtgtggtgttcctcccctcctgaggatgcagtgttcaaggtaccatcttaaaatcagaatcaccaaacca

SEQ ID NO: 842968 - DNA, 635 bp, Homo sapiens
tctacaaaaaaagctaagtaaaggtgttcagaatatattataagagaagtakctgatgaaatagtatgagtgacaggtaagaaaagagaaactgtcaagaaaggagaaaaataaagtggtcaatagggccaaatactgcaaaggggtgaattaaaataataactaaatattctccattaaatttggcaacatgaagatcactggggagtttttcaaagcaattgaagtagaaaatgtatatacttgtgagcaaatacttgggcagaaggggttaaattgtgataaaatttccaagttacacaaatctaagaatctcttaaagaggatggcaaaactatgtaacattaagcagcacactagaaaagagaaagcatagctagaaatgtaaatgtgagctatttacagttaatgattttaatgcttcaaatttgtataggtatagaaatgttttccaaacctgaattttgtttatgggggagttgagaggaagagtgacacctaccccagctttaaaaaattccagtctcgggcccggcgcggtggcgcacacctgtaatcccagcactttgggaggcctaggcgggcgcatcgtgaggtcaggagatggagaccatcctggctaacacagtgaaacc

SEQ ID NO: 842969 - DNA, 571 bp, Homo sapiens
gtatcccagcatcagacttatacacgagccattgtwtggtactaagaatctctattcccttctgacaactaagttcttataactagctcagactcaggattccaaagttcctgttacctcaagagtaggtctctcctcagaggattctcactctccatgcaaatagatgtttttcagttttgtctcattaataatccccacaatgatcagttatgcctgaatgtccaggtgtaatcacaatagagatacaccctgtaaggcaggataaaggatgtggtaatccttttggcagaagttgtgatatgtggagataattactagagtatttaaatttcccattatctatctcagaaattatatatgaagctacaaggaaaacagaaaagatttcattctatagaaaaatcaagtaactaagaatgactgtataaaagtaagcatagacttacttttttccccattctagaatatctgcaatgctttgtaattactttttaaagatagtactaatagaggaaagaaggacctatctcctaccctttgtaattcttgtaatacgctcactgttcgg

SEQ ID NO: 842970 - DNA, 555 bp, Homo sapiens
tacccatatttttatgtatgcatacaaataactctaatgacaaacaacaaatcatttttacatattaaaaataagaaatccaaataggtaattttggttgctgagtaaaggttttcataaggatattatgcaagggcatttagctttcaagtaggctaacagaataatcagagaaaaatcagagcatttatagttcaaattattatttgaccatgaaacattttgatatcataatatttgggttggtttcttcaataaaacaaaaccagaatttcccggggtttgtgtagcaaaacaccctctctcatttagagcttgtttcaggaaacagggatttcataaggactctgttgcttttcattacctttgtagaaatgcctgataagagaaagcttctgcttttcagggcccatctctaaatcataarccatgtcttagaaaagatttaataaaaaaaaaaaagtaagtcagaaagagtgaagtcagaccctagttgtagtcctagtcctccctaaggcacaaatttgaccacaaatttgctttccaatattttga

SEQ ID NO: 842971 - DNA, 586 bp, Homo sapiens
ttccctccaaaatattttatttttcctagcattaagctgtggacacttagaatgcattaagctaaaaaaaaaatggggtaaggagtttatcactaaaaygtactttttttcttttttttttagttacaagagggaaagatctatacactttataggtttcttgagtagtataataataatagtaataaaagaagctcatgaagctttgtacaattaagcagatcattccctttccttttaccttcttacgccattatgctttcaggttcctttaaacaaatgctaacatcaaagaaaggctcatttttctataagccatacctaacccagttctcttcctttgactattgacaaatctttctactttttgataataaatctgcctgttttaattaaatatccttagagtatatggaaatgaaattcctatgatttataacattttaataatacttccaaaagaaaatggcatcaggaaatacacaaagacaatacaattacagcccttggattatacgaatctaaattccttcattttgtaaaggtgacagagagactttcttagtaacaagcaatggcatacaga

SEQ ID NO: 842972 - DNA, 445 bp, Homo sapiens
gttagcctctagagcaaagcatagggtggtgcagggcagataatgaatctggaagggacacgtggagaaaaatcagtacagggaagagaatgagaaaagaatgagaagtgtatcaaagaacatttcttacactgttatgatatagtgggtagaaagaagcccaaacctcataaggagcctatgcctacaaggagttttcttcattgtcttttcctattctatccttgcctttgtgtggtaactacatttcagttttagttaatgtaactcttttaaagaagccctcgtagtcatgaagcattttcaaggctcttcattattctcagatgaaaagaaaaaaatgtagaygaatcccttgaaaaacattaaatcagtgatgttatctgtattcaatctctaagaaagttttcaaggattgaaagtttttaagactactttcataaag

SEQ ID NO: 842973 - DNA, 647 bp, Homo sapiens
ctcttcccccagttacttaagtgaaccatgaaaaacactcgatctcgttaagatttctctttgttacattagtgtgyataaaattatgacattttgtggcacaaatctatctgcaaatccacaacaaaatggggaaaagccttacttccttctttttctggatctaggcaacttgaatcaatgttttttgcttataagtaacagaaattcaaggtatcccagggaaaaaaagagaaaattattaagaaaaatcaaggacatctcacaaacatcaaaggcagctttgagattcagcttctcaaggaggactggaatctcttcaaatcctctactttgtacatcttcatgtacaaggtgcagaggcacttagatgacatggtagaagacagtttgccacaattcttaatttgcacaatttatcccaaatggcagctagaatcccttaaacctgattttaaatttccggaaagcaggacagtttggcataggttgagccaagccctggttcaatctcctattagaagataatagcatcatataaacataggcatataatataaacaagtattttaggggccaccccccaaaaaacctgatgacagatgtgggggagagtgaagtgtgttcttggagaaagggatccccaa

SEQ ID NO: 842974 - DNA, 636 bp, Homo sapiens
acaataactgaaactggacttacgatattgacaatcatttattagtcacaaatacttacagtccagaggaacagaacgtcacatgccacgcaaggtcattcatgaatagagtgaacagcctagggctatggaaagcagactttgtagtatttttttttctgccttccaagtagctggaattaaggcgcctgccaccaagtccagctaatttttgtattttttagtagagacgggatttcaccacgttggccaggctggtctcaaactcctgacctcagatgatccgcccgcctcggcctcccaaaatgctgggattacaggcgtgagccaccgcgccgggttgcaggctttatagtatcaaaagggtgaggtaccctgcgttcttgctgggaagacagaaatggcttgcttgaataataattccatgggctggggctgtggtttgaatgccacccgccccgcacaaaaaaaatttcatgccaaaatttaattgcctatgtaacagtattgggaggtgaggccttragaagttattaggtcatagggctcctccattataaataaattaatgccattatttacggagcaggttagttattgtgggaatgagttcctgataaaataatgaaattcagc

SEQ ID NO: 842975 - DNA, 666 bp, Homo sapiens
tagaacaagagtaaatcatgaagttcatttatatgtgttcatttttatctgttgtttatagtaactattgatgtctttagctatagtatatagatatgcacaatgaacatgaaatcttaccatactgttttaagaggctctagcctttgattttatgaaacagatataactaacagactacatgaaggtcttaactgtatccctaataatggacctagagtagctgacctcacactctccagattttcttaatctcattaagcttctttttcacatatttctttgccaattcttctaacttatctctaaatgtttttgttcctgttttttcagtccttgatcttctttttataaacttgttccttaggtgatcttattcagtcatatggatttaaatataaccggcatgtctttattttccaattatttctccatcctcagactcttttgagttttagatctatatatttaattactactataaatctctttggatgtctaaaacacttaacaaaattagtatttgtaaaactgaacttctaatcccttcaccaaaagaaaaggtttgttttctccattgcyacaatgatgttgtctttagctcttttcacaagccagggtctttctttcatgcctttctttcacatgtctagaatcctttgccag

SEQ ID NO: 842976 - DNA, 580 bp, Homo sapiens
cacacgtacaacattatactcacaagcaacaactagttagaagatatgatggaagattccatttatgatggcaataaatatctaaaaataaaattaagtaaatgtgaaaatttatatttaggagactaaagtgtactggaatgaataaaagtataagtctgcttcttggataaaaagactcaacatcataaagataaatattatccctaagctaatcactagccatacatttttctaattagcaaggtgattctaaagattacgaacaataataaagtaagaacaatgtagcagatagcactaccagatattaaaacagattttaaaggttaaatgatttaaagtatgttgttagtgcatgagtagagagaatcatgaaagaaacagactaagatgagaaatatgcaaaatacaaatgggaatttgtaacatgattaaagtgccattctaaatcagtagaaaaaataattatcattcactctatgagaagatcaaggawttaaatttcaaaaataaaaccaaaaagtaattttaaacaatcagtaaattttctgtttaaaacaaggaaagacctttttag

SEQ ID NO: 842977 - DNA, 589 bp, Homo sapiens
gctaagaagagtcaccagcttctaaaggctacctgcctggagtccctgaattctgactcacttcttctatcttaaaagccacaaagatgggtcaagttcctctcatgyttcaaatctcttctgcctctgtgtccatattgtgtcactctgactgacctcttccagtcaactcaagttgcaaaagttcctcttccacttttaagaacctgtgtgattacgttaggcccacctaggtaatcttcctatttgacgatccatgaccataatttcatctgcacaattccttgtaccatgcaatataacatgcatacaacatagccctagaggttgaaaattatagggttaaacttctccctaccatattgatatatattcaaaactatttacagcaccactgttggcaatagcaaaaataaatgaaaacaatctaaaaatcctccaaaaaggacagattaaggatattatgggaactcgtacaatggaacattattcaattgtgagtaaaaattgaggaagagccctattttcaaatacaaaaagctcttaaggactcgttaagtgaaaaaagcaatgagcagaactatgcata

SEQ ID NO: 842978 - DNA, 621 bp, Homo sapiens
gcattgcttgagagggaaatgttggctaggaaagttagtgtataataggagatagaatgcttctttgggggccaaagctttagcaaattatgaacccaaragatagcagatttggaaaatggtaatggaacctgcaattggttataataatcaatgaaaagaacccacaaactttgtatatggtccttttcagtcactgatgctattttctaattttagaaatcaacgatatttttctttggtacttgccatcgtctttcctgtgcatcctgtgtctactccctcccctcctgcaggcctcatttcccagagcccccttgcaatacatacttgcttgttaagaaaggtcttacaaaatgcttctgcttttacccttcctttctggtaataaaaatatatctacttgtatccaaatctctgagaatttagttggttgaattccacaggtgtgtgccatatgagctccagttgatttggttgtgaagtctgggttgagagttctgtatccacagtgcattaatcttgagatacataagcatctgcagtcaatttaagtagcttttagttttggctttggagacaggcaatttctcatatatttcatggagaagaagagaagtt

SEQ ID NO: 842979 - DNA, 621 bp, Homo sapiens
gcattgcttgagagggaaatgttggctaggaaagttagtgtataataggagatagaatgcttctttgggggccaaagctttagcaaattatgaacccaaaagatagcagatttggaaaatggtaatggaasctgcaattggttataataatcaatgaaaagaacccacaaactttgtatatggtccttttcagtcactgatgctattttctaattttagaaatcaacgatatttttctttggtacttgccatcgtctttcctgtgcatcctgtgtctactccctcccctcctgcaggcctcatttcccagagcccccttgcaatacatacttgcttgttaagaaaggtcttacaaaatgcttctgcttttacccttcctttctggtaataaaaatatatctacttgtatccaaatctctgagaatttagttggttgaattccacaggtgtgtgccatatgagctccagttgatttggttgtgaagtctgggttgagagttctgtatccacagtgcattaatcttgagatacataagcatctgcagtcaatttaagtagcttttagttttggctttggagacaggcaatttctcatatatttcatggagaagaagagaagtt

SEQ ID NO: 842980 - DNA, 629 bp, Homo sapiens
aaaaacaataactaggtagtacaggaatctatacttttagttcctgttgcttttgcccttctattaatttatttatttgaaaaaaaaactgagaggaaaaatttgcccttgcttcaaatccccaggtaaatcttgtttgttcaacaactgttgctgttactggaatagtgattattctcattgctttaagaaagatcccttagatcaaagcttggcttggtgacagcatgttttctactaatcaaatgaggtcaaagggtagacagtatttacaatgatttcatggattaggactgtgacagaatgaaatctgataaggttaggaaaaacagagtggatagagcaaatgtggtgcatctgagaaacctgaaaattatccattaaatagtcttatttagacactcacttcagcctggttggctgctaggcatattgctgtggaagtcaaaataaccagctcctctcctgaggatggcaaagaatgtcacaacttttaataaaataagagatagaatgtcaagcgatcatgaacagaaaacaagataatctaaaaaaartcatatgtactggttaggaaaatacaataattattagaaatgggcttgtgccttttttttatgctataataa

SEQ ID NO: 842981 - DNA, 641 bp, Homo sapiens
aatgtcacaacttttaataaaataagagatagaatgtcaagcgatcatgaacagaaaacaagataatctaaaaaaaatcatatgtactggttaggaaaatacaataattattagaaatgggcttgtgccttttttttatgctataataatgctgtctaattaacatccacaagaccataatgcttgtcatcctaagtgtcgggttccagcccaagctggggaccgagggcagtgggtggacaagtggcagggagctggaaaaacacttgaggaatcacagacggttttgacacggttcttactctatctcagcacaagcgagcctgggcatgagccatgggtgcaagccacaagcctgggcacaagcctgggcatgggcctgggcatgagctgcaagccatatgtaaagcattagcagggtaattataccttttacagacaatagtggctttgagacaagcacaagctcatgtgagtgatcacctaatgtgcctcacacagtgttggttacataatgtgtgaagttgtgcacttacactccaaacctactgaktcatgctgcgctgggaggcttcctcaacctactgcaaaataacatgcagccatttcccttacactccaccccataggctgaaagcatc

SEQ ID NO: 842982 - DNA, 596 bp, Homo sapiens
attaaatgaaaaatcttctgcacagcagaagaaatactcaccagagtaaacagataacccacagaatacgagaaaatatttgcaatctatgcatctgacaaagaactagtatccagaatctgtaagraactcaaacaccaagaaaaaaatcaaataattcctttgaaaagtgagcataggaaatgaatagacatttcttgaaagaagatacacaaattaccaacaaacatatgaaaaaaaagctcaacatcactaatcattagggaaatgcaaattaaaactacagtgagataccaccttattcctgcaagtaaggcgattattaaacagtcaaaaagcaatggatgttgccatggatgtgggaaaaagcgaatacttacaaactgctggtgggagtgtaaattagtacaacctttatggaaaacagcatggagattccttaaagagctataagtagatctaccattcaatccagcaatcccactactgagtatctactcaaaggaaaagaagtcattatatgaaaaagacatttgcaaatgcagcacaattcacaattacaaagatgtggaaccaagttaagtgcccattgacta

SEQ ID NO: 842983 - DNA, 620 bp, Homo sapiens
attaaatgaaaaatcttctgcacagcagaagaaatactcaccagagtaaacagataacccacagaatacgagaaaatatttgcaatctatgcatctgacaaagaactagtatccagaatctgtaaggaactcaaacaccaagaaaaaaatcaaataattcctttgaaaagtgagcataggaaatgaatagacatttcttgaaagaagatacacaaattaccaacaaacatatgaaaaaaaagctcaacatcactaatcattagggaaatgcaaattaaaactacagtgagataccaccttattcctgcaagtaaggcgattattaaacagtcaaaaagcaatggatgttgccatggatgtgggaaaaagcgaatacttacaaactgctggtgggagtgtaaattagtacaacctttatggaaaacagcatggagattccttaaagagctataagtagatctaccattcaatccagcaatcccactactgagtatctactcaaaggaaaagaagtcattatatgaaaaagacatttgcaaatgcagcacaattcacaattacaaagatgtggaaccaagttaagtgcccattgactaaygagtggataaaaaaatgtgtta

SEQ ID NO: 842984 - DNA, 639 bp, Homo sapiens
cttaaaaagctagaaaagccatagctgaccaaacccaacattagtagtagaaaagaaacagtaaagatcagaacataaataaatgaaattaaaatgaagaaatgaagaaaacaatacaaaagattaataaaatgaatcaaagttggttttctgaaaagttaaacaaaattgacaaacctttagccagactaagataaagagagaagacccaaataaaattagagatgaaaaaggagacattacaaccaatagtacagaaatttaaaggattattagaggctgctttgagcactatatacccataaattggaatatctagaaggaatggataaatttttagacacatacagtctaccaacattgaaccgtgaagaaatttacaatctgaacagaccaataataagtgatgagatcaaaatgataataaaacatctcccaggaaagacaagcctgagatataatgacttcattgctgaattttacctaacatttaaagaataccaatmctactcaaactatttagaataacagaagaagagggaatattttcaaactcattttatgagcccagaattactttgataccaaaaccagacagacccatttaaaaaaaaaaacaaaactacaggccaatatccc

SEQ ID NO: 842985 - DNA, 611 bp, Homo sapiens
taactcaacacgagtttatttattggctcacatgaagtccatagtggtcaggcagccccctcctagcttgtaccactatcatctggaatagtggtctataaggttgccggagtagargaagaaagagatagaggaggtatagttcctcttcttctctttttgagagtgcctatttattttattctataattatataaaatatctacacaatttcaaaatctaatctacaaagcaaggtatattcaaataagtctagcttatatccctgtgttctccaacctgttccctcttttccactaaagttagcaatttaaaatttatatttatttttccttgtaatacataagtaataatatacctagatttatctccctccttactcaaaactatacacattttccctaccttgcttttttttatggtaaaatatgcataacatgatgtttactatgttaactttttttttttttttttgagacagtgtctctctctctctctctgtcacccaggctgaagtgcagtggcgtgatcatggctcactgcaacattcacctccctggttcaagcaattctcctgcctcagcttcccgagtagctgggactacaggcac

SEQ ID NO: 842986 - DNA, 617 bp, Homo sapiens
tatgtatttattttttagagatgaggtctcactgtgtggcgcaggctgctctgcccgccttagcctcctaaagtgctgggattacagtcgtgagccaccgcacccagcctgtgctgtgttttccagcacagcccyagtttcaaacattcaggctcactgcgggcccatgatcctaggttttagttcagaaagctttgctagggaacttctgggtgttcgcctcatcccagctgggaggagaagctgaaaaggtttgggtgggtggggataaaggctgggggtggcagaatcttgggttctagccctgccctctcttcccagtggccgatcctacctgctccgattgcgaggagttgagctgccccaggaattggctgggcttcacactcctcacctctggctactttggaactcatcccccgaaacctccaggtaccagacaagaaagttccccagaagtaaggggagaaagtcattcccttacaggatctctgtcctgtaggcccgtatgcctttgctatggcatctcctcctaggaggagaggatgctgggaacagggtgggtggaggaaagtcccctgaggaggctgtggtggggttgaggtaggggagcaact

SEQ ID NO: 842987 - DNA, 616 bp, Homo sapiens
cacaaaaaagtgttcatgttcttcaggctgccccacaagttttcttatctaccagtatgtctttcataagcctaatatctcccccaaaakacatctgaaggctacacccactctcctgccctcaccagagggatgtagatgacactgcatgaaggaatacgggagtccagattctccagctccttgcgggcaacctcagtaaggaaactgggaagtcccatcagtcttcgcttttctacgagggtggaagacacgtggttatcaaaagtgagtctcctgccctggttgctatgaagatccccagctgtggtgaccacctgccaaggatggtactccatcactgcgcagggctcacaggcccatccacacccaacactcactctcatcaatttcaggatctatgttggggaggactgtgaagcgattttcagcaaggctgccctcaaagtccacctgaggagataagtactgtttcttaggacctggcaccctctgtcctgttcctcagctctccttgggccccaattctccctgcagtcctcctttaactctcaccctccagatacttccctgaagttctgctgcctcctcccaccatcccattctttatccaatt

SEQ ID NO: 842988 - DNA, 580 bp, Homo sapiens
tgcatcattaggttgtttatttgaaatctttctacttttttgatatatttataattattaattgcttcttctgaatcccataggcttttgtatgtcacctttctatttgcatttgtttttaagrcattttaaaattttattcctaaattccgtatagactcgttggttgttcagagcatgttgtttaattgccatgtatttgtaccattcacaaagttcttctggttattgatttctagttttatttcattgtggtcggagaatatacttatattatttccatgatttaaaattttttgagacttgttttgtagcctaacatatggtccatcctagagaatattccatgtgatgagaaataaatgtattctgtagctgttggatgaggtgttctgtgaatgtctgttaggtccatttggtctagagtatagtttaactgatgtttctttgttgattttctatctaaatgatctgtccaatgctgaaagtggagcagtgaagttcccaactgttattatatggttttctatctttctctgtagctctaataatatttgctttatataatctgggtgctcca

SEQ ID NO: 842989 - DNA, 601 bp, Homo sapiens
atcctctcgctgaccttcaatttcttatccactggtgaagcagattggaccaagccacgttgaggctcctcccagtgtacaggatgatgattctccaaataaggttttctcaacatgagctagtcggttggcgaccaagcttgagcccctgaaatcttgccttcctgctgaactggaacaagatttccctctaccctgggaaaaaacaagccagaaaatgcccttcctggcctaagggtaggagggagacatctaccattctaatgaggagctgtgtctgtatttacaggtgaggccattccacatacattccagccagaacaattcagggtacctaggagaggtatctgtgtagcaggagatgtggacctgcctggctgaatgtcagctctctaggcttccttccctgctccctgctcaggccaaacacttcctaggtcaacaccaaccccttagtcgtacctcgatggctgccattcgcccaggccaaacacttcctaggtcaacaccatctccttagttgtacctcgatggtctgccattcscccaggacaaacacttcctaggtcaacaccatcctcttagtcgtacctcgatgggc

SEQ ID NO: 842990 - DNA, 579 bp, Homo sapiens
cattatatatttttgtttttttgttcctcaaytccttcattattgccttctattgtgttaaatattttctagtgccccattttgattctctttttttcttttgattcccttcttttcttttcttttagttattttcttagtggttgtcttggatattgaacaatttggctgggcatggtgactcaagccctaccactttgggaggctgaggtaggaggattgcttgaggtcagaagtttgagaccagcctgggtaataaagaaagaccccgtatctagccacccccccaccaaattagccagatgtggtgatgtgcacctgtagtcccagctactcagaggctgaggtgggatgatcacttgagtccaggagttcatggctgcagtgagccataatcgcaacactgcactccagcccaagcaacagagcaagacctggtctcaaaaactgcaactacaacaaaaaatttaaataataatatttaacaatctaattctaattaataccaacttagtttcaatagcatgcaaaatctttgaacctctatagcttcatcccctacctttcatgtttttattg

SEQ ID NO: 842991 - DNA, 533 bp, Homo sapiens
ccagctttaggtggcttagaacagagagaaagactctgtatctttgagagaaaataatggtagagaacaagagtctctggctaktaatctagaaaattctcctggatcttgttgaaggctgtcaaggtggtacttctctgagtctggaagaattacagcattattgggtacaaggtacccataaagcagatatggcttagatcacaacacccaagtcttttaaaatatgtgaaaagtcttcccaagaaagacagctacaaataagcccagacagtgaagactacaataaatactcaccttttctcttttttaattttattttttaaacctctcatatggtgctgcatgcccaagaatttaatgtccagacactgaataacatctactagcatcaacaccatccaggaaaacatgacctcaccaagtgaactaaataaggcaccggggacaaatcctggagaaaaagagatatgtgacctttcagacagagaattcaacatagctgtattaaaaaaaaactgaaagaaatttaa

SEQ ID NO: 842992 - DNA, 570 bp, Homo sapiens
tggtcagtggagcactggatggaggagcagtggagatcggagtcttcatttccctttcccatgttgaagctcaagtgaaaggtgcgctctctctcacgtccaaaggcagagtgtgggttagtctgctagacctgccttttatacgtccctcggctgggcgtggcttactcttattggctgaagagttttctcattcctgccgcttcttagagcctcaatcagaagtttcttgctgtagttctactggggacctagacacagttaaagggagacattttcaggatcctgtcatggtgtccagaaaacaaagaaccgggagcacagggaccggaaaatcggggaagcatttcttcctatttctgtcccagttcctacctggaaggatttatgatcctgttcacctttcaagatgcacaattaaacatgcctatattgtcatatgttatatattttgcacagaaagagaatttattatacatagtgttaacattgtatgcatagatattataatttyttaaatgcttggaaacaacaaatgtcaaattatggttgattgtattaggtccacac

SEQ ID NO: 842993 - DNA, 667 bp, Homo sapiens
  misc_feature 53: n = A,T,C or G
atggtgtggctctgtgtccccacccaaatctcatcttgtagctcccataattncccttgtgttgtaggagggacttggtggaagacaattgaatcakggggggtgggtctttctcatgctgttctcctgatagtgaataagtctcacaagatctgatggttttaaaaacaggagtttccctgcacaagctctctctttttgcctgctgccatccacataagatgtgacttgctcctccttgcctttcaccttctgccatgattgtgaggcctccccagccacgtggaactgcaagtcaaataaacgtctttgtttgtgaattgcccagtctcaggtatgtctttatcagcagcagtaaaaaggactaatacactcaggaaaaaaaaatggcatctatactgaatatgtacagacattttattgtcattattccctaaacaatacaactatttatatagcatttacactgcattaggtattataagtagtctagagataatttaaagtagtctgtaggttacatgcaaatattatgccattttattccagggacttgagcatccacaaattttggtatctggaagcaatccttcacagataccaagggacgacagtacttggtgatttagatcaggctgcacattcttttctctctccattggtttgg

SEQ ID NO: 842994 - DNA, 626 bp, Homo sapiens
caccagataagcagagctggtttctgcattgctaactgggagcttcctaactaaaagagcctcacaaacagttaattctgctctagatgctgtaaaagagggggacgggggtaggggcagggagagagasagattacagtgataaaatgaaaatgctgtttcagccaggaagttttttctcccccatctcatatattaaaatgggcctgattttctaacttcagcataaaagcccagtaagaaatattagctcttcagttaatgtcattcacacaaggaatttatcagcagagtttgtgtttgaacttttcatgtcatctcacgcatctcagagggtattaaactccataaaacacaatcccaaaagtgaaatatttcccacttttactctataagtgagtcttagggaacggaaaaaaaaattccatgtctggcttattcctaaagagagagtaaatagagatatttcttgggccaaataatgagaagaatcacaacccttagggtttatgttccaaaggcctccaaatcccaacaggtccagcaaagcagaacagagaaaggggctgaatatacatgaagagaataacagaagcaagtggttaatggtttccttaaatgcggca

SEQ ID NO: 842995 - DNA, 276 bp, Homo sapiens
gctcagaaaggcttatttcttgagctagcaagtatctgccctaaaaccaggttcattaataaaatgtctatctttcaaaaaaaaawacttgaatcttctgttttccctgatgtttgtgtctttcttcatccttggatacctattcttataacacagcccatgctcatctgaaataagtgacttcaagtcagctccattatcctgcatcctgcctgcaaaaatgatctagatatggggagtagtgcttccccttgttctatacactatatcaatata

SEQ ID NO: 842996 - DNA, 276 bp, Homo sapiens
gctcagaaaggcttatttcttgagctagcaagtatctgccctaaaaccaggttcattaataaaatgtctatctttcaaaaaaaaatacttgaatcttctgttttccctgatgtttgtgtctttcttcatccttrgatacctattcttataacacagcccatgctcatctgaaataagtgacttcaagtcagctccattatcctgcatcctgcctgcaaaaatgatctagatatggggagtagtgcttccccttgttctatacactatatcaatata

SEQ ID NO: 842997 - DNA, 629 bp, Homo sapiens
tgtgaaacactgtgacagtccatttgctccttcaaatctcttcctccccttctttctctgttctgtgctgcagaaggctgatctatgtggactacactgacaggccccttggtgttctggcttcycctgcaagttggccagtgagggcttcataaggataccaaatgagaggaaaaacaagaacttggtctgatctagcagaaagatcagaccaaggccccaatcacagagatctcctgtttctcccaaagtactctgttttcccaaacatctctcctactgtgttgcagtaccactccctcaccttatccctttgggcttgagtctttaaaactccactgcttaccatccccaggttcctgtactaaccttgtggttcctctaaaccccaccagtgcctctctatatcgtccctttataaagaagttctctggagcgcagcctcagttgagtgtaccctctcttccagttggaagtctgatataaacaatgtgtttgaagttagggaatacagtaacaaacaaacaagtcatgatctctcatggaattctaactactaccactgtcataacaaacagctaccgtttattggacacatatcccatacaagctctatagaagttgtatac

SEQ ID NO: 842998 - DNA, 588 bp, Homo sapiens
gtccttaattttcccggcatgagatgacaaatctcggatattatcccagccaatgacactgcttcactgcmatttgcaacaagaaaaatatttacgacaaggaaaaaagatgaaccaactggaaattaatgacttttttagattcagcagagaactgaggtccaaagcaaactagtatccccaaatttggagaaacatgtaaacacaaagaatcataagatcagattacctaaagcaaaaacagaaggacctaggaactgatacgaacacgtgtatgataattttgacaaattgctggaggctcagtgcagactagcttgagagttaaaaactcttgcagcctagtcttaggggagactatacttttctgagttttatgtccaagaaccctatcatgttctcatggggaagtctggagaaaaatctcagggaagagaaaaagtaaccattttggaagtttcccagattgttctctgtaagaaagacacgtcctttcagggaagctattttaccagagttctatctgacttgggagaagggcaattagtcccctccagactcttttagccttcctgtctaatgtcaggg

SEQ ID NO: 842999 - DNA, 647 bp, Homo sapiens
aacttttattgagttcctatcagtctccacaccaaagcctctcaacaaatttatttcgtaaaaaacaaacaaaaacgagcaaacctccctgtggaggagtaccgattttatcccccttccgctatcttccagaagacagcactgaggttcacagaggagaatccattcttcctggttccagagtccgtactctaaagacccactacccactatccctcttgtgaaaactgtcccaacctgatcctgatgcaaaatgatggcaaataaaaggcagtagatagatttttacagtaaaagagaaacagaagataattaacttgagttgtgaaaagaattcaagaagggagatgcttcctttcaagacatataatctgctcctgtatgtctttcacttgttcttcaaggaatcttcgaaatgttcccctcacaaagtttctccttatgctcatatccctcctaagccatccatgagggtacccatgaaggcccagttcaccggagctgcctgacgtactgattatccctctctaaagcatcctcttttggacaacaaatkatatgtccacccaaaccataatctccatgagggcagggatgtgccttattctcctttttatctctcaccaggatttttattttattttatt

SEQ ID NO: 843000 - DNA, 573 bp, Homo sapiens
taatttttctagttatatttttggttctatataatttttttctattactttttagctatttattgctggtctatagggaaactaatgcttgtataaattaactttttatactggtcaccatattrttcatttttttttagttgattctcttgtgttttcagtaatacaatggtatcatctgcaataaatgatccttttaccttcttcccaatttttgacaagttttagtattgcgatgtgcttgctttacaaatgaattgggaagtttttcattttttccccatggtcaatatcagttgaaagaatgtaaaatctgtttatgtgaagtttcaaagaattcaaccatgaaactatttagcctcaagaatttttccagaggtgatttttgtttgtttgtttttacaaatatttctttttcaccatagatactggtttacttaagactttttcttttgtcaaaattggtaattcatgatttctgagaaaatttctattccatccctgtttctactcctgtctctctctaatctattctctagccagtaagctgtcacaacatttaaaatatcaggt

SEQ ID NO: 843001 - DNA, 598 bp, Homo sapiens
ggatggaggagatggagagagatatgatagtatgtgatgaaaattgaggaaaacagtgataatatccagcttgggcaacatggcgacgccccatctccacaaaaaatacagaaattagctgggtatggtggtgcgtgcctgaaatcccagctactctggaggccaaggtgggaggatcagttgagccccagaagcgaaggctgtagtgagccgagatcacaccactgcacattccagcctgggcaacagaacgagaccctgtccaaaacaaaacaaaacaaaacaacaacaacaacaacaaaaatgatgatatgaggcagagaatgtgctggtgactgaattattctgatagcaatgagtaatattaaattgtgtttgggttcagaggatcattttcaactggccacctgatggcagagaaatcaacagttcttgaattttagctgacacaagaaagaagtagtcccaattggagtattaaaagaaaggaaggcttatctctctaaagcacagggaagctttaactttataattaaatatatttcattcttggattcaggaaaacatgaartaagttttataatgagaatttttctag

SEQ ID NO: 843002 - DNA, 676 bp, Homo sapiens
gtgggagaatgcatgaacctgggaggcgcagcttgcagtkagcggagatcaagccactgcactccagcccaggcgatagagcgagactccgtctcaaaaaaaaaaaaaaaaaaaaaaaaaaaaatatatatatatatatatatatagtaagatgctctgaaagtaatgcctgtaaaggtgacaggaaaataaacccagtgtttaaagggatctgattaattttaatgtggcataacactatttgtgaggatacaatgagaagagcaatttgcaaaccagaaggccctcaccagaacccagccatggtggcattctgatctcagacttccagcctctagaactgtgagaaacacatttctgttgtttataagccatgtattctatggtgttttgttttagtagcagaagctacttcctactaagtaggaatcagcttcatgtagatccctcccattatacatcaggataggtctgtatcaccaacagcatatgacagaagcgatggtgtataatttttgacactttcttgtaaagactatggctttcatcttgaaagccctctctcccactcccttcctccctcctcctttcctcccccaatcctctctgtctcctctctccaactctccaaccccatgtagagctcaaaagacaagaaacgggaacttccttttaa

SEQ ID NO: 843003 - DNA, 493 bp, Homo sapiens
acacctgggaaattcatcgcaaaaagatatcgcctaggcacattgtcatcaggttatctacagttaagacgaaaaaaagaatcttaagagctgtgacaaaagcaccaggtaaactgtaaaggaaaacctatcagattaacagaagatttctcagcagaaaccctacaggctagaagggattggggccctatcttcagccacctcaagcaaaacaattgttagccaagaattttgtatccactgaaactaagcttcatatatgaatgaaagatagttttcttcagaaaaacaaatgctgaaagaattcaccattaccaagccaccactacaagaactgctaacaggagctctaaatattgaaacaaatcctggaaacacatcaaaacagaacctctttaaagcatgaatttcacaggacctatraaacaaaaatacaattaaaaaaaaaactaaaacaaagaacaaaaagccaaggtatacaggcaacaaatag

SEQ ID NO: 843004 - DNA, 645 bp, Homo sapiens
aatgaaacaccaaactagaaatttattgccattcctcaaactgacatcattcaatgatcaaaataaaakgcatccataatatcctagaaaatttacatgtcccattcttaaaaagaaaggcaaactatttttaacgtttaacgtgacatgcatttgtttttaaatgtctcagttttatataaccatatactcaaggtctttatcattcaaggtacaggaaggttgtgtgtttaatctttagcatggttgtaggagatatgattcacagagtagaaaatagataaaaataagcatgcagccagtatggtgccaaatcatcagaactcgacatcttattgacaaatggaagtcattcttctttatttcttgagcaaagcagtttcataaaagataaatagctttcagtcagaatagcctaacctgcaatatgcatctttttgacatgtatattctaatactactctagaccataagattaaaataagaaaaatctcagagtagtgtgttgacaagaagcactggttgaatctgtattttttttttccatttttcatctcccagaatttggctctgtgtatgtttgtaccttactggctgtcattaagtaatcaacttctagtgaccttcaagcatcattttctaaag

SEQ ID NO: 843005 - DNA, 507 bp, Homo sapiens
acaaaagccaaaataaacccactaaactgtaggccagattctgtcacttctcaaacatctttcaacactagctaaaattattttaatggcctagaacgccttcagtgatccagctctttgcggcggctcttcccgctatgcactctgccccactgcttctcaaacacaccagagacagtcccatttcaaggcctttgcacttgctcttccctctgcccagagtacagtttccttcaccaatcccaagaccagctccttcactttcttccagtcctttttccaatgtcccattctcaccaaggcttctctagttcttcatatttcaaatccttcttttctgttaatttttttttcttcttggcacctatcattatctagcatactgtatatattacttatttatcctatttattgtctgtcatctccagyaaatatggtatcttttgttcaccttggtatcgccagtgtattgtccataataagcatttaatagacatttgttgcgtt

SEQ ID NO: 843006 - DNA, 629 bp, Homo sapiens
cctcaatcttttgctcttaattttgtgwttttgcttgcctcaatatcaaatccaaattgtgattatcatcttcacatttctacaatattgttcttttctatatttctaaatgtcatttaaagttttgcaaatataaaaatgcttacactaaaaaagttagaaaacacaagcaccctctcccatccttctttattcctagacttcctatttcaactctttttctgatccttccaatatttaaaaaaaaaatgtttctagttggttagatttatttttctagataatatattttcttgatttatgcattaggcattatctatttattcctttttttatccttgaggattttgtactcttcttacttcccaactaccttataattattttgttaaatcattagtcactattaacattatcatggtataaataatattattcatggctgagttaaatattgtttaatgctttatgttcctcttttgcccatttttggaattaataactgtctttctttttatatgattggttctctatatattgttaatatttcaccaataaatactctgacaattatttcaagtgatttgtttcaaatatttaatttcaaacatcatacttgtcattgcaaa

SEQ ID NO: 843007 - DNA, 585 bp, Homo sapiens
acattacacagtaaaataaatgaattcattttggccgactgctgttttgggttatttccccattttgctgttttgggttatttccccaatttccttagatgtgtacaaaaaaattagtgctgatgatatttttaatcttaaccctcatctgcttttttgatagatttttttcccagattttttctgttaacccaagcccacacagccagcaaaactcccaagaactcttgcaaccaatttttccttttcaattgtataaagctttgaaagttattgattctgcaaatgtgaaaaattaacttatcaaaaaatagcacacataaaatgggaactggccaaagaaacacaaagaatattgttttaactggaagttctatcattaactgctacaactactgtattcctgatatggctttttgcaatatatttatcactatatgggaacgatttaatctgctccatagagagagcagtaggagctctcagtggcctcaaaatatgatggttcttaccaaaaacarcgaatctaaatttcttgcagatagtaggcctaacttttttttttctaaaaggaaataactctcc

SEQ ID NO: 843008 - DNA, 253 bp, Homo sapiens
acaccttgtcatgagttacagtggcttgcatcaatcattctgggttcacacagaaaatattttgtggtggttgactatcacatgcgagaaactaagtgccctttgcgggtgactgcgcaggtacctctgatttcttgccaaatcattcagaatgccgcaaatccattaaatctctccacagggaggaaaaarttcccgcattctagagagagaatttatgagttcatttcaatcaccacaaatgaaagccacc

SEQ ID NO: 843009 - DNA, 595 bp, Homo sapiens
cccctctaaaaggccaatttcccttgaaaccttgcatggctccaagccactctttgtagaaacaatggcctatgtccaagtrgaatcaggggaggcaaatggatgacatttccttatccattggtagtaattccactaagccactatggtggctatgagtttctgagctttaaaaattaaaggacagatttggaatgtgcagtcgtgtcattgtatcacttctctgctgtcatctgtgaccatatgtcctaaattgaatagagcttttcggttggcatcacaagagatgacttttgaaactgacatttctttcatttggagaaatgtatatgttggagacataatcctatgagcctgagagcttttcattaatctctgtctttctaccaccatagttcacgccaccatcatctttcatctatttttcccttcaaatctattttcttcactgtatgtagagtgatctttccaaaatatcaactcaagcctcatatcctcaacaaatcaacaagaaatatcaaaataagcccttggcttaaaacagttcttgcttagcttcctcattgcttttagggaagacacagcaaaacagcat

SEQ ID NO: 843010 - DNA, 579 bp, Homo sapiens
cttgcttagcttcctcattgcttttagggaagacacagcaaaacagcataacctgtaagaccatatgtggtctgactccttcctcaggcttaccttatcccacayctccgtgttttctctcccagctattatgaattctcattgtccttattatcagttagttaactcttctcttccatcacatttgaactctatcatcactacccatgaaagcattttctgactcctcgcctattattggccttcacagaaccatgtaacaatcatagctcttatcaaagctggcatttcatgtttatttatgtgattaaatatatttttgtttctaattagactataaggttcacaataatctgtttctacccaacagtttatcctccttaactggcatgatgtaaatactcaaaacaaattgttgagtaaatgaataaatcagttcttgattttaacgtatcttgtgccctggataaaaaatcctttctatgagtgagacatgggcttccactggggttgggcttgaggtgagctgcaataaagccatatttctaatccaattattcatcactatggttgtattta

SEQ ID NO: 843011 - DNA, 604 bp, Homo sapiens
ttgaaagtaacttgtaaacatgatgacgtttgtcttctaaatacacatttcagcgtgtgtgtctttaataaaagggacattgtctaacatagccacagtacaatgataaaagtaagggaattaacatggatacataatctaatataagactttattcaaattttgaaaattttaatccaacatccagtctagagtcatgtattgcatttagttgtcatttctcatcaatttcctttaatttagaacttgcttagtctttgtcttttatcaccttgacatttttcagaagtataggccaattattttgtagtctgtctcttgaatttgaatttgtctggtttcctcatgattatatttggatcatggatttttggcaggaatgccgcaaaagtaatgttctgtccttctcagtgcattttatcaggcacatttctttttgtcccattatgagtgatattaacttggataacttggtaatggtagaccattgtaaagatgctatttttccattrtacttattatgtatcttgtggagagacactttgacactctgtaaattatcagactcacccattaattttaacattgattctttactgaataa

SEQ ID NO: 843012 - DNA, 599 bp, Homo sapiens
ggttaagtaaattattttataaaaatcagttttacttgtatccttttacattttgaatacgactattataaaattttaaattatggaccaggcagagtggctcatgtctgtaatcccagcactttgggaggccaaggcgggcagatgatttaaagacatgagttcgagaccagcctggtcaacatggtgaaaccccgtctctactaaaaatataaaaattagctgggtgcagtggcacacatctgtagtcccagctacttgggaggttgaggcaggagaattgcttgaacccattatgcagtttcacaagtcctcccgtgtttcacatgatatttgtactggttctagagaatccttgagtgagctgtcgccctcatataatgttggaaagatatgccacctgtatttctggcccattttcaagttttgaatattttgttcttcacagaaatagatcattttaattttctttattttttataattttacacaatttctaaagtaaataagtgttcattttataatcygaaaaagattatttttcaagtccttctgaatattggaataaaacatctaagtcaggttaggagataaaaagc

SEQ ID NO: 843013 - DNA, 654 bp, Homo sapiens
ctatttatttttgacaaagctgaatacagataaagtatccatgatcttggcttcctctgggtccttcttcttctgctgtcctccgggtttgcagaatgccattctctgtattcctctgtccctgacaaatgtctcaagccttaatcccacagaacaggcttttcctactaccctgacccatactgaatcctttgtgtgtcttaaacttggagctcaggagaacaatttccgagttgcttttcagtaagagcattccatccatctgacattttaacttcattttcataaggaatttgggtgtatataaatgttccagttctatatgggaggctactcctctgtgacatcaacttctgttcacagctgcagagaaagaaatttcagtgttcttggcagttaatcttctaagagctaccttttggaagaagtctgtggaaaatatgcctacagacatgtgcatgagactttgcttcttgccaggtgaaaaataccctgcaaggagtatgccaaggtaaacagctctgcacagggttraaaggcctggttaacatcagcatcttgctctcataagttgttgggagcagtgggcctccatccacatccatggcagccctaattcaggcccttcagatcatcgctgtcttcctcctccag

SEQ ID NO: 843014 - DNA, 627 bp, Homo sapiens
ccttcattatatactgtcttaggctgtgaattggtgtttctgaactacttgagagactatagtacaccttagctttcctgtttttggctcaatagatatctaattggtacatggagcaattgggaaacttaaatttctagacatagaaggattcttcaaaattactaatttcttacctgacatacattttcccctgaaattacaattttaaggaaatttgtcttttaaggaacgaatttatctttcttttgcttatttttcctccaagactcaatctccatgagttccaagactcaatgagtatgcagaatttataaccacacaactacagcttgatctgccagaagaaaacattttcaatttaatcgctttctcatttctatcactgaaattctagagctctgtaatctactgtctccatcatttttgttattaatattattttggaaactgttcaaaaagaaagcgagtcactttgcctgaaaggcaattggctcctgctccagggtggcctcaagatgctacctctcaagaacactctgttcattccctgaaaacttgtgccaygagcagccaatgacaaagatgcaaagcttgtcctccagaacctcacatttctttttctgt

SEQ ID NO: 843015 - DNA, 622 bp, Homo sapiens
gcttttctaacctgttaactgttacgtgaacaacasagaaactttagttttgtttaaattataaaaatattggggtttatggaagctagagttaccctgaataattcactatactttattcataatgtgatttatccttttaaagaaactttttattcatttattcacaagcaaatttcaccaaaatttttctataaaaggccagctagtaaatattttagatattgtaagtcatatagtctccgttgtcaccactccactctgtcattgtaatatgaagcaagccatagatgacacataaaacaatggtcatggctatgtttcaataaaactttatttaccaaaagaagagggaggtaggctggatttggcccataggtatattttgctaactcctttgatagatgataggtaagtaaaactagaaccatacctttatgatattggctggggtcactcccacaactgcattcaacagagtatttgatggtgtctgaaattttaagatagtttcattcttacatctggtgctttatccactgtaactgaaacatctgggggctctctgagctcaaacttcttcacatggtgctggatcccaagagtcaaccatgggagctgc

SEQ ID NO: 843016 - DNA, 622 bp, Homo sapiens
gcttttctaacctgttaactgttacgtgaacaacagagaaactttagttttgtttaaattataaaaatattggggtttatggaagctagagttaccctgaataatkcactatactttattcataatgtgatttatccttttaaagaaactttttattcatttattcacaagcaaatttcaccaaaatttttctataaaaggccagctagtaaatattttagatattgtaagtcatatagtctccgttgtcaccactccactctgtcattgtaatatgaagcaagccatagatgacacataaaacaatggtcatggctatgtttcaataaaactttatttaccaaaagaagagggaggtaggctggatttggcccataggtatattttgctaactcctttgatagatgataggtaagtaaaactagaaccatacctttatgatattggctggggtcactcccacaactgcattcaacagagtatttgatggtgtctgaaattttaagatagtttcattcttacatctggtgctttatccactgtaactgaaacatctgggggctctctgagctcaaacttcttcacatggtgctggatcccaagagtcaaccatgggagctgc

SEQ ID NO: 843017 - DNA, 622 bp, Homo sapiens
gcttttctaacctgttaactgttacgtgaacaacagagaaactttagttttgtttaaattataaaaatattggggtttatggaagctagagttaccctgaataattcactatactttattcataatgtgatttatccttttaaagaaactttttattcatttattcacaagcaaatttcaccaaaatttttctataaaaggccagctagtaaatattttagatattgtaagtcatatagtctccgttgtcaccactccactctgtcattgtaatatgaagcaagccatagatgacacataaaacaatggtcatggctatgtttcaataaaactttatttaccaaaagaagagggaggtaggctggatttggcccataggtatattttgctaactcctttgatagatgataggtaagtaaaactagaaccatacctttatgatattggctggggtcactcccacaactgcattcaacagagtatttgatggtgtctgaaattttaakatagtttcattcttacatctggtgctttatccactgtaactgaaacatctgggggctctctgagctcaaacttcttcacatggtgctggatcccaagagtcaaccatgggagctgc

SEQ ID NO: 843018 - DNA, 517 bp, Homo sapiens
agtccattcaggctgctgtaacaaaacaccagaaaccagggggtttacaaaagcttgcatttatttctcatggttctggagacgggagagttcaagatcaaggtgccagctgtgtttggtgagggcccgcttctttactgatggtatctcttcaccctcctctcacatggcagaagagtaatgggtctctctagggcctcttttataagggcactaatcccaaacatgggggcttcacttccatggtctaatcgcttctcaaatgcttgagtcaccagaaacaccaaggcatgattagaggtctggaactttcaccctaacactcaacctataggaagaggggctgaacttgagttcagtcaccaatggtcagtgatttaatcaatcatgcctacatagtgaaaccttcataacagaccctaaacaatggtattagaagaactttctggctggtgtacacattgaggtgctgggacggagactggccyggaggaagcatggaaactctgtgctcctc

SEQ ID NO: 843019 - DNA, 565 bp, Homo sapiens
cacagactacttcaaagtgatgtgcagcaaggcacaagagttccaaaagccactgtggctggttagttccccattaagttgcttccttgsttggctttattatttcatctgctccattagtgaacagcaagcgttttgcaaaaaaggcattgcacagcctcaccaagctcctagagaagcctttctagaagctgcttcatgtatccccacaaagcaacatgggcagcaggttggtgggatgccccactctcccgaagaagcagcagacttatccaggttaactccctcctctctcctttgtccccaacatgcactgatcaggaagatgaaaccaagtgaaagccacttcctgtgtgggtcttaaaattcaataaaaataatatctcagaaaaaagccagaacacactttctgttcagatggaaaaatgcatgtttccctccccaccttcacctacaagctgagttcatgttatttcaacagcacatcatggacccagatgcaaatggacagtatctgaaatgcagtcccgagcaggagaaatgtagtttcatcagcgagtcattt

SEQ ID NO: 843020 - DNA, 622 bp, Homo sapiens; identical to SEQ ID NO: 842840

SEQ ID NO: 843021 - DNA, 542 bp, Homo sapiens
atgacctgaattgtcacttcccagaagaagacatatcacgtccaatgagcacatgtaacagcatcattagtaattagataaagacaaatttaaacaataatacaataccatytcatacacactatattggttaaaatttaaaatactgttgggatgaaaagttggagagaatatggagcaacaagaactatcatacatttctggcaagagtttaagtggtaccttttagaagttttataaagttaaacatgccatcccacttagtatttccccaagagaaatcctaacatatgttcacaaaaaggcttctacaaaaatattcataccagcctttctcctattagtcaatccctggaaacagcccaaaagtctggcaacagaataggaaaaatgtttagaaaagaaacaaagttctgaaatcagcaacaacatgtgtgaatttcagaagtattataatttaaaagaagaaatcagatacctaagaatacataccacttgcttctatttacataacaggtaaaactaatttgtgttcaaatcag

SEQ ID NO: 843022 - DNA, 648 bp, Homo sapiens
agtcagggttaattcagatcgtttcctctgctcttgcattccctgatttcaagcacsgcgaggctggggctgtaattacggaatgggtagtactcactgttcaccagttgtgtgtaagctttaaactaataactcagcaattacgagaaaaatgagcggtaattacacccattttactcgcggctagacagatgggacattttctcctcgttattggcaaactgtcaccacatttatttcatttttactgtttactatttgttgtgctttgattaagagtaattataggctaggaaaatatgaaaaacatgaatgttgggtatttttaaaaatagaaggaggcccttctccctgttttatattgatagaattctcattttagatcctattaaaatgatatcaacattctcaagatatttccaggcaggcttcagttctgtgacagcttttcagcaggggattcccatgtttgctcattatttgggtcgtcatagacccataaatatcctgcattttttttttttttacagcagcctctgtgtccctcacactcgtccattttggtccattttggtccattttgtgtctgatgataaagcacaggagaaatccacccgtcgctgggatccacaggggagtaacgccaaa

SEQ ID NO: 843023 - DNA, 403 bp, Homo sapiens
ctgtgtttctaaaaaaaatagacagttccttgaacaacaacaatgtcatgatcagttaccagtttttcttgagacagtgtctcrctctgtcacccaggctggagtgcagtggcatgatcacggctcactgcacccttgacctctctggactccagtgattctcctactttagcctcccgagtagctggtactataggcacgcaccactacgcctagctaatttttgtatttttttgtggagatggggtttcaccgtatctcctaggctggatagttaccaatattaactgtcaatatttgatagcaaaatctgtcttaaaaatgtctttttacagattggttcattcaaatcaggatctaaacagtttaaggggtttgctcatggaatttgtttttctctttc

SEQ ID NO: 843024 - DNA, 609 bp, Homo sapiens
aaaaattatcagtgaagtcctcttcaatattgggatcgtgaatcgtctctgttttcttcttatatctttctgagttttctaggttctgtaattttaattttaggacattttcatcatcccaraaagaaactctgtgctcattagttgtcacttcccattccttcacaccctccagccctaggcagccactaatctactttagatttgcctgttctggtatatatcttacttttatttaaaaaaaactttttttttcttttaagctgagagtgatggtgcacacttgtagccccagcttacttgggaggttgaggtgggaggattgagctcaggatttcaaggctgtcgtgcactgtagttgctcctatgaatagccactatttctagtctgggcaacatagcaaaaaaaaccccccgccccaaaaaattgcaattggatttcagaagatatccccctagaaactattcagttatgaataagacctaccttttagtatcaagagctaaaaatccaaatttccgatctttttttttcttcccagattttattgtacagtttttagaacagcaggtttgtactttgaactgggatgtgggcttcgtaataca

SEQ ID NO: 843025 - DNA, 563 bp, Homo sapiens
tatttttagccagtttggaagacaaayatagtaagtacagcttgcctttaatttagcccaacaatatgtaattccaatttttatttttaattttaataatggtgttttccagggggaacaaaaatgcttcatctgtgactctagatttccatatgatccgtatgaccaacccaacagccacaccattgagaatgtcattgtaagttttgaaccagacagagaaaagaaatggtggcaatctgaaaatggtatgatttaagttcctttccagttgtttatttcttcaatattttaatatgacatcctcttccttgtatggttttaataatgtcacagcaaagtattatattggaatggaacagtatcctccaagaatgtagagacccatataagaatacaatttattttcattttaacaagaatactttcctttacaggaaaatcaaaatgtattttaagcacataactcagaatgtttcactctttccatgtggaagaaaatatctctgcatccttttgttctttgtaaaaaaataagaagaagaagaaagtttatgaagtgt

SEQ ID NO: 843026 - DNA, 563 bp, Homo sapiens
tatttttagccagtttggaagacaaacatagtawgtacagcttgcctttaatttagcccaacaatatgtaattccaatttttatttttaattttaataatggtgttttccagggggaacaaaaatgcttcatctgtgactctagatttccatatgatccgtatgaccaacccaacagccacaccattgagaatgtcattgtaagttttgaaccagacagagaaaagaaatggtggcaatctgaaaatggtatgatttaagttcctttccagttgtttatttcttcaatattttaatatgacatcctcttccttgtatggttttaataatgtcacagcaaagtattatattggaatggaacagtatcctccaagaatgtagagacccatataagaatacaatttattttcattttaacaagaatactttcctttacaggaaaatcaaaatgtattttaagcacataactcagaatgtttcactctttccatgtggaagaaaatatctctgcatccttttgttctttgtaaaaaaataagaagaagaagaaagtttatgaagtgt

SEQ ID NO: 843027 - DNA, 563 bp, Homo sapiens
tatttttagccagtttggaagacaaacatagtaagtacagcttgcctttaatttagcccaacaatatgtaattccaatttttatttttaattttaataatggtgttttccagggggaacaaaaatgcttcatctgtgactctagatttccatatgatccgtatgaccaacccaacagccacaccattgagaatgtcattgtaagttttgaaccagacagagaaaagaaatggtggcaatctgaaaatggtatgatttaagttcctttccagttgtttatttcttcaatattttaatatgacatcctcttccttgtatggttttaataatgtcacagcaaagtattatattggaatggaacagtatcctccaagaatgtagagacccatataagaatacaatttattttcattttaacaagaatactttcctttacaggaaaatcaaaatgtattttaagcacataactcagaatgtttcactctttccatgtggaagaaaatatctctgcatccttttgttctttgtaaaaaaataakaagaagaagaaagtttatgaagtgt

SEQ ID NO: 843028 - DNA, 563 bp, Homo sapiens
tatttttagccagtttggaagacaaacatagtaagtacagcttgcctttaatttagcccaacaatatgtaattccaatttttatttttaattttaataatggtgttttccagggggaacaaaaatgcttcatctgtgactctagatttccatatgatccgtatgaccaacccaacagccacaccattgagaatgtcattgtaagttttgaaccagacagagaaaagaaatggtggcaatctgaaaatggtatgatttaagttcctttccagttgtttatttcttcaatattttaatatgacatcctcttccttgtatggttttaataatgtcacagcaaagtattatattggaatggaacagtatcctccaagaatgtagagacccatataagaatacaatttattttcattttaacaagaatactttcctttacaggaaaatcaaaatgtattttaagcacataactcagaatgtttcactctttccatgtggaagaaaatatctctgcatccttttgttctttgtaaaaaaataagaakaagaagaaagtttatgaagtgt

SEQ ID NO: 843029 - DNA, 630 bp, Homo sapiens
gtgagtccccgggtctgcctggatcctacccactgtctgagcaaagttcagtttgatcttactggggctgcccgcacctyatctgcttaacggcatctccaaactaccctattttggagagtggaggattgcaaaaatacctcagctttaagagctcatccttctgcaaacaagttgatccaaataatctgtgtctgtcctggtagttgggaaattatgcaggattccaccaggagaggcagacaacttgagtatcatggaagcctgctgggggaggaaccaaagtggtaaaattggctaaaacattcgactggctgtagacaattcaattttgctgttaagatgcataagctaacatgttacttaccttgcgctttttaaaaacctttaaaaatcttttatcttgaatctcaacttcttaaatgaaatatttcaagcatgtacaaaataatagggaataatataatatacacccttataccccaccatcagctttctctagaacagtcttagcctgtcactcttgggactttctttaataaaacatgacaggcactatattgatgtctcaggtacacaactgtcccatttgtctaccctccttgctagtggtaaactcatatattttgc

SEQ ID NO: 843030 - DNA, 618 bp, Homo sapiens
ttaggatccacggtggactcacagcctgtttaccatattgtgagtaatatcatctccccctctggagattatgaactgtttcacagacgggtgtacacactcggtgtacagagggtgtacacccgtctgtactgggagtaatatcatcctcttcctccctgaatattaagaacagtatcacaagggtgtttctactccctgcgatatcgcgtgtcatatcctcctctcccacgttgcaattagaaacaatatcagtgggggcgagtccaccttctgtcatattgaaagtaatatcatcttcttccctccaggatcgtgggaaaaatatccctggggggtttccactttctgccatacatgtagtcatatcaccccctctgccttggaatattattaaggaccatctcacacgggggtgaatacttactgccatattgggagtaatatcaacctctcggcctctgaatattaggaagaatatcacagcgtgggtgtacacatcgtgctctattatggggagtcatatctgcctattatggsgagtaatatcatcctctgcctttcaggatattaataaacaattcacacgctgggtcaacacaaactgcgatgcttgga

SEQ ID NO: 843031 - DNA, 618 bp, Homo sapiens
ttaggatccacggtggactcacagcctgtttaccatattgtgagtaatatcatctccccctctggagattatgaactgtttcacagacgggtgtacacactcggtgtacagagggtgtacacccgtctgtactgggagtaatatcatcctcttcctccctgaatattaagaacagtatcacaagggtgtttctactccctgcgatatcgcgtgtcatatcctcctctcccacgttgcaattagaaacaatatcagtgggggcgagtccaccttctgtcatattgaaagtaatatcatcttcttccctccaggatcgtgggaaaaatatccctggggggtttccactttctgccatacatgtagtcatatcaccccctctgccttggaatattattaaggaccatctcacacgggggtgaatacttactgccatattgggagtaatatcaacctctcggcctctgaatattaggaagaatatcacagcgtgggtgtacacatcgtgctctattatggggagtcatatctgcctattatggcgagtaatatcatcctctgcctttcaggatattaataaacaattcacasgctgggtcaacacaaactgcgatgcttgga

SEQ ID NO: 843032 - DNA, 618 bp, Homo sapiens
ttaggatccacggtggactcacagcctgtttaccatattgtgagtaatatcatctccccctctggagattatgaactgtttcacagacgggtgtacacactcggtgtacagagggtgtacacccgtctgtactgggagtaatatcatcctcttcctccctgaatattaagaacagtatcacaagggtgtttctactccctgcgatatcgcgtgtcatatcctcctctcccacgttgcaattagaaacaatatcagtgggggcgagtccaccttctgtcatattgaaagtaatatcatcttcttccctccaggatcgtgggaaaaatatccctggggggtttccactttctgccatacatgtagtcatatcaccccctctgccttggaatattattaaggaccatctcacacgggggtgaatacttactgccatattgggagtaatatcaacctctcggcctctgaatattaggaagaatatcacagcgtgggtgtacacatcgtgctctattatggggagtcatatctgcctattatggcgagtaatatcatcctctgcctttcaggatattaataaacaattcacacgctgggtsaacacaaactgcgatgcttgga

SEQ ID NO: 843033 - DNA, 587 bp, Homo sapiens; identical to SEQ ID NO: 818092

SEQ ID NO: 843034 - DNA, 633 bp, Homo sapiens
agtacagtaaaaaagttagaattagctcactatttaatgtggaaagaatttaagaacctgagattacccaaacctgtgcattttgccatgaaatataaatcaaatgccaaatctctttttcctatgattttaaatgtcattagtttggcatgtagcattaataaaaacagacaaatgaacgtatttttaaggtaactgacctaaatcaggacacagtaaatccactaataaacttatactttctaaataaatgactaagtatttcatgttgataagacattaaaaaatttttggtaattgtaaaaagttatattctaagtgctcttataatacttagtaataagctaaaattacatcatgttgtggtttaatatttattaaagtaataaaagagaatatgcataacttaagacccacagaatcttaagttatcatgtaaaatatgataaataagttatcagtgaaatatcatgtaaaatattgactgctaaccttagctgggtagattattaaatggtccttgtcagttagtactcattattttgattttgttagcaaaattcaygacagagtaaaaataatttgggttctgaggccattatctttagtttggttttctctgattccctgaaa

SEQ ID NO: 843035 - DNA, 578 bp, Homo sapiens
ttaaaatggagcttctttgaaaaaaaatctaatgatgtatgaatgcaattaaattaactgtcttcaataaacatcttagtatcratcaacataattttacatagccaataccagtgatcaaagttgcttatagatatatgtaacactataatagtggttattccaaaatgtataatttcttgaacttttacaaagattttagtatggctgctaatgaaggagtcattagttcaaacaactgtgtcctttaaagatttgtttcttgtcagtacatagaagtacatcttttaaagataaaaaatgtatttattgttattttcaccaagtcttccgaaagcacctgatgcattttatttgaacaaaaaaaactttcaattttaccagaaattaagtatcttatggtcagatcttctggcatactctggatttagtgaaagcagatcagttctccctatgaacatacgaggattgtatagtaaaatttctcataagatacagaaaacctatcagagaaaaatgccactaattcaatgccctacaaattgaatttgaatgaaattttaaggacttctaaattc

SEQ ID NO: 843036 - DNA, 578 bp, Homo sapiens
ttaaaatggagcttctttgaaaaaaaatctaatgatgtatgaatgcaattaaattaactgtcttcaataaacatcttagtatcgatcaacataattttacatagccaataccagtgatcaaagttgcttatagatatatgtaacactataatagtggttattccaaaatgtataatttcttgaacttttacaaagattttagtatggctgctaatgaaggagtcattagttcaaacaactgtgtcctttaaagatttgtttcttgtcagtacatagaagtacatcttttaaagataaaaaatgtatttattgttattttcaccaagtcttccgaaagcacctgatgcattttatttgaacaaaaaaaactttcaattttaccagaaattaagtatcttatggtcagatcttctggcatactctggatttagtgaaagcagatcagttctccctatgaacatacgaggattgtatagtaaaatttctcataagatacagaaaacctatcagagaaaaatgccactaattcaatgccctacaaattgaatttgaatgmaattttaaggacttctaaattc

SEQ ID NO: 843037 - DNA, 530 bp, Homo sapiens
attattcactggctttctaaaacaagcttttagcattttaaatctaggtattcatctttgatactgcatcattatttggataacactaaattcataaagtgtcaatcttagggttataataagaagtaagtaggtgtgagctcattctgatttattcctaggtctcacgcaccacaaatggtttatgtttattacccttgaatgttcagatatacacagaagaagtaactgccatgagagatatttctgtatggttcactactgaatacccagtacccagcataaagccctgctctcagcagacactgatatatgtttattgaatgtgtgaatgaatctagcttcatcacattcgatgccatatgagaaaatcattttagggcaatacagagtttataaatgaattaaaatttgraatcaaatttccaaagattttattttttaaaaaatgtcaaattcctgtaaaatcttacccttgaaagtgcccttgaaatgcactttcccccaggtgtacatcttttatatgaaac

SEQ ID NO: 843038 - DNA, 650 bp, Homo sapiens
gtatttttaaaatctaaactaaaacatatttgagtttaaatcatatatttttcaaatagatgtcaacagaaatacatctatatggcacagaagcagagacakgtacaaggatttttcatctctgcatatagtcaatagtttttaatcatttattttactctcaggcaaagaaaatatcaactgctacctaaagagaaactaccaacagggcctaaagtcatggcttcataaccagtgtttagagaggtatatacttcccatttttcctgatatagtctgatctctttggtattttacttatgcacatgtaaaaagtccaaatcgggtgagaaaacagttatgtacataaacattaagtcagtgctacctctttgataactggaattttgctttcattttaattaaatatgaagcaaaacaatgaatatcacttttcacttcagaccatctttagttaaaaaaaagctcctgcagtcttctgtcagtggttgtaaaggcattcaacattgtcacttgtttaaacgtctgtttggctgccaatggactgtccccaaaagaacatttttgcatctcaatagtctgtccggtatcaacaatctttaaactataaatttaacgctgctgaagaaaaggggaaataacattctcat

SEQ ID NO: 843039 - DNA, 619 bp, Homo sapiens
ggcgtagtctatgttcaaattaggagaggctcttggttagaggtaaactsaagcgctgaaaactaagttttggataattacagttcaagatgtaacactctcatttatacccactctcccttatataacaggtaagcctctgaggttcagagtctgacaatggaacttctacatttattcaggtatttggcagccagcaggtcggaagcaattcaattgcttaaacctgattttactacctaacttgggggtggggaggtgttgcagggaacagtctggattcatatgtatctggttttctgttttggaatataacttaaaatatttttgaagaaatatggtaaagtgattatccttctggaactagatacaccgacactgtcacattaactcacagcttgttaaatactgtgcaatctttctataacattctttgttatgagactagaatcagcatatgggaattgctcttttcctgctaaactgaagtcattactaactactcatctgtgacatgtactctttcttgtaaccagggattttagcttcacaaaatttagaaactgccgcattgtttcttggcattgctttcaaatgtgacatcatttaaattttggaa

SEQ ID NO: 843040 - DNA, 647 bp, Homo sapiens
tctcttaaacatattactttaaaaagagttgccgtgctaaatcatatattaaagggacaacttttttgtgacaaaacatctctagttttaaatactataacttatgaaatcaactcatgttatcaactgaaaaattctcccctacagaaagcaatactagaagttgaagtgttacaaattaaaaagaaggatctaaacttccttatgttgttttttgtttatttattttaaaattaacgaagaaatcaagagataaatcctgtcacctacaagttaaaatggccacctcacatccagtcatatatcaactattttctttacctaatattaggtacactggaaatctcaaggcaaaatgaagcagttggatacaaattatatgaatcaatatagctcagtcattgcaaaatatctcttgtggaaaaatttcagaacagccctactaaaaatactaattttcatgatatggccttactaatatggacttctagaaaaggaaattaatacagagggtrtaaaaagcatgtccgtaacaagaattaatttaaaaataagcttgatgatgtaaagaaggcaaaaacttgatagggatccacgtatagctactgtcttaaagttcataatttaagaaaaacataaaggcctca

SEQ ID NO: 843041 - DNA, 635 bp, Homo sapiens
tataatcctggtggaaggggaagaaaacatgttcttcttcscatgatggcgggaaggagaagtgccaagcaaagagggaaatgccccttataaaactatcagatctcatgagaattcactcactatcatgagaacagcagcatgagggtaaccactcctatgattcaattacctcccaccaggtccctcccatgagacttggggattatgggaactgcaattttagatgagatttgagtgaggacacagccaaaccatatcaggcatgcactacacatcagtttccctgtcaaaaagcagttattattattttttctccatgttttttcatatattcagaagagtagggaagaagaaacaaaaagcaaagcatccttaattaaagcattcaagatgatagctgatctttcacttgtgttgaccaaatggcttatgcttatttcaatcactgccatctatcagtcttaattagcatctatccaataaaacacttcacttctgaaatatattaattactgttttatgtctttggttcctattatcctagctgtacaaccacaaccataaaaacatggcattttccagcacaaagggatagtatatgttatgtatgatttatgtaagtttcattaaca

SEQ ID NO: 843042 - DNA, 559 bp, Homo sapiens
tgggataataaatctttttggttagagctaagctagtaggcatgtcatggtctggggctagaaytcattttacagtggcagcgatgaggtcagaaaaggcctcagattggcagtataaaaattagttccgcaatttacagctcacagctcaccagttgtaggactttaagaaactgacttaattagccaggcatggtggcaggcacctgaaatcccagctactcgtgaggctgaggtgggagactctcttgaacctgggatgttgtagttgcagtgaactgagattgcaccaaggcactccagcctgggtgaaagagcaaagctccgtcttaaaaaaaaacaaaaacacacacacaaaaaaacaaaacacacacacatacacacacacacacacacacacacaaaatcatttaacttctctgagtctcagattccccatctgtcaattggaaactataatagctctagattatgaagagtcaccagttgaggtaagatgtgtaaaagattgtgcctaagttcccatttatttctggaacaaaaagtatattgataaata

SEQ ID NO: 843043 - DNA, 613 bp, Homo sapiens
tccgcagattctggttgttctttatcttcacccaaacttaattttgttagtttttaaaattttagttatccttatgtaggtgtggtagtattaggttggtgcaaaagtaattgcagtttttgccattactttgcattttcttgacgactaatacatttatttgttaatttacatttgtgtattctcttatgtgaattaccttttaatgtttttacttttgaaaaaaattggattatttgtttttctttttattaatttgtagtaattctttacatatttacatgttctggctaagagcattttgtaggatatatttattgcattatccttacaatttctatagaaattgcaaaaatggctctgctttttttccctcgatattatgtcttctatcttttttttcttcatcagtgttgtttggggtttaacaagttgttaatatttttaaaacatgtgtttttttgcctttgttgattttttaattgcttttctgttttctagctcactgatacctacttttattattatttccttttttctacttactttagatttaattttacttcttagtgtcttaaaaatgaaagtttaraacattaattttaaatctttt

SEQ ID NO: 843044 - DNA, 627 bp, Homo sapiens
ggttggtttatgactaagaaggtattaaatgatagaaaagagaaaataaaagaccgtaaaagtttttaaaagcctctatacaaatattctttaacctttgactatctttgagtcatagaaacagtttataaatagcttcatggacacaattcagaaggtacagactagagccttgctcctcaaaagatggttcatgtgctgttgtgctggaccagcagcagcatcagtatcacgtgggagcttgttaaagaacctactgaatcataatttgcattttaacaggatcgccaagtgattcatatgggcactgaaggttaaaaagcactggaggtaatggcttttaaatattgattacccagctggaaatacactttatgtgctttgccttgtgcacacatcctggcctctcagtggctttacttctccccgccgtgtgatcttggttccaccctgcttcagctactccctcccatagtttctctcagaactcatcattaccaatatctggaaccatttcagaatttagtttcatgcatttgactatttgactttgtatcccatccttcctgctcactttctttagtccctaattastaacaatttttttacctcatcagaattatgcca

SEQ ID NO: 843045 - DNA, 577 bp, Homo sapiens
cttgattctattgtcctccatgactcaataaaagaaagttcttttccatctcagatgtcttcatagtccacttgagattgagaagaatatcraggaggtactgtttttcactagtcttcagggaagagaagggaaggccagtagtcatcttctaccttgatttttttttttttttttttttaacacggattttcgctcttgttgcccaggctatactacaatggcgtgatcttggctcactgcaacctctgcctcctgggttcaagcgattctcctgccacaccctcccgagtagctgggattacaggcgcgcactgccacgcccaactaatttttttgtatttttagtagagacagggtttcaccatgttggtcaagctggcttcgaactcctgacctcaggtgatccactcgccttggcctcccaaagtgctgggattacaggcatgagccaccgtgcccagcctaccttgatttcttctacactcactcttagtattttgtggtaccacttgaatgatttcagtcaattttgaacccctttggaaagaggtggttttgtagctctatagaagtc

SEQ ID NO: 843046 - DNA, 512 bp, Homo sapiens
acccagtgaccaagcaacttatgctccaaacagctaaaccaacttttggccatctgacagatgtaagtaaaatgttcaagttataataaatgtcactcttcatrgtaattaaatgcaaatgtttattgttttttaatagctagtagccttcctattaagataactgtaatgttatctgctctagaaaataatgacataagacatttgtaaatgtttatgtaaataagacatttgtaaatggtgcattaaccatccacctacttatgtgctttaattttactctaaggtactatttttggtaaaagagatatttataacatccttcaaaaactttcagtctgtgtcaacaaaattactcttgtaataagccttacctcaaagaattttacatttttaaagaggaacataaacatttaaacagatatttcaaagaccaggggtcacttttttttttagttatagtaggtccattttatatgaataaaatattgtagtttgaacaaatacacctc

SEQ ID NO: 843047 - DNA, 620 bp, Homo sapiens
acagttaaacgaggcacttgaccttcagacacttaaccttcacatgcctgcttgggtcttttccaagcatatcttcctttctttcctgttctaaarcctttttaaataaacttccactcctgctctgaaactcacctgggtctcttcttctgccttatactcctcagtcgaattctttcttctgaagaggcaggaattgaggtagctgcagatctttcctctggtaattccagtatggtgaagacagtatgggtgaaaaataaatttggaagttagcacccatgtgtaagattttcaataactctaagtgctgattatatgtatttagcaaagtaaaccttttatttttgttttaacttttttgttgttatctagactgaaaacaatgctcttctcaggacacattattaagacttctaagacgcttctctatttataagaagaatacataaatgtctactatgtgagtcactaattaacgaggaaaacaaaattacagctcaattgttcaacctattttcgattttttagtttccgcatatttctgtcttttcaaccattgccagagcttcacaagagtaatttgtgtgcatatctgaattttgtaatcaacttatttt

SEQ ID NO: 843048 - DNA, 622 bp, Homo sapiens
agaaccatccagctaagcccctcgcagattccccacccacgaaaatgctgagatgacacrtaagtattgctttaagcagctcagtttgggataatttataatatatcactaacatggatttcttaaaaaaaatatctaaaaacctattttcaacttccttaacattaaaattctctgcctactctcatgctcgttcacatttttgtcttacccagtctgtctagtctgctttattattcaccccagatgagttctatatacttgcctagccagaatacttttttttcatctgcttatgccttcatctccattaattttattcatattcttcgttctgggcaaaaatacctattcctttcattttaccgtactacttaaataatgtctattcattaaatcaacatacttcttgaattcttccaggagtaacccggagcactctaaccactttgttgtctcactccatagcagttaaaaattacagtatatagttagcctttcagaccgtattttatactggtccttaaacattcctcagaggcaattctataatacttgtcggctgactgcatgcttaacttaatcaggataaggaaagagcaattctagtttccattaaaat

SEQ ID NO: 843049 - DNA, 500 bp, Homo sapiens
atagatatgtgcaaccatgactactcctagttttagaacattttcatcaccacatgaagaaatcttgtacttttaagttatcagcccctacattcccatcctttctccagccctaagcaactctaatctactttctatctctattctggactttcatatgaatgtaattatatactggactttcatattaatgtatataattaagtaatataatatgattatataatgtgtgatcttctgtaatcggctcctttcactttgcctggtttcaaggttcatccatattgtaccatgtatcagtactttcttttttatggaaaaattacattccattttatcatagtctacattttgattatccatttattcgttgatggacatttgagatgtttctacctattggctattaatactgaataatactgttataamcatatgtgtacgtgttttcatttgtacatataggtttcatttctcttgggtatgtacgaaggacgaga

SEQ ID NO: 843050 - DNA, 466 bp, Homo sapiens
tttagctgcggaaccgcgccctctttcggccaatatttgyaatatctgagccctagaccgcgctccaacctcgatctggctgtgctctctcagccaaagccataactatgaggcacaggcagctacattccctgaaggtgcgggccagaaacccccccctttcgctgtccgcagtccagccgcccagctggtcttccgggagtattccgcctgttccatgccatcgagagcggttgtactatgttcattgcgctgcgcaatatgtgcttaataaattcttgacgggtgaatgaatctggtcccttcggtgaatgacgacttctggaatcacaaagatccaggtttgaatagggaaggggacctcccctctcccagcctcagctttcctggcctgttaaatgggggtcaaaatacctgtctggcagggttgttctgaggattaaagataatgtatgaaaagtgctag

SEQ ID NO: 843051 - DNA, 535 bp, Homo sapiens
ggtgtgggatataatctcctggagtgccgtttgctaagactgttggaaaagtgcagtattagggtgggagtgacccgattttccaggtgccatctgtcgcagcttcccttggctaggaaagargattccctggtcccttgtgcttcccaggtgaggcgatgccttgtcctgcttcggctcacactcagtgggctgcacccactgtctgacaagcccctgtgagatgaacccagtacctcagatggaaatgcagaaatcacccgtcttctgtgtcactcatgctgggagctgtagactggagctgttcctattcggccatcttggaaccaccctgtctattacctttgaagtttcataatcatcctctttgctacatgtctactggaattttaaaaataaactgtcatgtcttctttgaaaatctgtaggaaatttgttgaaacataggaagccaagaaatatccagaaacatacttattcagtttgcgtgtggcatttttggaatcactgtattttaatattaatataaccattt

SEQ ID NO: 843052 - DNA, 616 bp, Homo sapiens
aataagtttttgatagcttattgtcaacaaacttttaaatatattcttgtgtggatttaaaaaataactatatctcaagaatacttattcttcaaaaaaacataaaagtataaggtaaatgattcattaagaagaaaaagggacaatggaagataaatttttgaaggttctgtttgctttggagattctgaagatatctgagaatttttaacttgggatttctttagtttctacaaggatgccttaaattatcacaagattattacttccacatgtatggctagtatttctgaaataatattttaagggtcttgaaagaggctcatttcagaaaacaatagtgatcctgagttaatgaaagtcttcaacggttggaaggtagggaatttttactcgtccctccaactctattattgatttggtatgcaaccttcaggaaattggtttatcctttcgccttcttactggtaaaaatgactgccttagaggtcttataaaaacaaaygttggcttgatagtgctaaataaaagcagaactgtgttggcagttcataccatcatgttcttatatgcagttccttataattactgccggtgacatgagaatagttcacat

SEQ ID NO: 843053 - DNA, 582 bp, Homo sapiens
tggaggtacaggtattgggtaccatttcaaatgagagaaattgaccaaaacaaacagattacagggcccatgcaagtccaaaatccagcggggcagtcaaactttaaagttccaaaatggtgtccttygacgccaggtctcacatccagattacactgatgcaagagatgggtttctatagtcttggtcagctccatccttgtggctttggagggtacagcctcctttctggctgctttcatggtctggtgttgaggcttttctagatgcacggtgcaagcttttggtggatctaccattctgcggtctggaggacagtcaccctcttctcacagctccactaggcagcaacgcactagggactctgtgtgggggctctgaccccacatttctcttctgcgttgccctggcagaggttctccgtgagggccctgctcctgcagcaatcttttgcctgggcatccaggtgtttccatacatcttctgaaatctaggtggaggttcccaaacctcaattcttgacttctgtgcaccggaaggctcaacaccacatggaagctgccaaggctaggggcttccacc

SEQ ID NO: 843054 - DNA, 432 bp, Homo sapiens
caaggaaataaatggagagaatcttttgagagaaaaaaagagcaaatgtggaaatcatttacttgaaagcaaatactgaatgcttcatckgtatgagaggagaatgaaacttaaagggaatctgacatgtgagaagagagtccttggtcccccacagcaggggatgtggcactgtgagacagtgtccaagcagacaccaagtgccccatcagaccatcatgttttcaaacccagcaagtgtgtttaatgtttccacaccaccgcttccttatttacacacagaaagatggcttctgtagcttcttcggcaggagttttgaaagttaattaattttcatagagtgactacatattagatctctaaacactccctgaatagcgctcccttgacagctcctcatggcctccaaaaaagagcaaattcataaatat

SEQ ID NO: 843055 - DNA, 597 bp, Homo sapiens
tgtagtcccacatacttgggaggctgaggtgggaagatctcttgagctccaggagttcaaggttgcagaggttaaatgtatatcctgcattctgaaggagcacatacagaccctgcagggtatcatctccagctgatgagcatcttagtcatctcaggctgctgtagcaaattaccacagactaggtggcttaaacaaaatttatttcccacagttctggaggctgagaagtccaagagcaaggtgttggtagatcacgtgtctgctgagagcccactgccttcataggtggccttcttgctgtgacctcacatgatagaaggggcaagggagctctctggagcctctgttataaaagcactaatcccatttgtgagggctccaccttgcctcccaaagactctgtctctaaataccaaaacattggggattagtaacttagccagggttttaagaagtcattccaatcttctattatgaaagcatcttttggatgatggagccatggactcaatgttgtccctcctttgctttgaaatgggcccaatggttaagaaaatatacatgggatccsaggtcagtctatgaggtactttg

SEQ ID NO: 843056 - DNA, 514 bp, Homo sapiens
caaaaacctaaacaacactatcaaccatgttaggttattgacctgacatttataaaaaattccattttcctggctgagcatggtggctcacgcctgtaatcccagcaaccttgggaggctgaggtgggtggatcacctgaggttgggacttcgagacaagcctgtccaatatgaagaaaccccatctctaccaaaaatacaaaattagccgcacatagtggtgcacgccagtaatcccagctactcaggaggctgaggcaagagaactgcttgcacccaggaggcagaggttgtggtgagccaagatcatgccattgcactccagcctgggcaacaagagtgaaacttggtctcaaaaaaaaaaaaaagaaaaaaattccattttccaacaataaaatacacattctgttcaagtacacatggaatatttaccaaaaatgactataatttgggccataaaaratgtctcataaatttaaaagaattcaagtcattcaaaatacattctttggcc

SEQ ID NO: 843057 - DNA, 623 bp, Homo sapiens
atgtaccacattttctttatctgtttatctgtgaatggacamttaggttgattccaaatcttagctcttgtgaacagtgctgcagtaaacatgggagcagagatatctcattgatgtactgatttcttttcttttgggcatatacctagcagtgggattgctggatcatatgatagctctatttttagttttttcaggaacttccaaactgttctctttcagccatatgaagtgaaaaccatgctctgtaagtgctcacctgacttttagttcctgtgaaactgctgcttttgtgtggatagttgccaatcttagtcttcctgcggggggagtgggtatgatcggtggtgttctctattccaccatcttgctccacccatcctaaaaatgttttcttaggaaactcataacataatgaacaacgtaggttgataaagtatataaaaagataaactgtacaaacattaatcaaaacagagtgacactattaatatcaaatacagtagactccagagcaaagaaaattattagacaaaaggaacattatataatgataaaaggatcaatccaacaaaaatgcaatgatcctaaatgtgtctctagcaaacctcaaagtacacaaa

SEQ ID NO: 843058 - DNA, 526 bp, Homo sapiens
ccaccacatccagctaatttttgtgtctttagtagagatggagttttgctgtgttggccaggctggtcttgagctcctggcctcaagtgatccacccatctyggcctcccaaagtgctggaattacaggcatgagcccaccatgcctggactgatttttatagtgaatcatttttattcccttctttattcccttctcatttccttctgtgtatattttttagatattgcctttgtagttaaccatggggattgctttcacattctaaatttatgaaaatctagtttaaattaattccctcgtaacttcaatgtcatatgaagaccttgcttctacctagcaccttactcatcccctttatgttgttttcacacattacgtctttatacattgtgtaccgataatgtaaatttttatttagttcttatccatttatcttttaagtcccgcaggaagtaaaaaaatggagttacaaagcaaacatacagtgaccctggcttttatatttgtctatatagttaacttt

SEQ ID NO: 843059 - DNA, 642 bp, Homo sapiens
ttgttgttgtggaatagaagctcccaaaaatggtcatcttcattttcctggctgctctctaacacgtcatcaactttccatttcctttctagaaatgagaaaaataaccacatcttatgaaccttaatacatttctgatggaatcagacttttacacaaatgcactatcatacagtcaattcttttgttttaaattcagtttcctggtgtgaactgagttcaagtgtacattttctttaccctccaaggtttaggtggaaaacataaaacatgcttcagtggaaacagggagaagaaattggcaatgatatttaacactttataaatataaccttcaaaactgaaaagaaaaggtgaaataaaattcacagcacagggaaccagagtggctgattcagaaatagaaaaactcggagaaaatggggtgaacccaacagagacaatgaacactgaataaagtgatggtgaagattagcagacaaggggtttcagaggatgcattaggtttggtggagacaaaacagagcttggtcctaatcccctcacacacagyttactggggtagaattcccaccagaggacatgcttctttctatctttgaatcagcaagaaaattaacattctgaaaacatcaacttcct

SEQ ID NO: 843060 - DNA, 642 bp, Homo sapiens
ttgttgttgtggaatagaagctcccaaaaatggtcatcttcattttcctggctgctctctaacacgtcatcaactttccatttcctttctagaaatgagaaaaataaccacatcttatgaaccttaatacatttctgatggaatcagacttttacacaaatgcactatcatacagtcaattcttttgttttaaattcagtttcctggtgtgaactgagttcaagtgtacattttctttaccctccaaggtttaggtggaaaacataaaacatgcttcagtggaaacagggagaagaaattggcaatgatatttaacactttataaatataaccttcaaaactgaaaagaaaaggtgaaataaaattcacagcacagggaaccagagtggctgattcagaaatagaaaaactcggagaaaatggggtgaacccaacagagacaatgaacactgaataaagtgatggtgaagattagcagacaaggggtttcagaggatgcattaggtttggtggagacaaaacagagcttggtcctaatcccctcacacacagcttactggggtagaattcccaccagagkacatgcttctttctatctttgaatcagcaagaaaattaacattctgaaaacatcaacttcct

SEQ ID NO: 843061 - DNA, 303 bp, Homo sapiens
atctactacaacaacaaaagtaatagcttcactatgatcacagagatgatcaatgatctaaatgcctcacctattttcagcagagccatggatacaagtaatcacaaggcagaaratattttccctttgcttctgaactgcttttggtggcaatgatacaaatacaaattgtggttgatgtttgcataagggcacagacatgcttggtccaagctgaagtaaagattccaagttgtgggccgtcctgcccacattctgcatcatgatgtcaaaatagcatctgatgttctttgcattttcatt

SEQ ID NO: 843062 - DNA, 518 bp, Homo sapiens
tacaaatggaatcatacaatttgtagccttttgtgtctgatctctcacttagaataatgttttcaagacccatttatgttgtagttgtatatcagtactttgtccctttttatgactgaacaatattctattatatggatataccaacttttgtttatccattcatctgttgatggacattgggggtcatcctgtgtttcgctatcgtgaatagtgctcctatgagcattcatgtacaaatatttgttagaatacatgctctcagttgttctgggtatatacctacgagtgaaattgctgggtcatatggtaagtttacgtttaatttattgtgaaactgacagttttccacagcagggtgctttgcaatccataggaatttttagttagcttytctatttctgcaaaaaagtatgttgagtttttgataagtattgcattgggtaagtattggagtgggtaataacactttggggagtgttatcatcttaatattaaatcttataatccatgaatgt

SEQ ID NO: 843063 - DNA, 612 bp, Homo sapiens
caggctggtctcaaactcctgacctcgtgatctgcccgccttggcctcccaaagtgctgggattacaggtttgagccaccatgcccagcctattttgccaatttctgtcttttagttgggagtttagtttatttacatttaaagtaaatgataaactgaaaaaggacttatgccattttgctatttattttccatatgtattacatcttgttttcagtttttctgtgtatgccttcttttgtgtttttttctaacgtgccattttaattccttttgtatttctttgtattcattatttacctagtgttaatacttggaattgcaattaacatcttgaatttataacaatctagcttgcattaataccaactaagccttaatattatataaaaactctgctcctatacagctttgtccctgtcttttgtcttcttattgtcacatattaggccttcataaattgtgtgcacattacatagatgcataattattgttttatgtatctgtcttttaaatcacataaaaaaaagagagaacataaaagccaagaatacaataagactggcttttgcatttacttacagtagttasttttatcatttgaattttttg

SEQ ID NO: 843064 - DNA, 612 bp, Homo sapiens
tgctggtcttgaactcctgaccttgtgatcctcctgccttggcctaccaaagtgctgggattacaggcatgagccaccgcacctggcccattttgttttctagtagtgttcagaragtatttgttttgttttcatagttaggcaaatattaacatttaattttggaatgctctttttttagtctgtgatttttttttttttttttttttttgagatggagtctcactctgtcacccaggctggagtgtggtggcacattcttggctcactgcaatctctgcctcctgggtgcaagcaattctcctccctcagcctcccaagtagctgggattacaggcgtccacagtcaggcatggctattctttgtctttttagtaaagatggggttttaccatgttggccaggctggtcttgaactccaaaccttagatctcttccaagcttcagaatcatctctgtagccttccactggatatgctcacttccatgacatgaagacattccaagagcagcatggcctgcatgtgtcttattgtcactctgcactctcccctcctgcaacacccaccctcctggttctaatttccagacgttctaaggcctctatgcagg

SEQ ID NO: 843065 - DNA, 461 bp, Homo sapiens
gggatttaattgaagttgacacagaatgactttaaaaccttccaagccaatggctaatgatgaaaatacatatgaaaattaatttgggggatcctgtgcagaggaaaacaaaatagttctaktcaaccctcaaaggaaatgtccagaagtgaagatgaagttatctttcagagttccaatactcctaccccactacctgtttaaaatggacttttatgttacataatcctgaaaatgttaggagtcaaaattcctctagataaatgtggtacacatataccatggaatactatgcagccataaaaagaaaacaaaattgtatcctttgcaccaacgtgcataggaaatcttatcctttgcaccaacatggataggacatcttatcctttgcaacaaggtgctttcagaagcaggatgagcactgcaattgaaggctaagaggaaatggctcttggccaatt

SEQ ID NO: 843066 - DNA, 500 bp, Homo sapiens
attcagagcttggagacgatacatgactattgttacagcaaccctagcaaactaatacactggcttataacaaagagtctgcaaaaattagagacagctcatataattttgtgccttatgagaagttattttctggcaatatatctttaagagaacatgaagtaaataccataaggtgacataaaggctttgaaataacaaattaaagccaaagcaaatttactgcctttttgtaaatgggatttactttcaccaaatctcatggtcctataaaagatgacatttgtgaagcattcattttaccacccattggcacttctcacaaagatactaaaataaactggtaaaacagctcttagtcttttctaggcattggctaccattaaaatcttcattttatttctgctcttctttaacataccttcttttagagtcctttaaaaaaattgtttggagagactgcatttttrttacaaaaggactgaatagaagaactattg

SEQ ID NO: 843067 - DNA, 503 bp, Homo sapiens
tcaatagatgtttaaaaagtgttcagtaaaactcaaattcataataaataccctyaacaaactgggtgtagaacgaatatatctcaaaataataaaggccatgcatgacaaacccactactaacatcatactgagtaaggaaaaattgaaagccttttctgtaaaagcaggaacaagaccaggttgtgccctttcaccacttttcaatgtattatccaatataagactggaagtcctggccagagcaatcagacaactaaaagacgtacagggcatccagattggaaaggaagaaatcaaattagccttgttcacaggcaacatgatcttatacttagaaaaacttaaatactctgtcaaaaaaaagttagaactaataagttaatttataaagttgcagcactcaaaatcaacatataaaaatcagtagcatttatatacagcaatagcaaacaatctgataaggaaatcaagaaagcaatctcacttaatatagctaaaaa

SEQ ID NO: 843068 - DNA, 566 bp, Homo sapiens
agggtctatggaatgatgctttcaggtrggcagaggcctcgtggagggtggccccacactcacccccagaatccagaagccattcccacaggaacttcagagggagagcatttacatttacaggaaagaaatgatacttctgagcctacatttgccacatattcattaagtgcatttgttcaggcattacagtaaaatgccatgggctgtgcttttcctcagctacagcctctctccttccaacctcacaccctgtcttcctgtcatgcctttgtgagagcgccaccactctgcggtgcctggagaggaacctggaaacgctgatagttcagtgcatactcggtcatatggagacagcaggaaagagtcaggggccaacttgaaagatttggggcctggctgtggtttgcaggctgtagacaccaaactatactttatagaacatgtgaaaatatagcctgtatgggttactctcttactgattgtctagatttgatgccttacattaaatcattttaaaaccaactctagaagtctactcaaatcctgcattttctactggaata

SEQ ID NO: 843069 - DNA, 634 bp, Homo sapiens
aataactttcggcacgttaaaaatagccaaaatgttctaataaaaaatatgctgttgagttaayaacaattaagtgaaaagcagataaaaataaaattaacaagtgatccaaccccttcataaatttacacatgggtgatctcagtaaaacgtttgtttttgttttgttttaagacctaactgaactgtgataattgctttctctttcaggagcagttacaaatattttgtggcaggaagtcttcccttaagtgctgagtctgcaccgcgacaaacacacttttaaagaagaaaactgtataagcagcaatgtcttcatagccaaccactggttcaatcatttaaaaagtttttaatcaaggacccctagaagggagtttcctttataaaaagccctctgattacaggcgtgagccaccatgccatttgtgaggccgaagcgggtggatcacctgaggtcaggagttcaagtccagcctggccaacatgatgaaaccccatctctactaaaaacacaaaaaattagccaggtgtggtggcaggcgcctgtaatcccagctactcaggaggctgagacaggagagttgtttgaacccaggaggcggaggttgcagtgagctgagaccacaccatt

SEQ ID NO: 843070 - DNA, 583 bp, Homo sapiens
accaacagcaaccaagctgagaatcacatcaagaactcaatcccttttacaatacctgtaaaaataaaataaaatacttaggaatatacctaaccaaggatgtgaaagacctctacaaggaaaactacaaaacactgcagaaagaaatcatagatggcacaaacaaatggaaaacacatcccatgctcataattgggtagaaccaatattgtgagaaataaccatactgccaaaagcaatctacagattcaatgcaattcccataaaaataacaccatcattcttcacagaattagaaaaaaaaatcctaaaattcatatggaacccaaaaaagagcctgcatagccaaagcaagactaagaaaaaagaacaaatctggagggatcacattacctgacttcaaactatactctatggccatagtcaccaaaacagcatggcactgaaaaataggcacatagaccaatggaacagaatacaaarcccagaaataaagccaaatacttacagtcaactgattttcagcaaaggaaacaaaaacataaaatggggaaaggacacccttttcaacagatggtcctgg

SEQ ID NO: 843071 - DNA, 600 bp, Homo sapiens; identical to SEQ ID NO: 825342

SEQ ID NO: 843072 - DNA, 665 bp, Homo sapiens
tagatttttctttgagatgaaccttttttttgtaatttwttttttattttttattttttttcagtagagatgggattttgctctgttggccaggctggtctcaaactcctgacctcaagtgatccacccgcctcagcctcccaaagtgccgggattacaggcgtgagccacctagcttggccaaggtgaacctttttgataaatgaggctcactaatatttctaggatttacttttcactaacttgaactaaagaaagtataagacctgcataaagttgagcatacctctataatgtcccattttaaaaagcaatttgtttttaatgacttttatttgttaaaagcagttatttcaaaaaattatttttattatttatcatgtcatttggactgaaaatactataccatatttcagtgttagggcacacctatccctctttatcccagacgtcaattctaccatataacaagtatgtaaaaaagaaaacataaaagtgatgacagactccctaatcaacctatttattggttctaagcccaagcctgcagttcatttaaatagtgaaaatagattacttaattgtcttagaaaatatgtcttccatgacaagaattttaggaatgagaaaataactatttttggatgttttaacacaaattccca

SEQ ID NO: 843073 - DNA, 582 bp, Homo sapiens
ggatctgaagtactgtttatttaaacgagatttttcttactcttaatttaactaggcatacgaagatcttcagtaccccagaactttcaataatttactactaagggcaggagacaaactgtaatactggctactaaaagaaacgaaaagctagttcagcacacttactagtctctcataaaaagtaaaatatggctggtttccatgctgtccacagacatttcaaacatataacttctttaggctaaaataaatagcaagctcagaaatacagttttaaagtcctaaatgagccagcggttacaatgttttttgataagtaatgaatagtaatttattaagataaaatgtactttcttcaaaatattctgcatgcccactctgttgctgccctaacacattaccacatacttggggcttaaaacaacacaaatttatacttctgagtcaggagctcagaaatctagaatcaaggtgttggcagggctgctttccttcttgcrgctctcatctctttgccttttgagcttctagtggctgcctgctttccctgtgcaccctctcatcactccagcctcttgc

SEQ ID NO: 843074 - DNA, 650 bp, Homo sapiens
gtctgaagtacactctggagtttatcttatatgaaatggtttcyactttctaaccatttgttccagtaaaatctagaccactgctacatgcaagagaatcaatttcctgatattaatagtctgcatgtttgtttttttctaactgacccaatcaggagcaaggtaactcctcagtcacagtttatttttctgcccagcctttgaaccatttactaggtatttatctagtcattttcttcattcagcttccttcccatgtgccttatatataatcacttgaagcagcacagcagacgcaggtttaataagatagctctcactatctttgccagatgcaacgttttccagttttctcttagaaaatgcaaacaattggaaacagttataacaacgcagtttaccccacacagataactcgaacactatcactagaggattccacagtgaagtgcccatggtatggagaacaatatttccctgttctttcactgaaatacctctgcattattttcctaaaacagagaactactaacttggacaaagggcaggcagttcatgccatccatcctgtgcagtcacaatagctaattataacagccaacctttattgagccctggcaatatgctggtctctgttttaagcattttca

SEQ ID NO: 843075 - DNA, 653 bp, Homo sapiens
taatgaagttacacttcactcaggagagctgagttaatttyttagtctgtcactcactagctgtttgacattggtcaagcaaaggtcataatcacctttgagaacttctgttttcttattttttttaatgagagaacaaagttagggaggcaactaaatgcctataagctcttgttcaacttcaaaaagaaaatataaatatatggcatcaaatctgagctcttaccaaattcctaagggcttgatattctgattatgatatggtgattatgatttgattataatttaccaagcagttgataagaaattgttatatgtaatccaaagcaagcccttgaaaaccttgtgtctcccaaagataattagaaactaggattatccaggcgacatttgaatttctgttagtaaaatcttgaaagttgccgtactatgtctctatgcgactggactcaggctaagggctactttcagatctcattttagcactctggaccattctcatctgaataacaacagtgaacttcattttagtatgatggcaaaagtctccttttctaaactctaaatcactgaaatagtaatgggaaataaaataacattcaccatctctttgaaagaggacaacagaatttgcctgggtgtatatgttagtc

SEQ ID NO: 843076 - DNA, 531 bp, Homo sapiens
taatcatagggctttttgcattggtcaaaggaatggaaaagtgtgtttccagtgttttttaattctaggcttaraaagtttttataagatataaattcatatttttggcatttaaaaaacagtttattagagttgccatattacaatgttctattttctgtggtaactgcactacacacaattttagcttctttaaaattaagagcttgtagcaagttgaatgtggcttaactttagaaaataaggtcccagagtccaggaagttcaataagcgcaaatgctctggacaggttaaaatcctacagcgatttactgttcattacacatgatcgtagccaaaaggctgagaaatgattattttagtgctcatttattgtagcctgagagctgtgttttagcagagacctatgcattcaaataacttaagatcaggtttgtggtacacgaactagtatacgatcaagtatgaaatcatatgaagaaaataaatctgtagttttgaactaggagtgcaaagatagttttaaagag

SEQ ID NO: 843077 - DNA, 690 bp, Homo sapiens
accttgtcctttagtccctctagtcccaggagtggtagaaccttactgctaatggtaacctctgcatttgaatcaccaacttcagctattggcagtagccagttgcttacatctttaggataataaacsctttgtagtgatttatttcagtttggaatatctataaagacatttgttttcctgattaaaccctgactgacacagttttatagcccattcctgttctctaatctgctcgttctcaggttggagtttctacagatcttcaccagcagaaggggtcctttctgaattgctgcatctttcaatgaatattctgttagggctatggcttcctccaccctgaacatacatttcatgtcttcccatctttttactttttcttcttatgcccctgcctattacctccttttacaatgctgttataatttattcccttttaaacatgcttactgtcacttcaatggcaggacaggaggaagagatggatgtgtgcactcagtttattgcctagctcgaaagtagtgagctactttcaaggggtagtttttttttttaagaaaactggatatgacaatctgagaataatttcatttttactaatttatttacattaaaaacaagattcaaaaataataaaataaaaaaccccaacaacaacaaggttcaatgtaatgattatttctgttg

SEQ ID NO: 843078 - DNA, 602 bp, Homo sapiens
gaacagtgggggaaaaaaatactctcctcactccaccagtaccactatgttcaagtctggcctttcctttcagctaccaattacttgtcaaatggattggtttggttttgtatggaggtcatttggctttacmaaaaaaaaaagggaaataaaagactattattttcaagataaaacctggaaagaaaagaacctatacccttaagtaggaaggactctccagtctatatttgcagacgggctgactttgtcttccaggtgggtttttttttttccagttgtttgttttatgctaatagagttttgccccattaacatagaatatgattcagtgactccttcctgctctccagaggacacctgtacagttaattggcttttccttttatagaattctaaaatgttaaagctacaaatggatactcttatagaatgttacagtagccaaatcccttagttaaaaatggtaatgtagctcttctctttaaaaaattaaaaataaatgtaatatgttattgtaatatgtatttaaccagttttaaaaattagaaaacataaataagaaacaacaaattttaacatcccagatttaaaaagagaga

SEQ ID NO: 843079 - DNA, 554 bp, Homo sapiens
aatgattttatgtatcaccattacattacagtattctgaatgtaactctatacttccctttaccagggagtttcatactttcacgttttcatgttgctaattagcatcctttagtttccacttgaagtacttcaactttagtttcagttttagcatttcttgtgaggcaggtctagtggtgatgaactccctcagcttttgtttttgtggaaaagtcttcatctttccttttctgaatgacagctttgtgggtaaattattcttagttgggaggcttttcttttctttcagtattttgagtatatcatcccattctcttctggcttgcaaggtttgctgaaaaacctgctgaaagtcttataggagctcccttgtacatgacaagttgctttcctctgctgctttcaaattcttcgtcattaacttttgaaaatttgatcayaatgtgtctcagtgaaaaaattttcatatcagacaggtaatgtgccagtgttttggcaaggtctgagaaaggcacatcttacacaatggtatgaaaacccaatcatcatgct

SEQ ID NO: 843080 - DNA, 622 bp, Homo sapiens
tcttcaataaatggtgcggggaaaattggatatccataagcagaaaaatgaaactggactcttatctctcaccataaataaaaataaactcaagatggattaaagacttaaacataagacctgaaacrataaaactactagaagaaaacatacgagaagcatttcaagacatcgatctagacaaagatttttatagctaagacctcaaaagcaaagataacaaacataaacatagacaaatagtactatattaaactaaaaagcttcttcacagcaaaggaagcattcaacagaatgtagagacaacttgttgaatgggagaaaatatttgcagactattcatttgacaaggtactaatatctggaatacacaaggaactcaactgaacagtaaaaaagcaaataaccccatttaaaagtgggcaaaggacatgaatagacatttctctaaagaagacatacaaatggccaacaggtatatgcacaaatggtcaacatcactaatcatcagggaactgtaaatcaaaaccacaaatactatcttactccagttagaatgactattactgaaaagacaaaaaataatagatgctggagaggatgcagagaagaggaaacattt

SEQ ID NO: 843081 - DNA, 542 bp, Homo sapiens
cagtgccttgtttcttccagcttctggtggctccccagcatttctgagtttgtggctgcatcattccagtctctgcctctgacttcacatcaccttctgccttgtatgtttctatatgatcttcaatttcctcttttttataaggacatttatgatggcatctacgatccacccaaataatccagggtaatcttctcatctcaagatccttaactcagttacaactgcaaagacactttctccaagtaaggtaacattttcaagttccagggattaggacatatctctgggtagccattattcaacctactaccactacaagggataaggatgaaagaaggcttcctgggggaacagtgtataaaataggacctaaaaaattaggcagaattttgtcaggaggagaagcagcaagagtgatagagaatattccaagcagagaaatcagtgtgtggcaaaggccctgagttgagggagtgtggtgaatcagagaatctgcacsgagtgtggttatggctggagcacatagtaggtgtgtgtgt

SEQ ID NO: 843082 - DNA, 597 bp, Homo sapiens
tataaaggttttacgtctcagtacttcgttgaaagagccttagccctagtcattatctaagacttggattcagtgmatttcacatcgctgagctctcacatggctcctggtcttggaaatggccactggactgcctccatagtcaggtaaggcccagcttttccacggtcccttttgcttggatctgagaggactgagtttctgctttggctctcttggctgccttgctctgaccagttcttttcgctgaggccagaagccctgacccaaactcttatctttctatcctgggagctggggctcacccatctgtgggcccaccttcccaatgaagacgtatccagctgcctgcctggtttccttcttgtgctctatatgcctgcctgtatgcgttatcttttctttaggttctagtgcggttattcgaattatgcctggtaaaagtttgtcatcacacctgctctgatcccccaggggggcctgatactcggctgcagtcctgcacaagtggtaggtaaggaggaaatctccttcctctccatctctacttgccttgtacggttgtaaggcaggaacatgccttctcctcaattctca

SEQ ID NO: 843083 - DNA, 493 bp, Homo sapiens
gcttccacagcatgtaagggtaccaagcaggttgccgctgctggttgggggtggccascttttattcccttatttgtccccgcccatgtcctatttctgccctatcagaatgcccttttctcaatcctccctgtgattggttacttttagaatcctgctgatttgtccattttacagaggctgattggtccattttacagagctctgattggtccattttacaaacctcatgctagctacagagcactgattgatgcatttttacagagtgctgattggtgcattttacaaacctcttgctagctacagagcgctgattggtgcattttacaatccccttataagacagaacagttctccaagtccccactccaccaggaagtccagctggcttcacctctcatgactgctatttcaagatttgtacacaatctgaaatgtccctttgtttggagctttaaaccagggttccaaaaatgtttctgcatatttt

SEQ ID NO: 843084 - DNA, 537 bp, Homo sapiens
gctgtgcacaccccacctatggctagatgggtcagaaaacacccagttcttgataggcagttcaggtcgcatggtgacttgatgacccataatctaacattcagtttctaccaaagcccagtaacaggccaaraactgtttctcaaaaggagagtagttatctgcagaagatggcagggccttactccaaatcctagaggctgccactgtgtttcacctacaggggcctgccaaaggctccaaacggcatccctatctgccaccgacacctcaagcaccattggatctgatgggtcatatggcccaagtgtaagaacagcttgcacagcagcctggacctgttgcagaaccttctcttgttctggaccccactgaaaaatggcagcctgtcaggtcactggataaatcggccagagtaacacacttaaatgagggatgtgttgccttcaaaatccaaataggcccactaggagttgtgcctttttcttggttgtcggaggggccaaatgcagcaacttatcttttaccttagaagga

SEQ ID NO: 843085 - DNA, 566 bp, Homo sapiens
cagagctagtgattgatggagcagaaatgggaaatgtggttgatcttcctaattcaattctaggtcctcctcaccccaccattttggcaaamttttggcattgaccttgggtttttatccccttagctattccaaagtctgtgtcatccataacaggtattttagaagcagtagaaaaagaaatctacctatgaagtgaaatagccctaagttctgtctttggctcagccacttacccatatgacttcgggcaaagtgccaagcttctgtttttttttttttttttcatttaaaaagtaaacaaataacacacacctcatgatgcggttgtgatttctgggtaggaccctatgtgttacaagagttctcaatggaaaaataagtcatgtacattattaattaattggtatttcaatgtttatctggaacatgttacatctgcagggcatggcttgatagattcaagaagaacttccttacggttctctaacttactccaaatagcctcatgggaattgcggcagggtgggggcgggcggggaacgtgtagtcccagcgttgatttt

SEQ ID NO: 843086 - DNA, 644 bp, Homo sapiens
gagcttctccttctcctcacttaatctctaccctcccaggacgttttcctcccagtgaacccaggccctgtaaggtgcaaacctgagttagtaaatcattgstgtcaggccgagatctagcctttctaatcaccccttagagagtgccagtgctgctggtccggggaccacactttgagtagcaagctgtgtcgtactgtatagtttatgacttcctttctcattcatcttttcatttcacactcatggaaactcttggagaaaggcacaaaggggattccaatccccatgtacacataaggaagtcctctgggccgctgctggcacgtgggagaggcaggaactctttccctggaatcctgaggtctgcgctcgctcttctgccccaccctgctcaccccctgcctcctctccggtggggtggaaaggaaacatgccagcaaggcacgctctgagccatgcgctctgggccatggccaggctctgacctgtgacctgtggttccttcatagctgttaagggctgcagagcaagggaggacggtggggcccgcctgcctgtgtggaacccctcctctgccacatatgagctgcatggtcttgggcctgttccttgacattctcagcttcagtttcctccttagt

SEQ ID NO: 843087 - DNA, 630 bp, Homo sapiens
gttgtacttaattccctggatcagtgcaaaacacacttcagaatgaccccgccagctaggccaaggaacagggtgtgtacccagtggtgctgcagaggacttggctgacaattgcagggaggacagcagctcccaacccttccatcctgccactgtgccaagggcagctgtggctttcggcagctccctcagagccctgggcatagaacagcagttcatgttgcatacgtcatttccactcatcatctaagacctggagagaaatggcattttctccatttactgagggggagagtaaggcatagggactcaagggaacttcctcaaggttattcagctcaccagtagcacagcttgggtttcctttattccacgatcatatgatcattattcagatctgcttcactctgggaagtgggatgtagagatcctgatatctgcctcctgttaaggaagctcactgtctagcagaggggcaagggaaacacatggcctcctgaggcaagtgccactgtattggtacagctgagcaggccttggttcccctgaggctaggcaccatctgctgggaargaccctgggagactccatccttatatcaatgcctccaggacctacagcagccattct

SEQ ID NO: 843088 - DNA, 612 bp, Homo sapiens
aatgatgatatcatgaggagagagtgaaaacggaacacaaactgagcaggtgcgcaaccactggttctgtgttgttgcagtaggagtatatggtgaggtctcctctgcagtgtggaggacaaggaggacaaatccagtaattgcagagatccaagtctacatctctcagatgccataggtgttcacttgcgcaaattgttataaataacttttaccttctaaagaaggctatgacagaattttgagtagatcctttagagaaacatctcaatattgcacagtctgagaagttctagcaccattgtttattcccatttcagaagtaaaatcaaatgaaagtgcaactcagtctttttgtctcacctttgtgtcctagaacatggtagccccggggagacttgtcactttgagagccgttttccagagagttcagttcacacctctttaaacacaaacacctttaacatttttgccatgtcagatggacagaattctgaagtacagccatgcacctcaaaaagacaytttgaccaatgaaagaccatgtatgtaatggtggtcccataagattaaatggagaataagattataagattaatgcataagattata

SEQ ID NO: 843089 - DNA, 612 bp, Homo sapiens
aatgatgatatcatgaggagagagtgaaaacggaacacaaactgagcaggtgcgcaaccactggttctgtgttgttgcagtaggagtatatggtgaggtctcctctgcagtgtggaggacaaggaggacaaatccagtaattgcagagatccaagtctacatctctcagatgccataggtgttcacttgcgcaaattgttataaataacttttaccttctaaagaaggctatgacagaattttgagtagatcctttagagaaacatctcaatattgcacagtctgagaagttctagcaccattgtttattcccatttcagaagtaaaatcaaatgaaagtgcaactcagtctttttgtctcacctttgtgtcctagaacatggtagccccggggagacttgtcactttgagagccgttttccagagagttcagttcacacctctttaaacacaaacacctttaacatttttgccatgtcagatggacagaattctgaagtacagccatgcacctcaaaaagacactttgaccaatgaargaccatgtatgtaatggtggtcccataagattaaatggagaataagattataagattaatgcataagattata

SEQ ID NO: 843090 - DNA, 533 bp, Homo sapiens
actagctcttcattaggacaaatacctaatgcatgcagggcttaaaacctggatgacaggttggtaggcgcagcacaccaccatggcacacgtatacctatgtaacaaaccagcacraagttttgcatgtgtatcctggaacttaaagtaaaataaaataaaaatttaaataaaggtataaaaagactagctcctaataataattaaaaacaaaatttgatcatatctcgatgtcccaggctgtcagccagccctctcctgtagcatggggcttatttgcctccagactctgctatctgggctatttccctcaccttccatgtcacagggaatttgaaaggaactgaagactgagcaggggcaaaagaggcagcactgaccatcaggaaatggtgtggcaagcctagtgtcatccagagtgggatccaggggagaacagtttgccagaaaggaaaatcggataatattattaatcggttgagttgtggcagccgccaacaagtggctgcctatcaaatgttgaagactgcaga

SEQ ID NO: 843091 - DNA, 616 bp, Homo sapiens
tcacctgtacaacacccatgacacgagtttacctatttatgaaaccttcacatgtaccctctaacctaaaagtttaaaaaagatatatttgttaatatgtgaaaagggatgtgatataaatatatgatcatcttcctgatacacacatgcacactataaaattaataagtcaaaaaatagttatatctgggtaaaggatcacaagctatctttatttctcacacttttctttattcctttaaaatattttgtagaaagtatgtatatcttaatctgcagaaaaaagtaagttactttaagagatgaatggcatcattctcaataattgggtttttgacataaggcttcagcaatggatggtattaggtttttaaaatattgagcaagccataccttaaaagaatcatttggtattaggaaattatttaaagcaatgccttttaggctattagcaacttttttttacttcgttaataattaaatataggaggctttaagtcktttctcagattacttctttttctaccctttgtgtttacatgaggttaaacatctagaactttgagatagaagatttgtttgtgttgtttgatgacggggaaagattcgggatgtg

SEQ ID NO: 843092 - DNA, 542 bp, Homo sapiens
tcttatccctgatgagaaaccgaaaaatttcaacatttcrccatcctattcactctcctttttttgtagatggactttatcagagtgagtcattccattctgttccaaatttgctgagagtattcatttgaatatatgttgattttcatcaaacagtgcatctatttcgattaccacagcgttttttcccattcatgtgttaatatagtgaattcgattgataaatttgtacgtttttaggttcgattattaaaacttgagacagcgtctcactctgtcaccgaggctggagtgcagtggtgttatcagagctcgctgcagccttgacctcctgggctcaggcgctcctcccacctcagcctcctgagtagctgtgagtataggtacatgccaccatgcccagctaatttttcgatggttttttgtttgttttttgtagtgatgagattttctgatgttgcttaggctggtctcgaagtcctgagctcaggtgatctggccagctcagcctcccaaaatactaggattacaggcgtgagcct

SEQ ID NO: 843093 - DNA, 619 bp, Homo sapiens
gcccggtggagacataattcttacatattggttttctatccagtggccttgtgaaatatgcttgtgaattctaaagtttacttctaggtcgttttcagtcttcaatatacagaaacatatcatcctggaataagagcagttttgtttccgccatttttttttcttttcccttttgtatttttttgtagagacggggttttgccatgtttcccgggctgttgttgaacttttgagtgcaagtgatgcacccacgtcatctcccacagtgctgggattactggcgtgggccaccgtggcgggcccgtcgttgccattgtaaagagttttatttccttttctgattttatggcattgcgcagacccacccgttacaatggtgacagtggacatccttgtcttatccctgatgagaaaccgaaaaatttcaacatttcaccatcctattcactctcctttttttgtagatggactttatcagagtgagtcattscattctgttccaaatttgctgagagtattcatttgaatatatgttgattttcatcaaacagtgcatctatttcgattaccacagcgttttttcccattcatgtgttaatatagtgaattcgattgataa

SEQ ID NO: 843094 - DNA, 635 bp, Homo sapiens
atgccaccatgcccagctaatttttcgatggttttttgtttgttttttgtagtgatgagattttctgatgttgcttaggctggtctcgaagtcctgagctcaggtgatctggccagctcagcctcccaaaatactaggattacaggcgtgagccttggcctggtctggtttttcttatataggggtcttatctatataaagactaaagttaatctgtgcctttgtgcgggtgggctaagagcatgatgacttttatcattctattgatttaaagaaaactatccttgacttaccagtgtgtaaggccatgaaagcataattctgttgaaagcatatattgttaatgggtgttgggaaccgtgcactttccgctgctgtgggagcatgtccttggaggtacctttcatctgttttctcaactccaaacatcttaggaccatgggttgtgactggtaggactatgtatcttgctgctttcaagacggagtatattttcacgtggtttcactctggctgtcctgtttccctaatactgtcacttcaccctctgygattctgatgctacaaatgatagatatcgttttagcattttcttacgggtcctagcgattctattcatttttctttcagtctct

SEQ ID NO: 843095 - DNA, 620 bp, Homo sapiens
ttatcctcaatgaggatgggcatggagggtttggggcgtggcgctgggaacggcagccctccccagcccacagccgcgcatgctccctgggctcccgcctcagtgcgcatgttcactgggcgtcttctgcccggccccttcgcccacgtgaagaacgccagggagctgtgaggcagtgctgtgtggttcctgccgtccggactctttttcctctactgagattcatctggtaggtctgcaggccagtcatcccgggggctgaagtgtgagtgagggtggagagggccttgggtgggtcaggcgggtcccgcttcctggtctgtggcctccgagggagaagggccacgaggtcgtcctccttcccttcacaggctgcgaggccaccggcggcttcgtggtcgtgaaggggcctggacggggaggaaggtgggccgtggaggggaggcggtcaggggctcaggtgaagatggggtgagtgctgttggggggatggaagtcccgaggtgccgggaacccccgaygacacagggcagattccctgaatggggcctccggcgggggcgaggcgggcggtgaagaaggggcctggcacctgggaaggctgcggcctggtgagcgcc

SEQ ID NO: 843096 - DNA, 581 bp, Homo sapiens
agttactcgggacactgaggtgggaggatcccttgagcgggaggtsgaggctgcagtgagctgtgatcacgccgctgcactccagcctgagcaacacagcgagaccgcgtgtccaaaagaaatttagaaaaaaatgtcctctgccttttgccacacgccttaagatgattgctctgccagcctggccagcagaagtggctttgtaggcactcagacagcgtacacacgtatgcttaactctgggacttatcttgagagtattttcaaaagtaaaacggcaagtttacatttatccatggaagtgatcgaatatagcagccctgtggagcgcacgttcccaatcacggttgtctgttttcagtgtgaaatatgagttggcgaggaagatcgacctatcggcctagaccaagacgctacgtagagcctcctgaaatgattgggcctatgcgggtgagtgcttaaacgttaattcgatgttttctattagtagaaattaatttttgtgatagcgttgttgcattagtgtggaaatgctgataaaggtctttcctgctcataaaaaatgatgatggcatctcatg

SEQ ID NO: 843097 - DNA, 593 bp, Homo sapiens
agttactcgggacactgaggtgggaggatcccttgagcgggaggtcgaggctgcagtgagctgtgatcacgccgctgcactccagcctgagcaacacagcgagaccgcgtgtccaaaagaaatttagaaaaaaatgtcctctgccttttgccacacgccttaagatgattgctctgccagcctggccagcagaagtggctttgtaggcactcagacagcgtacacacgtatgcttaactctgggacttatcttgagagtattttcaaaagtaaaacggcaagttwacatttatccatggaagtgatcgaatatagcagccctgtggagcgcacgttcccaatcacggttgtctgttttcagtgtgaaatatgagttggcgaggaagatcgacctatcggcctagaccaagacgctacgtagagcctcctgaaatgattgggcctatgcgggtgagtgcttaaacgttaattcgatgttttctattagtagaaattaatttttgtgatagcgttgttgcattagtgtggaaatgctgataaaggtctttcctgctcataaaaaatgatgatggcatctcatgaaggaaacattg

SEQ ID NO: 843098 - DNA, 541 bp, Homo sapiens
tcttatccctgatgagaaaccgaaaaatttcaacatttcrccatcctattcactctcctttttttgtagacggactttatcagagtgagtcattgcattctgttccaaatttgctgagagtattcatttgaatatatgttgattttcatcaaacagtgcatctatttcgattaccacagcgttttttcccattcatgtgttaatatagtgaattcgattgataaatttgtacgtttttaggttcgattattaaaacttgagacagcgtctcactctgtcaccgaggctggagtgcggtggtgttatcagagctcgctgcagccttgacctcctgggctcaagcgcgcctcccacctcagcctcctgaggagctgtgagtataggtacatgccaccatgcccagctaatttttcgatggttttttgtttgttttttgtagtgatgagattttctgatgttgcttaggctggtctcgaagtcctgagctcaggtgatctggccagctcagcctcccaaaatactaggattacaggcgtgagcc

SEQ ID NO: 843099 - DNA, 541 bp, Homo sapiens
tcttatccctgatgagaaaccgaaaaatttcaacatttcaccatcctattcactctcctttttttgtagacggactttatcagagtgagtcattscattctgttccaaatttgctgagagtattcatttgaatatatgttgattttcatcaaacagtgcatctatttcgattaccacagcgttttttcccattcatgtgttaatatagtgaattcgattgataaatttgtacgtttttaggttcgattattaaaacttgagacagcgtctcactctgtcaccgaggctggagtgcggtggtgttatcagagctcgctgcagccttgacctcctgggctcaagcgcgcctcccacctcagcctcctgaggagctgtgagtataggtacatgccaccatgcccagctaatttttcgatggttttttgtttgttttttgtagtgatgagattttctgatgttgcttaggctggtctcgaagtcctgagctcaggtgatctggccagctcagcctcccaaaatactaggattacaggcgtgagcc

SEQ ID NO: 843100 - DNA, 633 bp, Homo sapiens
aggtgggattcccttatcctcaatgaggatgggcatggagggtttggggcgtggcgctgggaacggcagccctccccagcccacagccgcgcatgctccctgggctcccgcctcagtgcgcatgttcactgggcgtcttctgcccggccccttcgcccacgtgaagaacgccagggagctgtgaggcagtgctgtgtggttcctgccgtccggactctttttcctctactgagattcatctggtaggtgtgcaggccagtcatcccgggggctgaagtgtgagtgagggtggagagggcctcgggtgggtcaggcgggtcccgcttcctggtctgtggcctccgagggagaagggccacgaggtcgtcctccttcccttcacaggctgcgaggccaccggcggcttcgtggtcgtgaaggggcctggacggggaggaaggtgggccgtggaggggaggcggtcaggggctcaggtgaagacggggtgagtgctgttggggggatggaagtcccgaggtgccgggatccccgaygacacagggcagattccctgaatggggcccccggcgggggcgaggcgggcggtgaagaaggggcctggcacctgggaaggatgcggcctggcgagcgccc

SEQ ID NO: 843101 - DNA, 684 bp, Homo sapiens
tggggacactgaggtgggaggatcccttgagcgggaggtsgaggctgcagtgagctgtgatcacgccgctgcactccagcctgagcaacacagcgagaccgcgtgtccaaaagaaatttagaaaaaaatgtcctctgccttttgccacacgccttaagatgattgctctgccagcctggccagcagaagtggctttgtaggcactcagacagcgtacacacgtatgcttaactctgggacttattttgagagtattttcaaaagtaaaacggcaagttaacatttatccatggaagtgatcgaatatagcagccctctggagcgcacgttcccaatcacggttgtctgttttcagtgtgaaatatgagttggcgaggaagatcgacctattattggcctagaccaaggcgctatgtacagcctcctgaaatgattgggcctatgcgggtgagtgcttaaacgttaattcgatgttttctattagtagaaattaatttttgtgatagcgtcgttgcattagtgtggaaatgctgataaaggtctttcctgctcataaaaaatgaggatggcatctcatgaaggaaacattgattctggaggattttttttttcctctcgtgttcttcagcttttgcccatgacttctttctccggctttgtttgttaatgacagattgtacacat

SEQ ID NO: 843102 - DNA, 505 bp, Homo sapiens
gacgcacactgctgttggtactctagggctgaatataagcattatacatgtcctgtggtttatccttagattgtcatttaggagaaaggtctaaagctgggctgaatgccatgcactcatagtcccagctacttgggaggccgaggtgagaggattgcttgagtcctggagttcaagcccagcctgggaaacacagtgagacctcatcgctaataaataaataaatggataaataaatacataaataaattcattaaataaataaagttttcatggtataggaaaacacagatgcaaagtttttgtgcctagtggctggtaatgttgcaaacgtaactccttagtgaactgtaccacttaaaaatagttaagatggtaaattttaggatatctgtattttktaccacaattggaaattcctttcttcctaaagttcagtgcagttatcatatattcttttaaatttttcctgtatgtatcttcaagtcatagcattcatagaaaa

SEQ ID NO: 843103 - DNA, 504 bp, Homo sapiens
aggctggtgtcaaactcctgacctcaggtgatcaacctgccttggcctcccaaagtgctgggattacaggcatgagacaccgcgctcggtcaggaggcccgctactctttcctgagctttacctccaggaactccataaggtcttcaaaatgaagatcccagaatgattcccttttgacgggaagaatagtcattgagagagtccttcagaaacctctgcattacaaaagccgatttttcagtagaaaagactttcctagattcttatcacaacgaaggaagaacattccttcaactgtagcctcctcttactctccagttccagctgaatggggaaaacagctataccactggaaaaagagttgtgaaggtctcaccccagacacacaggccccataaaatactgaaattaaattataakattcccttcccacaccgctgtcagagcagcaggggtagaatggatcctcataatttggagattttgtatttgttcattttcct

SEQ ID NO: 843104 - DNA, 429 bp, Homo sapiens
acgttgtatatatatattctgactcattatgacagagatcattctaggcttccctattttttatctgtaacttctcactgtaatagtgaggaacctgaatgtgagtttatacttacgttgtatatatatattctgactcattatgacagagatcattctaggcttccctattttttatctgtaacttctcgctgtaatagtgaggaacctgaatgtgagtttatacttacgttgtatatatatattctgactcattatgaccgagatcattctaggcttccctattttttatctgtaacttctcactgtaatagtgaggaacctgaatgtgagtttatacttacgttgtatatatayattctgacttattatgaccgagatcattctaggcttccctattttttatctgtaacttctcactgtaatagt

SEQ ID NO: 843105 - DNA, 429 bp, Homo sapiens
acgttgtatatatatattctgactcattatgacagagatcattctaggcttccctattttttatctgtaacttctcactgtaatagtgaggaacctgaatgtgagtttatacttacgttgtatatatatattctgactcattatgacagagatcattctaggcttccctattttttatctgtaacttctcgctgtaatagtgaggaacctgaatgtgagtttatacttacgttgtatatatatattctgactcattatgaccgagatcattctaggcttccctattttttatctgtaacttctcactgtaatagtgaggaacctgaatgtgagtttatacttacgttgtatatatatattctgactyattatgaccgagatcattctaggcttccctattttttatctgtaacttctcactgtaatagt

SEQ ID NO: 843106 - DNA, 557 bp, Homo sapiens
aaccatggtggtgtgctacgtgcgtataaacaatatgtgcatagtcatgatattctaaacgttaattcaaccattgattatgatattggtataaaagaacaatgaaagttgggaaattgaattgaaagtactttaagttttagctttttttacatctccaccttaccacatacaaatattttctcttccccatactcctagtataaacatactataaggtttgtccaatacttattgtttaaataattatggctacctaaatatgtttattaccaagttgctaatgtacttccattcttatttattgcttttgttttactggtgttatcaattttgcttatttgtttggttaatttctattttcttattactaaatcactttcaaactttctaatggaattctaaaatggctagctttttcttagtacagttcaaaaattcatatagtacataaatctataaggtaycattggttccattttgtcttctttccttgatggttttcttcttgaagtttttcattatcatgttccagactgagctggctgatctccagc

SEQ ID NO: 843107 - DNA, 573 bp, Homo sapiens
ttggaaaaactgcaacctggatttagttgcaaccgcagggaggaactgctgctgccagggtgaagaaacactgctatagtggaagctgcgggagcgagagaatgtaagcaagcctagaggaagaaaacaggaaggaggaagtcacttcctcccccagcctcagtctctcagtaccactttatcctggcagagtagaaagtggtttttcagatgctagtcctagcatcacaaagcaaagatgaagttagagtggagagagaatagcttcataaatagcctactttttcactcctctaactccattcatttttacctctaatttttccttcttactttctatcatttcttttttcttctttttgaggtttttttttttcttagacggaatcttgctctgtcgcccaggctggagtgcaatggcgcagtctaggctcactgctacctcttcctactgggttcaagtgattctcctgcctcagcctcctgagtagctgggactacaggtacgtgccaccrcacctggctaattatttttagtagagatggggtttcaccgtgttggccaggctggtc

SEQ ID NO: 843108 - DNA, 359 bp, Homo sapiens
caacagagtttccagggaaactgcagacacagccttgtcacgctcaaagacctagatcaggatgagccttcatatcctcaacatgttctccagccagataaagaaggcagctcaaccatcaaaaactggaaatgaggaaattctattcaaaaccaaagggtcagagatgaatgaggtttgtttacagatgtattgaaaatgtagctagtggagaagaatatgcagaacttgggcaaacaaaccaggaataataaaaacttgaccaagaaaggaatkcacatttgctatccagtaaaaattaaaaggtgatagtttattattggtaaaataacagcaagtgcatccacataaattaatat

SEQ ID NO: 843109 - DNA, 630 bp, Homo sapiens
ggctggagaccctgggatcctttctcctggcatggtagactaaaccacttgttggctctgttccccaccctgtgccgcctggagcaggggaagcagatggtttcaatacaggcagaaacagctgttcctcatatggggtgagctgaatcttgattgttttaggttctgctctttacattgacccctcaatggtcctagttctgaagtatataagcgggccctttaaaagactttcctaaggcctgaatgtcaaatgaatcataatctaggtagcaagattgctcctaaatggacatcacagtggctgaaaacaatcaagggatggctgatttagtagggccatgctcaagtagggcaagtctctccccaaggtaaccagagacatcctcaatgcatcagcaatcttggaagctgtactcatctgaaagttcaggctttgttggacaacactcctgtccactggcacactcacacactcactgccatacaaccctttctcagactgagtccattagtagtatctacctgccgtaagcccctagaatcaaagatgctatgwggaaggcttggacccaaagacagcattggagacttggtcttaggtgagcaagggtttaatctgactaggac

SEQ ID NO: 843110 - DNA, 657 bp, Homo sapiens
ggccgcatccctttctggggtctctaggggaaaattcatttctctttatgtgggttgttgacaaaattgagtttcttgccgtcgcaggtctgagatcagtttgtccttgctgactctcagctgaggactgtttctggcttctagaggctccttgtgtcccttgattcatggctactttccttcatcttcaaagccagtaacaattcgttaagaccctctcatccttcaaatctcttcttctctttctccttctccttcccttctcagtctcctttcttctcttcctccttcttgtatcatctctctgacctgaccaggacagattctctgctttagggtctcatgtacaggtgtatctggttttattgctctttgctttattgaacttcacagatactgtattttttttaagattgaaagtttgtggcaactctgcatggaacaagtctatcagtgctatttctccaacagcatgggctcactttgtgtctctgtgtcagacgattgttagcatattttagaaataaaatatttttaagttcaggtatgcacatttttgaaacataatactattgcacgcttaataggcttcagtatagtgtaaacrtacattttatgcactggaaaaccaaaatgtatgtgttacttactttgttc

SEQ ID NO: 843111 - DNA, 572 bp, Homo sapiens
cggatcacaagttcaggagtttgagaccagcctggccaacatggagaaaccccgtctctaccaaagatacaaaaaattagctgggcgtggtggcacgcgcctgtaatcccagctactcgggggcctggrgcaggagaatcacttgaacccaggaggcggaggttgcagtgagccaatatcatgccactgcactccagcctgggtgacagggcaagactccatctcaaaaaaaagaaagaaaaaaaacatgtagtctttgtccctgctacctggcacagaatttgtaaaacccttggaattttctcagtgaaaaggatgatggagtcttttatgccctgatgaggaaactcttagtgggcacataccttcagggcggaagctgattaccaaaaagaccaagaattggttaactataagccctactttccccaacctccaggaatgggaaaggatctgtagattgggctattcaccaatggctgaagaaaacctaaatgacagggtttagagtttctgggttggtgaatatatggaaataatggaagtgtgcacccagaaagagcgtggaagct

SEQ ID NO: 843112 - DNA, 322 bp, Homo sapiens
gttggagaatcagagaattggtgaattagttggtgtgagggggacaaaaaactttcaacagtaaaagatcaaagacagtctctattaaagttagagtgtttatctttttttcttttacaagcagcatcatccgtgctgcctcattacatgaattctattgtttatcagaggaattgaaggtaggattttttttttaatttgctagaagctattctcatccctgagaaaaataactttaagtayatgtttttactgttgatgggctagtaattttaaatttgcttatgaaggacagcatgttatttttacctttcaagaactg

SEQ ID NO: 843113 - DNA, 628 bp, Homo sapiens
cttaggctaaccagagagacaataaatatatgattaaataagggtaggtagaggcaggggaaacacwtatttaaaaatatatgtattgcccagttactcttacaaagtatatattcaggaacacatcgatttaaaacaaatttactatatatgtgttctcaggccaaaaagtagagaaacataaacaattagacatcaatggagaaaattaatcagattaaagaaagctagtaattatgtattttacagtaatagtcaaagaaagtaatctcttcaagaaacagtttcttggtagccaaggtacagaacttggcagtgacaggggaattaaaccaaccagacacctgctaattaggaaagattgtcttttgcaaaaggcagaggaatagacatgggtggctgagcctctttatttgattcttgtgcacccaagagaactgcatgatgtgatctgcacaaaatttaccaggaactaatagagctgggaaaatgaaaagcagaatgtggatggatgttagacaacaaaaatctatgttaccaaaaagtaattttaaagaggtttaagaaacaagtttcctttttttaagtcttatagtacagagaaattcaaggggcagtgaagagtaag

SEQ ID NO: 843114 - DNA, 444 bp, Homo sapiens
cctaatacaattttgctgtttcctttattaggtttgataattttcaacttcatacccattaaaatcttattcacattataagaatagtgcaaaaaaattgactactatcacacattttctaactttagcccctaggttaaatactttagtctttataccactactatgcctcgtaggtagttctgttaaagtacttgtgatgccaatgtgtttatttgtttaaatttttgtgtcctttactagagaatgtgcattaaaaaaaatgtggtctgaatccagtgtagtattgggtacatctgaactcttaaaaaatgttatatattatgacttgctttgccattctctattccgtgtgacactcttcttctgtgawactggaacacaattcaactcactgagtctcagtttctttacctttaaaatgagtattataatatgcttgtt

SEQ ID NO: 843115 - DNA, 483 bp, Homo sapiens
ggtcaggggcaaaatgccgctagtctctttgctaaaacataacaagagtcaccttagttccagttcccaacaagttcctcatctccatctgagaccacctctacctgaaccttatagtccatatcgctatcagtattttgggcaaagccattcaacaagtctctaggaagttccaaactttcacacattttcctgtcttctgaatcctccaaaccattccaacctctgcctgttacccagttccaaagtcgcttccacatttttgggtatcttctcagcagtgcgccactcccgacatgaattaattgtattagtccatttttatgctgctgataaagacgtacccaagactgcgcaatttacaaaataaagaggtttaactggacttaacagttccaaggctggggaagccttgcaatcattgcacaagacagggaggagcratttccatcttacagagatggcagcaggcaaagacagaat

SEQ ID NO: 843116 - DNA, 620 bp, Homo sapiens
tttactgtgttaaccaaaacgtatctgagacaagtctcaatcagtttggaagtttattttgccaaggttaaggacatgcccatgagacagcctcaggaggtcctgagaacatttgcacaaggcrgcttggtcacaattttattttgtacattttagggaggcagaagttacaggcagacatcaatgaatacatgtaaggtgtatattggttcagggtggaaaggcaggacatctctaagaagggctttcagggaggtaaggaggtttctaggtgttagagagattcaaagattcctgactggcaatttgctgaaagagttaagttttgcctaaagagttcaagtcaacagaaagaaatacttggggttaaggtaaggttaggctgtgaaaaccaagattcttcccatgcagatgaagcctccaggaagcttacttcagagacagtagatggtttaggtcttcttatcagaccttaaaaggtgatagactctcctgaaaagacctagtaagtgaaggagattctctacaaaatgtaaatttccccccacaatagacagctttgcagggtcattttaagatatgtcaaagaaatacattttgaggtaacgtactttgtttaa

SEQ ID NO: 843117 - DNA, 599 bp, Homo sapiens
attacatgtggactctaaaatagtcaaactcatcaaagcagagaatagaatagtggttaccaaggactgcrggggtagcagtgaagaaatgggtaggtgtttgtcaaagggtagaaactttcagttgtaagatgagcgaattctgttgacctaatatacaatatgctgaccacagtgaatgcactctattgcatattagaaaatttttaatagagtggatcttataccacacacatatacacacatacaaatgacaaatgtgagataatggttatgttaattagcttgattgtggtgatcatttcacagtgtatctgtatgtcaaaacatcaggttgtataccttaaatgtatacaatttttattttgtcaattatatctcaataaagttgaaaaaaaggttcttcagagggagaagataacgatacagattagacacttttatctacatacagaaaggaagagggtcaaataatgaataagtgaaggtaagataaaacttttttcatatttaattgatccaaccaataacaatttgttcaaaatagtagaaaaatgttttcaattatgtgtactcgaatgcatatctatatttatata

SEQ ID NO: 843118 - DNA, 620 bp, Homo sapiens
actctgatgtttacataatgataacaactttattcataattgccaaaacttggaagcaaccaagatgttcttctgtagataaatggataagtaaatttccttacaaacgaacaataaaatactattcagcactaaaagaaatgtgctatcaagccatgaaaatatagaggagtaacttaggtacttatcgctaaacaaaataagtccgtttgaaaaggctacctaccatataattctaacaataagacattttggaaaaagcaaaactgtggagacaggagaaagatcaggaatttgtaaggttggagagaagggagggatgaataggtagatcacagaggatttttaagacagtgaaactactctccatgattaaaaagaaaaaagtggtggaaaaatgtcattataaattgttccaaacccacagaatgcacaattccaagaatgaaccctaatgtaaagtacagattttgagtgataatgatgtgtcaatataggttcattaattgtaacaattgtagcactctgttgagggatgttgttaagggcggagaccctgtgtgtgtggaagcaggkaatatatgggaaatctttaccttcctctccaacttgaatcacaa

SEQ ID NO: 843119 - DNA, 414 bp, Homo sapiens
tccatatttcctcaatctgaaagctgacctgatttattatctaagtccgtaaatagaatmaaattgattagtcttaaaataatagccactattatctaaagggaagaaaaatgtagtaaaccgaagagtggtattcatgagtctgtcccggtcacttgaaaataaaatttcaataggtgtccaagcaggatgtgacaagccttccctgccttccctcccctgtccctgtttcagcagagatcagtctgcactttgaagctgcaaatggcatgtgagttgttttcacaaacccatgatggataatggctaatgggtagtactgtggtaacaaagcactaagttttgaacaaaatagctgtgggacttgaggatattttagtgcttcttttgcttcacaaacgcaccaagtttcct

SEQ ID NO: 843120 - DNA, 599 bp, Homo sapiens
atgtaagaagtgcctttcacctcccaccatgattttgaggcctccccaggcaagcaaaactgtaaggacaattaaaactctttttgtttccagtttcaggtatgtctttatcagcagcatgaaaatgaactaatacagttaattggtaccaggagtggtgtgatgctgaaaagacacctgaaaatgtgcaagaggctttggaactgggtaacaggcaaaggttctaacagtttggagggctcagaagaagacaggaaaatgtgggaaagtttggaacctcctagagacttgttgaatgcctttgaccaaaatactgatggtgatatgaacaataaggtccaggctaaggtggtctcatatggagatgaggaacttgttaggaactggagcaaagatgactcttgttatgtttttagcaaagagactggcagcattttgatcctgccccagagatttgtggaactttaaayttgagagagatgatttagggtatctggtggaagaaatttctaagcagcaaagcattcaagaggtgacttgcgtgctgttgaaggtattcagttttaaaagggaaaaagagcataaaagttcagaaaatt

SEQ ID NO: 843121 - DNA, 567 bp, Homo sapiens
tgctgacaacaggcaattaaagttcaaggatatttgagagaggaagcccattttaaatatggaagagaaagttgagtgatagaagggttagataaattgagtccagcagtacaacctcaagaataagttctgaaaggaaatccttgtaaactgtttggttttcttttatagaatcacctaagttggtcaccatagagatgacacaagcaaagacagtcctctcttcctctaagcttgcaaatgcctttgtaagaatggacaccagcaaattccacccccaaaaagagagatataatagaaacagagcaatattgtcaaacaccaggacttctgatctatgtcccagcagtagtggtaaaaatgaatcaagacaacaaatgtaattttttttctttcttcctataatataattgtagataaacatgagaagtcatatattattaggtcagggttaagtaaaaatgatgcagcattcattttcattcaatttaattcaacaaatrcttagtaaaagtcatgtggtagatactctaccaatattgtggatacacaaaaggagttaataca

SEQ ID NO: 843122 - DNA, 519 bp, Homo sapiens
aactaattataattaaaatcaaaatatttactraacctacttactcctataatttgcgttgctggttaaaacccagctataaaaattttgatcaaaaatttttattttgtaaatgatctgacacagcataaatgttaatcacatttctttattttatttgcagattaatttgagtaatttgaaaaattattaatgttacttaattactctcaacaccttacagtgtctcctgtaagcactattggtgatactgaatttaagttacatttaacaactatcagaaaatagtttttaaagtaaaaattatgatttggagtttaccaactaaatcttgttagctttcactgcctctattgagaagagcagcagttcttatcttcctcctttttcttctttaattaacaagagattatttgtatcatagccataaaatcagttcaggtcttacatgaacgacacccctgactgcaatggtgtagtttattgtattagtccattttcatgctgctgataaagaca

SEQ ID NO: 843123 - DNA, 519 bp, Homo sapiens
aactaattataattaaaatcaaaatatttactaaacctacttactcctataatttgcgttgctggttaaaacccagctataaaaattttgatcaaaaatttttattttgtaaatgatctgacacagcataaatgttaatcacatttctttattttatttgcagattaatttgagtaatttgaaaaattattaatgttacttaattactctcaacaccttacagtgtctcctgtaagcactattggtgatactgaatttaagttacatttaacaactatcagaaaatagtttttaaagtaaaaattatgatttggagtttaccaactaaatcttgttagctttcactgcctctattgagaagagcagcagttcttatcttcctcctttttcttctttaattaacaagagattatttgtatcatagccataaaatcagttcaggtmttacatgaacgacacccctgactgcaatggtgtagtttattgtattagtccattttcatgctgctgataaagaca

SEQ ID NO: 843124 - DNA, 612 bp, Homo sapiens
ttctttctctttagttgtttgagttccttatatattttggatattaatcccttaacagatgtatggtttacaaatattttgtcccattctgtggattgtctcttcactttattaattgtttcttttgctgtgcagaagctttgatgcaatttgatttgtctatgtttgtttctatcacttgtgttttcagggtcatatgtgaacaattacaagactcatgtcatagagcttgatatggtttggctgtgtccccacccaaatctcatattggattgtagctcccataattcccacatgttgtgggagggactggtgggagataattgaatcacaggggcagtttcccccatactgttcttatggtactgaataagtctcacgagatctgatggttttataagggaaaagccctgttgcttggttctcattctctctcttgcctgccaccatgtgaggcatgccttttgccttgtgcaatgattgtgaggcctccctagccattggaactgtgagtccattaaacctctttttctttataaatttcccagtctcgggtatgtctttatyagcagcgtgaaaaaggactaagacagagctttttccctatgtttt

SEQ ID NO: 843125 - DNA, 445 bp, Homo sapiens
gttgcagctcttaaaggtggtgcgtctggagttgttcattccttccggtgggttygtgttctcaatggcctcaggagtgaagctgcagaccttcgcggtgagtgttacagttcataaaagtggcatgtccagagttgtttgttcctcctgtccagagttgttcaccctcctggtgggtttgtggtctcgctggcttcaggagtgaagctgcagacctctgcggtgagtgttacagctcataaaggtggtgcggacccaaagagtgagcagcagcaactaaaagatagtttcaacaaatacagaattcatggttgacagctgttttgttttgttttgttttgttttgtttttttggcacttggaaaatgttgttccacttccttttggcttccatggttttttgtgagaaatttgttgtcatttgaattcctgtttcctctaggca

SEQ ID NO: 843126 - DNA, 327 bp, Homo sapiens
tgtctatgagtgaagtcagcctgtactttttcttccctaaatcatcctataatgccatttacaattatgaatcagtaaaaatttaattttttagagaaataatcaatttcatggyttttactcacatatattttaaaagaacatttacttacgttataaattatactttcttctaattatgaccctgtttttgttttgttttgtctttcaggtatttttgttgtttttattttgtttcatttgttttgttttttggaaggaggaaggtaataggtaaaccagtgtttgatttagtacttgttttaaatctccattttctgtttcaat

SEQ ID NO: 843127 - DNA, 562 bp, Homo sapiens
agaaaccctagcacttaacacctttgaagataaaatctagccttgaaggtaaaatttaatgagacctaagttaaagctcacgctgacaaacacaaatgtcaccagcatcattgatttcaagagaaaaagcagaagcagcctgcatcaactatgctcattttcccctttcaattctcaggcataaatatatgcttagcagaagttatgtcacaggaaagttttgagagactctggaaaatatatctagctttctaaatgaaattgcactagagcatactaaaggagctttggagacagtggggtaacataatctttattcccacagtactttgcaaccattggccaattggagtcccccctccccacacacaattttcttctaaattttcaactataaatgaacagtagccatattctccaacctaagayaatatgaccatacttaatatgataagactgcttacttccttctctaaataatcattagtcattgaaaccagtttgacaagtgtttatttctcctctatctcagtctaactatcttgtaatcaaagaatggaat

SEQ ID NO: 843128 - DNA, 578 bp, Homo sapiens
ggcacctgaattttgtgtttgccagtctccacctatgagcaataaatttctatgatactktatatttcagcccagatcaactaagacaacatgtcttctaaaatgctacatataaaatgtacttatttatttgtaaaaattgtattgattggttatctctctagaaagtaagttttatggaagaactttgtaaataaataagtgaataaacaagtaaatgaataagctggttttacacttgttccctgaattatattgtaattttaagtataacttctcttacaattttgtttcatattatacgagtaagtaaaaataatctggaagcatataacttttcaatgaaactttaaacaaaaatattctaaattaagttaactggcaaggatttattataatggatgaaatatattgggatataattggtcaaaaaatataaaaattatgacagttatttaggaataaaaatacatttattaattatacattaaaataaaagaactaaaatagctatataaaaatcttttggaattaatttttactggctcatagtaattctaaatattacttacacaata

SEQ ID NO: 843129 - DNA, 608 bp, Homo sapiens
ggacaatgaagacttggtcttgtataactacatgccttgcttccaaagttcttatgatgaatgtagctgtccactcaatgacaaaatatkcaaacttaagtcttttctttcaggttttgctatcttttttaggctcttttttttttccatgtcagatgttttaggatgtttaaataaaagagaaagatatctgaaaagtcttgaagtacaatataattaatgaagtccttaatgagttaagtttttacaactgtggattcctgcgacaccctattgaaatacccaattaaaagataattaggataaattatggtgagaaaggagataaccttacatcttcaagtaaagaccttcttgcttcacataaaactttcagggtgactcttacagcttcttccaaagaacagaaattaagtacaaggatgagatccattttaatattaacaaatttaatttaaaatacaccattttaaaactaatgtgattagaaatatattttacaaggttatatgttaataaaatttcttgaaatgaagtagaagttatctgtcacgtgttttctcagtattcacacgaacaattcattacaattttatagtagtcatagc

SEQ ID NO: 843130 - DNA, 488 bp, Homo sapiens
taaagcctagtattttctcagtagggttaatgaagaagctcttaaataaaacaagctcctcaataatccctgctggcttttaatgcttcatcttgatgctaaattagttscagtagcataattcttttagctcttggtcctttggctcacatcaagcctcttgccataaactcttgaaaacataggattttatttaaacaattcttcaaattttctgagttgatattggcctaatttgaaatccatagcccattagactaacatctgaatggcagtgttgttataaattcgtataccccctattttgagagccatagtataagataaatttctaaatattaaaaaagaagccttatagtctaaattgtcaggttatgtttaatatgtaaatattaggagctgtttatgtacaactgtgggtttccaattttagtatatatcagcattatctggtgggttgttaaacacaggttgctaagcctcaaaca

SEQ ID NO: 843131 - DNA, 606 bp, Homo sapiens
agcactatatgggttctttaaagttggcgactaatgtgtttcctgctaatttatattatcccttctgttttctcaattctttstacctgttttaatctgttgtaccactttaatttattcataattattaagccaaaaatattttctagccaattttacacctttttgctattttattctatttcctgggctattccctctatttttatcttccaatcctttgttatcatattttaaattcccaaggctcttttctgggtctctgaatgttccctgcactcacctcatgatgcaataactttacattcttcaaagtttatttatcatgaagcatggtatttgaggtttcattttgttggctactcgcagaggataacacagagcgaggaattcttttttttcctttgaagcatattgataaattttcaaagaaaattaattgttttcatagatagataggtgcctatttccttattctaccagatacacaagtgttaatggcacaaaatcatttccacaggtagaactgagaatgtgggggtggatgtctggtgaaagttcaaacaaatagcattgatatacttttctttcaagtattgttgaagc

SEQ ID NO: 843132 - DNA, 591 bp, Homo sapiens
caaaaggatcctttggtccaaagggaagttttgcagaattcyagccactcagaaagccctggcagaggcatcgtgggcagaagaggcaaaaccacatgcaatatacgtatgaatcacaaaaagatgagttattgccttctccaggatgaaaggggttttaagtaattaactagacatcaagtggatggtctcttcaaagaatggtaccatattgagagttggggcagtctccaatactggacaggtcagatattcagtagtgggaataattttatcagtctcaatgtaagaagaagcacatgaggggatgcaatgctagtacagtcattcataacctccaaaccagccaccaagggttcactgtaggaggatagggtggctgaggacaaatgctggctggtgtacttttaatgcaccattatttccatttggtttttggtggctctgtgcagtagttactctttggtgggtggtgataggatacaccaagatccgcgtgcttttggtgccttcccctggtccattctcattccactttcacagacattattgttttcaaacttgctcctctcaggtacttggttattcagc

SEQ ID NO: 843133 - DNA, 648 bp, Homo sapiens
taagttgtttctataaataaaatcaaggccgggtgcrgtggctcaaacctgtaatcccagcactttgggaggtggaggcaggcggatcatgaggtcaacagaacgagaccattctggccaacacggtgaaaccccatctctacgaaaaatacaaaaattagccagtgtggtggcacgcacctgtagtcccagctacttgggaggctgaggcaggagaatcgcttgaactcgggaggcagaggttgagtgagcagagatcacaccactgcattccagcctggatgacagagcgagactctgtctcaaaaaaaaaaaatcaaatagaacaaaggagatatatgctgaaataatggaccattatgtagtttattcagatgagtactcaattttttcttccatgagtagttacgtaaaattttttcagggctgctagagctgagaaattaatcactccagctccagctgactaagaataactcatattactaatatcttataataatttaacttatcttgcaatatttactctaaggtatgtaacttcaattttgctactatttgaggcataaaatgccattacttctatttcaaatcactaattttatagagagtttcatgaataatagtaaaaacaagttattcttaata

SEQ ID NO: 843134 - DNA, 647 bp, Homo sapiens
ccctccaagtttctctctcgtcttccctgcacacccctgacctaaatatgaatgatttatttgagaaaattttttkggggggatagataacccatgaaattgtgggatgtttatactggctattttctcagcatttcatcttacctgaagttgataattcattgtttctagagttctccacaaatacaactttccattgacatgaaaaacacatgaaaccaaccaaaaggaactataaaatgtgaatttttactttggaagtgatgtctcctgtttatatcctttccagtatgtactcagacatggttactcaaatgagcattgttttttaagataaatgtacttacaaaaaatgactctgacctataataaaaatgtttaaaaaataatctgttttccatgtgcttaggatcgaagccacctacagtaatagcttttgttttcattaacaggggcgagttagttttgcaagtatttcttgagcatgtgttagagaactcattggaatgacctaagcaagactgccttataactataaaaaactgaaatatatttagtatagtagaaaataattgaatagcataactaaaaggtcatctttcttctatataatttgcttgaacagaaagacatcttgtaaaatggct

SEQ ID NO: 843135 - DNA, 627 bp, Homo sapiens
aaaataattatacaactcatcataatgtagaataagctcagtgggagccctgagcttactgtcctgcaactagacagtcccatctagggttggtgggagacagtgatagatcatcagacattagagtytcaaaaggagcacgcaacctagatcccttgcatgtgcagttcacaatagggtttgtgctccagtgagaatctaatggtaccgctggtgtgacaggaagtggagctcaggtggtaatgtgagcagtggggagtggatgaaaatacagatgaagcttcactggcttgcctacagctcacatcctgctgtgtggcctggttcctaacaggccactgtaccaagtctatggcccaggagttggggactcctgctctagacattcaacttagatatttttaaatatcttctatgtctccacttagtattttgcacatatggaacacagtcacatatgttttaatacccttttctgctaattctaatacctgtatcagttctgggtcagtttcaattgagtgactgaacttcactattggttgtattttcccatttcttgcatgttggtaatctttggttgtatgtcagatactgtgaattttaccttgttccatgcttgttatg

SEQ ID NO: 843136 - DNA, 302 bp, Homo sapiens
aacataagaaaactcagaagacatgggcagagaagcaaaatggccaggtacgatgtaaaatgtaacgaggctagctagcacatccaacctggtgctaaaagtcttttaaggacttgaagctagcttgtggaaagatcagctattaatgtttgccagaggcaacccttaggcctttagagaaaattgtagttttccaatgataagaaaattaccccatggttctrttcttgaattattttatcaattagctaagggaaaatacaatctcagacaatgcactgtacctgcactgcggctctatt

SEQ ID NO: 843137 - DNA, 579 bp, Homo sapiens
aaagatttatatatggatacatatacaaagcacatatttgcatataaggactacacccacagatccataaccgtaaagkctcaaagttactgactgttggcttttaaacttttaaacttttaaacacagatacatatctctgagtctagtctttatatgcaaatatatatgttttatatatgtatattttttgaatcattttatgtggtttatatttattcaatttttatatgcttggtttagaagcatataaaatgttcacttttcagaaaacattaggaattggttatattttagaaagaaacgtagaatatcacatttcaatttggactagcacttttcaagcggctgctaaccacatgtggatagtggctatcctatcagcatagagctacacgaagggcatatgactgcttattttactatgcttgcaatttctgtagctttgattttttttaaataaaatgttggccaggcacggtggttatgcctgtaatccgagcacttttggaggctgaggtgagctgattacctgagatcaggagttcgagaccaacctggccaacatggtgaaacccc

SEQ ID NO: 843138 - DNA, 646 bp, Homo sapiens
attcatacacaagttagtaaaatttgggcccagctgtactcccttcaacttgatgtggtcaaggggaaacaaaagggaggcccatacatacagctactgtaaatttatagggtatacaaattttccccttaggaataaggtgggccagtctctttggacctcccaaagaagaatcaagtctggttttcaaatgaaagcttcagagtatgaagcaatatttcacaaattattagagctttttaagggcatgccctctgcctagcagtactggataaacaggtatttagcagcaataaatcctaactcatctttttatatctcagggatcaccaagagtttcctgtttccagagactggcacatctttttgatgggcatgatacatgttatttgaatgactgattgaatgaataaatgagccaacaattgccatccctagataccaacaaatttccaactggcatctgcctgcttgttagtgtcatttccattaggtgtgacaagttgtaacctaaaataacacctcattgagacactagttcactttcaggactgctggggacaaggaagggagaagactacagctccttgcacaaccrgcctcccactcccattgtacctgctatacaattgttgctattttggct

SEQ ID NO: 843139 - DNA, 650 bp, Homo sapiens
gaggccacttcttttgtgtgctcccgtatgcatatataaataaactttagtttttatttctcctgctaatctgtcttttgtcagtttaatctgcaggcctccaagccaggaaccaaagtgagtacaagaakagttttccctccgcaacactttggcaatgaagatgggatggttgggactccccagtcactctgaaggctgcagctgagatctcaggatctcttgaccaagccagcaaaggtaaatttccttgctgatctctgctcagcatccagctgagtgcgtgcagtaagaacttgtctttgttcaaacaggaaaagttccctgatcctctcacagggcatgtgatgggggtgtggcttgcttcttcgtgccccactgctcaaacctctagggaaacttacagacgggcaggctgtggggctctgactcctcggcagtgtctaggggtggatgtttacagctcctgaagcctcagtgggcgtgtgtcagagggtgcttagaggtttgccgtctatccgtctacgggtggcttatgttaaccagctcaattagaccctctaccttgtcacaaggacagagggctgtttcctgagttcttgccttggtgtagtggaagaattggaccacacgtgggcttggagaatgag

SEQ ID NO: 843140 - DNA, 527 bp, Homo sapiens
attttatagttgtttattgttagtaattagaaatgcaattgatatttgaatattagccctgtgtccagagactgctaaattcacttattagttctagtagttatttgtttgtgtgtggattacatgaagttttctttttttttctttttttgagacggagtctggctctgttgcccaggctggagtgcagtggtgcgatctcagctcactgcaagctctgcctcccgggttcatgccattctcctgcctcagcctcccgagtagctgggactacaggtgcctgccaccacacccggctaattttttttgtatttttagtagagacggggtttcaccgtgttaaccaggatggtctcgatctcctgacctcatgatctgcgcacctcggcctcccaaagtgctgggattacaggcgtgagccaccrtgcagggcccacatggagttttctacacacaagcacgtcatttgtgaataatgatagtttcacttctttttaattttagtgtgtcatttctttttctggcct

SEQ ID NO: 843141 - DNA, 343 bp, Homo sapiens
atttgaaccaaaaaaaaaaaaaatcgtgtatgcatttatgttgtttcttrctatttacctttcaatcctttgcactgactccaatgaattgacatcagaaatctgtgctggagtcaacaatgaaaggggatgtcataatatatattggagatgggaggaattcaggtttgtgaaattcagtttcagaattattcatgggaaaatagttttctggacactgattctaaaattctttctaaaaagttgggtcttaagtaagctaagtcatatttaccatatcttttagattcaaggaattttgttgttcaaataagttggtcatatcaccgctccatgtggcaaa

SEQ ID NO: 843142 - DNA, 574 bp, Homo sapiens
cacgtggcagacagaataatggccccaaagatgtccacatcctaatccccatgtgggagacagaataatggtcccaaagatacccatgtcctamtcctcatgtgatacagagaataatggtcccaaagatgtccatggcctaatactaggtagcagacagaataatggccccaaggatgtctacatcctaatccccatgtgggttgacagagtaagcacccccttccccccctcaaaaaaatatccacatcctaattctagaaatctgtaaaaacctgtcatggctaaaaagattttgcagatgtgattagtttaagaatcatgagatgaaatgaccctggattatccagctgggtctaagatcatcacaggatctttgtaagagggaggcaggagtgccagagccagaggaggtgatgttaggacaaaagcaaaggtcagagtcacagagaaattagaagatgctgcactactggctctgaagttcaaggaagggtccaggagccaaggaatactctagaaacattcccctagaagcaggaaatggcaaggaaactgattctcccccagaact

SEQ ID NO: 843143 - DNA, 419 bp, Homo sapiens
acccttagcccactggctaccaccctggtccacatctttccccctaacagcgacagacgtaaaaaccacagctcctcccaggacactgcctcaatgtggccccatttctcttcatcagatctctcccttcaatgctaataagtctgtctccaactccgcgtttcttttggggaaaaaaaaaggagaagaaggctgggcacagttgctcacacctgtcatcgcagaactttgggaggccgaggcgggtggatcacaaggtcaggagatcgagaccagcctggccagcagggtgaaattccgyctctactaaaaaacccaaaaaattagccggccatggtggcagacgcctatgatcccagctacttgggaggctgaggcaggagaatcgcttgaaaccaggcggcagaggttgcagtgag

SEQ ID NO: 843144 - DNA, 419 bp, Homo sapiens
acccttagcccactggctaccaccctggtccacatctttccccctaacagcgacagacgtaaaaaccacagctcctcccaggacactgcctcaatgtggccccatttctcttcatcagatctctcccttcaatgctaataagtctgtctccaactccgcgtttcttttggggaaaaaaaaaggagaagaaggctgggcacagttgctcacacctgtcatcgcagaactttgggaggccgaggcgggtggatcacaaggtcaggagatcgagaccagcctggccagcagggtgaaattccgtctctactaaaaaacccaaaaaattagccggccatggtggcagacrcctatgatcccagctacttgggaggctgaggcaggagaatcgcttgaaaccaggcggcagaggttgcagtgag

SEQ ID NO: 843145 - DNA, 598 bp, Homo sapiens
attatgttaaattctaattatttatcagagtgttttattaccctgattacctcatgtttttgagaggagaaattacagcaatccatctctgtatctctgtctagtacagtatcctggcaccaactagatgctcaacaaagatttgcttcatgaatgctgcagcaattattagtaatagaaataacagctcatatttattaagtactctccatgctccagacgctgtaatgagtactttgcgtacatgatctgagttcatatatcagatccagtacattttctcctcccactcagtttttttaattaggtcacaactccttcatttcacaaggcactgtacattcaacagtagattagggatcagagacaggctgatgggagaaatatttgggtccctaaaccacacaaactctgccttacaattaagcaagttccatctacttgccctatggcagccctgtgctctacacaraagaaaagcttaccaaattcttactagagaaaagataaaaataaagtctagtcacttcagcagaattctgcttcatctttgtcactgggcaaaattaggggcatgtcctgtgttattggagttgct

SEQ ID NO: 843146 - DNA, 634 bp, Homo sapiens
agtattccaaaatcactagggataactacattttagccctgggacactgtgagaacacaaatgctgctctgacccctgactgctatccctggttttatcaaacctgacttctttgaaaatatttgggaaaaatgaatggctaaagaatttttcagtccctttttctcctatgaccttctttattacttttgacgcacagtagtttttgtgtcatttgctccattcatgttgaggactataagcatgcgagacagagggtcttagatgcagacaataaattttcaagctgtccttttcagctttgcaagtgaaagagggatgcagggctgaatggaggaggatgaggagctcgagtgaactgtcagtttcaagaaggtcattgagtatgttcaggctgccaagttcctgggattgttcccaaactcccacagtgctgcctcaatctggctacagactctgtgccatagactaggatctgtggctcattccatggaactaagccaggtttctctggggtctcagatgcttccatgggtgtcaactgggtrcctcaataagtcacattcttgccttcagttttcacatttgtattttctggtcagaactaacaattaaaatagtttattatatttag

SEQ ID NO: 843147 - DNA, 611 bp, Homo sapiens
taacttaaacaaggattttctaaaggttcatttctacattttgaaatatttgttgagtatcttttatattccaggtactgggttcaacactaggaatataatagtaaagaaaacagactctatgattaccracctcatggagaaaacatgctagtgatgaaaggcagatcatgatcaaacaaaagaacaatataaataaatatacttgagtgctgtgaggaaaactctaggttactgatgggaacacccttcttagagaaaatttgtttttcaagggtatggaaaaggttccctgatgaagtgacatttgagttgatatctgaagggagagtaagagttaattaaggcaaagctatgagcccccagcaaaaggaacagaatgtgcaaaggcccagatgcaggaaggagcatggtgctttcaaaaaatgggaaggagacggggcgcagtggctcatgcctgtaatcccagcactttgggaggccgaggtgggtggatcatttgaggtcaggagttcaagaccagcctgaccaacatggtgaaatcctgtctctactaaaaatatatacaaattagccgggtgtggtggtgcacgcctgtactcccagctact

SEQ ID NO: 843148 - DNA, 624 bp, Homo sapiens
aatatttatttgtacttaattctatttctatgctttctattctgatccaaggatctattggtctcaatatgcaccatacagattaaatacttagggtgtaccrtattgcatttctttttcaaaatactctgttgtaatcctatatcttctttcaaatgagctataaaattatgttgacattcccctagcctctaaaaatctatatttgtatgtgtattgggatttcccgaaacttaaagattaatgttaggaaattaaatggaaatctatgtaattccatctttctacccaagaacttgatatatctcttcattaattaagtctttttatttttttaagtctttctttatgtcttccagttaagcttatatttttcttcataaaaattttactctttttattaagtttatttctagatattttacttttaggtccttatgtaaatggcacaatggaactcagaattaagaaactaacacaaaactgcacaactacatggaaactgaacaacctgctcctaaatggctactgggtaaataatgaaattaaggcagaaataaagatgttctttgaaaccaatgagaacaaagacacaacataccagaatctctgggacacatttaa

SEQ ID NO: 843149 - DNA, 634 bp, Homo sapiens
gaagtagcattaactttgggatcctgaggcaggcaggatcatttgaggtcaggagttcgagaccagcctgatcaacgtggtgaaaccctgtttctactaaaaatacaaaaaaaaaattagtcaggcatgctggcatgtgcctgtagtcccagctacttgggaggctgaggcaggagaatcacttgagccagtgaggcagaggttgcagtgagccaagatcacgccattgcactccagcctaggcaacagagcaagactctgtatcaaaaaaaaaaaaaaaaaaagtgatgttaaaagaaaaagtctctccaagacctctgatgccaacgcctgcctggctttctgcattaactcctaaacggctcctgataggtttgcccacacctgagtttgtcactcttttgtagatggacaaggggtcagcctaacttcatggtagtgttccgtcttccatcatgcctgctcttcacttccttctcctccctgttgacccagttgctgaggattgaagggtatcctagcactctagacagttaggcccaagtggagtttgaggctagagctgggttsggggcacagagcaggcccctgggaggaccagcacatgactggtagaacaagctggaggcccagt

SEQ ID NO: 843150 - DNA, 613 bp, Homo sapiens
aggaacaatgtcccagggtgggtgtacagcccctgcaatattaggtgtaatatcatcgtctgmcaacatggatattgaggacactgtcacgggagggtgtacacctccttcgatattgggagtaatatcaccctctccccatggattgtaggaaatatatcgaaagggttttacaatttgtgccatattgggagtaatatcatcctctccccacttagatattaggaactatatcacgggacgctgtacagttcttgtgatattgggagtaatatcatcctctcccatcatagatattaagaacactatcacaggtgtacaccccctgtgatattgagagtaatgctctccccttctggctattaggaacaatatcacagaagggtgcacagttcctgcgatgttggcagtaatatcacaccctccccgccccgatatcagaaataataatactatttattaataattaataattgattttaattaattctaattaagttgtaattatgaataatcaacacattattagttatttattattaataatcattgttacaataacattgataattattaattaatattgattataaatattaataaacatgacaat

SEQ ID NO: 843151 - DNA, 613 bp, Homo sapiens
aggaacaatgtcccagggtgggtgtacagcccctgcaatattaggtgtaatatcatcgtctgacaacatggatattgaggacactgtcacgggagggtrtacacctccttcgatattgggagtaatatcaccctctccccatggattgtaggaaatatatcgaaagggttttacaatttgtgccatattgggagtaatatcatcctctccccacttagatattaggaactatatcacgggacgctgtacagttcttgtgatattgggagtaatatcatcctctcccatcatagatattaagaacactatcacaggtgtacaccccctgtgatattgagagtaatgctctccccttctggctattaggaacaatatcacagaagggtgcacagttcctgcgatgttggcagtaatatcacaccctccccgccccgatatcagaaataataatactatttattaataattaataattgattttaattaattctaattaagttgtaattatgaataatcaacacattattagttatttattattaataatcattgttacaataacattgataattattaattaatattgattataaatattaataaacatgacaat

SEQ ID NO: 843152 - DNA, 588 bp, Homo sapiens
gggtacgcgtacgggcatgtggacctgccgggctgcctgcaaaaggcttgattgcataatggcatttagaaaatggcagttgtcttttcttcaaaggccttcaggatgatgaattggggcttattgaaatggccttaaatcaaacctatgcacaacagcttgctcagactcatgcagagtggatttctaaggggctgatagtagcagctccttagcactggctgtcttctgggcttaggggctgtaccgggaaccagagtcacagggagagcttggaaacaaaactacctcacaagacagagaatgtgaaatccctgtgtatttttggggaccccaaggccctgaggggaggaggtattgacccaaaggtacccagtaagtcagtcaggaagccgtctttggagccctgggctagggttcttcctcctgcttaggactctagtaatagctatgttcccatggggccactctggggtctgcctctccacctgcaggcgcttactgtctggcagcaaycttgaacttgcatgaccctgaaagtaaatgtatccttaaattttacaccctcagtgccttgcttgtctcacc

SEQ ID NO: 843153 - DNA, 600 bp, Homo sapiens
acgaaaaaaaagcaattgaattgttttgtagttggaggcatgggcaagggtggtcctcaggcagtgaattccgccgagggtgggctgagggctagagccgagcctcaggtgtgtcttctgttccctgtgctcccctgcacagcggcctccctcccgggctctgggcaagtcgcaggaggggcagggtgggaggggctgccgcagctgttcacttgggcgggacgtcagaggacgcggacaccagcttcccatcgcgggtctcgatcttcttcacaaccggggccctggtggagctggtgcggctgaaggagctgaagcccgcgccagagccagagctggagcccaggccgtagctgaggccggggcttgtgaggcccccataggccgagctcagaccacctgcaaaaccgctggtggtcttcatatgaatactcatgttctgcatcccagactctagctggctctcttcgccctccagcagcttcccgtaggtggcgatctcratgtccagggctagcttgacgttcatcagctcctggtactcacgcagccgcctcgccatgtcctgcttggcccgctgcagggtggcctccagctcgg

SEQ ID NO: 843154 - DNA, 613 bp, Homo sapiens
tctccaaagtggctatataattttgcattcccaccggcagtgtgtaagagtctcagctgctcattatccccaccaccacttggtattttcatctttaaaaaactagaccaggcacggtggctcatgcctgtaatcccagtgctttggaggccgtggcaggtgaatcacttgaggtcaggagttcgagaccagcctggccaacatggtgaaaccccgtctctactaaaaatacaaaaattagcctggtgtggtggcaggcgtctgtaatctcagctactcgggagactgaggcaggagaatcaaatcacttgaaactgggaggtggagtttgcagtgagctgagattgtgccgctgcactccagcctgggtgacagagtgagacttcatctcaaaaaataataataataataataataaactttattttagaacagtttcggatttacaaaaaaattcaacggagttaccccatcccccaccccagtttcccttattattaacgtytttaatgtggtgcatttgttacaactgataaactgatattgatatattattattaactcacgtctatagcttgcatttgtgcacactctttgtgttttacagttctat

SEQ ID NO: 843155 - DNA, 622 bp, Homo sapiens
atttgtgcacactctttgtgttytacagttctatgaattttgacaatgtataacatatatccaccattattgtataatatagaatagtttctctgccctaaaaaatctcctgttatatacctgttcatccctccctccagcctgaacctctagcaaccactgatcttttcactctctttaatgttttgccttttccaaaatgtcatatagttgaaattttacagtatgtagcttttaaggctggcttctttcacttgacaatatgtatttaagatttttccatgtattatcatggcttgataactcatttctttttattgctgaataatattcaattgtgtggatagacacataggctgtaccacagtttgtttatccattcacctactgaaggacatcttggttacttccaagttttggcaattatgaataaagctgctataagtgtttgtaagcaggtttttgtgtggatataagttttcaactcatttgggtaaataccgaggagtgcaattgctggatcatatggtaaaactatgtttagctttgtaagaaactgcctgactgtcttccaaagtggctatatcattttgcactgccatcagcaataaatgagcattcc

SEQ ID NO: 843156 - DNA, 658 bp, Homo sapiens
gagttcactctgtgttgcacagttctgtgggttttgacaaatgtataatgcattgtatccaccaatacagaatagtttcattgccctaacaatccccagtggcccacctacttaactctccctyttttcctccaagcccttggcaaccactaatttttttagtctttatgtagtattttccaaaatgtcataattagcactatacagtctgtagccttttctgattggcttctttcaattagcaatatacatttaaggttcctccatggtttttttttttttttggtggttcgatagctcattttttttagtggtgaataataatattgcattgtttgtatgtgtcacaggtcatcttggttgcttccaagttttggcaattatgagcaaagctgctataaacatttttgtgtaggcttttgcttgtaaataaactttcaaatcatttggataaataccaaggagtgttattgctggatcatatggtaaaagtatgtttagttttgtaaataactgccagactgtcttccaaactggttgtatcattttgcattaccagcagcaatgtacgagaattcctgttgttccacatcctcatcagcatttggtattgtcaatgttttggaatttagccactgtaatagatgaaagtggtatt

SEQ ID NO: 843157 - DNA, 621 bp, Homo sapiens
atcctcgatgaatgtcttcatttattcatgacaccacttctgaatatatttatgtgccagacgctgaagtttactaatattatggtgcccagtaaatacttgtttttactaatattttttatggcaataaaatgactttttcaggattatgtgatttaaaagattgacccttttggcaaaatacgtattcatgataggaaatatatacaaataaaaacaacatagttcacttaaacctcccaccagagcccagggttcactgttaccattctgaagtgactatggaatttcctagaagtggatatgccatatttttttaaccactcctattggatatttgttttttatttttttgagatggggtcccactctgcagtgtacaatatcatagttcactgtaacgtgtatctcctgggctcaagcgatcctcccacctcagcctcctgagtagctagtcttcagtagctagactataggtgggcgccaccacasctggctttttaaaaaattttttaaaaacttttttatgaacacgaggtctcactatgttgcccaggctgccctcaaattcctgggctcaagtgattctcccaccttggccttccgaagtgcagggattat

SEQ ID NO: 843158 - DNA, 621 bp, Homo sapiens
atcctcgatgaatgtcttcatttattcatgacaccacttctgaatatatttatgtgccagacgctgaagtttactaatattatggtgcccagtaaatacttgtttttactaatattttttatggcaataaaatgactttttcaggattatgtgatttaaaagattgacccttttggcaaaatacgtattcatgataggaaatatatacaaataaaaacaacatagttcacttaaacctcccaccagagcccagggttcactgttaccattctgaagtgactatggaatttcctagaagtggatatgccatatttttttaaccactcctattggatatttgttttttatttttttgagatggggtcccactctgcagtgtacaatatcatagttcactgtaacgtgtatctcctgggctcaagcgatcctcccacctcagcctcctgagtagctagtcttcagtagctagactataggtgggcgccaccacacctggctttttaaaaaattttttaaaaamttttttatgaacacgaggtctcactatgttgcccaggctgccctcaaattcctgggctcaagtgattctcccaccttggccttccgaagtgcagggattat

SEQ ID NO: 843159 - DNA, 621 bp, Homo sapiens
atcctcgatgaatgtcttcatttattcatgacaccacttctgaatatatttatgtgccagacgctgaagtttactaatattatggtgcccagtaaatacttgtttttactaatattttttatggcaataaaatgactttttcaggattatgtgatttaaaagattgacccttttggcaaaatacgtattcatgataggaaatatatacaaataaaaacaacatagttcacttaaacctcccaccagagcccagggttcactgttaccattctgaagtgactatggaatttcctagaagtggatatgccatatttttttaaccactcctattggatatttgttttttatttttttgagatggggtcccactctgcagtgtacaatatcatagttcactgtaacgtgtatctcctgggctcaagcgatcctcccacctcagcctcctgagtagctagtcttcagtagctagactataggtgggcgccaccacacctggctttttaaaaaattttttaaaaacttttttatgaacacgaggtctcactatgttgcccaggctgccctcaaaytcctgggctcaagtgattctcccaccttggccttccgaagtgcagggattat

SEQ ID NO: 843160 - DNA, 608 bp, Homo sapiens
aatacatagtacaaacagcaactctttctgatatgcttgcatttaaaatcaggctttttctcccttttggaaaaacacagtccttgtttgctttagggaagartaaaggtcagtgcgctgcattgcattaatttcgaagggaaagatgagaagacatcttgaaaggaatggctggctttctagagaatagtagaggcttaataggtgtcatagaaaaaccagggttggacagtggtagtaaaacggcaaaacagattttattcagaaaaactactgcagtaagaggagagagacctcggtacagaactgctccactgcgaatacaaagaaaagtaggaattgatggcgggggagccggatgtcagtggatggaaaattattacgaggaaacacaggggtgtgcattcttgctgaaggcaggccagagttatcagacatcacctgagggatggagggggatgtggaacctaatcggctgtctagggtgatcagatactgaagttgggggattctggtcaaatcaatttagcaggattcttggtaaaactgggcgatgcaaagacagatgcgttgagtacaaagtccaggctttattgggaagaggattt

SEQ ID NO: 843161 - DNA, 594 bp, Homo sapiens
atcagatactgaagttgggggattctggtcaaatcaatttagcaggattcttggtaaaactgggcgatgcaaagacagatgcgttgagtacaaagtccaggcyttattgggaagaggatttcagcggagcccgagtagagtttggtctagggagactctgtcactgggaggacgagcgagccgctcggaagtgcgctgggttcccttagcggccagtgggttctggtgagaagggcaacagcgggaggaggcgccggtgcggagcgggaggccgggggcggggctgcggggctgcggggcgggcccgttgtgggtcggcccagcgcgtattcgagtagagggcgagcccgtcccgcccctcgtcgggcgcttcccagatctgcttgagtctatggaggaaaaactccgcggggtccgcgattcccatggccgcagccgcctgcggcaccaaggccatggccctcttcaagcgcaccttggtgctgagtcccgccgcggcgcccaggggcccgggcgcaggcaccgccccgcggggctgctgcttgcctcctgccgcctggccctgcaaggactggcctcggggagagggcggca

SEQ ID NO: 843162 - DNA, 506 bp, Homo sapiens
actcccctcctgaaactctcctgttcagacacacacctcagtgaagtgatgattcttactgaggctgccctagtcacgatcaccccatttctttgcctcctggcttcctatatgcacatcacctgcgttgtcctgagggtcccatccacaaagggaagatggaaagccttctccacctgtggctcccacctggctgtggttctcctcttctatggcaccatcatgtctccatatttcagaacttcatcctcccactcagctcagagagatatagcagctgctgtgaggttcacagtggtgactcccgtgatgaatcctttgatctacagcctgaggaacaaggacataaaaggggctcttgtaaaagtggttgctgtgaaatttttttctgttcaataatggtataggcttaaraaagtcctagaaggagctaatttctgagataatcgtttattttttctactgtgtgaaacttagcattgtttgtttgtttgtttgttttgaga

SEQ ID NO: 843163 - DNA, 620 bp, Homo sapiens
gccctgctcttgtgaggaggggtcacctaggcccaygctggccctgctcttgtgaggaggggtcacctaggcccacgcaggccctgctcttgtgaggaggggtcacctaggcccacgcaggccctgctcttgtgaggaggggtcacctaggcccacgcaggccctgctcttgtgaggaggggtcacctaggcccacgctggccctgctcttgggcctgcccagctgagccggctcctgagagaagcgctttctgagtcgtttcgaggacagccctggccggtctttccaggctgtgaggggctcctgggactgctgtctcctcttatcctgtacctctgccatgtgtctctgtgtgtgtgtgtgtgtgtgtgtgtgtgtgtgtgtgtgtgtataaattatcctggaggaaaggttaaggtgacacatggagacagagtgtcaccgttatttccgcaggtcctctctgatgacatgaagaagctgaaggcccgaatggtaatgctcctccctacttctgctcaggggttgggggcctgggtctcagcgtgtgacactgaggacactgtgggacacctgggaccctggagggacaaggatccggccctttggtgccaactct

SEQ ID NO: 843164 - DNA, 620 bp, Homo sapiens
gccctgctcttgtgaggaggggtcacctaggcccatgcwggccctgctcttgtgaggaggggtcacctaggcccacgcaggccctgctcttgtgaggaggggtcacctaggcccacgcaggccctgctcttgtgaggaggggtcacctaggcccacgcaggccctgctcttgtgaggaggggtcacctaggcccacgctggccctgctcttgggcctgcccagctgagccggctcctgagagaagcgctttctgagtcgtttcgaggacagccctggccggtctttccaggctgtgaggggctcctgggactgctgtctcctcttatcctgtacctctgccatgtgtctctgtgtgtgtgtgtgtgtgtgtgtgtgtgtgtgtgtgtgtgtataaattatcctggaggaaaggttaaggtgacacatggagacagagtgtcaccgttatttccgcaggtcctctctgatgacatgaagaagctgaaggcccgaatggtaatgctcctccctacttctgctcaggggttgggggcctgggtctcagcgtgtgacactgaggacactgtgggacacctgggaccctggagggacaaggatccggccctttggtgccaactct

SEQ ID NO: 843165 - DNA, 605 bp, Homo sapiens
tcttgtgaggaggggtcacctaggcccatgctggccctgctcttgtgaggaggggtcacctaggcccacgcaggccctgctcttgtgaggaggggtcacctaggcccacgcwggccctgctcttgtgaggaggggtcacctaggcccacgcaggccctgctcttgtgaggaggggtcacctaggcccacgctggccctgctcttgggcctgcccagctgagccggctcctgagagaagcgctttctgagtcgtttcgaggacagccctggccggtctttccaggctgtgaggggctcctgggactgctgtctcctcttatcctgtacctctgccatgtgtctctgtgtgtgtgtgtgtgtgtgtgtgtgtgtgtgtgtgtgtgtataaattatcctggaggaaaggttaaggtgacacatggagacagagtgtcaccgttatttccgcaggtcctctctgatgacatgaagaagctgaaggcccgaatggtaatgctcctccctacttctgctcaggggttgggggcctgggtctcagcgtgtgacactgaggacactgtgggacacctgggaccctggagggacaaggatccggccctttggtg

SEQ ID NO: 843166 - DNA, 564 bp, Homo sapiens
agaggtgcaatttaagctaaacatccccttaggggaccaattaacagtgattccataggaatcgttgcgcagcacctctgcctgttctgcaatgcaatcttcctaaacaagtacgttcattttttctggccaggttcaattttgtttacaaataggtttttaagggcggtatgcctcaattataggagcagattatggtaaatactgagatcagaaagcatgtgtaactgtgtcatagagtgattacatctaggcattattgccagccaaggttgataaatatgcccaataagtataattgttctgtgtgtcagcccttgttgaaggaatactcacagcagtggtgataactgctatcatagctaccatgaaattactcattgtgactggttgtcccgctttcctcaggttttcttctgccatctgtgacagcttcttgatctgtccccaggtgggtggctgtgttcgacaggtgttgctcgtgacagttggggtcctcctcagcgtcagtctcaacatggctgcaactgggscgtcctcgggatcctcccggagtctcttcct

SEQ ID NO: 843167 - DNA, 602 bp, Homo sapiens
ttgtccccttttaaacttaaactagaccttcctaaaagtaatcctattscccctctggcacgggtccacagactcctgttgagacctttcgcgggtgttcccctggcagaaagctcacggctttcgtgcagcatcaatctactgcggcactaccggctgcggcgggggacagacattgtacgggggtgagggaagggcctcagctggaaatgccctgatttagaaccgggcccgggacgggcacctcatggcatttcccgaaattgggtttccagctttatcaaacttagagtgacactgattagcccaatgttttccttttttacattttggacatatttcaggctcagcagttttctttgatattttctacattcttttttagtatgaatatcttgtttaaattctttgagtaatttaaaagggaaaggctcaaatgtagctataatatttccctgttgatctggggggtgtattctaacagggaactgtcaagcctctaaatcaccccctcgtctagcttgctgaattcctgcctgaatagaactaagagaggtcgctcgaggtgctgctcagtcactggagcaactacttttcgccca

SEQ ID NO: 843168 - DNA, 602 bp, Homo sapiens
ttgtccccttttaaacttaaactagaccttcctaaaagtaatcctattccccckctggcacgggtccacagactcctgttgagacctttcgcgggtgttcccctggcagaaagctcacggctttcgtgcagcatcaatctactgcggcactaccggctgcggcgggggacagacattgtacgggggtgagggaagggcctcagctggaaatgccctgatttagaaccgggcccgggacgggcacctcatggcatttcccgaaattgggtttccagctttatcaaacttagagtgacactgattagcccaatgttttccttttttacattttggacatatttcaggctcagcagttttctttgatattttctacattcttttttagtatgaatatcttgtttaaattctttgagtaatttaaaagggaaaggctcaaatgtagctataatatttccctgttgatctggggggtgtattctaacagggaactgtcaagcctctaaatcaccccctcgtctagcttgctgaattcctgcctgaatagaactaagagaggtcgctcgaggtgctgctcagtcactggagcaactacttttcgccca

SEQ ID NO: 843169 - DNA, 639 bp, Homo sapiens
catctttgtaaactgaggatgtatgtagcctcaggatcctgtgatgattgcattatctgcacaaattgtttgtagagcatgtgtgtttgaacaatatgaaatctgggcatccaaaaggaacaggatggctgcaattttcagggaacaaaggagataaccattgggcctgactgcctgcggggccagacaaaacagagtcatatttctcttcttacaaaagtgaataggagaaatttcgctgaattctttttctcagcaaggaagagccctgagaaagagaatgcattcccagggataggtctctaaaatggccactctgggaatgtgtgtcttatacagttgtaggtatgggatgaaattagccctggtctcccgtagcacccccaggcctactaggattagaaaattcctgcctagtaaattttagtcagactggttgtctgttctcaaaccctgtctcctgataagatgttatcaacaataatgcgtgccctgtgggacatgacacttcatcagcatttctaatttcrccctagtccagtgatctcgctctgcccccatttgccttgtgatattttattgcccttgaagcttgtgatctctgtgacccacaccctatttgtacacccctcccctttt

SEQ ID NO: 843170 - DNA, 627 bp, Homo sapiens
tttctaaaagtttgatctatttaaaaatgctaagatcttgattattggctctctaaatcctgcagttcaggacattttgaacaagctgcagaattctaaragacagaatacgtattgagaagaatataaaatagccaaaagccaatgggttatccttatgccagtcatagtataaagtattcaaaaacacttgtttaatttatgttccagctaatatttgacagttattacatagaaacacataataatatgatttattttatatgtgaaaagataactttacaactttatgaacagcaggtaaattgaggaaagatgctactagcagtaaatatgctcacagtcagactgaaacctgagtctcctttgaaaattgattatgggctgggttcagtggctcacacctgtaatcccagcactttgggaaggtgaggtgggcaaatcacttgagcccaggagtttgagaccagcctgggcaacacagggagacccccttctataaaaaataaaaagagaagaaaagaaaaaagaaaattaattatggatagatatcaaattggaaattaccattgattaaatggattgttactgttgttgtcattgttttctcaattaattgcattaata

SEQ ID NO: 843171 - DNA, 602 bp, Homo sapiens
ggcaaattatcagttctttttattataaataaattaaaaatgcaaatgtttaggtcaagtgttattctctgaaaatgcacaaagagaaatgagccaagagaaaaataactaataacaaataaatatatttctgacaccaagacaagtccaagagaatttaaaaagtaattataaatattttatggtaatgtatttcaaatatacatgctgcagattccacgatttatgtcatggggatggatcaggagtccttgaaacctggcacttattaataaatgttgtttctaattttctatcactgcaaggtactcttatagacaccatgtgaacaaatcaaatgttacatctctgggattataggctcataaaaaatcaacacctagggcataacttgaatcacagtaacttcatgcatttcaaatgggataaagtcagccaagaagtgtttaggtttgcagtcgattgctcaagattatggtatcaaccaactctggaattaacttctgggatgaagagtaagaagaaagtaaaatcactccwcataggctcaaaggagacttttgttgaagtgggtttccccatggtctttgaagtgggtgagg

SEQ ID NO: 843172 - DNA, 529 bp, Homo sapiens
gctataaagatactctaaaacgtgggagcaactttggaactgggtaacrggcagaagctgaaacagtttgaagggctcagaagaagacaggaagatgtgagaaattttggaacttcctagagacttgttgaatggctttgacctaaatgctgacaatgatatgggcaatgaaatccaggtggaagtggtctcaggtggagatgaggaacttgttggaaaccggaataaaggtgactcttgctatgtttttttttgtttgtttgtttgtttttgagtactcaggctggagtgcaatggcgcgatctcagctcactgcaagctccgcctcccgggttcacgccattctcctgcctcagcctcccgagtagctgggattacaggcacccgccaccacgcctggctaattttttgtatttttagtagagacgggctttcaccatgttagccaggatggtctcaatctcctgaccttgtgatccgcctgccttggcctcccaaagtgctgggattacaggcgtgagtcaccgcg

SEQ ID NO: 843173 - DNA, 613 bp, Homo sapiens
ttgggaatatagaatgtcttaaaagttgaatctcaataaatcagttttatgcagtgttctgatatgttatactcattttgcttctaaaaccttctagaatcctgtataagactagttaaccaattgggaacaaygttagcaaatatttccacacacacacacacacacacacacacgcacagatggccagagttttgcttaaacatctttctattgcagtcagaactattccttcatagagaaactaatgtgtatatttttaataacaggtttatattattgaaatgactgtcacacatgctgacccagaggctgtgaggacaatagcagtcctacagttgtacagaatttaaaaaggaatgaaatattttatatcaaatatgaacttggttgtacttgttgcaatagatggacttaatttaaagccaaaagcatatttcaattcccttatttcctaacacaaagtaaaagaggcagatggatactgtcatataagaacaagtttgaccaaaatggtcttaactggaaggttaatgataataaattaaattaaatgtaaacaaccaaatgaaactgaatgttctgccagaagcagcaaaaatatatctcagag

SEQ ID NO: 843174 - DNA, 544 bp, Homo sapiens
acatcctcaacaacacttgttattatctgtcttttttattatagttattctggtatttgtgaagtttcatctcattaygattgtgatttgcatttccctaatggctaataacagtcagcatactttcgtgtgcctgttggccatttgtatatcttccttggcgtaaagtctttcaaattacttgctcattttttaattatttgtcttttgattttttggttgtaacagttccgtatatattatgcataagtccttatcagatacacaatgtgaaaatattttagtcctgctatacttggttttcccctttataagtggtgtattttgtagatcaaaagcctttaattttaatgaagtccaatttaacaatatttttcttgtgttgcttgtgttttaagtgtcatattgtttgttaagtgtcataggttttttaatatgaatgagtgtgggattttctccaaagatttttctacaaccattgtcatgattatcctttttgatcctttattttattaatataaatattttattaattgattctcca

SEQ ID NO: 843175 - DNA, 607 bp, Homo sapiens
ggtagatccactgacaacgtgcaccatgcacctggaaaaactgcagacactcaatgccagctcatgaaagcagccagarggggagctgtaccctgtaaagacacaggggcagagctgcctaaggtcatgggcgcctacctcttgcatcagtgagacctcgatgtgagacatggagaaaaaaggatcattttggagctttaagatttgactgctctgctggattttggatttctatggggcctgtagccccttcattttgccaatttttcccatctggaatagctgtatttacacaatgcctgtatctccattgtatctaggaagtaactaacttgcttttgattttacaggctcataggcagaagggacttgccttgtcttagatgagactttggactgtggacttttgagttaatgctgaaatgagttaagattttggaggactgttgggaaagcatgattggttttgaaatgtgaggatgagatttgggaggggccatgggtggaatattatttgctgtgtccccactcaaatctcatccagaattttagctctcacaatccccatgtgttgtgggaggggcccagtgggaagtaattgaatctt

SEQ ID NO: 843176 - DNA, 609 bp, Homo sapiens
ccttcacaaagttatcaaatgagatactggattatttgaatatggtgacagagggaaacattttgatcggctgatcagctgaaaacaaactcattacactcccacctcaccaactagtttaaagtcaggaaaaaaaaaaggttattagcaactggaaactttttcacaaaaatatatgcctattgtcttggtgcggtggctcattcctgcaatcccagcactttgggaggctaaggcaggagggttgctggagcctaggagtttgagacaagcctgggcaacatagtaagacctggtccctacaaaaaaattgaaaaatttgccaggtgtggtggtgtgtgcctgtagtcccagctactcaggaggctgagcctgcaaggaggctgagcctgcaagatggaggctgcagtgagtcataattgtgccagtgaactccagcctgggtgacagagctgtcatatacatatatacatataatattatataattttataatatawtaatatagatccataataatatagatctatattaaaacatcaatattaaaacaataatgtatattgactcagttgttatcaaattcaacttacatagtaccttataaat

SEQ ID NO: 843177 - DNA, 528 bp, Homo sapiens
aagcaggaaagaagctgaagtgaggttaaagtacaggtttaaaaagtatgcacayatatattttgttaactgtcctcatttgttcagagccaaacaggctgttagggagaaaactacaaaagaagggaaacacaaaagcacttatcttcaacagaaaataagtcaatccctgataattatttcgtgatttacacagaacaatgcaggcatatagatacatgttccctttaatgtcgggtcttcgcaaaagctatgtgtttatactgccacaaaagtgacggtagccatgccacattaatcacgttttgtttaccagctaaatcctaatggcctttgagaaatggctcagtaagagcaggctctccttagggccacctctaatcaagtgattagactgattgggaaaatggcatgacccatcaaataaacccttggtatcacgtgtttgttttttaatcactcattgccaacacgagattattatttttcaattgtacatttttccctatgattatgtctgtcaaggac

SEQ ID NO: 843178 - DNA, 608 bp, Homo sapiens
atagcatgaatggatatttgcacgttcatgttcatagcagcactattcacaacagccaaaacgtgaaagcaatctaagtgcccattgatagattactggatagacaaaatgtggtatwtacatacaatgaaatagtatccagccttaaaaaggaaggaagttctggcatatgctataacatggatgaaccttggagacattatgctgagtgaataaatcatcataaaagtataaatactgtatgattccacttacatgagggacctagagtagtcaaattcatagagaaaaagtagaaaggtggtttccagaaactatggggagggttgaatggagagttactatttaatggatacagagtttcagttttgtaagattaaaaaaaaattctgaagatgggtggtggtaatagttgcacaaaattttaaaggtatccctgctactcaggaggctgaggtgggaggatcccttgagcccgggaattggaggctgcagtgagctgtgatggcaccactgcacttcagcctgggcaacagagtgagatcctgtttctaaaacagaaatatatatatattaaatgtactaatgccactatgcacttaaaaatg

SEQ ID NO: 843179 - DNA, 659 bp, Homo sapiens
aatgacaaattttttagttgtttgtcacatattacaaccattctatatgttattcattttccaaatataaaagagttaccattactagatggaaaattatattcagaaatgcagacaygtccttggtaggaaaaagatagaaacgcacaacgagcttcactcactaaaccaaatttcttaaatttcaaaaagacccattattcacaggtcaaatttgtcccttgatcagtatacagaaaacaataaggtttagtcataaacagtaaagcagcatgtctggaaggaaagagactagaaatgaaacaaaatgagatatgggccgtctaaggctaccccagtcctcactttcaccccccttcacctagacgagtacatgctgaacaagcaccaaaaacaaccaataaatgaaaggaaactcaaaggtcacttggggtcattattttcacatacctttgaataatgagagcatcacatgtcagccagaggagaacaaaatgtcacattctccagctaaaggttggccttggtcaaaggtcacagaagggaggccaggaaataacctaagaggttaggctgggtgcacaaagaaaggtcaccaaatgtcaatgaaagcatgcagctgtttggagatgaaacaactgaggcacccttttgtgctg

SEQ ID NO: 843180 - DNA, 564 bp, Homo sapiens
tctgtctcccaggctggagtgcagtggtgcaatctcggctcactgcaagctctgcatcccgagttcatgccattctcctgcctcggcctcccaagtagctgggactacaggcgcccgccaccacgcccggctaatttttgtatttttagtacagacggggtttcacagtgttagccaggatggtctcgatctcctgaccacgtgatctgcccgcctcggcctcccaaagtgctgggattacaggcgtgagcaccgcgcccagccttaaaatgctattttttttttttttttttttgagacagagtctcgctctgtcacccaggctggagtgctgtagcgcaatctcggctcactgcaggctccgccccccgggttcatgccgttctcctgcctcagcctcccgagtagctgggactaccggcacctgccamctcgccgggctaattttttgtatttttagtagagacgaggtttcaccatgttagccaggggtcttgatctcctgactcgtgatccacccgccttggcttcccaaagtgctgagattacaggcgtgaccaccgc

SEQ ID NO: 843181 - DNA, 619 bp, Homo sapiens
tacagtgagccgagattgcgccactgcactccagcctaggcgatagagcaagactccgtctcaaaaaaaaaaaaaaaaaraaatttataaaaaatgtcagtcaatgctacagaaagtagtatattaagacagatactctcattagtgccagtaagaatgtaaataggtaggccaggcatggtggctcacacttgtaatcccaagcactttgggaggccaaggcaggtggatcactagaggtcaggagtttgagaccagcctggctaacatggtgaaacctcatctctactaaaaatacaaaaattagccaggtgtggtggcatgcgcttgtaaacccagctacttggcaggctgacgcaggagaatcacttgaacccgggtggtggaggttgcagtgagccgagatcacgccacggcactccagcctgggcaacagagcgagactatctcagaaaaaaaaaaaaaaaaaaagagtaagttggcattttgtttttgggaatgtgttttgcaatgcaaagcctaaaaacagccaattttaaaaattaatactcatgaaataatataaaatacataaagatgttctctgctctttgcaataaactaggaaaaaaccctctga

SEQ ID NO: 843182 - DNA, 564 bp, Homo sapiens
gaagaattgtccatttcagcagtygcagcttgagtttcagcaagcctcatcaccatgggctaaggggctctggggttctaaattaactttttttttttttgagatggagttttttgctcttattgcccagcctggagtgcaatattgtgatcttggctcactgcaacctccacctcccgggttcaagagattctcccgcctcagcctcccaagtagctgggattacaggcaccgactaccacggccagctaattttttatgtttttagtagagacagggtttcaccatgttgttcaggctggtttcgaactcctgacctcaggtgatccacccacctcagtctctcaaagtgctgggattacaggtgtgagccaccgcacacagccctaaattaactctaaatcctgtctaggtcacaaggactgcaacttctaggcaggtcctactgctgtgctggcctaagagccagtggacttggaggggcacatgaccagtcagggtggcaaaggcagtactcgcatcacccctcccccaacctcaggcagcacagtttgcagctccaaa

SEQ ID NO: 843183 - DNA, 564 bp, Homo sapiens
gaagaattgtccatttcagcagtcgcagcttgagtttcagcaagcctcatcaccatgggctaaggggctctggggttctaaattaactttttttttttttgagatggagttttttgctcttattgcccagcctggagtgcaatattgtgatcttggctcactgcaacctccacctcccgggttcaagagattctcccgcctcagcctcccaagtagctgggattacaggcaccgactaccacggccagctaattttttatgtttttagtagagacagggtttcaccatgttgttcaggctggtttcgaactcctgacctcaggtgatccacccacctcagtctctcaaagtgctgggattacaggtgtgagccaccgcacacagccctaaattaactctaaatcctgtctaggtcacaaggactgcaacktctaggcaggtcctactgctgtgctggcctaagagccagtggacttggaggggcacatgaccagtcagggtggcaaaggcagtactcgcatcacccctcccccaacctcaggcagcacagtttgcagctccaaa

SEQ ID NO: 843184 - DNA, 635 bp, Homo sapiens
tgaaattccgtctcaaaagaaaaaaaaaaaaaagccgggtgttgtggcatgcacctgcggtcccagctgctcaggaggctgaggtaggaggatcacttgagcacaggaagtgtaggctgcagtgagctgtgttcgtgccactgcactccagcctggctgacagactctgtcacaagaaaaaataatatagtgtggggacaccaacctttattttatgtgtcttaatgtggtgcattagtctgctttcacactgctgataaagacatacctgagactgggcaatttacaaaggaaagaggtttagtggagaactcacagttccacatggaagcctcacagtcatgcggaaggcaaggaggagcaggtcacgtctacgtgagtggcggcaaagagagaggttgtgcagggaaactcctgtttttaaaaccatcagatctcatgagactcactgttacaagaacagcacgggaaagacctgcccccatgatcgaattacctcccaccagctccctcccacaacacatgggaattcaagatgagatttgggtggggacacagccaaatcatgtcatgtgarttaggaagaaatctaaaccagcatatcaaacaaacctagggtttcacaaatattgctt

SEQ ID NO: 843185 - DNA, 635 bp, Homo sapiens
tgaaattccgtctcaaaagaaaaaaaaaaaaaagccgggtgttgtggcatgcacctgcggtcccagctgctcaggaggctgaggtaggaggatcacttgagcacaggaagtgtaggctgcagtgagctgtgttcgtgccactgcactccagcctggctgacagactctgtcacaagaaaaaataatatagtgtggggacaccaacctttattttatgtgtcttaatgtggtgcattagtctgctttcacactgctgataaagacatacctgagactgggcaatttacaaaggaaagaggtttagtggagaactcacagttccacatggaagcctcacagtcatgcggaaggcaaggaggagcaggtcacgtctacgtgagtggcggcaaagagagaggttgtgcagggaaactcctgtttttaaaaccatcagatctcatgagactcactgttacaagaacagcacgggaaagacctgcccccatgatcgaattacctcccaccagctccctcccacaacacatgggaattcaagatgagatttgggtggggacacagccaaatcatgtcatgtgagttaggaagaaatmtaaaccagcatatcaaacaaacctagggtttcacaaatattgctt

SEQ ID NO: 843186 - DNA, 635 bp, Homo sapiens
atcctaacttaagaagatttaatgcactgagccatttattgaacattttgtgctgtgatggaggtaggggyaggcagctgaatgaaggcaaaataaagtgagatcctccctcctcaaaacagtcactccccctgccttctaattcaggcaataaagaactcaatgagagtttctttctttctttatcaaatagggttagctgtatgttcccagttaaaaaaaaaaaaaaggggggggggggcaacttaacattctctctaaaaataacaaacctaaaaaattgctttaaaacaatttttagacaaattagcaaatatttgcattgtctaccaaatgcccaaccatatgcttaagtgcaagattctgtgccagagaaatcggtccttgctgcaggacagattagtctagtatagagatcagcctacacttatgaaacaattagagaacaattgagttttctctctctggaacgaggtgcttataaacctgtgtaattcagccctaggtttcctagtagatgtttctgggagaggattcctgttaacttactgttttcttgggtggaaataagtaggctgagttgagattcttcagtgtcttaaaaccccttatatttaatatgtattttgaacata

SEQ ID NO: 843187 - DNA, 556 bp, Homo sapiens
ttaatttatgtattgacttgtgtacttaatctcacagtgccttggattatagatatttatggacccgtttcatgtccctcagtcaacagtgagctctctgaggacagggccaaatgccttaaacatgttggtatctatgaggtagtctataaatagctgctgaatgaatgaattgcaggtggggagttgaataatgaagggacaggtgggatggagagcacctaggacagagctgtctaaagagagtgataacaaatcactaatatctttgtaaagtcacatggggcccagggcgctgggagcatagccctggcagagtgcttccatgtgggcctccacccctgtcaaggacagggaggtcttccaacaggtaggtaagttcctggcgtcataggtagggtatgctgcaagcaatgattttcagtgtttttggcctattgagaggtttttgattytgaaccaagcattctctctagaagtaacataaatgtcatcttataatgctaagattgtaccaagtgcagtgtgtttaggtaaaaactggggaccgacataa

SEQ ID NO: 843188 - DNA, 678 bp, Homo sapiens
gaagcatcaaggctgaactgtttccctcccacccgctgaactggccagctcagctctgcccgcccagaggaagtgggtgcggctcccctggggctcctggtgccctgggagggttggccctttgtcctaggatggggacaggtggagaggcacacgagggggaagcttctaccggagggtccttgtcatgctggagggtggcggcgggtgctgagccgtggtgcagccaggttgcagtctgacggggtctctctctctctctaggcctacacaatccagggacagtatgccatccctcacccggatgtgagtcttcactttgtcttcctctcacctttctcttctcatggttgtttacctacctgcatgctgctgttaattgctactaacattaatattacacaataatattaatcaacttctcagcgttcctgacctgtgtcgtatccatatgacctcgaataaccttttaacctcttagcactaattctgcttgtgttgaggacttggcctgatgtcaaattgtctcaattctgccgcagtcctgggttttcctccctcccacggggcctgggagggaactragacgggctctgtccccgtgcagggcagtgaggatgtgctcacccgccacaggcaggcgtcagtgatactttctctgcgcctaagaagttgggt

SEQ ID NO: 843189 - DNA, 571 bp, Homo sapiens
taggctgtagaacactggagtgcaggaaatgcaggaattttttctctcattaagccctagtatatatataaacaggaaattaaaaatrataagttgaacttaattgaaaataaaagtcagatcacagtggattaaagaatgagtagaagtgaggtagtggaactagttattatagtgcaaggttattctttccaatgtccaaatgttccttggaatattattattggcctacctgttttatccaccaactagattgtggataactgaacaaaaatacatttttagtaattagtctttactcagaaggattttttacaagacataaagttcatgcaatctggttaatttcccaaatgagtcacatatattctttctttctttgttagctttgttattacttactcaggaaggggtcgcttttgaaatttgtgacttagcaatttcttccacttcaatgtcaaaaataacactgcatggccaaggctagggatttcatacatttctttagcatttttgaagcctacattccttatcactctagagacattatgtaaaattatttcatatttga

SEQ ID NO: 843190 - DNA, 546 bp, Homo sapiens
taaactatctgaaaatgaaattaagaaaaaaatttcacctataatagcatctgctataatttggatgttttcccccacaaaactcatgttgaaatttgatccccagtgttagagatggggcataatggtaggtgttttagtagtgggggcgggtcccttatgaaaggcttgctgccatcctcaggtcaatgagttcttattctattagttcctggaagagctggttgctaaaaagagcctggcatctccccgctgtctctctattgcttcctctctcatcatccgaactctgcacaagctggcccctcttcacctttccaagcagcctgaagctttcaccagacgcccaatcttacagtcagcagaattgtgaaccaaataaacctcttttctttataaattacagtctcaggtattcctttatagcaacagaaaatagactaagaaagcacttaaatatgaataccccatttttcatgtgatatttcacattgcatgcctatatcaaaacaccycatgtaccccataaatatatgcacctactat

SEQ ID NO: 843191 - DNA, 618 bp, Homo sapiens
ttatttctggaatgttatacaaatcaattttttggctaagttatgaatatgtttataatgcaattatttgcataactctagtaatgctatggacagctataagatcraaatagttttctaaagaaaatactaaatacataaaaacacttatccccattatttacttgtagaacacgttcatttatgactaattttcagcagcattatgtcatcattgctctgattttaaaagtcatatccaaaggataaggcaaaaccacctatgaattgacatatttgtttatctctcagtttgtgaaaatgtccttaatttgttgatgttgcaaacagatttcaactctgccatgcaaaaaacagaagacaatcttctttgcaatgaattttgtagctccattgcatacaaggaacatgctatatatgaaacaaaatagtaactcaagtacaggtcttaaacactgaaagaactaacagtttattacaatttattttattaacaatctaggaagttcacagcctcagcagttctagtgtcatttcaggtgaaatgggaatttaagaatctctgtggagctgtaggtatagcgaaacttttaggtaaaatacgtgcctgcttttggc

SEQ ID NO: 843192 - DNA, 590 bp, Homo sapiens
atattaatattccttgctaggaaaagaatttagtgrtatctctcctacttgacgcgtccatttataggctctctgcaagaagaaaaatatggctctttttgcctgaccctgcaggcagtcagaccttatggttgtcttcccttgttccctaaaaatcgctgttattctgttctttttcaaggtgcactgatttcatatcattaaaacacacatgttttacaatcaatttatacagtcaacacaattatcacagtggtcctgaggtgacatacatcctcagcttatgaagataacaggattaagagattaaagtaaagacaggcataagaaattataaaagcattatttgggaactgataaatgtccatgaaatcttcacaatttatgttcctctgccacagctccagccagtccctctgtttggggtctctgacttcccacaacacttgacaatgaattacctgtttaaaccatcctcttggaggttaggtttcaacatatgaattttggggggacaccaacattgagatcatattaaccagtaaacataagtaaatgtttccctgagttctatgagccatcatagcaaa

SEQ ID NO: 843193 - DNA, 551 bp, Homo sapiens
aattcaggaggctgaggcacgagaatcgcttgaacccgggaggtagagtttgcagtgagcggagatcatgccattgccctccagcctgggtgacagagtgagactccatctcgaaaaaataaaatagtcgggcacagcgcctcacgcctgtaatcccagcactttggaaggctgaggtgggtggatcacgagatcaagggattgagaccatcctggccaacatggtgaaaccccatctctactaaaaatacaaaaattagccaggtgtggtggtgtttgcctgtagtcccagctactcaggaggctgaagcaggagaatcacttgaagttgggaggcggaggttgcagtgagccgagatgacgccattgcactccaccctgggtgacagagctagacttcgtctcaaaataaataaataaaatgaagtaaaataataaataaataaataataaaaataaaaaatcacagtgttggccrggcacggtagctcacgcctgtaatcccagcactctgggagaccgaggcaggcagatggcttgagctcaggagt

SEQ ID NO: 843194 - DNA, 614 bp, Homo sapiens
gggatcctgttgatctgtgaccttacccccaaccctgtgctctctgaaacatgtgctgtgtccactcagggttaaatggattaagggcgatgcaagatgtgctttgttaaacagatgcttgaaggcagcatgctcattaagagtcatcaccaatccctaatctcaagtaatcagggacacaaacactgcggaaggccgcagggtcctctgcctaggaaaaccagagacctttgttcacttgtttatctgctgaccttccctccactattgtcccatgaccctgccaaatccccctctgtgagaaacacccaagaattatcaataaaaaaataaattaaaaaaaaaaattttatctgcttgtcctataagttactgagagaagtgtgttaaaatattccatttagtcaactcttgttttgcacttgttaaattttccttttggttctgccaattttttgttttgttttggtttggtttttttttgagactgagtttcgctctgtccagcccaggctggagtgtagtggcatgatctyggctcattgcaacctctgcctcccagggtgaaacgactcccatgcctcagcctcccaaatagctgggattacaggcac

SEQ ID NO: 843195 - DNA, 466 bp, Homo sapiens
gaacctaaagtagtgtggcagagcagaaggaaaactggctatttagagatagaggaattggcayatgatcttttattaggtatgagaccttagatgagtcatttaatttcagtgagcctcagagcttcttcatctataaacatgttcatttgttaattcagcacatatttcccaagggcaaaatatgtcccagatgcagaggatgccatgatgggaatagattccatctagaaaggaagaacaatgattaaacaattaccctactgcagattatgggttgtggtgacaatgtaggtatggtgaagggcacagagcaggggctctgacctgtaatgaggtcaaggaaggtttccccagggcaacaatgttgaatagaggccaggagatggggtagggagcagtggatgggggtggggtgagagagagctacagttgtataaggatccaaagctggaggggaacccca

SEQ ID NO: 843196 - DNA, 405 bp, Homo sapiens
accagtaagtccagtgtgtatgctaattcttgctcactggatccaatcagcataatgtcatcaatgtaatggaccagtgtgatattttgcagaagcaaagagatcagggtctctcggaataagattatracacaaagacagagagttgatatatccctgaggtaggcctgtaaaggtatattgctggccttgccagctgaaggcaaattgcttctgtgggccttataaacagaaatggagaaaaaggcatttgccaagtcaatggttgcatagcaagtaccaggagacatgttaatttgctcagcaatgaaaccacattttgtacagcagctgcaattggagttaccccttgttaagcttatgataattcactgtcattccccaagatccatctgtcttctgcac

SEQ ID NO: 843197 - DNA, 553 bp, Homo sapiens
attgatttttcttgattttctgctgagagtgaagaaataggggttgagtatgaggattgaaaaaatgaagatatgaaagtcattgaaggaaatgagagaaagtgttaattaaagatgaaagattgagaggcagggctaagggacaagctaaaatgggagaccatgaaatttttagcacatcaacgccaacccgtacgactacacaattatttttccagtatattcctctctctcttcacaggtacagaacaaaggagacagggagtaatagtactattgattctagtttggaattttactaggtggtataacagaagcaaaaggatgaaaaagaatcaaagatgcttgcagaagagtgattcagatatctgtataacccatgggatctaggttgcatacagaaaaaaagtagtcagaaaggtgttaataaaatgtraggaaaatggagtgatcaagggacaggaagtgcatatgaggtcaaagtgtaatggaagaatattttaaggactggacattgggatcagacggcaggatcctggagtactgcccaagc

SEQ ID NO: 843198 - DNA, 580 bp, Homo sapiens
cacattctttgttattatccttttgcgctgattgaaaggctataaaatgtttttatctcttggttttagtattgtaagygagtatgattccattctggagatttgtgaaaaatatcttgtcttgagtaaaatgaaaccattaaacacacacacgcccctatgcttattagtaacaggttaaaaaaaagtcactctgataatgacagcatgtgctcacctgcaacgcaacttctcccgtgactgcctggttctacatcagagtctgaattcttttaccaaattatgtctatcatcaaaacaaatgtctggtgcattttgtgctctaacagggctgagagggccagatctaaggaaggatgtcctgggcctgaaggagcctgggccttgcctgccctgctgctggctgggccttttggggtatacagagttgtctctcttgttggagccacgaatgagacagctggaaaacacacattttatttcatctgtgatgtcagggctgctgtgctttctcccagtcctgtttcacgtatgaccctcagagggctgcttagagaatagtttattctcacttatttta

SEQ ID NO: 843199 - DNA, 563 bp, Homo sapiens
gtgggatttcttttatcaggaggctctttagcagggccaacttcaacagaagtctgatctccaatttgggatagaactcaagatacttgtctccaatatcacgaagcccaaacaaattcagatatgtttataaccactgtttcagtaattcccaaacaatgagacattccatgatagagatgatgcttctgaaatagtctgtgatgtttggaagctggtctgcacagaactcctagtggacttgcgaggcaggtgtcacctaattccacctgccttctctggtcagtagataaaatagcgaccaccaatgaattatgtccccagtgtctacatgcccttgtaatgtggcactatagctccggtcagcaagaggatggacctatttcccacccccttgaatcccatctggctttgtgacttgttttgaccaataaaatatgtaggccttaagatgttcatggctttcactgttcccttattggaatactaaracgccatgttgtgaaataacctagtatagcctactagaacatgaggggtgatatgaagaactaagacatcta

SEQ ID NO: 843200 - DNA, 581 bp, Homo sapiens
tttcatctcagaggttagcatcacgtaagaaaattaaactccccaaaaagttagaaaggagagaataaaggtaagaggaaaagttaatgaaatagaaaacagtcaataaagaggatcagtaagactgaaagttcattcttgaaaaaggagcaataaaattgataaactcctggatatactgatttaagaaaaatagatagaaaacacaaacaactattaccaggtatcaaaaaggagacaataccatagatcctgatgcaaacaggatccttttcaaatgcaaatttaaaagattataagaatatcatgaacagctttaaacagtaagtttgatgagttagatgaaattgacatgttctttaaaaggtcacaactgaccaaaactgacacaacaaggaatataaaaatcagaataatcttataactattaaataaatgggatctataattgccaactttcccacgaggaaaactttagcctcagagtctcaatggygaattcttccaaatatttaagaaagaagtaacgctaaacttttgcaactttttcaaagaatagtaaagaacaaagataatctcta

SEQ ID NO: 843201 - DNA, 572 bp, Homo sapiens
caacagaacataatttaaaacactgcttatgtcrtactcgtgaatgtgcacagagtgcctggtttcaagggttcctggatttacagtgagtaggtaaaaatggtcacttcccggcaggcccaggaactttaagactataagtaaaatctaaagtctgctttggtttggcttcctagcccccagaagtttttaaatctgagaatcctgtgcgacaaatgtagggagaaaatgtttctgaagaaaagctgtaatacacctcttattagattgtagctctatgcattgttttccagctcttgttatctacctacagactagacttgaattatcctaattcctccaatccaactttcttccagagttactaaaattgaatactgctctcttcctgaagccctgtaagctgaaattatataaattttaaggaacaagtcatatgtctgatgtttgaggaacacccagtaccacaaccagagacattcaaactgcaaaccaggctgagaagtggatggttccatgctgtagacagatttttccgacattagaacagaactctgtatcataataagact

SEQ ID NO: 843202 - DNA, 572 bp, Homo sapiens
caacagaacataatttaaaacactgcttatgtcatactcgtgaatgtgcacagagtgcctggtttsaagggttcctggatttacagtgagtaggtaaaaatggtcacttcccggcaggcccaggaactttaagactataagtaaaatctaaagtctgctttggtttggcttcctagcccccagaagtttttaaatctgagaatcctgtgcgacaaatgtagggagaaaatgtttctgaagaaaagctgtaatacacctcttattagattgtagctctatgcattgttttccagctcttgttatctacctacagactagacttgaattatcctaattcctccaatccaactttcttccagagttactaaaattgaatactgctctcttcctgaagccctgtaagctgaaattatataaattttaaggaacaagtcatatgtctgatgtttgaggaacacccagtaccacaaccagagacattcaaactgcaaaccaggctgagaagtggatggttccatgctgtagacagatttttccgacattagaacagaactctgtatcataataagact

SEQ ID NO: 843203 - DNA, 616 bp, Homo sapiens
gctctgtcacccaggctggagtgcagtagcgcaatcttggctgactacaacctccgcctcccgtgttcaagcaattctcctgcctcagccttccgagtagctgggacaacaggcgcctgccaccacgtccagctaatttttgtatttttagtagagacaggctttctccatgttggccaggctggtctcaaactcctgacctcaggtgatccacccacctcggcctcccaaagtgctgggattacagacgtgagccaccgctcctggcctctattgtcttaagggcagaaaataggcttgtgtgatttcagtaaattggcttttcagtattttgattgaggtttactttggggtctactacatggttaaattttgtgaactgtccatttgtgtttgagaatattaataaaaaggcatctatttgttctgtatatttctattagaataagcttgtttactgacttactcaaatgtatgtcatttcttttggtttacaaaatcttttgatttctgagagtgaaatgcatgttaagtgtcctattaytgggtctatttctccttgtattttgcttgtaattttcatttattatgccagatgcatgaacgttatgataaa

SEQ ID NO: 843204 - DNA, 609 bp, Homo sapiens
gcttccagctgaatgagtgaaagtttgtcttcagtgcacatgctccaagatgaatgaggtgaaagtttgtcttcagtgcacatgcttccagctgaatgagtaaaagtttgtcttcagwgcacatgctcccagctgaatgagtgaaagtttgtcttcagtgcacatgctcccagctgaatgagtgaaagtttgtcttcagtgcacatgctcccagctgaatgaggcgaaagtttgtcttcagagcacatgctcccagatgaatgaggcgaaagtttgtcttcagagcacatgctcccagatgaatgaggcgaaagtttgtcttcagagcacatgcttccagctgaatgagtgaaagtttgtcttcagtgcacatgcttccagctgaatgagtgaaagtttgtcttcagagcacatgcttccagctgaatgagtgaaagtttgtcttcagagcacatgcttccagctgaatgagtgaaagtttgtcttcagtgcacatgctcccagatgaatgaggcgaaagtttgtcttcagtgcacatgcttccagctgaatgagtgaaagtttgtcttcagagcacatgctcccagctgaatgagtgaaagtttgtct

SEQ ID NO: 843205 - DNA, 622 bp, Homo sapiens
gggataatttcttgtagacaaaaacccagttgttcctgaaatggtattttatagggtttaggatgcaggattcaggcagcccacctggaatatgctgtgtgaggaacaaaagatccagctgctcagacttattgctgcaaaaacattaaccaaaatgagcagaaacagctaccaaaacatcatttgaagagtttcaggcaaaatattgttctacaacagtggctaagtcacaggcaatattatatcaagcataaaatctttactagcctcctaataacagcctccagccaccattttagagatttatctgagtgaatgcactcatttcacgtagacgaggggctagagatacctgtgggaatggccagtgcagttgctctcgttaaagcaaagtcagtttcacgggaaaagttcaggaaactcggctgcctatagaaatccctgtggatccactccagctactagcttcagtttctcacatcttgacgtatccacccattcacaacagcgtccccrtctccctctttctccttcaagatggctccgcctggtgaaggcctatcagtcagcctcggaatctcgcttgcagcctcaccctctggctgcagagctgtgctgggag

SEQ ID NO: 843206 - DNA, 519 bp, Homo sapiens
cagaagttctttagtctaattagattccattagtcaatttttgcttttgttgcaattgcttttgtcatcttcatcatgaaatctttgcccaygcctgtgtcctgaatggtattgcctaagttgtctttccagggtttttagttttgggttttatgagatatcatctaacagctgtcagaatagctattattaaaaagtcacaaaacaacagatgctggcgaggtggcagagaaaaagaaacagttatatcctgctggtgggagtgtagattagttcagcctttgtggaagacagcgtggcaattcctcagagacctaaagacaaaagtaccatttgacccagcaatcccgttacaaggtatatacccaaaggaatacaaatcattctattataaagacagatgcatgtgtgtattcattgcagcaccattcacaatagcaaagatatggaatcaacttaaatacccatcaaagatagactggataaagaaaatacaccatggaatactgtgcaaccata

SEQ ID NO: 843207 - DNA, 587 bp, Homo sapiens
gcatcttttaatatgcttacttgccagctgtatttatttatttctttatttttcctttggtaggatgtctgcttaactmttttgaccatttaaaaatgggtcccttacttatgtgtttctgagttgcaagacttctttgtatatcttggatactactcctttatcagatatatattttgtgaatattttctctctgattgtgactcggcttttcattctctggagagtgtcttttgcagagcagaagtctttaattttaatgaagccctgcctatcaattatttctttcatggattgtgcctttggtgttacatgtaaaaaatcaccagcaaacccaaggtcatctagatgatcttatttgttatcttctccatgttttatagttttgcattttatattgaagtttatggcgcatttttagttgatttttgttaaggatgtaaactgtaatgatttattctattttttgcatgtggatggctatttgttccagcatcattttttgaaaagatgattatttctccattctattgcctttgcctctttgtcaaagatcagttgactgtatttgtgtggatctatttctg

SEQ ID NO: 843208 - DNA, 603 bp, Homo sapiens
cataaaattagcaagcgttacaaccagcattcaaatttctctttatgtagctctaaagacgttctgccttctgtgactttaaagaggtagtaggtggggagaactgggtacttccytccactcctgttttggaaatcatggctggagttcaggggctggtacagatgggacatgacatgtttcccacatatgtcagaaaaaggttgagacccactcaaatcacattactgccattcagcactagccatttttcacataatggcacttgattatgaactcagtgagtttcttaagatgttttttcttattcatgcgaatgttttagttggtcaaatattatgtatttggtttatctttccattttaaatttatattgtatgttagatttactgttaaaaatattcatatccgtagtatttatgatttatctaaatactgtaactttaaatctgtaacttttctattatagaaaaaacttgtatatacttaggatttcagtagttggacagaggtatctttaatattttttgcagtttccctttacaaaaaaactctcatccttgcagtaggagttccatgatttgaacccctggagcaaaatca

SEQ ID NO: 843209 - DNA, 614 bp, Homo sapiens
tgtttttacatgttctttgtttgttctaaagatcaaaacaattgaactcctgaagatagagaatagaagtatgattatcagaggctgagaaatgtagtgggggggtggtcagaaacgagatggggatggttaatgcacacaaaaataaactgtttgaaagaatgattaagacctactatttgcacaaaaaggggattatagtgaataataatttaattttacattttaaaataactaaaagagtgtaagtggattgtttataacacaaagggtaagtgcatgagaggatggatatccagttttccataatgtgattattatgtattgcatgcctgtatcaaaatagctcatgtaacccataaatatatacctgtactgtataccaacaaaaattaaagataaaatttaatgaagattatttgctaagaacagggagcttgatagaaacagaaattgtttttaaaaacggcgatcaaaaagagtgaggaaaattatttttatcttgaccctgaaaattaaaatgaagtctaacagttcaatgggattttcaatkatcatgtctgtaaagagagtcttggcatggaagataacaaagagataagaagtgtatcttg

SEQ ID NO: 843210 - DNA, 631 bp, Homo sapiens
caggcatatagataagccattattaaaatattagtatgaaatttaacaaacataccacaaattttatctccaaataagtgcaatctcattcaaagcagttaccttggaaggtgttctaggaatgtttctattcatcaaatgatttcagaatcgcttttggaattaaagttggagtcatcacataagctttttattgccatcagcctcggtctttgtcctttgagggtcgttattttatgggaacaacatgaagaactaaggcagctaggcagagtgcacgatcgagctttgtttaaagcaagatacaactctgaagttacgagacaggactgtgtggctggtttggttttcatcacaaaacctgactcttaaggcaaacaaaagcccccaagggcttttaaagcaccatacattcatgtcatattttttgttgttgttgaaacggagtctcgctctgtcgcccaggctggagtgcagtggtgcaatctcggcttactgcaagctccrcctcccgggttcacaccattctcctgcctcagcctcccgagtagctgggactacaggcgcccaccaccatgcccggctaattttttatatttttagtagagacggggtttcaccgtgttagcca

SEQ ID NO: 843211 - DNA, 618 bp, Homo sapiens
caacaacttgtaggtgagccgtctccccgattagatggtggccaaagagaaagggaaggcctttgcagagagcacctcccacctggtcatcagacccgcaagttgaaagaggcaaagagtaaagcaggcagaaactgggcgtggagtcagaagttctccacccactcttcatgagacagcacagctgggcagaggatgccacatctctgggtgggcacagagatgtggggctccagaccccactccactcaggcctccttccctcccttggaccactagtcgttggaaagtgacacctggtgttcagtacagactgcaagtgaggacttgagggagcagaggagagcaggtctcatgatcgctcctcctttaaactgggacttaggcttctgttaatatggcccttggtttcttagcttttgggactaccaagtttttgtggttgctcagcccgagtttcctgttaccatggaagcaagaaaatctagagccacagactgggtccttggattggaaggttttgctgtgattccttcatcttcccacctccctgcacttgctgcgtgcactgacccctcacctttcaccayagtgaccaccaggcgactcccgcagaac

SEQ ID NO: 843212 - DNA, 612 bp, Homo sapiens
cttgccatgtacatctcaatcttcatcacctatttatttttgccatytaattttaacataatcttaactttttaattgtaactgacctacaaccagtgactacaacaccatcctgttgactgcctgctagacattgagctcctacacccattttcctcctcctcatagagtccaagtccaccatctgtgtcctggagccagccctgcctccagtctcagagagcaggccctgactgaccaatccaattacagccactttatttatcttctcaagattggttaagacctggacatatggcacgatcacaggccatgagatataaagaaattttgctgggtgcccctgggaaactttgtttggcttttacaaagaggcattcatgaggcaatgtccccattctttctctaaatgtggctggatctgggtgtgatgctgggatctctgcagccattttgtgtccatgaggaaagtgagcccaggcaataaagctaacatgtagaaaaggacaactgcaggcaccttctcagtgcactctcactctgggcttctcataaggtaagatagtggatgtcctgaccccttcaggcagctgagttaagatgcctgttgct

SEQ ID NO: 843213 - DNA, 596 bp, Homo sapiens
tcaatcttcatcacctatttatttttgccatctaattttaacataatcttaactttttaattgtaactgacctacaaccagtgactacaacaccatcctgttgactgcctgctagacattgagctcctacacccattttcctcctcctcatagagtccaagtccaccatctgtgtcctggagccagccctgcctccagtctcagagagcaggccctgactgaccaatccaattacagccactttatttatcttctcaagattggttaagacctggacatatggcacgatcacaggccatgagatataaagaaattttgctgggtgcccctgggaaactttgtttggcttttacaaagaggcattcatgaggcaatgtccccattctttctctaaatgtggctggatctgggtgtgatgctgggatctctgcagccattttgtgtccatgaggaaagtgagcccaggcaataaagctaacatgtagaaaaggacaactgcaggcaccttctcagygcactctcactctgggcttctcataaggtaagatagtggatgtcctgaccccttcaggcagctgagttaagatgcctgttgc

SEQ ID NO: 843214 - DNA, 607 bp, Homo sapiens
atctcacttagagcctagctattcttggtttgcgcacagtactaacgaaggtggttagctgaccttcctgtctacaaattgaattcaacaaataaaaagggagaaggaaaagctgcaggtaataaaggccgataaaggtggctggtggtgtcttcatgggcatcagaaataggtaggattatttgaaagtagcctcactaatggcaaaaactgagcggtctagggccattttgtgaaggggcaaagggggagaccacttctcattgtacagagcctttcatttctcactggaaaataaatgatgctcataatgatagctctgagatttagttcaagggccactgcccaaactatcaaagagcatcgtgcattttacagagattttcatcccaaacataatttttaagatgataattagaggcgatcttccatcaaccagaaaccttggctttctcaaatgactaagtcagggaaggttatatgctaygggatccactgctctttgtgtggatggagatgacaattagagaatttaagggaagcaaagggaaagtggaaggtggagagggggatcaatcaggattgctttgcatcctggacatgaatg

SEQ ID NO: 843215 - DNA, 533 bp, Homo sapiens
tgttgtgtgcatgtcattgcatgaattttgtgtgggtggcgtgggggtattgtgtgagccttgcacatgtgttttgtttggatgtgatgtcgcatgggtgatatgggtgctctgtgtgcattgtgtgttttygtgggggtgatgtgggtgatgtaagtattgtcagttgcattgtattatagagtgctgtggggtggtgtgtgtgttgtatgtgtgtgttagaaattgtaaccatgtgtgttccagcactctgtatgccctgagtattccacctattccctgaaggctcagggcacactccctgtgtgtgactcatgccatcctgtgtcccttttatgagtccagggcatgacccttggatgcctaagggcatatgggcttgcaccctgccacccctcacccttcatgcaggctccatgtatgcacacattaggtatgtaccctaaagtcattgcagagacatctagaaggtggtgactattgtcttcaaacagagaacagccattaacacattcattaattaggatcatgtt

SEQ ID NO: 843216 - DNA, 489 bp, Homo sapiens
aaaaggtttatttgtcacatttaaagtacaaaatcaaatacacagatccagatatgtgaaccatatatacatatctatacarccattatttagactttcacaaacctatctatacattctaatttatctatcaacactatcccttaagtaaaaagcaacatatctcttaagtaggtttgttatcagtaacactatcgaatgtaaattattttcacttcatcacttgaaacggtagaaataggtacctcctagaaactggagaattaccaagcatatatccaatttgtatagatttcttaaaatacattctataggaataattaaccgaagaaactgccaatcaaagtttttgggcatatttaacaaaacttgagtcatgggaagacataaagttaattaattgcattacaagagttttgttttgactttggttttaaatgcaaagaggggctttattttgtttagtacacagagcacttccaagtcata

SEQ ID NO: 843217 - DNA, 511 bp, Homo sapiens
tctcaaacacagagcaataagacagagatgttaaamtcagttaatccagaaacagatttaagcaactatgagggctaaagaggtcccaccagaagaacaaaaaacaaaaagtagttgcctttgggaataggtctaggggtgggaacaagcttttatcataaaaccttctgtgctactgatatttttttaaccatgaacatatattgtttaatgttaaaaaaaaaaaaaagtaacacaacctcactacagtacacttaaaaagaaaactcaaggccgggtgcggtggctcaagcctgtaatcccgacactttgggaggccgaggcgggcagatcacgaggtcaggagatcaagaccatcctggctaacatggtgaaaccctgtctctactaaaaatacaaaaaaaaaatattagccgggcgtggtggtgggcacctgtagtcccagctactcgggaggctgaagcaggagaatggcgtgaacctgggaggcggagcttgcagtgagccgaga

SEQ ID NO: 843218 - DNA, 374 bp, Homo sapiens
ggtctgaaactcccaacctcagggtgatctgcccacctttgcctcccaaagtgctgggattacaggtgtgagacaccacacccggcaagatgcctgcttcttttttgccttctgccatgattgtaagtttcctgaggcctccccagcaatacaggactgtgagtcaattaaacctttttcttttataaattatacagtctccagcagttccttatagcagcatgagaactgactaatacactgaattggcactgaggtagtggggtgctgctataaagatacctgaaaatgtgacagtaactttggatttgggtaacagtcaggytggaagagtttggaggattctgaaatagacaggaagaactgggaaagtt

SEQ ID NO: 843219 - DNA, 677 bp, Homo sapiens
acatgaaaataaagtggaccttaagtgtgattgcctgctatagtggaaagagtagaggatttggagacctggggtcaagagtcggctctaccaatttaccaactgatgatcctggtataagtcacttatccaatcagtctcatctgtaaagagcagatcataaaagcatgtacctcatgaaacaactacagagagtcaatgagataatacatatgaaagcactttgtaatatctcacccaaagcagtttaaggtaactttacctctgctctagaggagagaaactctattcctactccatacagaaattctgtttagttcaatgaattgctatggaccatgtcagccctttacttgctcaaaacagtacaaacaaaactcccaaagccaactacaaaaataaacaaagactgatgaatacttaggaggggagaatgcaaaaaatctcctggcatagtcatattctttccacttttttctctccattgaaactataaaatatccattaaaaactatttgaatagatatttcatgaaagaatatgtaccagtggataataggcttatgaaaagatacttaatatcatcacttgctagggaaatgcaaattaaaaccacaatgagataccactacacacccrccagaaagtctataatcaacgaatgacaataccatatg

SEQ ID NO: 843220 - DNA, 598 bp, Homo sapiens
cctgttggcctattgtccctctgtatcccatgatagcattcgcttgtttgaacaataaattatacagttacctattgagaaaaaccactgtttttctatactctcacacagaagacttctgatgccagatattgtggggttattttcctacaatgaccagttcttcaacactagctgggtccctataatttaatacaacagtgacactacctccttgacaaaagcatcagactctatgggttagtggcttagtcccacgaggctgcccacttcagatgccagttgcaaatcccagtctcctgtcctctgacagatttgctgtaaatcaaggattcctatgatcccctccttgggttccataatttactagaatggctcctgaaactctgggaaacacatttactagcttattatcaaggatgcaacttgggaacagccagagagaagaggtacataaggcaaaatatgggggtgtggggtgagggggtatggagcttccatgccttctctgggcacaccaccctgcagcaacaayagtgttcaccaacccagaagttcatcaaatcttgttattcaagagcatttaaagagcttgatt

SEQ ID NO: 843221 - DNA, 385 bp, Homo sapiens
tcagagtgagacctgctctcgtatctgtaaacactgtgttcaaggagagagacactcctttgaaacactggaatgcggacagacgtgcaggctccgagttaagcccgctcccaccagctactctccgataaagatacgctgtttgagcagcacagaggaggttcgttgaaaccgctgttgccgtagatgatgcctgtgacgcgccgccgcccttccactgtttcgccccgaacatctgcttaaatctaagtgattggactcaatagtgtggagaccagagctctragccttttgcagcctccacattttgcaactggccccctggctcccaccttcactcttaacctgtctcttctcaatcctttgtcgccaccagacttcgggt

SEQ ID NO: 843222 - DNA, 555 bp, Homo sapiens
tgatgtcatgatgctgcttcctcacatggtggttgtgaacaggtgatgtctgtgaagacacctacttctragcagttgaaagtgaggccaggtgaggtggcccacacctgtaatcccagcacttcgggaggccaaagtggaaggctcacctgaggccaggagtttgagaccagcctgggcaacatagcaagaccccatctctacaaaaatttttaaaaattagccaggccaggtggtgggcgcctgtagtcacagctactctagaggctgaggtgggagtatctcgagctcagaagttcaaggttgccatgagccgtggttgcatcactgcactccagcctgggcagcacagaccttgcctcaacaaaagaaaaagtgtacttctcagacatatggacatactgatccttgaggaagaaaactgcatttgccaatttgcctctgaaatattacggttttctatcaggagtctagacttccattactgttttgccttgccctgctttcaagtatatcctcaggcacgggccctctgggcacagggtgaaataaggg

SEQ ID NO: 843223 - DNA, 283 bp, Homo sapiens
ctgccgctccaggcctgtcttgttccatyttgaagtggaaatgaagtggtgaaagtgcagctttctgcacataataacgtttgtaagtggagaagtcagttgtcacttgagaaactctgtattcttcaatatttccgtaacagagattctatttataaaaattcagattgcattgaaacagacataattcaatttcaccattaaaatatttttggcttctaaaattctacattggagacatttgaaattagaacattttttattgatattttcaatactaaca

SEQ ID NO: 843224 - DNA, 568 bp, Homo sapiens
accagcctgcggtgtgaccttggccaggcacagccctccaggtctgcaaggcaggaacgcctcccctgcggcagtgcctcctacaaaccgctaggcaaagagaagggctgggtggtccgggcctccgcacgctcggcacctcggcctgcgcactggtggttggggatgacaacacctatgtccccagggggccgtgagcacgggggagacggtggaaagtgaacttgacggatgggagcccccgcccccagctgtgcagcccttacccgctcgtgcatgggcgaagctgggctggagtcctcttcagtcccacagggggatgtgtcacctgtagacactcggctgaccgccatctcggcgtggcccttgccctgggggcccttcatgcgcacaaactccatgttgctgtacttgtagaagccaaacgacatcttctgtgccatgcgggcggccacgctcacctgggggccggcgcggggcagcctgagtcagggrggtggcgatggctccatggggcccctccccaggacatgaacagccagggcgaccatccctcaaggagcggggg

SEQ ID NO: 843225 - DNA, 334 bp, Homo sapiens
ttgactcaaagcagcccgagcgtcggggcataaatacaaccctgattccacgtgcaggcactgcgccaggtgctttgtatcctggataataacagcagcctggactgcacccgactccacaccagggrtttgtgctgagcctgtacctgccacgtctcatttactccctgtcacttctctcatacaatccctaagtccctagagaatttgtggtctccagtctacagatgaggacactgaggcccgagggctggagtgcttagccagggctcacagtcttcctttccagcggcacctcccactaaaggccccccggcccccatcacttatgccc

SEQ ID NO: 843226 - DNA, 598 bp, Homo sapiens
cgcataggcatttgtaccatgatcaaccccacgcacatgaaaactgtgaccaagtgacgtgcctgggagctttgacacacgagccgtgtgaattcactaggaaacatgtaataaagtcatggaagagaaaatcgtgtgtaaactttgcctttaactttagaccgcagtatattataatacatttgatatctgaaatatctttacttttttaagagtaagattccatatgtctgtctggaagggagccatggttattcacacgaatatccctgtcacttctccagaggtgtcaggtaactaacacgagcattctttgaagactctgggcacatgaatgatacacagaattgaatgtttaaatttccactgagtcctcatgaatcatttgagactagtaccagctgatcttgtgtacaggctcagggtcagtgcccaagggctcccgcgtgtgtgttctgatcttcagtgcgtarcacattctccatttagaaaagagtggtcagaataattgtggacggtacagtggctttttaaaactacagtctttaggtgtaaggtttggcgccgggagcaattttatgatcaaatatgatgaact

SEQ ID NO: 843227 - DNA, 693 bp, Homo sapiens
tcggctcacactatcggcctggatcccacgtctaccaagggagactgcgtggggtggtgacgggtgtgtaagcacgcgtgaggtccggccactgcacagtcagacacgccggctgctgcagtggggcaggcagctccgggtgccagcatgggccccagctctctgcgaggctacagctggaccaggcgcactgcaagcagcttccacagctggcactggggaacacagtggctctcagaagcttggagatgccagaaaccacagggacccaaagagggcatcacagccctggcttgggagactccccggtctgggctccccaaagggctgcagctcttccttccttctcttcccctgcaacgtggccagcaaggggcatgtctcagcactgtttgtgttatagctcttttagccttattcagtgggtcccaagttcttgtcctccactcaggaagaatgaggtacggaaacaagagggtgagcaagacgaagaggagctttattgagtgacaatagctcagaggaggccctggagagggcagttcctcactacagctggtcatccgacrtctgctcagctctggctgagcctggggcttctgtcagcctcagagagggggaagttcatgctgactggtccatgggcggccatgggcaggcccagaaaaggcaacacaagttcgcactccagtc

SEQ ID NO: 843228 - DNA, 618 bp, Homo sapiens
atatttgggatacaagtcctttatcagacatgtgttttgcaaacctttctcccagtcagtggcctgtctttttgttctcttaacagtgtcttccacagagcagcagtttttaattttaatgaagcccaacttaccttttttttttttctttcatgaactgtgctttcagcattgtgtctaaaacctccttgctgaatccaaggtcacctacgttttctcccatgttatcttctaaaagttttaccattttgcatgttacatttaggtctatgatccatttggtgttaatttttgtgaaaggtgtaaggtcagtgtctacatttatatatttttttgcatgtggatgcccttgtgaatatctttgcaatcattaaatgttaattacaaggacgacagaggctggaaaatatcaggatgtaatgttaagtggaaggcagtaggcagagcaccatctctgccacagtttcaggtgaaggggtttcatctcggtcggtaaaaggagcaatggagtggaaggagagaagggaggcagctccatgggggggcagttgcctgcagagcccgggacccacacttgcatcatgrgaggggctgagggagccacacccaggcaggagg

SEQ ID NO: 843229 - DNA, 525 bp, Homo sapiens
aaagcttaacatcacttgtctttctctttgcattttctgtaataaattctaatctcacccagactaatggatgcctagcgtggtagagataaaaatctgtactcaggaaagcaaaatgaaatacacattaaaaacttttaaactaggtatccctgctacatatcttttgaagcatggtggatgtattgattttgaccactagcgtcccttccttgatgaaaccatgcctccctcactccccagaggctgttaatcactgttgtctgccctcctcaccacagcggagggcctgtgaccaggctgagccaatcctagcacccatgtcagtgtcctcttgggctcagtgattggtcctgaggtgaacatgtgacccaagcagagccaatccaaatccttagttggatttctatgtggaagctgagagagaggaagagcgatagatagatagatagwtagatagatagatagatagatagatagacagacagacagacagacagatagttagaccttatggattacaag

SEQ ID NO: 843230 - DNA, 525 bp, Homo sapiens
aaagcttaacatcacttgtctttctctttgcattttctgtaataaattctaatctcacccagactaatggatgcctagcgtggtagagataaaaatctgtactcaggaaagcaaaatgaaatacacattaaaaacttttaaactaggtatccctgctacatatcttttgaagcatggtggatgtattgattttgaccactagcgtcccttccttgatgaaaccatgcctccctcactccccagaggctgttaatcactgttgtctgccctcctcaccacagcggagggcctgtgaccaggctgagccaatcctagcacccatgtcagtgtcctcttgggctcagtgattggtcctgaggtgaacatgtgacccaagcagagccaatccaaatccttagttggatttctatgtggaagctgagagagaggaagagcgatagatagatagatagttagatagatagatagatagatagayagacagacagacagacagacagatagttagaccttatggattacaag

SEQ ID NO: 843231 - DNA, 501 bp, Homo sapiens
tataaacaagcttgtttagtaggtaattatgaagactataatcattagctaagaaaatatataagaatactacaaaataactatacgaagtttacagagtgatgtgaccaaaactagcttccgaaaatgacagtaatcctctgtcagtaatcactgccccaaagaaagttctctctctgtaaggatactacagtataggcaaaaaacataaaaagcagttaaggtattttgttttgttttgcttctgaaagcaaacatggaagaacgaagccattttcaaaataaggactatttttcagaaaaaaatgggaaacgtccatcctttgaaacatcctgcctcccttctttgctttaaattccacataagctattttgagcttactgctttgatcagatttagctgtaagtaactatacttagtcatagacatctgatctataaatagaatctactagaggaaytgctataacttccttgaaattggcaagtagcagttccatt

SEQ ID NO: 843232 - DNA, 504 bp, Homo sapiens
ccacttagctcatgtcaatagcatatagatattgtattggttcatgggtgtgatttttttttcctaggcaagaggagctggaatagaacagaattcagaaagaaragcaaaacagggccagatgcggtggctcgtgcctgtaatcccggcactttgggaggctgaggcaggaggaatgcttgagcgcaggagttcaagaccaacccaggtaacatagtgagacctcatctccacacaaaaaaataaagaactagccaagtatagtggtgcatgcctttagccccagctactagggaggctgagacaggaggatcatttgagcccaggaggtaaaggctgcagtgggctgaaatcataccactacactccagcctgagtgacagagggagaccctgtcttaaaaaaataaaaaatggaaaaacaaagcaaaacggcttcagcttggctgttgcacatacgggctcttcattttatttaagaaaaattcaaagtgaaagcttgcat

SEQ ID NO: 843233 - DNA, 594 bp, Homo sapiens
cagcctccaccaaagcccatttctcccatctagctgtaattctgtatccaataaccaacctctccccaagctcccctgccccttaccctcccagcctctatacccacaattctatgctctgcttctgtgagctcagcatttttcttttacctcccatataggagtgagaacatgcggtatttatctttctggtcctgatttattttgcttaacataatgtcctccaggctgagactcaggtcttgacccagagaagtgatgaatctgcaggtatcgtggaaatggccaggttagtgattaatttgtacttaattcataaaataacagctttgttttcaaatttcaaataacttgaatataatctatttccctctcctaaagtgtatcacatattaaatgaagatttttttctttgtatatatatttttaaaagacctacatttagttctattaaaaaatgatktacagtgggatgagatcactcctcgggattcagtgtctgagcaagaaaacaaggcttgggagacagtgtgtagggagccaggttaactttacgtgattagaatgaattggatccggtcataaagcaatcat

SEQ ID NO: 843234 - DNA, 598 bp, Homo sapiens
aatgaattagagaattggtaaaggatatcaagtaattcacagaaaaaatatgaatagctaataaatacaygcaaatatatacaatctcactagtaagtggagaaataccaatttaaaaaatgaaactatttttcaatcatcaaattgacaaaaattcactatgattggtaatataccctgtagtcaagcatgtgagtaaataaaaactctcatatactgatgagaatataaattggcaaatcctttttgaaacataatttttaatcaaaatattaatgcttgtacactttgctccagtattccatttctaggaaaataaagaaaataaaactagcaaatatgtcaaaagatgaatatacaggtatgtctatttgagtattgtagataatagcaaataattgaaaccaacatgaatgctccttagtagaaaagtggccaaattatagtgaactatcctatggaacaatagtgcagctataagaagaatgagggagatctatttgtacagataggcaaagatctccaagatatattttatgtgtaaaagccagtcacaaaataacacataaaggaagattgcattttgtaaatgtatgtg

SEQ ID NO: 843235 - DNA, 382 bp, Homo sapiens
aaaaaaatgctatgacaatatagggtcttctcgaaaattgtgaaggtgaaaaaggacattctggtatcratttttttcctcttgtttccctccatctcacttccactatcttcaaggcccccaggctgctcagggtcccctgggttgacttaactctccaagcatcctcttggaattagtcccttccctgctcctttgtaacacagcccaatcattaatgaatatgactgataaactcctctgtgttcatgtgtggaagacttaatccattacctccatgtgatatacatggaaactgctagagacaatgcattcacctatcagagtaggtggaaattttacaccctattaaaatactggtggagttttatgaagatgtgga

SEQ ID NO: 843236 - DNA, 382 bp, Homo sapiens
aaaaaaatgctatgacaatatagggtcttctcgaaaattgtgaaggtgaaaaaggacattctggtatcgatttttttcctcttgtttccctccatctcacttccactatcttcaaggcccccaggctgctcagggtcccctgggttgacttaactctccaagcatcctcttggaattagtcccttccctgctcctttgtaacacagcccaatcattaatgaatatgactgataaactcctctgtgttcatgtgtggaagacttaatccattacctccatgtgatatacatggaaactgctagagacaatgcattcacctatcagagtaggtggraattttacaccctattaaaatactggtggagttttatgaagatgtgga

SEQ ID NO: 843237 - DNA, 624 bp, Homo sapiens
ggagctgtcaaggctgaggcgcttgggtagctcagtagaatctaagcacaaaacacaagggccccaagggcagttagaattctatatggttttgatttttctttcaaaatttacgacatctttatatgcatagaagctagcaaagaattatgcaagagctactcatattaatcttacaatcctcaaaaacatggtcctgttagaaaaagtaaatctaacatagggacaaaatcattctaggagagctcacagccacacccaccccagacccaccatggcccatctccactctgctccctgtcacatgcggggtcagggtaagcagcatgaccctgtatccgccttcctctgagcagggctggccgtgctcctggggtgggggccctttgctcagctggggcatgtgagcagtctgtgacatctcctgccctcctttccagctccatcccagcaagtccctctggcatcaccgacactcgctctccacactgcctctcccccattctctcaacttagtccattcaggttttagtccctatcattcttataaaggtcaccaatgaggtccacwctgccaaatccagagtccattgctcagttctgcagtgagagagacacaccctg

SEQ ID NO: 843238 - DNA, 585 bp, Homo sapiens
cctcctgcctcagcgtcccaagtagctgggactataggcctgccccaccacacctggctaattttttgtatttttagtagagacagggtttcaccatgttggccaggctggtctcgaacccctgacctcaagtgatccacctgcctcagcctcccaaagtgctgggattacaggcgtgagccaaggcgcgcggccagaaagcagaatgttaagaggtgttgtccatgtgacgaaataagaaaataggagttatattaattgaatttatgaggagaaatgagagaactgcaaataagcatataaatgtcaaacaattggaggtggagagagcagagattgcaagtagactacagggaatggtccatttgcccagacattcatcctagtctgttcacgctgtgctatagtttggacatggtttctttgactcctccaaatctcaggctgaaatgtaatccccagtgttggagggatgctaatggaagttgtttgggttatgggtaggatctctcatgaatggcttggtgttgycctagtgattgataatgagggcgttcttgctctattagttccctggttgttaaa

SEQ ID NO: 843239 - DNA, 635 bp, Homo sapiens
ctatttctagagttttacatacactataaaaggatggaattttaccgacttgccctatggaaggattctacatccccaccccacrtaagtcaggcatagccatatgatttgctttggccaagggaatttgagtggaagtgacatgtgagacatccaagcagaagctttaagaggctcccccattctctcttttccttattccatgagatcagcatgttccagctgcttcttccagctgtgtccagagatacagctgaattcaacccatcacaaacatgcaattaagatataaatttttaggctgggcgcagtggctcacgcctgtaatcccagcactctgggaggctgaggcagatggattgcttgagctggggagttcgagaccagcctgagcaacatggtaaaaccctgtctccacaaaaaccacaaaaaattagctgggccttgtggcacacatctgtagtcccagctacttgggaggctgagatgagaggatcacctgagcccaggaggtcgaggctacggtgagccatgatcatgccactgcactacagcctgggagacagagtgagaccctgtctcaacaaaaaaacaaacaaacaaaagacataaacttttattaatataagacactg

SEQ ID NO: 843240 - DNA, 535 bp, Homo sapiens
tgccatttacattagcacaaaaataagtataaatctaacaaaatatgtacaagtctatgtgagcaaaactatcaaactctggtggaagaaactaaagaaaacctaaataaatggatagatattccatgttcatggataaaagactcaatactgttaatatatcagttcttccctatttaatctatagattcaacacgatcccaataaaaatcccaatgagtaattttgtggatgtcgacacatttattctaaaatgtatacagaaatgcaaaagaaccagaacaaccaacaaaatgctgaggaagaacaaagttggaggactgacactacctcacttcaagacttacaacaaaactatagtaatcaaggcagtgtggtcttggcaaaagaacagacaaataaatcaatggaacagaatagagaatttagaaatagacccacacaaatmgtgaactgatctttaaaaagaagcaaaagcaatgcaatggagaaaggatagccttttcaacaaatggtggtggaacaacaggacgtc

SEQ ID NO: 843241 - DNA, 431 bp, Homo sapiens
tcctgtgctgcgctggccctgggatcctgggggtcctcrcaacggtgctgaggacatggctctggtccctctgccggctgagagcaagcggccgtccatgcatccccggtgtctcatgggagcgggcccttggcctgcggggtctgcactcaccctgggtagaggtcgtcagaactgagttagctgcagggcaccctggtggagtccacagagatctgggaacacgacgtgaggaaagccacaggcttgttgtcaggagtttcaggcagagccacccggtcgcctttcaccctccagggggctggccccttctcttggaacttggggatgccttccctgctgcttctggcttaaccgactgaatttgccggcaactgcctttcgttaccagcagatgaaaaaagcggtgagtgtggggtgtgaggctgcgg

SEQ ID NO: 843242 - DNA, 659 bp, Homo sapiens
gtcattcatggcggcatgaaaatacattttgtctaacgtcacctttaagtcatgacagaatatgagaggaaatcagagggaccatgctgtcgtcctgggtgcaaaataaaagtcgagtttcgtgggtcctggccatttctaggaccagttatatttttgatgaagccacattggatgttaagtaaagtacgctctttgcctgtttctgggtaatggatctggagggattggaatacattttttgtattttttcaaaatattacaatgggcatgataatttttagcaagaatcagtgaagtaattaaaataaaaacattttatgctttatgcttttctagaaattgccattttgtttgtcaaccctgtgatttaataactcaatgcttgaatgctgctgcgtgataatgagggaaaaatgggaacaggagacatgtttgctgttggatgtggagtgcaaaaacacaattgtgatttggccaaagaacagctcactagcaaatatctacctccagggaaaaccgagttcacttgctctagcaaagctggcttcatggackgatgggaagattaagtggttaatttccataaagtctggaagagtgcctggcgtagcttaggcacatcaatcaatgtaagttatgcttgcggttattaaaat

SEQ ID NO: 843243 - DNA, 575 bp, Homo sapiens
ggggacattttccaagccaccattagaatatgagctgtcacctgggcgagccccactcccccatgcccccagcccgctcgtcagcatccacgcaatcatggcaggagcccctgtggcagctgagccaccttgggttttcctcaattccatctcactgacttggtgatgacagccccaaagcaggcaggacaaatcccctctttcttcctagaaaagtacctgaaataacacgctcattgttagactccaggagttggtgctgaggaagggtccttggggctgggacacggagaacagccaccggtcactgtagacccttttgtcctggctgcctttcccctctattggcacatgttccttttccatcaaaaatttagttacaattatttttttaaaataagaagaccagaaagaacacacagggctgactgccttttgtaggacaaaacwcgaacagggaaatttaacttgcgtgtaacatgcacacccagacgaccttatttcaatcatacccaattttaaaatccaggaaccggccacagtaaggaaaggcaggcatgtttcaggctgtccag

SEQ ID NO: 843244 - DNA, 633 bp, Homo sapiens
gaaggtctctcgctgcccatgtatctttgaaagagaggaaaccacagcctcttgttgattacacactacctatgwggtggagtttcttatcttcctttgcatttttctctcttctttatcttcttgaatcaacttggagccttctaccttaaggaactcatactctctagtttccaacttttttccttaaaagattcttcccaccaaacaagaatctattgactgctttcatccccagctcccggctgccgttatccccagctctgtgcctttataggaaccattgctaattaaccaaaaagtggagagaggaaaagacaggattcaggcaaaacatgagccatggaattacattttttggcctcttccatccttacttcctataatacccaatgtggaaatccaagcgcagttggaatggagtggctgtcactgataaaagggctgctttgcagggtgggcaccaagtccccagccccactttcatcacccttcgccaccctggaggccatctatcgtgtacttcaccctcctgctcccattgtcatttgtattcaattaggtgggaaatggaccaacgtaaaccactaatgtgataaaccactaataagatgctgcattttgtaaatacgt

SEQ ID NO: 843245 - DNA, 598 bp, Homo sapiens
agcaggtatatgaccaaaaatcctttctctgacattgtattaggccattcttgcattactataaaggaatacctgagactgtgtaatttataaataaaagaggtttaattggctcatggttctgcaggctatacaggcagcatggccctggcatttgcttgacttctagggaggcctcaggaaacttccaatcatggaggaaggtgaaggagaagaaggcacatcacatggcaaaagcaggagcaagagagagagagagagtgagcagggagttgccacatgctttttttttttctttttttttttttgagacagtctcactttgtcacccaggctggagtgcagtggcgcaatgtcggctcactgcaacctccacctcccaggttcaagcgattctcctgcctcagcctcccaagtagctaggattacaggcatgtgccaccatgcccggctaatttttgtatttttaatagagacggggtttcrccacaaagttttaaatgaccagatcttgcaagaactcactgtcaagaagctaggaccaagccatgagggctccccatccaagcaccttgcaccaggcctccccccgagcaat

SEQ ID NO: 843246 - DNA, 619 bp, Homo sapiens
taaactaattcactgtatgatgcagttactcatcagtacctcygcactacctctgtcatggccaagttcttgttgttccagggttttctgttgcctagaggggtgcaggaagtcagccaggcagtcaggaaggcacttctgtgtctgacctcttcgaccccttctatgatgagtaagggcccaagacattgtggcccaagaaaccaagtttggcgacagtttggttccagttggtacagtcagacaagctctgaggccaagctgtgtattactgcctggctacaccacacacccacagagctagacaggtttccttaggaactggctgaggcctcgagcccttcccacgcaccagctgtcagcttctgggactggcaggttcctagagatgcagacaggacattgggtgctctgaggccatgcagacatgcatcagacaaccaagggccggcagcaccccgagccagccatgaccttttcaggcagtttactcccaggaatgatacctttccggggcactgtacaagggctgtgagactggttgagaccagaagaggagggagccttatctcctgactccctggcctcactttttaacctcatcaccttgcctcggctc

SEQ ID NO: 843247 - DNA, 655 bp, Homo sapiens
ttgagaagccaaggcaggaggatcacttgaaccgaggagtttgagaccagcctgagcaacrtggtgagactacagctctacaaaaactacaaaaattagccaggtacagtggcacacacctgtggtcccagctactcaaaaggctgaggcaggaggatcacttgagcccaggaggttgagactgcactgacccttatcacaccaacaccactgcattccagcctatgtgtagatcgagaacttgtctcaaaaaaagaaaaagaaaaaaggaaaatcctactagtttaagccaatatttaacaaatcactccaagacattatgctgcaatttttaaaaggttccagtattctcaacttctctcaaatgatgatagcaaacacttctgcttcttaaaaggatagcagtcccttatatatgaatagggttttacattttaccaagtaattttatacatattcacttttgcatcaaccttgtgaagcagataagattatttccattttacagatgaagttatagactaagagaaggtaacaggcctctctctcaatgagcacccagatggtagacgtatctattgactcaacgccttctccactataccatgctgaccctgagttgctttgaaatattccatagccttgttaactgagg

SEQ ID NO: 843248 - DNA, 628 bp, Homo sapiens
tataatttatatattacggaattggaataaattaagcacgctgtggcccccttaggatgacttccccaagcttcayaaatgcaaggcaacctttctcattagcactttcttcaaatctccaaatgagaagaccctcagacaggagaaacacttgagaatctcccccaacccccatctgcagaggaatgaggtgacaaggtcctgctgcccaggtctctctttttttttttttaagacaaggtctaactcccattgcccaggctgtagtgcagtggtgcaatcacaactcactgcagcctcgacctcccaaactcaagtgatcctcctgcctcagcctccagagtagctgggatcacaggcatgcaccatcacatccagctaatttttctgtatttttagtagagacggggtttcaccatgttgcccaggctggtcaggaactccaggcctcaagtgatctgcctgcctcggcctcccaaagtgctgggattacaggcatgagctactgtgcccggccctttaggtcttcttgatctatccaggagctcatcccttagaaatccaggaaggcgccccaagaacctcacatgagatgcctttcccctcacagaaattaccgttgtctgaa

SEQ ID NO: 843249 - DNA, 611 bp, Homo sapiens
cagacagcgacgcctgctggcaaagcatgatattgcactatagctctatcagactttgttaatcacgaataaaggaaaagactaagagcaaagttttggggagatttaaatragacattagatgataaacaggcttggaaagagttcctatgactttgagaaaaaaataataaagagatgatattgggtttgggacaataactattgcaaagttcttcaaaaacacagtgaagtaacagcagactgtgatattggtgcctatcttaaatcttcaccagttgcttttaacagtatttcagtttatttctatccatgggacatcttgaatatacattataatataattaattaattttaatagtattaatgtagtaaaactccattaaacaatcaaagtgaaaccccctccaagtatttattatttggcccttcagtatttatttttattaaaaatttaggaacctaatgaataaatatggaacagtgctgttctgcatgctggagagtgataaacaacatggaccaggctctgggccttagagaatttccatttcagtgggagagaccaatagtaaacaataaatgagatcattccagatggtaacagtgtt

SEQ ID NO: 843250 - DNA, 640 bp, Homo sapiens
ttttttgtagtggtattatttgattcatttgcctttactttttgtgtatttactataagttttaaatttgtstataccatgaggcttacataaaacattttatagtttttttccaatatagcaaattgaaggcattgctagcattatctctcctaattggaaggacaaaatactgtgtataggttcacattgtacacttttttaaagaagtaacacggtgactcaaccaaaaaaacagaaggaacctatggactctttgaaggaagcagggggaggcagcatacactatgagtcaggcaaagtcccccagttgtgagagggggagagtttgcccctgggatatacaccctcactgtggaaccagaatatcctggacacagggaaaggccctaatcccactcaactcagtaatgggcttggggaaggccatggaatataaaaataggagcagcagtgtgaagacccttacatgcactcccagattccaatgtggactgagggcaacaatttattactcttcctcatgggagactctctctaggaaagccaaaaagttcaggcactggtcagaggttgaaagaagctctcagtggggtttcacaatataacctcaggtagggatgaagtctcttgggcaggg

SEQ ID NO: 843251 - DNA, 513 bp, Homo sapiens
agtaagctaaaaactcctgcacagcaagagaaataatcagcagagtacacagacaccccacagaatgggaaaaatrtttgcaaactatgcatctgtcataggactaatatctagaatctatgataactcaaacaaatcagcaagaagaaaaaccaaataactgaatcaaaaaatgggcagaggacatgaatagataattctcaaaagtagatacacgaatggtcaacaaatatgtgaaaagatgctcaacatcactaattttcaggaaaatgcaaactatgaccacaatgagataccaccttactcttgtaggaatggccataattagaaaatcaaaaaatatataatagatgttggtgtaaatgtgctgaaaaggtaacacttttacactgctggtgggaatgtaaaccagtacaaccactgtggaaaacagtatagagattctttaaagaactaaaagtagaactatcatttgattcaggaaccccaccactgggtatctaccccaaggaa

SEQ ID NO: 843252 - DNA, 624 bp, Homo sapiens
ctttccgcctctagaactggcagaaataaatttgtgttctttataaatcatccagtcttaggtattytgttatagcagcataaattgactaagacactgacttagcaggattatctggtaaaaatcaactttaaaaggaggtacgcagttgagcctatgagaaggttcaggaacttcactaaagattacccaagcaaagaatccttgtcagcctccctcttgtttaagaaaataagacacatcctttttttctttgaatgttataagtccattttctcatttaactagtttttcattaatgaggaagtgacttatctgttgcgactatgtagtagaaagtatttgctgaattctcatagcaggtaggcatttaatgaggggaggttggtgtctataaaaataaaagtaaaacaaggttaatagttggaaaaatctataaactcagtttctgagtccacagggcagccagtcaagatttttataagattgccaactagacacaaccaggagaaatgtctgccactgacagactggtactttggaaagactgacacactctgagcatatcttcagagggaaggcattgagagtgggtagaggaaggacatagatgtcgtactaaag

SEQ ID NO: 843253 - DNA, 623 bp, Homo sapiens
aatggatttttagatgttgatttgctgaatccaaatgtaatgaatttgtttattagttataacaatttttgcaggagattttagkgttattttgtgtatagaattatgtcacctaaaaacagagaaaatgttgtttctccctttctaattttaatgacttttatttattttcttgcctaattgctctggctagggcttcctctgaaaagatcaataatgagtaaggggattggatcactaaccaaagacctcccaacaaagaaaatcctaggaacaaatggcttcactggtgaattctaccaaatagttaaataaaaatttatgtaaatccttctcaaactcctccaaaacatttaagagtatggaacactttaaaactcattctatgtggccagtgtcacaccagaaaaggacactatgatgaaagaaaactagaggctactatccctgataaatatggatgccaaattctcaacaagtactagcaaactgaattcactggctcattaaaagaataacatgctatgatcaagtgagatttattcctggaattcagaataaatgtgatatacaagaatgaagtataaacatcatatgatcaacttaataaagaaaatgtcttt

SEQ ID NO: 843254 - DNA, 643 bp, Homo sapiens
atatgaagtcaggtagtgtgattcctccagttttgttctttttgctcacaatagctttggctattctgggtcttctgtggttccataaaaaatttagaattttttttacatctgtgaaaaatgtcattcatattttggtggggattacatttaatgtgtagattgctttgggtaggatggacattttaacaatacttattcttccaatccatgaacatggaaaatccttttattgtgtttgtagcctgttcaattactttcaccaatgttttacagtttttattgcagaaatgtttcccttctttggctaatttattttctaggttttgaattttatttgtagctattgtaagtgagattactttttcatttatttttcaaattttttgctgttggtgtatagaaacaatactgatttttgcatgtagattatgtgccctgcaactttacttatttatcagttctaacagtttttttgggagtcttcaggttttcacaaacataagatcacatcatcctcaaacaaggataatttgagtttttcctttccaatgyggatgccctttatttctttctcttgtctgaatgttctaactaggacttccagtactatgttgaatcagtggtgaaagtgggcatcttt

SEQ ID NO: 843255 - DNA, 597 bp, Homo sapiens
gagccctcatagaggcagtgaggaagggaaatgtggggtcagagyccccacatagagtcctccatggggcactgcctagtggagctgtgagaagaaggcgaccatccctccagactccagaatggtaaatccactgacagattgcaccatgcacctgaaaaagccggagacactcaatgccagcctgtgaaagcaaccaggagaggagctgtaccctgtaaagccacaggagtggaactgcctaaggccttgggagcccacctcttgcattcacatgacctggatgtgagacatggagccaaaatgatgatttcagaactttaagatttgactgctttattggattttggatctggatgagacctgtagcccctttgttttggccaatttctcccatttggaatgagtgtatttacccaatgcctctatttaccattcctctattgtatataggaagtaactaacttaatattgattttatgggctcataggtggaaggaacttgccttgtctcagatgggactttggacttggacttctgagttaatgctgaaatgagttaagattttgaaggactgctagaagaccataattgtg

SEQ ID NO: 843256 - DNA, 653 bp, Homo sapiens
gaagaaaatgaacagaatatgtcaaatgtcaatactaaaccaaagtgttatgtttttcaaacaaaattggcattttgttacaataatgcaacaaaactttctatgcatttataaatatgttccccattttactgaaataaattcttaaatatctaatggatttcttcttagagaagttaaatattcatttctttaaaatatgcagcctgctgcttaataaatagaggttttataactgtgcttttgtttatatatttaaacgtataatgtaaaatttgttatatatatatataaaacgtgtgtgtgtgtgtgtgtgtgtgtgtgtgtgtgtgtgtgtaaaacaaatgttgcatcttattccgtgttaaaaccaagggagtctttagggataaagagtttaatcacatgagggaattaaactctttagagctctaggggactattgatttagattgtgttttcatctctttaaaagacaccaatatgtccttaccaaagattatttgttgtctgctttgataaayatatgaccagattggagctgaaacctaaactaccagggatcaatcacacattgcatcattcatcctaagccatgcatttgaaattatcgtgtccttttttttgacaaacaagactaaaaaagacaaaaa

SEQ ID NO: 843257 - DNA, 576 bp, Homo sapiens
gcattagaaggggcccaggcaatctgcactggacagcgagtgaaagaccttgatcctagcttcagttgttacctgagcaccattcccaagactttcatcatctatgggctaaaagctgccaggtctccaactatgaacacaatgcctcatgtgcaatttcccttctgatgcccctcaagcacctcagaatcaacagacacgtgccatagtgatcaccacaccagccccgaacctcttcctttgcagccatcttccaggtgagccagcacatgagccagccacagccttgctcctccttctccttctccagtgccccccaagcacctactccattgccgacacttgtttaattctgcctcccaaatgtcagtcaattctggagatggctctcaagcctgctgcagagcacagtcacctccccctcctgaattactaacgcgtcccagctgggctctcttttttattttgcccctttcaatctgacccaaggcagtgagttgggcactctcctactcagacctctgcaatakctccctagtgctcttggagaagtcccatccttaaaggtggatccca

SEQ ID NO: 843258 - DNA, 528 bp, Homo sapiens
ggtgtgcagtaatatctcattgtggttttaatttgcgtttccctggtgatcagtgacgcagagctccttttcatgtacttggccatttctatgtctttgtagaaatgtctgttcaattattttgcccatttcttaatttgcttaatttttttttctgttaagttttatgagctccttatatatagatggtccctgaagtataataggattatatctggataaacccatcataaataaaaaatcataagtcaaaatgaatttaatacctttataaatccagcataaagtcacaaaaatcatcagttgaactatcataaattagagatcatctgtattttggatattaaccctttatcagatatatggtttgcaaatatttttttttcatttcataggtcgtcttttcatttggttgattgtttcttttccygtgaagatgctttttcgtttgattcagcagactacattaagacattgtgatgtgaagtagagccctaaaatgaagcagtagctgttaaggggatatgt

SEQ ID NO: 843259 - DNA, 580 bp, Homo sapiens
ggtctttttaaaaaaaataaccctgaataatcaggagaatttttttgatgaatgagggcactcctctccagctgtcccaggggtgcgaggagaacagtgtccatgagggggcgccagagcaccaggcccggggctgcagcctcccgcacccacccggcctggcctgcagggccagctctccaggcgctcccagggacttcccggcctcctaccctgggaatctggaaactccctggctcagactcagcagcccagacgctgcctggaggatcctctggttctgggcattcaccactggctttgtttggacaaaggctctgctgcgtgacagatcctgggggatgcctgagttatcgttatcatgctccagcggaagtgggtatcctcgtcctgggttacacaccaggaaactgaggcacagaaatgcacggagccggggtccaaacccacggatgcccaacccccgaatctttgccagcagtctctgagaatcagtctggatctcagaatgattgtaataatcttggaggcttagaaggctagactcwtagaaatattcagttcaaatatacacgtgtat

SEQ ID NO: 843260 - DNA, 403 bp, Homo sapiens
cctgcctcaggtgtgctccctcccccaggtgtgctccctgtgtctggtgtgctccctgctccaggtgtattctctgctcccaccactgctcaaaagctcactctggcccctgggtctttgtacatgcaattcctttgccagggtgcctgctctgctctagccaattgtcccaccatttttaggaaccagcaggagtccccacctcctccaggaggtcttttgagtctaccctgtggttgagtctgccagccttgactcacagggtttcgagtattgtgtgtttccagatcttctctgagtttcaggtgatttggaggggaggttaygtggaaggaggccaggcaatcaataggcttatattcctctgttcctccaaagctctgtgaccttggatcagctacta

SEQ ID NO: 843261 - DNA, 512 bp, Homo sapiens
aacaccaaacttctgagtcttgggtaattatgaatatactaacttgggaccaaagggtgaggccatactgtccttgccatttggccattagaacttaataaatgarcccctattattaaataaataaaatacaatgggcttgtacctccttgccatactagttcaattttaactactttattaattgaaatatcagcagcagtagggtgctaactgcccagattttaccaaagagtcactaaccattgtggaagtaacttgtgcagtctgcaagtcaggcccatcttataagtcactgcatggatagttttcctgcagtcaccagcaaacctgtgatattaagggtcctcttccctcagtagtcattttctgttggatatccattccaatcaactgctgtatccttaggtaaccttaatttttcttgacaataggcatttctaaaatcctaactaactgtcacaaagaaggtacatgttatggagctaacacatttttgaagaatcaaatga

SEQ ID NO: 843262 - DNA, 618 bp, Homo sapiens
aaattcagttaaattatagatttgaatgatactattgactcccttgattgaattggcataataactgctgaatacacatttttctccccaagtgtacatggaacattcatcaagatggctcatatgctgggtaaaataacaagtctcaataaatttcaaaagatccaaatattataaagtgttttctaaccaaaatggaattaaatttgaaattaataagctatttagatttttttttaaaaaaagaaatattacgggagaatgttcctgaaatctagcacatttcatactgaacagtaaaagactcacactccagggattcagtattttttctcttctgtcaattaaaggaatttgattgttaatttaaaaacccagtctttataagtatgtgattctgattttattgtaagtgtttgttcctggtggttttggttttggagcttgcatactcccacaccaagaccctaagagtggagctacaaaggatggagcctgtctccattcactttggaggcctgcagaaaaacccaacactgtttttttttttttccaagttggataaactcttaacgtttcrcagtggggtgttgattttcctggccagcctgctgaact

SEQ ID NO: 843263 - DNA, 615 bp, Homo sapiens
cttagaaatttcttctgcatgataccccaaaacatcactcttaagctcaagcttccacagatccctagagcaggggaactatgcagccaacttcttcactaacacaaacaaatgtgacctttgactayagtccagcactttgggaggctgagtgagcagatagcttgagctcaggagttagagactagcctgggccatatggtaaaactccatctctacaaaaaatacaaaaattagctgagcatgatggtgcatgcctgtagtcccagctacttggtaggctgaggtgggagaatcactgaatctgggaggtcaaggatgcagtgagctgagattgcaccacttcactctagcctgagtaacaaagagagacattgtcaaaaagaaagaaaggaagaaagaaagaaagagagagagcgagagaaagaaagaaagaaaaaagaaagagacatttgctctagtttccaataagtttctcatttccatgtgagacttcctaggctgagggcctagactttactatccatatcactatcagcattttggtcacaatcattcaacaagtctctaggaagttctaaactatccctaatcttcttgtcttcttctgagccc

SEQ ID NO: 843264 - DNA, 522 bp, Homo sapiens
agcccacatggaaagagatcagggcactggaagaacgctttgctttctctacttcctatctcctccctatgtaaacccattgatgaggttcctacctcttaaacaacagttaaataattgatcctgggcaatgtcatcaccacacccccaggacctcctttggaacgcctaatgtctgaactgatgagtaagccctatccctgtgtttcagagtgctgtgagcctgcatgactcaccaactctgattcttgatctgttttgtgaactcccactagttctgggccatgctctgggccttgagttttacaataactttaaagatgaaaatcttaaaatcacatgccaaaaaaaaaagtgagagacagagatcacatgctattttcctaggtctcagatcatagccaagtatttggcggggtacatttgatwgggctgggagagataaacaggattgtctacgatgaaataaaacagctgcttttactgcaaccaatgcttctagctgctctacataacagtttg

SEQ ID NO: 843265 - DNA, 568 bp, Homo sapiens
ttagggtgaaatcctagtgaaacctgactggacaggttctaggcttgcaaagggagagaaatgatctgtagaagaacctaaagaatctggctagtacgwattggcaggagctgggaaggtatgcatgagactggatcctgaggacaatgggcgaaggaggtagaacaggaagttggtgtgctctcccaggatacggaacttaaaaccctggcgaggactctaggaagtgttactaacacactggtatttggaaacctggagtaaacaatggcccacactaagtgaagcagaacttccatggcagattgcacagggaaggattaaagggctcaaagaagcagacatgttggagtagatatactactgaagtctggaaaacccaccagctgattaaggcctggaggatacactcaacttatgaaattaataagaaacatgctggtgagggtggtaccagtcacgctgagaagcacagtagtggtaaggtgataaatgagtcctggcccaggtcctgcttacagtgggtctggtgggtctagagacccacccagtggtcacttcctcagtt

SEQ ID NO: 843266 - DNA, 525 bp, Homo sapiens
tcaaagggaatgcttccagcttttgcccattcagtatkatgttggctgtgggtttctcataaatagctcttattattttgagacacgttccatcaatacctacataattgagtttttagcgtgaagtggtgttgaattttatcgaagcctttttctgcatctattaagatgatcatgtggtttttgtcattggttctgtttatgtgatggattacatttattgatttgtgtatgttgaactagccttgcatcccagggatgaagctgacttgatggtggtgcataagctttttgatgtactgctggattcagtttgccagtattttattgaggattttcgcattggtgttcatcagggatattggcctgaaattttctttttttgttgtgtctctgccaggttttggtatcaggatgatgttggcctcataaatttagttagggaggagtccttgtttttctattgtttgggatagtttcagaaggaatgataccagctccttttttgtacatctggcagaattt

SEQ ID NO: 843267 - DNA, 525 bp, Homo sapiens
tcaaagggaatgcttccagcttttgcccattcagtattatgttggctgtgggtttctcataaatagctcttattattttgagacacgttccatcaatacctacataattgagtttttagcgtgaagtggtgttgaattttatcgaagcctttttctgcatctattaagatgatcatgtggtttttgtcattggttctgtttatgtgatggattacatttattgatttgtgtatgttgaactagccttgcatcccagggatgaagctgacttgatggtggtgcataagctttttgatgtactgctggattcagtttgccagtattttattgaggattttcgcattggtgttcatcagggatattggcctgaaattttctttttttgttgtgtctctgccaggttttggtatcaggatgatgttggcctcataaatttagttagggaggagtccttgtttttctattgtttgggatagtttcagaaggaatgataycagctccttttttgtacatctggcagaattt

SEQ ID NO: 843268 - DNA, 564 bp, Homo sapiens
aatgtcacagaatatggaaatatatgtatgtatgcttaaaaacagggatactwtgtagtgttagatgattttgttgttctgtgaacatcatagagtatacttacacaaatctagatggtatagtcttctacacacctaggatatatggtatagtccattgctactaggctacaaacctatacagcatgttactgtactgaatactgtaggcaattgtaataaaataacaggtagttatgtatttacatatgtcaaaacacaaaaaaggtagaggaaaatacagcataacagattgcaacatggtacacttgtgtgggacacttaacgtcaatggagcttgcagaatgggaagtcactctgggtgagtcagtgagtgcttagtgagttaatgtgagggcctaggacattactgtacattcctgtagactttataaatactgtacaattaggctacactaaatttataaaaaatacttttctttcttcaatagtagattaaccttagcttactgtaactgttgactttataaatttttaatttttaaaaatattttcactcataat

SEQ ID NO: 843269 - DNA, 470 bp, Homo sapiens
acacattacaaaaagtattacaatactaactttaattagaatgggatcaactaaagatctactttgcaatctgtagggtgactgctaaaataattaaatgcaatcaggtagatccaaaaatctcatggggaaaccaaactgtatacctagaatatacagttaactaaaagacggcagaaaaaatgatcatattaaaagtagctgggacacataaaacataaataatatgatggtagactcaaattcaaccacatcagcagttaaatataaatataataagcactgcaataaaagacagagattttcagactttttaaaatcacaagccaacaaaagataaacggtaggaaaagatgtggcakacccggtaatatcagacaagcaggatattaagcggtgctgctccaagacaataaagattatcaggaataagaagcagaactccaaaataacaaaatgatcaatttatt

SEQ ID NO: 843270 - DNA, 627 bp, Homo sapiens
tttctggtagaattgttgtgtcaaagagtaagcatgttattaaggctttggtatgtaacgtcaaattgcaygaatgagggaaggagttctcaggaagtgaaaatgggatcagcaacagcatgaaatggaaaagcatgggggtatgtctggaaaatggcaaacactccaatctgaatggaatgtaaagtgcttgaagacaagagattgaagcactgcttctaaattggtctggacccagcttgtggagcactttgaacaccagacttcagaatttagactctgtcgagcagcactcaaaaaccagcatacatttttgaactggggagtgaaatgatcagattctgtctaaaataatttgctcaagaaaaacttgaggaaagaaaaacttctttcccttcataagaggagtcattcatcacaactgcatcagtacaaatggactggtgggggtatatttcattattcttttaacatggtacattcttgaaattacctatttttacacacagagaaataaaaggattaatataaagaataaatatatcaataacaataattatatgtattctattttaatatatggattattttatatattctataaatgtataatatacttaatattat

SEQ ID NO: 843271 - DNA, 780 bp, Homo sapiens
taattggagaaggggagggaatgggggagctggggaatgcagaaactttttcctgccattgctggaaaacttcatgctgtggttttggggaacaaatagcccagtgtttcactgctttgggtccgaagggtggaggggaggtgggcactgagtggggagggagatatgctctgttcagtccacctttcaggttggcaagggacggctcagcttggtgcactggagaaggaattcctaaatccttattatttctaaacttgtggctttgcaccagaggcacaagttttggtcacatgcacatgttgtaaatttgtccatcagcagatatcatgattttcagaggcaactggcacatcaagtagaaatcaataaatagtgttcagtgacaatgaaaggtaattatgcagctttttaaaaagtagcgttatcgttgctacaccataaggagagaagagcagtccaatgggcagaagtgagaactacaaatagaatttttcacttagcattcatttggtcttctacttgtatccacttaataaacactgtgtctctggccaggctggtctcgaactcctgccctcgtgatccacatgccttggcctcccaaagtgttgggattacagaagtgagccaccgtgcccggcccttccttccttttaaataacctccataggcctgagrgttcacattggaggacaccaggaccactgattcagaaaaacttgcagaaagacactcgggggagggtgtaggatccagggtatcttagcctagagctga

SEQ ID NO: 843272 - DNA, 525 bp, Homo sapiens
gtttgcggtgatgctggtataggcaaacctactgcgttaccagttgtataaacgtatagctcgtacagttgtgcatagcacattctacttgataatgatgatgmgtgctatactatacattttattgttattttagagtgtactcctcctactaattagaaaaacaagttaattgtaaagcagctgcaggcaggtcctgtgggaggtgtccagaagaaggcattgtcatcacaggaggtgacggctctgtgcgtgtcattgcccctgcagaccttccagtgggaccagatgttggggggaagacagtgacaccgaggaccctgaccctgtgtgggcctaggccactgtgtgtttgcctctttgtttttaacagaaacattttaaaagttaaaaaaaaaaatgaaaaaatagaaaaaagcttatagaatgagaatataaagaaagaaaataattttgtacagctgtataatgtgtttgtgttttaagcaaagtgttataaaagagtcaaaaagttaaaaaaattta

SEQ ID NO: 843273 - DNA, 567 bp, Homo sapiens
ttctgttattaattccattttatacatggtgagactgaaatgcaagataaaggactggactgaagctaaacaaacctgcactgggcgargttgaaaaagacctttttaatctataagtcggtttttgaaaattcaagtttctactttataattttagttttccttttaaacgtatattattgttagttgcactgttcaaaaagttttacagcttctatttcaatcagcactggtatactaatatttttaagtatctcctatctaaaaccaaaatctacgtaaaacctaaaagtaccaggtaatagaggacaacagagcaagactgtctcttaaaaaaagaagtatcacataataggaataaatatgaggacagaaagtaataatatttttgaatttctgattaaactttgcacttactttaaaatttttttcgaaatattatgaaaaccaggttctgagaccagccacatgaaataaaccttttcctgccccaattttcacagcctctagaaaatagtaggtaccagggaaaagattaatacatctaaaaaaaaaaagatacaaata

SEQ ID NO: 843274 - DNA, 567 bp, Homo sapiens
ttctgttattaattccattttatacatggtgagactgaaatgcaagataaaggactggactgaagctaaacaaacctgcactgggcgaggttgaaaaagacctttttaatctataagtcrgtttttgaaaattcaagtttctactttataattttagttttccttttaaacgtatattattgttagttgcactgttcaaaaagttttacagcttctatttcaatcagcactggtatactaatatttttaagtatctcctatctaaaaccaaaatctacgtaaaacctaaaagtaccaggtaatagaggacaacagagcaagactgtctcttaaaaaaagaagtatcacataataggaataaatatgaggacagaaagtaataatatttttgaatttctgattaaactttgcacttactttaaaatttttttcgaaatattatgaaaaccaggttctgagaccagccacatgaaataaaccttttcctgccccaattttcacagcctctagaaaatagtaggtaccagggaaaagattaatacatctaaaaaaaaaaagatacaaata

SEQ ID NO: 843275 - DNA, 684 bp, Homo sapiens
atttctgcctccaaagaaagaagaagtaaaaactaaaaagcagaaatgaaatccacaggcagacagcccggcgccacgccctgggcctggtagttaaagatyaacccctgacctaacactggttatgttatctatagtttccagacattgtatggaaaagcattgtaaaaatccctgtcctgttctgttccgttctgattactggtgcatgcagcccccaaacatgcaccccctgcttgctcagttgatcacgaccctctcatgtggacccccttagagttgtgagcccttaaaagggacaggaattgctcactcagggagctcggttcttgagacagaagtcttgccgatgctccaggccaaataaaccccttccttctttaactcggtgtctgaggggttttgtctgcggctcttcctgctgcacattaagtgaggtacaccactgcatattacatggcaggtgctcagtctcctccttccacttcctcactggttttctagtgaagagagaatgaaggggtgggttgcccctccacacctgtgggtgtttctcgtaaggtggaacgagagacttggaaaagaaaaagacacagagacaaagtatagagaaagaaataaggggacccgggggaccagcgttcagcatatggaggatcccaccagcctctgagttcccttagt

SEQ ID NO: 843276 - DNA, 497 bp, Homo sapiens
cctctataacaaacatttctgagagcataggtatccacccccgaagttcccattaaatcttttaaccaaattcatttcctcttgcttagaaatcatcaagcttcagatgatcatgaaacaaaggttccagccacctccatgtgaagacaccacccctggccatcaagaagctaccttgccttcactagacagaacagggagagagttccatgatccacaataggtagggactacgccccaaggtagcatgaagcagttacagaaaaaagaccatcagtccctctgcctcccataaagatttatggggatcacatctctcagggaggaaatgagacaggaaaataaggtctggaggcagggaacataaggccaattcatacttcagctataaaaggaaatatcctctccatagggcatatgctgtaaatgactttgtaactttacctcatcytgtctgtttatatagggcttccgaagtaacaaataagaattctcta

SEQ ID NO: 843277 - DNA, 650 bp, Homo sapiens
ttgcaaaaaaaagaatgatagaatattttttttttttttttgagaggttgtctggctgtgttactcaggctggagggcagtggtgcagtctcggctcactgcaacctctgtctccagagatcaagcgattctcctgcctcagcctcctgagtagctgggatcacaggcgtgcaccactgggcccagctaatttttgtattttcagtagagactgggtttcgccatgttggccaggctggtcttgaactcctgacctcaggtgatctgcccaccttggcctcccaaagtgctgggattacaggtgtgagccaccacacccggctattttcactgttatttatttgttaggtggcatactttccaacttttttcacaacactctatcttaagagatttctatattaatatacagtgtcttcatttgtatatggatataccataatatatttaagccatttcctggtgatgaacacttgggctttactcatttcctggtgatagacactaggttgtttctaatctttcaccaycacaaacaatgcagtgaataactgtgtgtatgtatcatatatacatacacatatatatacacacacacaattatatatgtacagttaactatatatatagctttatatataaatatatac

SEQ ID NO: 843278 - DNA, 634 bp, Homo sapiens
ttaaacacttatacttaatatattcactgctccacaataccttccttcctttagagttatgaaactcctttttttcccttaggktgatgctatggttgcagtataaaagttacatttaacactatttggggttggtgatatagctcattttaaaaattatctatttaaaacctctcaactacagataccaagtagttattattaacaaacattaactgaactcctttatgtgacaaggacatcaataaagagaatatacaccgtctttatcgatataacacccacccctccaaataaaaggaggagaattatgtcagaggtgcatttctcttcaggaacacatattatctgtatgtaattttcaccaccagataattaaacaagtaacaacagagacttcactggaataagggcaattatagcataattcagtttatatcattattagtaagaacaattttagatggtaaagtattacctccaaatttaaagatttataaacaggattatattctggttctttttttttttttttctttttttgagacacgatctcactctgtcacccaggctggagtaccatggcacgatctcactgcaacctccgcatcccagattcaagtgatcctcccac

SEQ ID NO: 843279 - DNA, 394 bp, Homo sapiens
catggccaagcactgcataaggcacatggattgagaaaacaaatataacagctgtaagggacagcagtacctgacatataacggacagttagtcaatgataattccccaccccactcacctcccttgttcgtgtccctctttcaggaaccaattccaatgcacagcttccagggatgagcaatggaggacagaatggaatagagcaggaactaagcaaggatgctaatgcaagatatagccggtaggtggcagcagcgtccgtgaaatgagcccggtctcgggcagccytgcctaaatttctcccaagccaagctgtttgactgtgtgcacgtgtatgaacacaggtgtacggatgtgcatgtgtatgggtcaggtgtatgggtcacaggtgta

SEQ ID NO: 843280 - DNA, 322 bp, Homo sapiens
aattctttattacgtttaaaacattacaaccaaattcaatttgtatgtctgacacagaaaaaaaaagtcatggacaacagtaatacaaacatttcagttttgatgtcacaaggcacaaagacaactgacaggtggccctcacgaagccaacttctcacccttctctgtcccaccctcctactcccttgttctttattctcacacagcaaatttcttatgcagtcgtgtctaatacttttgttaataaaatggcttttccttaaagccaaggtaaaagagaagctatytgtgtctcttttagccttcccagaagaaatgagtc

SEQ ID NO: 843281 - DNA, 578 bp, Homo sapiens
caccgcccaggttcaagcaattctcttgcctcaacctcctgagtagctgggattacaggcacccgccaccacgccyggctaatttttgtatttttagtagagatggggtttcaccatgttggccaggctggtctcgaactgctgacctcaggtgatgcacccacctcagcctcccaaagtgctgggattacaggcattagccaccgtgcccgaccatgtttcataatctttatatatgtcgcatccttcttttggtagagcattcctaggtaccttctggttttgttgttactatgcattgttgctaataggttacaagtcaactgattaatgtacattaatattatgaccaaccatcttgataaacttctcttgttatttctagtattctacagatttagggttgtccatgtatacaaccatgccatctgcaaataagaatggttttgtttcttcctttggaatcttcaaaatttaaatttcttttttcttgtcataagttactgtctagaaaccccaatacatgtaaaatataagtggcgattgttttgtccaaacctgtggctggagttaccccc

SEQ ID NO: 843282 - DNA, 506 bp, Homo sapiens
ggttttgaactccagacctcaagggatcctgctactttggcttcccaaaatgctgggattacagggtgagccactgcttctractaaaatccgagggtttttttttttgtttgtttttctttttttttctggagtgcagtggcgcgatctcggctcactacaagctccgcctcccgggttaactccgttctcctgcctcagcctcccgaatagctggggctacaggcctccgccacgacgcccggctcattttttgtattttttagtagagacggggtttcaccgtcttagccaggatggtctctatctcctgaccttgtgatccgcccgcctcggcctccccaagtgctgggattacaggtgtgagccactgcacccggccaaaatctgagtttcttatataacttataaaatctggctctctggtccctgctcaccctgtggcttccttcccctctcctcaatcccagccccaactctccctcccatgtgcctgggcccatggc

SEQ ID NO: 843283 - DNA, 623 bp, Homo sapiens
gctttttaagccccttatatatctgactaacaaataaaacctcccaagcacttaattcctacgcacataacaaattaaaagtacagtgaatcttaaagttttcttacatgtccaagcatattaatggccttaaaattatgggcaagcagtcagacaggttatgagaaatttatccagatatcattttaaaatttgtaagaattgtgttaaaaaggatggaagatggaaaattgtgtcaagtttaaagtatttgaaccaaaacatgaagactttcaagagtctcaagatataaaaattaaaacttccattctggtaaaggaaccaagaacctacattgggtaaaggacgccctcttcactaaatagtattggaaaaattggatatccacatacagaagaatgaaactcaatccccatctctcaccatatacaaaaatcaactcaagagaaattaaaggcttaaatataagactgaaactttaaaaaatactagaagaaaacagggaaaatactttaggacatagatctaggcaaagatttcacagttaagacctcaaaagcacagacaacaaaaatrataacagacaaatgtaactatattaaactaaaaagcttctgcacagc

SEQ ID NO: 843284 - DNA, 593 bp, Homo sapiens
aacaaaacagttaagatagaaacaataatgagttcttctggyggcttttgtgtaattaaagataattgacagagttttttaaaaaaatagttttcctctttcacagatgccattaactcaggagaaacaggaagtgtgaaaaaagatgaaaatatcacattgtgaggacaaatagctatttaacagctttattaacatatcattcacatatcctataattcatccatttatagtgtacaattcaatggtctttggtatattcacagagcatgcaaccatcatcacatctcattttagaacattttctttaccctgagaagaagcccttaattattagtagtcactcttctttctctgacactgcattttgaagaactgccaaactattttccaaagtggctgcaccattttacatttctaccagcaatgggtgaggtttccaatgtcgccccatcctgcacaacacttattaatgtctgccttttttattacagccatcctgttgggtgtgaagggatatctcattgtggttttgacttgcatttccctaataactaataacattgatcatcttttcagatgcttattgatca

SEQ ID NO: 843285 - DNA, 562 bp, Homo sapiens
tatttcagaaggacactgggagccatggacagctctaaacacaaagtggcatcctcccagagctgaatcccccaccgtctctatcttggccacaaacacttctgagcaccaggacatccactcaattcccactgacccaggtgactaggtcccaggagattgtgtgtctatattcacctccccaacagagcaagtctggccctagcaggtgtgcaagccagtgatctggcaattagagccactgattggaaaatgggctgcttacctgcgacaaaggagggcttctcttctctgaggccttagacaaagcaggcttccagggcagctaattacctgataggtagcaaagctatcacctactgggccttttagctcagttaatagagcaatttgcccagccttttgtccttctcttgttgtgatttcttgacctacaatcgttttacaaaatgrgaaagttacacaaacgctgcttaatccggagttcagaacttggggcccagcttctggccaggccagcagcaaagctactgtagaaccaggtacctaggaaaagatgtgg

SEQ ID NO: 843286 - DNA, 604 bp, Homo sapiens
atccaatgtccatagtttacattaggcttcactcttggtgtcagacattctatggatttgtacaagtgtgtaatgacatgtacccatacctgtagtattatacagaatggtttctctgccctaaaaatcttctgtgccccacctattcatccttccctgagcctaccccatagaaaccactgatatttttaactatctctacaggtttgcctcttacagactgtcatatatttggaaacatacagtatgtaggctttttagactggcttctttcattttgtaatatgcattcaagtttccttcatgtcttcttatggcttaatagctcatttctttcagtgctgaataatatttcattgtctgaatgtaccaccgtttactcattcgcctactgatggacgtctcagttgctttcacattttgccaattcagaatacagtttctataaatatccatatacaggttttctgtgaaaagtttctactccctcaggtaaaagccaaggagttcaaytggtggattgtatgataaaagtatgttttgttttgtaagaaacagccaaactgtcttccaaagtggctgtaccatttatttgccttcccat

SEQ ID NO: 843287 - DNA, 589 bp, Homo sapiens
gagaagtttgggaatataaagctgtatgttgaagggatctcccagctctgagagtttgtgaaatactcaagaaaccacaaggactttcataaaaaggcaatttctgtagcacgyggtggggggataaaagccacgatattttcccattccttttcttcagaacttgatgaaaacatgaaaccatccacaggcaggaagcagaaaatgatcatttcacagcagggggctgctgcggctgtacacagtgcgctgtcaagcgggaggggggcggtctgggctggtgcctctgagggatggtctctccacagcctggcagggccccttccctctgcgggccctagcacccccatgatcgctgtctccgcgacctccttgctctgatggtctcggataccctgagttccctgggtaaagtccaggctctaggtgagccatgcgctttgctgtgggggcgttaggagttaaagaagccaagcaaatgccttctgatttctagcaggagaggatgttcagggatgctagcagccctgagttcatgtgctgctccacttcttactaactgtttgaacttgggaaacagcatacctct

SEQ ID NO: 843288 - DNA, 554 bp, Homo sapiens
tgtgtttgttcttgttcagcgtctgtctcccacagggctggaatccctgagggcagggctggtgtytatccatccatagcctggcacattgaagacactcagagcatatttgtggatctacacatcagcttcccgcctggccacaggtatctatctgggtcctgggccaacttcttcatcttcctcagggtactacagtggtcctagcaaaaccacatcagcctgggggaaccaagaggcgggtctctttctctatctggcatctcacgcaaccagttctttgaggatgaagctccagccagcagcagcaagaagaagaaagactctcaagccctcaaaatctgaaaaatgactcccagtccagacagacctcattctctgccacctgcccccacaacccagagtagacaagaaatacagtttgaggaggggggcctttgaaaccgacattaccaacccaggtttcgttaatctcccattctaaaaattgttcatttcagtggggtggaactttttattcctacaataaaagaacaatgaagaggataaaaaca

SEQ ID NO: 843289 - DNA, 545 bp, Homo sapiens
ctaaagaaatgggcttggggttggctgattactgagctagcagggacctcagatgttgtgggaaatctgcagttaatactttgggggcattttcatataaaatgtaggtgtctgaacttcacacctacctatggaataagaatcttcaagggtgtgacccagaaacctgcattttcaatattctctccccatcatgatctgatggtgagcagttcagaatcatctcattccccctccaccagcacctgttgtatgaatcttctctccggcttccctgacaaaaagatgcttgatctgttttgtttgcatacctccagtaatggggagctcactcactttcatagctattaagtccaaaccttaagcttatgaaacatcccaatgctgacccctggagacatgcagaacaaacagctgcttctgcacaggttaycttgactgggggcagattacacatggtgtgtgtgtggacagtggccaaagagggggctgggactatattccaatgttgtcagaagtcatcattcagatgaaggaacagtaat

SEQ ID NO: 843290 - DNA, 412 bp, Homo sapiens
agctgggaccaggggtgcacaccaccacacccagctttttttttgtatctttagtagaracaggggtcttgccatgttgcccaggctggtctagaactcttgagctcaaccagtctgcctgcctcggcctcccaaagtgctggaattacaggcgtgaccgaccacacccagcctatcatggatgttttcaaacaaaaaaaaaaggttaaaagaattagtgaacacccatatgccctctacttaaattctatcatatacactttactatatattcacctatccatctgttcatctctctctccatcactatatcaattcattttatttctgatgtatttaaagttgcagacatcagtatacatgacccttaaacacttcagcatgcacagcattatttagagttaaatatttg

SEQ ID NO: 843291 - DNA, 412 bp, Homo sapiens
agctgggaccaggggtgcacaccaccacacccagctttttttttgtatctttagtagagacaggggtcttgccatgttgcccaggctggtctagaactcttgagctcaaccagtctgcctgcctcggcctcccaaagtgctggaattacaggcgtgaccgaccacacccagcctatcatggatgttttcaaacaaaaaaaaaaggttaaaagaattagtgaacacccatatgccctctacttaaattctatcatatacactttactatatattcacctatccatctgttcatctctctmtccatcactatatcaattcattttatttctgatgtatttaaagttgcagacatcagtatacatgacccttaaacacttcagcatgcacagcattatttagagttaaatatttg

SEQ ID NO: 843292 - DNA, 418 bp, Homo sapiens
tggccaagggacctggaatctgcattttagaaagctcttcagcccggggcaccaatgaagggttataagcaaggaacaggcattagcagatttacacttcagatagattgtttcagcagtagtgtggaatatagatttgaaagtggggaaagactacagcctcagggatgaaagagaaagctactgaaatagcctatgctaaaatatgatgcatcctgggccagggcagagatacaaagtggaaaggaagccataaatgtgagaaatcattaagggaaaaatcagcatgacattatrattggttcaatgtgggaaagtcagagaaatagagaggaatctaggaggacttacagatctctggcattggaaaccaggtggacagtagtgctgtgaatacagagggggtgtgcagaaaatg

SEQ ID NO: 843293 - DNA, 546 bp, Homo sapiens
gcagaaagttaaggcatgttgaagattgtgaaagttgtaagaaaagttatgaaaaggaatttatgccagaaatattgtataatttaaaaagtaagtaggcctcctgaatgtaaaattayttgaaaaacagtttatttacaaggtatgtaagaaaaataaaatatatttttaataacaggattataaggaggcataaaaatataggtttttacatacattaaaaagttaaaaatatatattttgttttaaaagtttaagcaagttttaaaatgttaattgtaaaggaaattctgtgtgtaaacataatggctaaagttaaagaggtatcatccagtttttctgtgaactggacattaaaataaaagcacaatagatttttcttaaagcactaacctgctctttagcaaaaattataaacagttaaaaagagtctataaaagtcttaccttatagtcagacatcaaaaatagattaaatatctacaagattttattaaaattaagcttaacattaatagcacattaatataaaaaatttaacttatct

SEQ ID NO: 843294 - DNA, 554 bp, Homo sapiens
aatcaactcaagatggatcaaatacttaaatctaagacctgaaaccataaaaattctagaagatagcattggaaaaacccttctagacattggcrttggcaaagacttcatgaccaagaatctaaaagcaaacgcaacaaaaacaaaggtaagtagatgggacttaattaaactaaaaagcttctgcatagcaaaagaaataatcagcagagtaaacagacaacccacagagtgggagaaaatcttcacaaactatgcatctaactaaggactaatatccacaatcttcaaggaactcaaacaaatcagcaaggaaaaaacgaataagctcatcaaaaagtgggctaaggacatgaatagacaattctcaaaataagatattcaaatggccaataaagagatgaaaaaatgctcaacatcactaatgatcagggaaatgcaaatcaaaacctcaatacgataccaccttactcctgcaagaatggtcataagcaaaaaataaaaaaaacaacagatgttggcatggatgtggtgaacagggaacacttttatac

SEQ ID NO: 843295 - DNA, 612 bp, Homo sapiens
atacaccactgattatgaaatataatttatttwaaaaatttttttatttttaatttcgtgggtacacagtaggtgtatatatttatggggtaattgagatgttttggtacaggcatgcaatgagtaataattacatcatggaaaactgggtatccatccccctcaagcatttatcctttctgttacaaacaatccaattatactattttagttattttaaagtgtacaattaaattattattgactatagtgtctgtggtgctctcaaatactaggtcttactcattctttctaattattttttttgcccatccctcctcccctgcaaccctgcctcccaaaactacccttcccagcctctggtaactatccttctattctctctctatgagttcaattgttttgatttttagatctcaaaaataagtgagaacctgtgatgtttgtctttctgtgtctggcttgtttcacttaacataatgatctccagttccatctatgttgttgcaaatgactggatctccttctttttatgtctggctagtactccattgtggaaatgtacaacattttctttctccattcatctgctcatgcacacttaggttgctt

SEQ ID NO: 843296 - DNA, 612 bp, Homo sapiens
atacaccactgattatgaaatataatttattttaaaaatttttttatttttaatttcgtgggtacacagtaggtgtatatatttatggggtaattgagatgttttggtacaggcatgcaatgagtaataattacatcatggaaaactgggtatccatccccctcaagcatttatcctttctgttacaaacaatccaattatactattttagttattttaaagtgtacaattaaattattattgactatagtgtctgtggtgctctcaaatactaggtcttactcattctttctaattattttttttgcccatccctcctcccctgcaaccctgcctcccaaaactacccttcccagcctctggtaactatccttctattctctctctatgagttcaattgttttgatttttagatctcaaaaataagtgagaacctgtgatgtttgtctttctgtgtctggcttgtttcacttaacataatgatctccagttccatctatrttgttgcaaatgactggatctccttctttttatgtctggctagtactccattgtggaaatgtacaacattttctttctccattcatctgctcatgcacacttaggttgctt

SEQ ID NO: 843297 - DNA, 645 bp, Homo sapiens
attagctgacttttctactcaccactttcccattagagcctagcccttagtttcagactttagtgattaaatcctggttctttctactcaggggatcttggcctagagactttggtttcccatctgcaaaatgggttggtaagcaaatgctcatcttgtatcaggcttgctgtgaaaattaaatgatataatgcagaatgcgggacccacatgaagtactgagaagataatatctgtccctgtatagttttatccttgtattatcacttcaaatcccagagatctggggagatgcgtaaggagtactgggtggctagtgtggaaaggggctaagaggcaggatctttgtttccctacctaaccgtaactaaggcaactgtttcatttttttctaaaaacctactccatgtatttaaattttatagacaaaatctggtttgaagaaaagagaatttcagggttttataaacaggtgaatcccaagatttttaaaaaggtttttctgatctcaaatggctgcatagaatttcattgcatggaagccccgttctttacttggtcagtycctttttgttagacatgtagttgtttctaatttttattaatgcaaaaaactctaaaatgaacataattatgcatatattt

SEQ ID NO: 843298 - DNA, 645 bp, Homo sapiens
attagctgacttttctactcaccactttcccattagagcctagcccttagtttcagactttagtgattaaatcctggttctttctactcaggggatcttggcctagagactttggtttcccatctgcaaaatgggttggtaagcaaatgctcatcttgtatcaggcttgctgtgaaaattaaatgatataatgcagaatgcgggacccacatgaagtactgagaagataatatctgtccctgtatagttttatccttgtattatcacttcaaatcccagagatctggggagatgcgtaaggagtactgggtggctagtgtggaaaggggctaagaggcaggatctttgtttccctacctaaccgtaactaaggcaactgtttcatttttttctaaaaacctactccatgtatttaaattttatagacaaaatctggtttgaagaaaagagaatttcagggttttataaacaggtgaatcccaagatttttaaaaaggtttttctgatctcaaatggctgcatagaatttcattgcatggaagccccgttctttacttggtcagttccyttttgttagacatgtagttgtttctaatttttattaatgcaaaaaactctaaaatgaacataattatgcatatattt

SEQ ID NO: 843299 - DNA, 597 bp, Homo sapiens
catctgtcattgtgtgccagtctggcatctgacctcyttcctatgtctggggacttcctcactgcacaggtcttggcagagttcacctcctgtgaaagctgaaaacaacaaattcttgcttttccagcctcccttacacctaagctcaaccaatcagaagccctcactacagactttgaatcaggagcacagtggaagatccattccaatgctggtggcaaccacagcaatggtgtctagtgttcagggaacagtgacacagcgatggcatttagtgtgtggcagcagtgtcctgccaaactggctcggtggcatgattttggctgagatcctgcctgctgcccagccccagttttccaacttcccagaaattctgtgaactactgaacattccctttcagtgcagcccttttctgcttaaatcagctcaggatggtttctcttgcttgccataaaaagcctaagataccaccactgaatcatactctctgggaatgacgccaagtgattctgacacagatgcaggtttgaaacccacggtctcgatgctaacagctctcaaatgtgtatctccagcccgctcctttgaattccaaa

SEQ ID NO: 843300 - DNA, 597 bp, Homo sapiens
catctgtcattgtgtgccagtctggcatctgacctccttcctatgtctggggacttcctcactgcacaggtcttggcagagttcacctcctgtgaaagctgaaaacaacaaattcttgyttttccagcctcccttacacctaagctcaaccaatcagaagccctcactacagactttgaatcaggagcacagtggaagatccattccaatgctggtggcaaccacagcaatggtgtctagtgttcagggaacagtgacacagcgatggcatttagtgtgtggcagcagtgtcctgccaaactggctcggtggcatgattttggctgagatcctgcctgctgcccagccccagttttccaacttcccagaaattctgtgaactactgaacattccctttcagtgcagcccttttctgcttaaatcagctcaggatggtttctcttgcttgccataaaaagcctaagataccaccactgaatcatactctctgggaatgacgccaagtgattctgacacagatgcaggtttgaaacccacggtctcgatgctaacagctctcaaatgtgtatctccagcccgctcctttgaattccaaa

SEQ ID NO: 843301 - DNA, 590 bp, Homo sapiens
ggggtccctttccttttaggtagctgaagcagagagggaaggcagcatacgtcagcgttttcttctgtgcayttatcagaaattcgatcaaagactttaagattttcactatttcttctaccgctatcttctaagaacttcaaagaggaaccaggagtacgggaagagcatgaaagtggacaaggagcgtgaccatggaagcacagcaccacagggaggggtttaggcctccggatgactgcgggcaggcctggataatatccagcctcccacaagaagctggtggagcagagtgttccctgactcctccaaggaaacggagactccctttcacggtttgctaagtaacgggtgccttcccaggcactggcattaccacttgaccaaggagccctcaagcggccctgatgcaggtgtgacagagggctcacctcttgccttcttggtcacttctcacaatgtcccttcagcccctgtccctatacccgccggttattccttggttatacaacaaagagtaatattaaaagttaatgattaataatgtttatactaatgatttataatgtccatgatcatctctatatcta

SEQ ID NO: 843302 - DNA, 626 bp, Homo sapiens
ttggaaggaaatgaatatttaccaagcatcttttttgggccagcattgtgttagatactttatgtatgtctttttatttactttaatttagsgttacgattccagaaagctaggttaaaaaaaatatataaaaatatattggattaagtcatttttaattcctgatagggagacagtttatgttcctctgtggagacaaaaacaattttttttttttttttttgagacggagtctcgctctgtcgcccaggctaaagtgcaatggcgctatctcggctcactgcaagctccgcctcccggcttcacgccattctcctgcctcagcctcctgagtagctgggactacaggcgcctgccaccatgcccggctatttttttttgtatttttagtagagacggggtttcaccatgttagccaggatggtctcgatctcctgacctcgtgatctgcccatctcggcctcctaaagtgctgagattacaggcgtgagccaccgtgcccggccaaaaacaaaatttcttaaaccagtaccaaatgttcccttggaagaaaggacctacccaaagcagaatcatggaaatgaacagttagtcattgttataaccccatctcccagttttacatc

SEQ ID NO: 843303 - DNA, 525 bp, Homo sapiens
cacgtgcaaatcatgggagctacaattcaagatgagatttgggtgggaacacagccaaactataccatttcacccttggcccttcccaaatcacatgtccacacatttcaaaaccaatcacrccttcccaagtcccctaaagtcttaactcatttcagcattaactcaaaagtccacattccaagtctcatctgagacaaggcaattcccttctaccaataagtctgtaaaattgaaagcaagttaattacttcctagatacaatgggggtacaggcattgggtaaatatagctgttccaaatggaagcaatttgccaaaataaaggggctgcaggccccatacaagtccaaaatccagctgggcagtccaatcttaaggctctaaaatgatctactttgactccatgcctcacatcaggtcatgctgatacaagaggtgggttcctatggtcttgggcaacttcacccctgtggctttgcagagttcagccttcctcccagctgctttcatgggctggcattga

SEQ ID NO: 843304 - DNA, 605 bp, Homo sapiens
tttttttttcagagtctcactctgtcacccaggctggagtccagtggcacgatctcggctcacygcaacctctccctcccaggttcaagcaattttcctgccacagactcgtgagtagctaggattacaggagcgtgtcaccatgcccggctaatttttttttttttttttttagtagagacagggtttctccctgttggccaggctggtcttgaactcctgacctcatgatcttcctgcctcggcttcccaaagtgctgggactacagtcgtgagccaccatgccctgctagcagtttgtttttttcccgaggcctctctccttggcttgaagatagccaccttctaactgtggcctcacatggtcatccctctcaagtgtggtctgtgtcctaacctcttattacaatgttctgtcatacggcattatgacccaccctaatgacctcattttaatttagttacttctttcaagactccatctccaaataccaaatacaatcagactctgaggcactgggggttagggctttcacatatgaatttttggggggacacaattcaatccataccattcagtatgacattcaaaagtaaaactgcat

SEQ ID NO: 843305 - DNA, 603 bp, Homo sapiens
ctgaggcactgggggttagggctttcacatatgaatttttggggggacacaattcaatccataccattcagtatgacattcaaaagtaaaactgcatgtgaacactttataagaactaarggaaaggacataagctgtaaaatgggagtaaaggaatggcacagggatggtgttaaaggggtggggttaggatggtggttaaagagttgggctagaattttcccttggtctaatataaaatgaaatgtagaaatagaggcaactcactcataaaaccagggcaatactacagcacgatcttttgataaatataaataattataagagtattctgcttcatttgtgtggacaattaactgtacactatcacttttcagtaataaataagtggttaaatggcaagttgtattatatgcttttgtgtactatgatttgaaactgaaagaattgaacactgtaatattatttcttataactatatgaaggagaataggcgctcaatccaagattgacggagtttctgtaagcccagacagtttctcacactcctaaaaaataaaaatatttttatcaaaaacacacatccttttgttttaagggctg

SEQ ID NO: 843306 - DNA, 603 bp, Homo sapiens
ctgaggcactgggggttagggctttcacatatgaatttttggggggacacaattcaatccataccattcagtatgacattcaaaagtaaaactgcatgtgaacactttataagaactaaaggaaaggacataagctgtaaaatgggagtaaaggaatggcacagggatggtgttaaaggggtggggttaggatggtggttaaagagttgggctagaattttcccttggtctaatataaaatgaaatgtagaaatagaggcaactcactcataaaaccagggcaatactacagcacgatcttttgataaatataaataattataagagtattctgcttcatttgtgtggacaattaactgtacactatcacttttcagtaataaataagtggttaaatggcaagttgtattatatgcttttgtgtactatgatttgaaactgaaagaattgaacactgtaatattatttcttataactatrtgaaggagaataggcgctcaatccaagattgacggagtttctgtaagcccagacagtttctcacactcctaaaaaataaaaatatttttatcaaaaacacacatccttttgttttaagggctg

SEQ ID NO: 843307 - DNA, 603 bp, Homo sapiens
ctgaggcactgggggttagggctttcacatatgaatttttggggggacacaattcaatccataccattcagtatgacattcaaaagtaaaactgcatgtgaacactttataagaactaaaggaaaggacataagctgtaaaatgggagtaaaggaatggcacagggatggtgttaaaggggtggggttaggatggtggttaaagagttgggctagaattttcccttggtctaatataaaatgaaatgtagaaatagaggcaactcactcataaaaccagggcaatactacagcacgatcttttgataaatataaataattataagagtattctgcttcatttgtgtggacaattaactgtacactatcacttttcagtaataaataagtggttaaatggcaagttgtattatatgcttttgtgtactatgatttgaaactgaaagaattgaacactgtaatattatttcttataactatatgaaggagaataggygctcaatccaagattgacggagtttctgtaagcccagacagtttctcacactcctaaaaaataaaaatatttttatcaaaaacacacatccttttgttttaagggctg

SEQ ID NO: 843308 - DNA, 622 bp, Homo sapiens
tacaatcagactctgaggcactgggggttagggctttcacatatgaatttttggggggacacaattcaatccataccattcagtatgacattcaaaagtaaaactgcatgtgaacactttataagaactaaaggaaaggacataagctgtaaaatgggagtaaaggaatggcacagggatggtgttaaaggggtggggttaggatggtggttaaagagttgggctagaattttcccttggtctaatataaaatgaaatgtagaaatagaggcaactcactcataaaaccagggcaatactacagcacgatcttttgataaatataaataattataagagtattctgcttcatttgtgtggacaattaactgtacactatcacttttcagtaataaataagtggttaaatggcaagttgtattatatgcttttgtgtactatgatttgaaactgaaagaattgaacactgtaatattatttcttataactatatgaaggagaataggcgctcaatccaagattgacggagtttctgtaagcccagacagtttctcacactcctaaaaaataaaaatatttttatcaaaawcacacatccttttgttttaagggctgcttacat

SEQ ID NO: 843309 - DNA, 568 bp, Homo sapiens
atgtgaggaattgtgtcttttttctcgttttcaagttcatccttctcatccttttaccactatctcttctaggcccctttgctgcaggtattggtgtgagattggaagtgtgggagttggagggaggagaaaaagaagctgcaccatccatgtattgccatatattgtcctggagccacccgtatcagcacacgtgcacatgcacacaagcacacacaagcacagcctctggcagccccttcagtattattgacctatgactgtgtttagaataatgcctgtggcatagaatgttctttatggtttttagctattcttattattgttttatgaacaaaagtgttccagcatcagattaatttgggaaggctttcattcctatgagatttacaataaaagtgataaaaagtttttaattagagaaatctgtttaactttagttattctagcattccaaaactgtttatttcraaactcaccagatattatcttgtaaaagtgaggtctgtaaaagtattttagaaaatgctcacctagtcggacatctggagtttccagacagtattgc

SEQ ID NO: 843310 - DNA, 413 bp, Homo sapiens
gaattcagcctgcttaagtaccaaacaatactgaagaaaatatgttcagagaatttttaaataaagtctaattatctttaaaatagacaaacagaattagatcatgttttccattataataattatctcttgtggaaaacagcagttggatgaatttagaaaatgaatgaattatgttatataatgtgtatacccatttcatgataccattttttaagacacagaatttctgtaatagcaaatcacttaccataagatttttttttcattaatttgcattcttcacaacaacwaacagaaaagtattgtgattgtgtctcacctgcaatttggtgggcaaactggtacacctactttaacctctatgatcaaatgacactgcttcaggagtattttaggaaagtctgctgcct

SEQ ID NO: 843311 - DNA, 623 bp, Homo sapiens
ttgttatgtccgtgaacaaaatgaggyaatgtcatcactaggcaaaatttatgccaggttttaaaattgtgattcttaattggtataattcaagaattggatattactgggtgattctcagaaataaagacttgatagtcacctaagtatggcaaatgatggtctgaaaaagtttgagttttctttactggagagtgtctccaagctcggaagaagtagctctgtttgagggagggagtgtgccgtattttccagacttctttgaccagagaatcccttcatgaaaagatttcttctatggatcctgtcccaagaaggacacatggggacatgcccatccattggctgctgggattgacagtaacctaggaggctgaaggaagtgttttctggggaagcagggacaaactacagtaagatactctttaaaaattttgtggccaggtgcggtggctcacgcctgtaatcccagcacttggggaggccgaggcaggcagatcacgaggtcaggagatcaagaccatcctggctaacatggtgaaaccccgtctctactaaaagaaatacaaaaaaattagccgggcgtgggggcgggcacctgtagtcccagctactcaggaggc

SEQ ID NO: 843312 - DNA, 633 bp, Homo sapiens
ggcacaatacaaatggaaatgcttaactgagcagaagcatagagaagcagacaaaatgtccctcaatacttctgggcatctgttttttaatctgtaaaataaatggattgaataaaatatctgtaaaataactttccacttaaataacttataatgaataccctgtccaggagaccatctgaaatctgggctctcagaggcagatcactataaggccttatatttatttaaaagaatgtgtttataggccaggcacagtggctcatgcctgtaatcccagcagtttgggaggctgaggcaggcagatcgtgaggtcagcagttcaagaccagcctggacaacatggtgaaactccatctctactaaaaatacaaaaatttgccaggcgtggtggcgggtgcctgtaatcccagctacttgggaggctgaggcaggagaatcgcttgaacctgggaggcggaggttacagtgagccgagaccatgccattgcactccagcctgggcaacagagggagactccatctcaaaaaaaaaaaaaaaaaaaagaatgtgtttatagagattaatattagttacctggcaaatttatrtctatctctacctctaatgcctatatttctatgcctatctct

SEQ ID NO: 843313 - DNA, 642 bp, Homo sapiens
atgttttctctatgacactcttagctgactggcggctgtctagatgagggttcaaatccagactccatcactcacctgctacgtgacatgggcaccttctttagtcttgttgagctttgtttcctcatccttaaaaacaataccaatgacaacaacaaaactaccatgcagagcttccatgccctgcacagagactagcgagtaatgaagtaataatacagagtcagcccccattccctatgcagtcgacttctgcaaggtccaagctcacagtgcaaattgctcctgcaaagctactttgattaggctcattccttgaccttcttccagacaaatacgtctcagacagggagaaaaaataagtccttcatacatcaactggtgttaccagacgtggcactgagtcccagagtgtggttctaagatggactgagttctgcttttccaatggcagcaacaccacgtggaagtgttgagggggcctccttccataggagctgaccgtggcatctgtgttttcaggtgtctgggcagwtgcatgcaggagacttgggctggtgtgtcactcttctcacttcacactgagctgcctggttgcctgcgaaactctgcagggtctttgggttcctgttggaccagttc

SEQ ID NO: 843314 - DNA, 590 bp, Homo sapiens
cacaccttaattttcattctttcacagttggtctgatgaataagaggtaacagagacccttcatcatgttcagagagaaattataactactcaatggttaaaagagtatagtcacaagaaagaacatccaaaaaccagcatcaataacaacttacgatgttaaaaagacagtaatttgtagatatttcaaagataaattgagtcttcgtggtatgagggcatttcagcaaacgctttcatagcatcaggatctcacagcacattaaatcccatctgggaaggttcacactcagggtcaggctttccctcattttggcagagcctgtacgttctactaaaactctactaaaatccaacaaatacttgctgaatgcaaacaagtgcgaaacccagggcaaaatgctctctggcttctgctcacttctgggcctggggcagccccacagaacaagccttgttccatcttcaaaacactagggatggggcagattttaccagaaccccatgggyacgggagcacttacagaccctctactgcagcatggaatctttcttcttgttttttaaactttatgtgacatttttcttca

SEQ ID NO: 843315 - DNA, 582 bp, Homo sapiens
ccgtaggccctgtgccagcttccccaaatgctgagcatctcacagagccacggcacattcgtacagctaggaagtaacgctgccatgtgacagttagtggggggacagcctttatttgggttcctccaggcttcccacgagggttcttttttctgtgccaggatcctgtcctggattccctgttggactcagtcatcgtatcttctggctgctctgtgacagcttttcattttccttgtttttcatgacctggacccttttgaagagcaccgtagtctgtaggctgttccttaattttggtttgtttgctgttttctcatgattaggctggggctgtgggtttgcggaggacagctccctggtgaggcactttcttgtcccgtcatatgggggatacaggacagggacaggcctcctcaccagcgatgttaaccttgatcccgttggctccgtggtgcyggccacatctctccactgcaaacccactgccttccctttccacacgcggttctgcgggagcgagtgcccagggagccagcagtcaagaagacagcagctaatctccaccctgaggaatgtcta

SEQ ID NO: 843316 - DNA, 626 bp, Homo sapiens
tcaaagcaaattagttaaactcactcttttttagtattcagtgtgtaaactgggaatattcctacttcacaaagaaaaattaaaagagtgtgtatcayaaaatgctatcaagagctatacaatggaacaataagaacagccatcccctagaccaagcttaaaatgcagtgcttttctgtcaatccctgaactgcagtgcgctcttctaagctttcataacatttcattcatcagtcttaagtttccatggcccaactcccaggactcagaggcaaatgtgccctgtttttacttgatcagagatttgatgaaggcaagatttttaaaaaatataatgtatgccacaatatattatacaaaattttctaaaatctaaagatctatctataagaaagcccttaaatatagaaattaaaacgttaagagcatataatgaagagacagggagggtgccgctgacccagatctgttgcccatctgcagttactattgcattctaagattagccctgagcttgctggcagccacggcagaaaaataaatgcaaattataaaatagtcagttttgatgaaaagaggcctgccagcatcaagaaagagattcgttttctaggtcccaaaatgta

SEQ ID NO: 843317 - DNA, 626 bp, Homo sapiens
tcaaagcaaattagttaaactcactcttttttagtattcagtgtgtaaactgggaatattcctacttcacaaagaaaaattaaaagagtgtgtatcataaaatgctatcaagagctatacaakggaacaataagaacagccatcccctagaccaagcttaaaatgcagtgcttttctgtcaatccctgaactgcagtgcgctcttctaagctttcataacatttcattcatcagtcttaagtttccatggcccaactcccaggactcagaggcaaatgtgccctgtttttacttgatcagagatttgatgaaggcaagatttttaaaaaatataatgtatgccacaatatattatacaaaattttctaaaatctaaagatctatctataagaaagcccttaaatatagaaattaaaacgttaagagcatataatgaagagacagggagggtgccgctgacccagatctgttgcccatctgcagttactattgcattctaagattagccctgagcttgctggcagccacggcagaaaaataaatgcaaattataaaatagtcagttttgatgaaaagaggcctgccagcatcaagaaagagattcgttttctaggtcccaaaatgta

SEQ ID NO: 843318 - DNA, 601 bp, Homo sapiens
aaaaacagatgtacttatcaaataagatggggttaagtaccatcaaaattaaatatttcttttcctttggctgacataggcactcgatccaagacatgattttattttctttgtggtgtgggataatgtgaaaaatgaaatctgtaaccctatattgaaggaaatcatagtcttaatggaaccactaaagaaattattccagaattatatatccttccagaaataacaaccctgtaatgtcagcaaatttggagtcagcctgggttacctactgcatacagcaggctctggtcatgttcattaaatctgcctgaggcttagtcaaacttgagtacatgacctttaagaattttaaaaaattcattaatcaatgttctttgcctgaattttgctgtttttgcttctttaacctattatttgtatcattgttttaggttggccaatcctcacacccattgaaaatgagaactgcaagcataacagttctagytgataattaacagaaggttctttcagctcagataccattgtcaaagttcaataatgatattgcaaaatgtcaccaaaaagcataataatgtgagataatcagttataagaa

SEQ ID NO: 843319 - DNA, 340 bp, Homo sapiens
tttcccttctttggggggatccaggattcagtataaaatggcacacttaattttggggatctgtctttgccttccaggtgtacctgcttattaggccctagaaactgcatatattcctggccctgctcctccaagggctccaccctgaaactagtaatccaattaagaaactggcaaataaaaaatcttacaagtgctgaatcttctgtctgtctgtctatgtatttatatatgttgyatgtgtgatgtttatattttaaaagctctgattaattggcttagaaaaataaacatttaaatcaaatattttgtctgactaatagaaactttaatgcctttt

SEQ ID NO: 843320 - DNA, 490 bp, Homo sapiens
attcactatcttgagaacagcatgggaaatacctgcctacatgattgaattacctcccactgggtccctcccacaccatgtggggattatggaagctagaattcagtatgagatttgggtgrggacacaatcaaaccatatcattccacccctggcccctcccaaatattatgtcctcacatgtcaaaatcaatcatgccttcccaacagttccccaaagccttaacttgtttcagcattaactcaaaagtccgcagttcaaagtctcatctgagacaagacaaatactttctgcgtataagcctgtaaaatcaaaagcaagttacttcctaggtacaatgggggtacaggcagtgggtaaatacagccattccaaatgggagaaattcaccaaaacgaaggggctacagtccccttgcaagtctgaaatccaatggggcagtcaaatcttaaagctccaaaatgacctcctttgactctatgtctcaca

SEQ ID NO: 843321 - DNA, 521 bp, Homo sapiens
caattacaataataaccataataacaataataatagcaaaaaacccaatagtacttgccatttatattacrttagagccagaaattctatacagaaggagggtggcaccctagttggaaggaggtactgaggctaggagacaccttgtggttgaattggtatagcactttaccttcgattgagaagacgacaactgttaggatcaaagaatggggatgggctgggtgcagtggctcacacctgtaatcccagcactttgggagaccaagatggcggatcacctgaggtcaggagtttgagaccagcctggccaacatggtgaaaccccgtctctactaaacatacaaaagttagctgggcatgtttgtgggcacctgtacagctatttgggaggctgaggcaagagaatcacttgaacccgagagacggaggttgcatgagccaagaccatgccattgcacttcagcctgggcaacaagagtgaaactccatctcaaaaaaaaaaaaaaagaaaagaaaag

SEQ ID NO: 843322 - DNA, 556 bp, Homo sapiens
ttagaaagctgagaatctgcctatagggaaagttaagtggatttatggcagggaraaggcaggagatgagcttggaaatttagtcctcaaatgacaaggctaggggtttctcttaccccaatcttggcatgggagggccaccaagagttttaagcaggaaagtattatgagagttaattttttagaaaactcacttaggctgtgtgtaaagagtggattgattgcaattagggagatcaagttggggcttgcaaaaatctttgcaggtgatgggagtgttgcaatttaaaaagtggagatagaaggaaggagccagagatgccagagatagaattgacagttgatctaaaaaagaacaacagctgattgggtttgcctatctacaaaactttggaactggtgaaaaaaattaggaagcagatgtcttcagctggacatgttgagaatagaatctggtatgatcagttttacctaaagacacttagattcatattatatagatactgaattctcagtgcagtggtgatgaaggatgcctagctttttcctgtgtcca

SEQ ID NO: 843323 - DNA, 378 bp, Homo sapiens
tctggacattccagattaagtgtgttaattgactagtaggtaataaaattactaccagtttttgagagctatttgccaggcactataatagcatttttcatgttattacttaatttaattctcataaccctataaaataggtaatattatttccccaattttagatgagaaaactaaaactagaggtttagaaacttccctaaagtcacataattagttactaagtagcatcactggtcttactttatagcttatacccttaagcattatgtgatacttcatcataaatgtagttttaaaaaaaaaactatgtcagattatttgagtttaacattgctcaactamatacaaatataactaaatactctctattccact

SEQ ID NO: 843324 - DNA, 573 bp, Homo sapiens
ctgccagcaggacacctgctgcttctcacctctcatctccgaacctctctgcttctcccagtggagaaaaagcctccatcctcacagcagcgatcccaaagagagaccccctcctgccccacacccctccaccaagtctcctggaaggattctcatcgccctgcttggtcatgtgccacgcttgagccaaggggactgcgggggcagaggccagggtgctgtgactggcagtgccatctgaaccactggggctgaggcaggcagtaccccaacagaaaaggggctgcagcagacagcgcgacacagagcaagcgcccaagaaatgttcattttgtgaacggccaggattaggagtgagcaggcagaagccaaagggaaaccagacgagggcacccagcatgcctagcccctcatatctggcccaccctccagacatttgctcggtgcccagtccctgcttggtaggggcgcaaaactggtgcagtgcagagagtcagacagagcccctgcctgrtggacaggcacggaccacacaccccacaaagggggacacttgatattgcgtggtgccca

SEQ ID NO: 843325 - DNA, 669 bp, Homo sapiens
tttcctatcccatttcccccacggaagcaccgcttcagggttattcagtcctctgcctcatggctgaaattgctcatctcgtctgcagatgtctactrtcctgtctacctaatgcactattatgtattgattctccatgagacagagagagagagagactatcagatagtttacacccaaagggtaggtttttgtatatttttccagccttttttattaaggggaaggggagagtttaaaaacccaaaccgttgtggttttaaggtgtttcatttttaaaagggagagagaatctatttaaagctatttcagatcagggattgtcatccttttttgtccaatgtattccttgttctttaaaaaaattttttttagaggaaactaatattagtctttgtgttcactaactcttctggtcacttgtatttatttattcattcattcatcagatatttgttgccatctgaaagaactggcccagtgggtctgaaagctcgcttgagaataggaaacttgagacctggccccctgtgggtaggagaacaaggaccacctgggttctccagtcttgaacgagaatctcactcttatcagaatgtttttcttaacctcagcgtatgatgaggaaatttacttatctctagctaggatttgacaaattccaacatc

SEQ ID NO: 843326 - DNA, 605 bp, Homo sapiens
agcagggaatgggaggcacattacatgtggctcacaacaaaggaaaaagaaaactctaggtagtgccgggtgactatcccttatgcaaaatgcttagaagcataagtgtctcgaatttttttcagatttyttaaatatttgcatatgcatactgagatatctaggggaagaaacccaagtccaaacataaaattcatttatgttacttatacacacagcctgaaggtaattttatataatatttttaataattttgtgcaccaaagttgtagcttttttctttttctttttgagacaggatctcactctgtgcccagactggctggagtgtggtggtatggtcatggctcacctcagcctcgacctccgaggctcaaacaatactcccacatcaactacccaaggagctgggactacaggcacacaccatcatacccagctaatttttatattttttgtagagacagggtttcaccatgttgcccaggctggccttgaactcctgagctcaagtgatctgtctgcctcggcctcccaaagtgttgggattacaggtgtgagccaccataccggaccgaatgttatgttttttaacttgaattttt

SEQ ID NO: 843327 - DNA, 634 bp, Homo sapiens
atgtgtaagacccttgagaccttcacaggatcctgtggggcaagaagggaaccccaaatatgaatttcctgccaggtcagtaagctgagacttgggataggtttatagcaaatgcaattattgtgacatgtcttgcctttctgagattaaggcataaaattgacacccgctatcatttttccagtatttagcaccctctatctggtattgtctccatgacctacaccctgtcctccccaacttcctgctttcctcatatcccaccgcctgatcaataaccttttgtttgccttttgtgtactgaggataggacccaccttctaatcatctactatggggtcttagtacctagtttgtgctcgtcggttgaaatcgactacgttgcactgaactgtatcccaccctaccatgctagcaccatactttgtgtctggttggtattcaacaaatgtttgcagagtggagaaaggcatgtggagtattccaaggtgaccactttagaggagacaagatgaacctgaaygtgtaagttcaggcatgtttgttcagaagcacgttagtgacctggtttaatcacaggagactggcaaggaaggagcctgtgcatctgtgaaatgagccattttctgccaac

SEQ ID NO: 843328 - DNA, 583 bp, Homo sapiens
aacctgattcagggagggtactcaataaatatctgtgttagtgagaaaataaggcaggtgacgtgggcrtaagcaagaggcccaggcagggctggggcagctctgggggtttttagtggtaggaattaggctaaggtgtccagctacagctatgctgtcagtcctgggagggagctggagcgaaaccctgggaaaaggttagaggggcagttatatatacatgtgtagaggggtgatcttgggcagctttctcgcctctagcacactgagtcaggcatgtgggcggcagacccaggccagctcagcatgagaagctgtttggctgggccaaggtgttcacatgactggacaccactgtgggcagctggacagatctgtggcaggcaggacatagcagccataggatgctatgatgataccaactaagatgaccagcgagggcttctgggaacttgtgctagctttgggatcatacaaacatggatacagatcccattctcacttttgctctaggaaaattatttaacttctctaaagtttggtctcctcatctgtaaaaagggatcctctctgctctctcctt

SEQ ID NO: 843329 - DNA, 520 bp, Homo sapiens
tgaagtaaatgcttactaaatgttgttattatcaacaaagagggtagcagaaggaaaacacaatgaaaaaaaggagaattaaccttacttttgagattgaaataaggttgtcaacataatagaaaacaagataaaatttacatttataaaatttaaaatataacactaaagtacagtaaactaaattggcttctgcattaatcagtagttttaaagacaatgcttacacttggctgtggcaggagactggcttacctctaatctagtgaaatagccatcactcaagggtgatgagcagctgctgttttcctgaccttgacaactaagctcatctgcatggaacagaaggttcaagtatatactcattaaatttaatttcccaaagtcaactcaactgacacatcacctgatctaygcagtattaaacaggcaatgtaatgtaacctaatctaagggctgccctttcctcggcttctacatctcagccataaaaatgcaacatgattatagtctctagttt

SEQ ID NO: 843330 - DNA, 585 bp, Homo sapiens
ggctcacaggttcaagcaattcttctgcctcagcctcccgcatagctggcactacaggcgtgtgccaccacgcccagctaatttttgtatttttagtagagacagggtttcaccatgttggcccasatggtctccatctcctgacctcgtgatcttcccgcctcggcctcccaaagtgctaggtgtgagccactgcacccggcctgctcttgttttcaatatttctcctgaattataaaatttgaaaatgatctgtttttgttttcaaaagaactttattttgtaattaaatctttgtatgtctctttatttattgacttaccaactttagattgttagttaaagttgtcatctgtttcctggagtggttatttttgctggaagctacctgtggagggtgatcggacccatgtcttccttcctgtgacttctgggttcacctcactttattattatttttctgcctcctgtggatgactcacccttaagtctagccttaagtaaatatttgatatctaccaggagcattcaggaaaaaaaaatcacacttattggtgatagatcagaggaattcccattaaagtc

SEQ ID NO: 843331 - DNA, 283 bp, Homo sapiens
agattttgggaggaaatctaagggawcgttaagtaatgtagggggaaaagatgccatgaaaagaaagtggcagtttgtatatgatttccaggaggtaaaaaaatgtccataattcttccatggtcacttagagataacacttagccctaagcagttttacttccaactgtgtacggagcaggtataaggccactcttgaggtgaaaactgggaggggaagggagttggagtgtaggggcagggcatataaccagtcccctgcatcacacattaagtttatgat

SEQ ID NO: 843332 - DNA, 590 bp, Homo sapiens
ttctgggatgaaaacacatgagtttgaccaaggaaaagtttggtagattttgtcaatgaagcatgaaaagggatcagtctttactctgagctcatyttttttttttagctgagtgtgctcttggaagatgcaggcatcagtgtatttatatctgggtcaacagggcatgcggtgaaggggaaggaaggccattacctagtgaatgtatattgggtggggagccactgaggttaaaaaattcagcctactgccatctctttactttgggctgtatggaagttgttcatgacctccataattgttcttttgtaggataccctgtatcagattatagactctgaaatccaactcccagggttcaaaacctgccttgaacactatgtatctctgaggaagacatttaactcattctgagcttccattttctcttctacaaactagaaataataaataggaatcccatgaggattaaatgagataacacatctgaaacacttggcacaacacacatgctgataggtgcttcacaactgctactgatttttaggataaattttagtaaattttaatatatattgtgtgaatctgaa

SEQ ID NO: 843333 - DNA, 491 bp, Homo sapiens
ttgatttgtatgatgttttctcatgattatattgaggttctgcatttgtattagtcgattctcacactggtgtgaagaaatacctgagactgggtaatttataaagaaaagaggtttaattggctcacagttcygcttggctggggaggcctctggaaacttacaatcatggtgcaaggtacctcttcacagggtggcaggagcgagaatgagagcagagtgaagtggggaaaatctccttttaaaactacaaaatctcatgagaactcactatcaaaagaacagcatgggggaacccgccccatcattcaattgtctccacctggcccctcccttgacacatggggattatgacaactcaaggtgagatctggatggggacacagaaccaaaccatatcagcattcttggcaaaaataccacagaagtgatgctgtgcctttcccagcacattctatcagacagaaaatgatattttgaaataccatttg

SEQ ID NO: 843334 - DNA, 621 bp, Homo sapiens
cactttctccttaaatggatatttggcttgttttaattttttttctgttaccaatgatgctggaatgcacacacctccttgtgcataagtattggccttctttgggatacatagggaagcgtaaatgcattttacattttaagtggcattgccaacttatccttcaagatgatagtatagcagccttttaattttagaaattaagaaggttaagaaggtaaggcacagagattttatagcttgccagatagcataacaatttaggaactagaaatcaaatatcctatttcctttatagatttctagtgtctacatcaaattttttccaaatttataaaagaagaaaataatgtatattaaactagccccatgaaattttgcttcatacttttcctattctttaccagcaaagcaaaaccagttctgattggtcatttaaatcaatgagttgaatacaaacagaagtataattgccaaattatgggttttgggaaactatgrtgaacacgagattctttacttgtctgttttaggttatttttccaggttatgtgatcctgtgatcacatatctgccaacattttcatgttttgggtatttcctaatgtaattgaatttctc

SEQ ID NO: 843335 - DNA, 578 bp, Homo sapiens
ctttgggaagtataattttggaggataaagggcattggcaagaaactcattggggtctcatgataaacagccagatattaggagtcaggagctagaaggactccctgtgtctctccagagaacttagtgtctcttctttctcccttgaccttcctgctacatgtttctgttgttgttgtttttattttttttctctctgcagaatggcttatttgctctacccagcgtgtggtcacatcagctgcagcaaagattccagctactagcatcactaggcctcagtgccagattccacgggccagatgtctatccctggtccactcagctatgatgaggataatgctttcagattcttgtttacctcagcctgggagcaggttcttttatatcatggcacaagcagctcctctaagaaggcaatgattagtatttgaaccacaaggaacaggagaagtgaggggtcaatgtggtcagacttactaaggagtacttaaaggccactgcaaaaccaggcacytgatcctctaattgagaggggaagtttgcaagggaaaggtgtttgatatatggcaagttga

SEQ ID NO: 843336 - DNA, 284 bp, Homo sapiens
ctttaaggacatgttaatgtggaggtgaaatgtcaagccattgcattgagaacagttggctttggtagcagacttcattgttttaagccactaatattttggggttgtttgtttatcagcacaatctagactatcctgactacaacaccctctcagcacctcatcaacaccctcttgcccttccaaatcagcaaaggaaataaaggctaccactgycaaaattcgcctttattttctttgctgatttggaagtatagattatatttcttttcatttagtgaaca

SEQ ID NO: 843337 - DNA, 563 bp, Homo sapiens
gttcaatcctaagtctgggacaattgcctttattgtgtgatttggcatgttctaaaaatcttccccactggaaaatacatctgactgartctgtcatggaacctgacaatctggtattatagtactatgttccctaggcaatctggaacctggtcctatattccctgacatcttctataacggtggttgttgcttgtctgggtcacagacctcttttgagaatctgataaaagacatagatcctctccataaccccaccaccaaaaaaatgcataggtgacattcacagaatactgtgaatacttttaggaattttggggaatttcctcactgttcatcaattttacccacaggtaagttaaaactgctgctcttttaggacatcagaagaaacgtgtttttttctaatggtcttagatatgttgccaactgagggcaacatgttcacaaactaattcttttagggcaatatatgttaaactattatggtatatttttgcctgataattagtagaatcttcaagaattaagacacatgacttagaaatgtgaacagtaataaa

SEQ ID NO: 843338 - DNA, 544 bp, Homo sapiens
aaggaggaaggcattgcacatgagcaccagatttgtttwactgtgttgcattttgtcatccattctggagaacggtgttggagctgggttcagcatgcagctgggattccagcccctccacttcacgctctcccacctgtgattatttattgcatatttccccctgagaggggacacccctccccttctttaactctcccctaatcactggtctaaggtggtggacttgcacttgagcgaagtgttctttctagggaaaatttctttgcagactgtttatcctttcagccaggagtgtggagctggcgggtggggggagggctcactgcattcgagccagagccagcaggcagactctgtgaactgcctctctggactgggctgctgtgctcctcgggcaatttcttcacttcctaggtcttgccattgttcagggctgcagccagccagctgcgggcggcgttcatctttggcgtatttgcagtcccgagaaagaaaggctctcctgcgacagggctgggctgggggcccatagaatgggcag

SEQ ID NO: 843339 - DNA, 609 bp, Homo sapiens
ttcttcattggtaattttcagtgatttaggctttaagcccttcttagtcctaatctggtttttatttttatttttatttatttattttgagacagggtcttactctgtctattgccgaggctgtaatacagtggcacagtcatggctcactgtagcctcaacctcctaggctcaagcgatccttctgtctcagtctcctgagcatctgggagacaggcatgtgccaccaggcctggctaaattttattttttgtagagatgaggtctcaccatgttacccagattggtcttgaactcctgggctcaagtggtcctcccaccttcgcctttcaaagtgctggtattacaggtgtaagccactgcgcgtggccctaatcgggtatttttacgttatactatatctttggagctcagattttggtggggcagtggggggatacaaggtctccttttgtcccccaggctggagtgcagtggcacaatcatggctcactgtagcctcaacctcctaggctmcagtgagcctcccatcttggcctgccaagtagctgggactacaggcatgagccaccatacccagctaatttttttttttttttttttttttta

SEQ ID NO: 843340 - DNA, 594 bp, Homo sapiens
taacatttagcactcctgcctcccgaaaagrtgtgtgtgtgtgtgtgtgtgtgtgtgcgcacgtgtgtgtgcgcgtgtgtttgagaattattgaagggtttgtattttttcccaataaaaatgtaccaaaattaaccttcagacttctcatttcaggtccacatgtaaggatctcataagtcaccattctgtcccaataataagtaaagctgaataaactgaaaaatcaacaactcttcttagatcattcagagaagtgaggtcacagggcaaactactgcctgaaaactgaacagacaggtaggtagatacagagaatgccaactggcaggagaataaacccatgggcagaaacctccatgggaaccagtagcaaagccaaaactgtcataaatgaattctggaggctcagtgtagacaccctgagaggtaaaaactccagccatcacaaaaatgaactcaaaatgaatcaaaatcaaatgtaaacataaaactataaaacccctagaagacaagaggagaacacctaggtgaccttgggtttggccatgactttttagatatgacacagaaggtacaatccatgaaggaaat

SEQ ID NO: 843341 - DNA, 594 bp, Homo sapiens
taacatttagcactcctgcctcccgaaaaggtgtgtgtgtgtgtgtgtgtgtgtgtgcgcrcgtgtgtgtgcgcgtgtgtttgagaattattgaagggtttgtattttttcccaataaaaatgtaccaaaattaaccttcagacttctcatttcaggtccacatgtaaggatctcataagtcaccattctgtcccaataataagtaaagctgaataaactgaaaaatcaacaactcttcttagatcattcagagaagtgaggtcacagggcaaactactgcctgaaaactgaacagacaggtaggtagatacagagaatgccaactggcaggagaataaacccatgggcagaaacctccatgggaaccagtagcaaagccaaaactgtcataaatgaattctggaggctcagtgtagacaccctgagaggtaaaaactccagccatcacaaaaatgaactcaaaatgaatcaaaatcaaatgtaaacataaaactataaaacccctagaagacaagaggagaacacctaggtgaccttgggtttggccatgactttttagatatgacacagaaggtacaatccatgaaggaaat

SEQ ID NO: 843342 - DNA, 626 bp, Homo sapiens
gaagctttgatgtcaggtacacatctggcctgctctaataagatgaaccactcaaagatcacttaataattgtagaatttcaggaaccacatataggtcaattttgacaagtgttgagtctgtttttgaagacccagattcttaagactcctctttcccctcatccttttatgtggactcagtgaattttaccatgccttgacaactcacaccccacccatggcaattaacccacccatggcaaacccacccatggcaaagcgtaagatgtcagacatttattaacacatctgtacacccaagcatcatcctcgaatccaccagttggatgctattagattcatagtgactcctcctgctggaattctttacaaatagaaagagatcataactagttaaacaagttgaacaataatcagaagactaacccagatacacggccccaaggagtcagtttcatcagtggtttccttgctgcttcacctctgtttatcacatcctttctctgtaaaatgggaataatgatwccttcctcatcctacctcagagaaattttgtatagataaataagacatttaaaattgtaacaaatgtagaggaatgtgctctttaagaatacattctta

SEQ ID NO: 843343 - DNA, 530 bp, Homo sapiens
atgtcataaatacaatagaacagtatgatgttttgttggggatacaaacataattcgtgttacttttggccaaattgtaagagagaagacaaaattatgtctccctaatataggaaggtaaggcagactacttcttcttctttttttttttgctgacagaaatggaagaggaagaagttatgtgttatgtaaatagctacatattaactgccaagagcagtgtttacttgctttaataaagacaccacattcagaactaaagctggaatttgctttatgctctaattacgattgcaataatccatagtcattttccaaaacacatctggcctttgcccctagccaaattaaattaaatggcaatatagaaaaaataacactttttggattgtggaggcatctgatgatagtaataacytctgcaattcctttctcttttggtttacagtcttggcagggagtaaggagagttgtagtgactcttgcaatagccctaactcatggatcatgaaaccagtatggggattctt

SEQ ID NO: 843344 - DNA, 524 bp, Homo sapiens
gaaaggttttctggttttcctyatttcaaatgatactacttatgtgtctgtcatatatggctttcatttatgtttaggtatgttccttttataataagtgttttgagagtttggattgtgaaagaattttgaatattatcaaatactttttctataatacatcaattgaaataatcatatggtttctgtcctttattctactatatgatgtatcacattgattagattctgtatgttgaaccatacttgcatcctgaggataaatcccacttcatcatgatggatgatttttctaatgtattgttgaatccagtctgctagtactttgtggaggattttttcttcaatattcatcagggatattcattggcttctagttttcttttttcgctttgtcttcctctggttttgatatcagggcaatgctggtgttattgaattctttaaatgcctggtaaaattcagcaaagaagccattggatcccagacttttctttgtttggagtctttttattatagcttcc

SEQ ID NO: 843345 - DNA, 532 bp, Homo sapiens
cctgcgacaccttgatttcctatgcaagttcctccacgatgccccaggcgtcggggatcaaattcagaaacacctggaaaggaragccatctgttttatcagacaccgccccaaggattctcttccttacaccctatccctcttgttgcatgtttaacgtttgtctgggatccctttcaagtccggtttcttaatgtcagtatgtagcaggaaggctcgcaagctcttcttggtgcgatcgtgggactggacggggatatcgaggctgaatcgcgttagcaggcatgggacagggcattaccaagatcgccgaactgagagactaagggagacactgatttctattcttcacagccgcgcctttcttaattcaatatttctccagacgatgtcccttcttttacgtccaggacctatgctcagggacaaagttgtgcaggaaagggtctgaagagtggaagcctgcccaaggcgggggaaaataaatgaagaaactgtctgggtaagcataggcacagaagaaacaaacaaa

SEQ ID NO: 843346 - DNA, 645 bp, Homo sapiens
gggctaaaatacagtttcaagtttcattttatgcacgggtattcctatggactttagcctttctttcaggatgaggttttaactgctgttttggaggcattatgagccagattattactgaagaataaggataatattaattgttgcaattagtagccctcctattgcatttgtacattcacatttatatgcatgattatttcaatgtggcaaaaatacaatttactaagttaaggcagtatcacaatttgttttccctatgtgctttacgtatttccaccctatcttttaacaagtgatgttttgttaaaccactcagatatattcattgatacagtggttttaacaatggaaatttatttggctcagacctaaagcctttatataaaagttagtaccaaaattcaataaataaagctatcggttatttggttgtttattggatagagatcaatattgccttgttaaaggtaatctgagtgttagaccagtttgtatgatccatctttgctacaatttccacatgtttaaagcacagagatgtataattsttagtttgtctataaaatcctatgtatatattaaattgtctaaagtcatataaaatcataccctctagaccatagacaaatgggaaatcttctg

SEQ ID NO: 843347 - DNA, 610 bp, Homo sapiens
atcaatcaaccacagaatatatatatttccatatgttcagccataaagcatctcagtacattttaaaaaaatcaaaatcataccaaacatactctcagaccacagaggaataaaaatagatgtcaataccaaaaagatctctcaaaaccacacaattacatgaaaagtaaaaacttgctcctgagtgacttttgggtaaacagtgacattcaggcagaaatcaaaaacatatttgaaataaatgaaagcagagacataacataccaaaatctctgcgattcaccaaaggaagtgccaagaggaaagtttatggcactaaatggctacctcagaaatttagaaggatctcaaattagtgatctaatatcacacctagagaaaccagaaatacaaaatcaaactaaccccaaagctagcaggagaaagaaataactaaaatcagcagaactaaataaaattgagacgcaaaattttgtacaaagaatcagtgaagctagaagttggtgttttgaaatgataaacaagatcaatagaccgctagctakattaacaaaaaaagaggaaggtctagagaagcacaaccagaaatggcaaaaatggcattacaacc

SEQ ID NO: 843348 - DNA, 513 bp, Homo sapiens
cttcctctgcattaaaccaagggagatcaggtatttccagctcactcacagtgggccatcttttaatccatattttggctaaccaagcaaataattagaascttttttaaatccccgagctgcaacattaaatgcagactccctacttagtgggcctaaatcaataaattcagcctggtccaactctgtattccttccaccattatcccatacccttgatgtccattcccatacctgttctccagatttctgcttatgtaagttagaaaacaggttctttttgagtgtagcacacctcctcatgggtcacattctgaacctcacctctaggggcccgctgggactttagtctagttataggtctagaagcaaacaggggtgttgggggtggctcctgagaagaatcaacatcatcttgcctggtaactacctcgggggaggccattactgttgcctcaggcagcgcagagtttatctcctcagacaaaagtggaaatgctgttggcagcatgg

SEQ ID NO: 843349 - DNA, 599 bp, Homo sapiens
tttttttacttatttatattctgaatccagtaattttattagccagtgttattgagggtctaattytggtgtttgttctttctgctgactcctgttctcttgcttgatttattttgtttttatgcttttctttttgaacttagatacccttttcagtgcttcttcagctttgaaagccctgtgaagaatgcatggaaggtctttctctccggcgagaattttcacttcctaataaatggggccctgatgtgcttagggtttcttagaccctaattcctcataatagagagctgtggttataaataggcagggaagattttttttcccccaaagcccatcctgggacagacaattttccttttagtttcctttgttggcagagagatattattctagcatatcattttacctgcagtatagccccttaagggttccaggtttacacaggtctagattccaacttccatttttaaaaggcaaaaggccttgttttcttccctggcaggcattaaaactcaaacctcttggctagtaagcatagcaaatgctcccaggatagttgctgcatgggtggcagcttacaaatttaattttcactc

SEQ ID NO: 843350 - DNA, 596 bp, Homo sapiens
ttctctgtcccaggctgttccctaagaaggtctgcccaggactcaggtaatcatatgctcattagaaactcttgggcactgcctgtgtgcccagcccagcccattatgtcggtgaggacagaygtggaggacagcagtccctgcccttggttggggctccaggccagcaagggccacagccccagaaggcagagcaggaagacaggactcggggcaggtgaagcagccttctcgttggcagaagggaaacagaagcccggggtggggaagggtggggaagggtggggaagggtgggcccggggtcacacggggtaatggcagagcaaggactagggtcagggtctctggctctcagctgcccatgccacctcctccttctctgcccgccccagtgccttatgggtccaaggttgactcctgtccctagggcaggcctgtgggccctgcctgatccctactgggaggatggtacctagggttggagccaaacaagtgtcctcctccagcgccagcctggccctgagtgcgaactcgtcactggtcaggggtccagacagcagcatccctgagggcccagagaggtggccagtcctgt

SEQ ID NO: 843351 - DNA, 633 bp, Homo sapiens
gcgatcttctcgctaggccacagggtaccttaaaggcattaaaggaggtaagggacacagtcagaaacacattctgggttagtgctaacttagctctacttacataatctgccctcaactacatttccggtgttatctctcatcaatgcccttcccagtacccctccaaaaagcaatgtttcaactagagggaactttcttcagtttctcccatattccttgaggtttaggtttggaacactaccctaccccgttttctcaccccacaccaatttgtctcattttaacacatccttcagatccagatctgagcttaagtataattcattccaaaaatacttaattaagcacctatggaggactcagaggtaaagaaggtaaaactagaacctttcttcgtgaagcttggagtctaagtgaccctccaggcaaccacctaaaacctttgtggttgagatccagaactctttctgtgggctacttactgtgttagggctgcacttctcacttgcactcagttgtttyattgttaacttctgtaatcctttagaaatctcgctctccattgaatgagcagtacctagcaaagtgcttggcttttgctatttcacataaaaagaatttgaaaaaaat

SEQ ID NO: 843352 - DNA, 612 bp, Homo sapiens
ttttctagctggtgaaaactcaaaactcaagtctgctcttcatctcatcctgaacctcaataagcgatcgttggtwgtgcaaatatttcagctctaagaaattaattaaaattaaattcgcttttaaatgaaatattgtggatgagggtgtccagcaccgattttgatccaaaacaaagatcggtaaaagtcctcccccacccaattgtacaaatagagctggaaaatgtctccttttcatcctagaacactacttccttaatttcctccactggtgcctagtttcaagtatcctgtgcatcttcccagaaattttatatgtatgttaacattaataatatgtaatatatttctgggaagatgcatatatatgcatatatgtatacacacatatatacatatatagatgtatatctccactcatctttgactgaagtgatatcatttaacatatgtagtgttatttcattctttatatgaattacataatatgccatagcatggattgtatcattatattacaaacacgtcgcaccttaaatccagattgcctgccatcaggtggtctggcccattgtcactgacagttcttggaaaaggctcttctgtttg

SEQ ID NO: 843353 - DNA, 583 bp, Homo sapiens
gataatagttaggtcaaaccaaacttgattgcacagccatacctaaagaatgtaaagacaacaccaatgcagagagaactccatagggacaygtcataagcctctatccttaccctgatctgttcaatgacaggtaggaagaaatagaaggaatattcatcaaatccgctagtggcattaagttagaaaggacagttaaggcactgaataactaaattaggattcataatcattctgaaagcctaaaacatgtgaccaaaaaattgaacagtcataaatgtaagtcatgacattaaggataataataattccattacacaaaaatggtgtaaatctagatcactgcagtttatgtaaaaaagatctaaagtttacagtacatcactgatagtttttaaagcaaatgtgatctaatgccaaacagcggaagtataatccgagtcaaaggaagtagtacattatcctctcaggtacttttcaaagcacatccaaagagctatgtttaccattaggcactgcattttaagaaaaatgctgacaagcaggagagttttcagagaaaggtctagatacatcacataga

SEQ ID NO: 843354 - DNA, 580 bp, Homo sapiens
tatatttgaactgaaattactaatcaactttggcttgttttactgtaacaatgactagggactggccacagctgcaatcttacttgttttactgggctgaaaacaaaaacatagtagaatggatctcagtaaaggtagagagtcaggacttagttgcaggaaacaaaaaccagtccagtttctactttagccctaaattggaaacaaatcaaatgtccttctatacttaaaaaggcaaattgtcagtttttcttcaaatacaaggaatacaaagaaaatacattttttttctacaaagaaaaaaaagttagctaggagtggtggtgcatgcttctattcctagctactctggaggctgaggcagaaggatggcttgtgcccaagagttcaggttacagtaagctatgatggtgccactgcactccagtctgtgtgatagagtaagaccctgattctaaaatttttttaaatttcttaaaagagatttgatatttctttggtatctaactttattcaaagctggagttgcaaatgatttcagcaaaaaaaaataaaratgtgcttgataaaaatatgtcca

SEQ ID NO: 843355 - DNA, 545 bp, Homo sapiens
agaactggtttaactagtattttggcttgttttgggtgcacctgtgacctaatttacaagaccaagattaattaaatgttcatgcacaattaaaagacaattttacttcagtagtatgatgcttaatttctgcttatagaattcattttttattagttataaattatgctagatgacatagagaggaatatcaaatgcagaggattcttagcctgagatccatggacctcaagtgtttcacgaacaccttgagatagttttcaaaatggtatatgtgtgtatctaggggcatctttctgagaaagggatttcctagattttattcaatatgatctggagtccagagcaaaaaaatattgtacaaatctttgctctactaacttcttgacattgggaatttgagggagaggaattttccawcagctttttgttttttgggaaataaataaaatgactatgagcaaacatgaagacaattcccaaaccaattcccaaagactggtaccagtagctcctggtgcagaaccaacttcagcatggcaggg

SEQ ID NO: 843356 - DNA, 545 bp, Homo sapiens
agaactggtttaactagtattttggcttgttttgggtgcacctgtgacctaatttacaagaccaagattaattaaatgttcatgcacaattaaaagacaattttacttcagtagtatgatgcttaatttctgcttatagaattcattttttattagttataaattatgctagatgacatagagaggaatatcaaatgcagaggattcttagcctgagatccatggacctcaagtgtttcacgaacaccttgagatagttttcaaaatggtatatgtgtgtatctaggggcatctttctgagaaagggatttcctagattttattcaatatgatctggagtccagagcaaaaaaatattgtacaaatctttgctctactaacttcttgacattgggaatttgagggagaggaattttccatmagctttttgttttttgggaaataaataaaatgactatgagcaaacatgaagacaattcccaaaccaattcccaaagactggtaccagtagctcctggtgcagaaccaacttcagcatggcaggg

SEQ ID NO: 843357 - DNA, 643 bp, Homo sapiens
ttctaaaacatcccacatccacatatatttaggttttactttgcatagtagttaagaatctcactgaagcctgtgctcaaaagatatttaatgacgttccatgctcaatgctaggagtttcaaaagcaatactgtaatgtaggtagatattaaatgtgtttacctaaagtacatacctaaaatagctacattaaggtaatttttaaaaataactgagagaatggcatgtgcataggctctgttctttctgcgtgggacaaaccatctaccaggagatgtgccaggggccaaataggcttccaggtcagctacgtttccccatgcgaccctaaagggcatttctagattccaggggttctgttcagaagtattctctgggggatgcattttatctgatctctttgcccttcaccctgctcatggccctgtgttcatgaccaaagcctcccctctatagccctcagtgtctgggatgtcccccacctgccttggcatgcaggcattacagccctcaggagatgtcacatgtctccttgagaaagygacactgatccttagccctctgcaggcacccacaacctcctggcagctggcgggtgatgctaggtgtgctctgggatccagacatgtgaaagtggccacc

SEQ ID NO: 843358 - DNA, 625 bp, Homo sapiens
gctgcttcaaatgcatgggaaatgaaggtgagatagaagcaggcaagcaaggcagttcaggccagcctgtgagcacctgggtttgaattgccaaggagccatgaggggacctggctgcctacctatttggtaactcctgcaattccaacaccaagccatgctagtgaaaagtgatttgtaagtgtgtggggaaggggactaatctggacaagctatgttctcctgtgaggtggttcagacacatgtgacaggcttggccgggaaagatggactgccctctgtgccaggaggtggctttgagatttaatcagcagggtttgtcaaatattcttttatccacacaagtgctttccctgagcagagtgcaggtcagtaaaaatgtcttcattgtaatacactgccagtgttgctttcgcgacaggcaaccttagccgttggtacaccctggtccaccttccatgtctgcttggttgcagagaacttgatctgaaccagctggtatcctagaagcaacaaattaaccarttctcccttaagtgtgaatggttgatagccagcgtgatgtgatgatgtctcttgtgaattggaatgttcaaaggtgttttaaatggcatggggtactttg

SEQ ID NO: 843359 - DNA, 528 bp, Homo sapiens
acatgtgacaggcttggccgggaaagatggactgccctctgtgccaggaggtggctttgagatttaatcagcagggtttgtcaaatattcttttatccacacaagtgctttccctgagcagagtgcaggtcagtaaaaatgtcttcattgtaatacactgccagtgttgctttcgcgacaggcaaccttagccgttggtacaccctggtccaccttccatgtctgcttggttgcagagaacttgatctgaaccagctggtatcctagaagcaacaaattaaccaattctcccttaagtgtgaatggttgatagccagcgtgatgtgatgatgtctcttgtgaattggaatgttcaaaggtgttttaaatggcatggggtactttgtagtcaagtgcccccaaggaaggcaggctgccactgagggtgttctgggctgattcaaacatggggcttcagaaaagacttgccttaaatctgtagagtagcatgagggawactgagactgtagtgagtctaaggaagaaaat

SEQ ID NO: 843360 - DNA, 531 bp, Homo sapiens
acaatctaaacaccaagctcaacacacccacatcagttagtaggcagttttagccacatatagcacaacacaagtaatgtccatgaaggacaaagcatattcaagtgcgtaaaggactggtatactgcctggtacagaaccaagcctgattttagcatgcatctttcatctttttctaaatccaacttgtaccaaaatacattatgagaaaaactgtctctctaaactctgtgaaaacaagaccttttctggcaagactcctggtgtagcctgtcctgtcttcaagcaggaccccattatccacaatggctgctcagtaagcctgggcgtccctgttacactcaccttctctgaactctgctttcttggttgtttagcctctcagcctccctgactctcctcctcttgctscttctcagtctcagctgtgcttttctgtatttgtgcatgtgtgtctgactcctctgttgccccctctcatggtacccagggaggcactaatactccggtgtcctcagcacagtccccttc

SEQ ID NO: 843361 - DNA, 625 bp, Homo sapiens
tgcaatgtatgccattcttctaaaccctccagacaacggtattaaaccatattaatattctgaaaaccaaaacaaacacccactacacttgacacatttttttttgtaccataatgaaagcctatgtgtttgggcccacagtttcagccaggattttgacctggggcctcctcactgatcctgaggctttaagaccacacagcatgggtctgcgaattgcaaatgggaggcttacttttcccattcttatccaagcctccagaagtggctctggagctggatccagcctcctttcttacgaagccttggatacatcccacttagcttgacaaacttttaccggaattctctgatcccatttcacagctgttgcaaaggtagggtcttggttgtgtcttccttcaagctgcttatgaaccaggggtggagactaggaagtaaggaaccctggaatcagagaagtcaggagcaagcatcttgttggcttgaggttctccaggcaccataaaycaagtagtgcgcatactaagaaaacaagctggacaacaagaggagagcaggagggtccttaggattggctgcttgtaccatggcccccagtggctcagtagagacaaggggaatc

SEQ ID NO: 843362 - DNA, 529 bp, Homo sapiens
atatattcctgcccagccactgactgcccagccccaaaacactacctggaatcagccaccggacctttgtcccaggtttcctggctcagcccggctgggtggagcctccctctggccctctccctacatcagcaaagcctcagtgacccttgagctgagtcaattggggcctccatggacatgcagagtccagaccccagagtgccagtaccacctgctcccctccctcgccaccacacccacagacagacgcacaagcagacacattggttgcaagccgggagcacatttatggcaaagcacggctcagctctaggggaaagcagagcccttactaaggccacaggaggcacccaggaagaagggcagcaggtaatatgcaaacacccagggcagagggtgcattttctggcttagccggaggaggcgaatggagatttggagagataggtctcttgagycccgatgaaggggtcaggtctgggagggaggaataaaatgggccgacagctcttggattcccaggctg

SEQ ID NO: 843363 - DNA, 479 bp, Homo sapiens
aatccccagattctccagtacaagaagaggttctcggagctggagcagctgttggagagatccggagagctggagcagcagcagctgagggtgggtgccagggtggggcagaggcaggccctgccctccacctgcccagcctgatgctttaacctctctgccacccaggacgcagagcacagccaagacctggagagtgccctcatctggctggaggaggagcagcagggagggccagggctggcagcatggccccctgggcgagcgcctactgatcccctgtgccccattcaggagtgccagcctggcccaggtgaatgccatgctctgagaacagctggaccaggcaggtttggccaaccaggctctgagtgaggagatacgaaaggtgaccagtgactggactcgcagctgcaaggagctggagcrgtgggaggcggcatggaggcgcgaggaggaggtgggcatgggggtgcagg

SEQ ID NO: 843364 - DNA, 566 bp, Homo sapiens
aaagcaagcttatttaagtagcaaagaataasgtgaaggttagtaagtatagcttatacttaaaatacaatgaattgaaagctcatggcacttcatagagtaggaagaagaaacttaatagaaagtggtagttgggcgagaaggactgcaagggagttatttggaaaatgcattttttatttctgcatcattttgttcacaaattattcctaatcttttgtgaatttgtggatttcttgaactcaaaccagacttaaaaatacagttatagcacagaaaaaaatctttaatggcaaaataaaagctaagcaagagagcctttcaaaacacatgaaaataacacacacatacaaaaaaaaaagaataaagagatgtacaagtgacacctcctcaaccttctcacttggtgtacatatgcacagtaaattattttgggctcagccaagcatgggagcaattcaaatagatccatatgatattctctgattagaaactcttgtggagtaagttggtgagtgtatctttgcctaaaacagtcatgtcaaaatatagcttcctatagcata

SEQ ID NO: 843365 - DNA, 380 bp, Homo sapiens
ctttcaaaacacatgaaaataacacacacatacaaaaaaaaaagaataaagagatgtacaagtgacacctcctcaaccttctcacttggtgtacataygcacagtaaattattttgggctcagccaagcatgggagcaattcaaatagatccatatgatattctctgattagaaactcttgtggagtaagttggtgagtgtatctttgcctaaaacagtcatgtcaaaatatagcttcctatagcatatttatttagtatcattttggtgaaaaagtggttatacagaatagaaaagagttgtccaaaactaagtggttgacctttccagagccattacctgcagaattgttatgtaagtctgttccatactcataaagg

SEQ ID NO: 843366 - DNA, 601 bp, Homo sapiens
tgataagagaaagcccaactttacactctgtataaccttacaccaatgccccattcctcgtctaattttttttacatgttaacacatgaccttggcattactaaataagaagccctctcacttagaacccgatgcagtatgataaaaattattttgagaacaatcaggagctctagttttcaattctgcttctcttctcaagtagttctgtgccttagtttcttctttgtaaatttaaatggttggaacagaggatctgttaagtgtgattcaagctgaaattgtatgtagcccacactgagtttctctgctatacccctaacccattcaacaatcacaccaccagttttcaggactcacagtaggatagccgtctatcatttgttaataggtgtgctctttcatccaaacaagaaactcatgatttctgcagttttttattctagccaggttctaggtgctggcctggaactataaaacraacatttcacaaaaagttatgacaatatacaaaggaaagacaatttctttgaatatccataatctcaatatgcagtctggctgtggatggccaagagatagtttccttaactggaaaaag

SEQ ID NO: 843367 - DNA, 241 bp, Homo sapiens
acttgtggctccaagcctggcaggacaggccacccacggtcgtggccatggtgccccggtacccaaccccattgttcatgatgcaggtccgtatgtagtctgggagcaagagacagaagatcaacttgggctgaggtcccctgtctcccaccctgcccctctccacccccactcgcctttctcctggaagaggtcacagcgcccagaatgccrcagccttgagtggggcgagtgttgagtc

SEQ ID NO: 843368 - DNA, 241 bp, Homo sapiens
acttgtggctccaagcctggcaggacaggccacccacggtcgtggccatggtgccccggtacccaaccccattgttcatgatgcaggtccgtatgtagtctgggagcaagagacagaagatcaacttgggctgaggtcccctgtctcccaccctgcccctctccacccccactcgcctttctcctggaagaggtcacagcgcccagaatgccacagcctygagtggggcgagtgttgagtc

SEQ ID NO: 843369 - DNA, 585 bp, Homo sapiens
tcaggcctgacagagcagatgcagcaagttggctgaaccaataggaatgtgtgggagctgggagaggaagcgcaatggtttgaatgtgtttcctccaraattcatgttggaaccttaatctccattttggtgttatcaagaggtggtactctttgagaatggataagtgacccataaaagggctggagggaagtagctggggccatctttgccctctgcttttctgtgtgaggacacagcagcaaagagccatgttgggaacaaagagtgggccctcacagacactgaacctaccggcacattgatcatggacttccagcctccaaaactatgaggaataaatttctattgcttataaatcacctagtctcaggcttttaaaaatagctgcacaaatggaccaagacaggaaaccaggactaagactcaggaaacagaattccagagtcaagatccatttggaaaccacatagaatcagagaacacatccatagcaatgagagaagacagatttgaggaaggtggaaggtaaaattttacctgttcctagtgacagcacctcctttatctttcaactcagtttaa

SEQ ID NO: 843370 - DNA, 579 bp, Homo sapiens
ggatcctgactgggggtgaagcagggcatccctgagatgggagaaaaggcacagagccygagttcagagcccagctcagaaggaggcccccaagtcctagcaggtccccatggcactcaccctggagggcttgctgtgatggaagaagggatggcacttggagaagagctagggagcccagtggggcaaggtctcagagacttcaggacatgctgtggggctgtggccacaggactaactctggagaatctcagggaagtggaaaagtgaggggtgggagggtctggacaggatgcagagctgacctttggggaatattatggccaaggagaagtacggggattgggttctgggcctcaccctgcttctgagtcactgtgtgacacaggacaagccacttggcttctctgagtttggtctgcacatcttagaataagagatattaactaagggatctctgagaccctctcagctccctcagagggtcaggccttgtctcggtatagttctgtgtgatgcccccctccctccccctacaccccaccctctaccttatctggtaagtggctttctagctca

SEQ ID NO: 843371 - DNA, 498 bp, Homo sapiens
ttctctaccatgcaaagccatctcaagtcccccttcctagtggtgagatggtttccatctggactggcactcagcagaaaagagaacttsttttcctcatggttgatcaaaagttctaggccactggctctaagaaccacagccccatccctgaatcaccagaaaagatagaggcctggaatatgtcaatcagggtctatcccatgagtgagcttaaccccatgtagactgagagttggggagagggcagttttatcagtaaaagaataaaagtgtactaggccaccaaaacccatagatgcctggagtgagtttggggcagggagcaagaaaagaaaacgtattaacagaaacaaaagggtggataggaaaaatacaaatatttatgcatcctggattgatttcatttcactttcccaataatacaatgatattggagctgttataatcctaggtatagaattctcggtgtttagagttagaaataccttcaatact

SEQ ID NO: 843372 - DNA, 350 bp, Homo sapiens
aagtgctcagtgccatgatgggcgtgttgtcagtcgtcactggatgcttttgctacccccttctcctgggcactgcctgggcwgcagccaccggcctggtcctgagcctatgaagacaaagtgagggactccaggttcctgtccacgtctgtgctgataaagctgggaagataaagcagcttccgggactgcacagtggagggggaggcaaagcactgacatctgaatcctgggtcagtgacatcaccagctacaaggactcaaggaggccacttttcctctctgagcctcagtttcctcatctgtaaaatggagaggatgatgaaggtcccagacacgacacatggtag

SEQ ID NO: 843373 - DNA, 350 bp, Homo sapiens
aagtgctcagtgccatgatgggcgtgttgtcagtcgtcactggatgcttttgctacccccttctcctgggcactgcctgggctgcagccaccggcctggtcctgagcctrtgaagacaaagtgagggactccaggttcctgtccacgtctgtgctgataaagctgggaagataaagcagcttccgggactgcacagtggagggggaggcaaagcactgacatctgaatcctgggtcagtgacatcaccagctacaaggactcaaggaggccacttttcctctctgagcctcagtttcctcatctgtaaaatggagaggatgatgaaggtcccagacacgacacatggtag

SEQ ID NO: 843374 - DNA, 601 bp, Homo sapiens
cataaggcacatgcaacctagatccctcgcatgcacggttcacaatagggttcgcactcctatgagaatctaatgctgccactgatctgacaggaggcagagctcaggcagtaatgctcagtcgcctgcccactgttcacctccggctgtgcagtccagtttctaacctgtctgtggcccagggactggggactcctgggttaaaggaatgaaaggatggaggagagaggaagctcttccaggcagagaaaacagcaaaagcaaaggcaaggggtgaggagggcagtggaaacagtttgattgctggggcagagaaaggtaaagagaaagatgaagcagagagaggtaagtaggagatggggtgtggtgaatcttgtagtccatgctaaggtgcgaggacttgatgctcagggcagccactgcaggctgagaaccccagaataacctggtcaagatcagtgttaatccctctgaagagaagggatgtaatgycactgcttgggttcgtgctcgtgagggtttagttcctgaacctacatctcatccccctggagccacccctcttgtggcagtgaagttagttattagccaaagagtacat

SEQ ID NO: 843375 - DNA, 620 bp, Homo sapiens
gggaagtaaagggggcagggggaggactgggcaacaccgacagagccaaagacaaggtatattttgtactcaacagctcattaattttaagtgtcgtgggaacctgccagttttactcctccaagtaattatcttttgtcttaatttgtaagatttgagaaagggagagaagaggaaaggaaaaaaaatattcactctcacagggaaagattaaaccctgtgaacataagagagagaaagacagaaagttcaatgtatagaagtcctccacacactgtccccaattaaaagaaataattggactagtttctttaaggagagaaaaaaagcattcatcactgtgaaccatattaggaaattgtattgtactcagatacaaatagctttacattaacgaacagagacaaatatattgatttgtatacacatactctgaaagttaaacggcctatagaaaagtgttttcacaccacggcaggcaaaatctttaaatccaaaggctrttattttgatttagggtcacctcatccctgagaaggtaagatttgctcccaatgagggatgaaaaagatatgggcaaaagaagttactttagaaacatatttaatagcaatcctgta

SEQ ID NO: 843376 - DNA, 523 bp, Homo sapiens
ttattaattcctctagtctacctcacttaccccctggaaaaaataaccaattatgagagcttaagaaaaatctaggcatctcaaatatcaacttgtaatataaatacccatgaagcagtgttytgattgtgttatttggtttccaaatagtcattacctaagggctccatttttagaatcatttgagattctgtatatggaagagtattttggaaactctgatgtgctattgaaatagaagttgctggaagcattgttattgtaacccttgagtgctaacccaaggttaaaagctcatgtgatgctgtccaaatcatttcagattatatattttaataaatccatttccattaggatgttcagtggattacaaatgagcacattagagtcctgtgtaatgtttgcaaaacaaaacatctgcctggggacagcaggctcttgcaggaaactactggcatcaggactcctgctcggaggaagaagggtacagtctcaggcccatgtggaagctgatggcaggaca

SEQ ID NO: 843377 - DNA, 569 bp, Homo sapiens
tgtttaaatgcccaggactagaggagctaactctttaaacatccagaacgaattagttattttcgcttttccctcccctactaaaagcttctcttacgttgctytaaagcagatgacacagatgtggttcgcattccttccaatcccagtggagaaactgagggctcaagagaggagcaaggtgaacatgaccccctctatatttgtcaggggaggaagtttcagcccatggaggaaagaggagaagggctgtcttagtttaatgggcttactagttcccaagaaataaaatcaatgctgtgcagagatggaaacagaaactgtcatgcaggccaggttcagggcagactggctgggaaagataactcatcatctatccagacgttcttggtctcaggagagagtggttaagggaacacggctctgcacgccacccctgcctccaaatcccagtagagggcaagccccaggcctagtccactctggggaacctgcagtcaccaggcagggaagaagtatgtcgcgcctttgcagacaccacagacctcattttacaaagaatgggatta

SEQ ID NO: 843378 - DNA, 637 bp, Homo sapiens
tgcacgtgggagaggcaggggatgatgaatgaagcagcaggcgcagagacccccactgagtggcagaggtactgtgaggctgcctttctgacaataacccaggtctagtgggactggagcccccaayaaaaaccgagggcagatcctagaggagcaccattctttatcttcttctcaagattgggagggacacgctgttcacactaaactctgcatctggaatttgggcctagacatgccacaaagccttctcctctttcatggctctgcttctttccagaccacagcagcaattgtctcaagaaactctggccatccctgttgagggacccaggcaacaaggcaagtttctggttttttggagcttccaagccctcgctgaaaccatctctaccaccttaaaagctttagctggcacgcttaggaaagtcttacgaagtacatagagatttcttggatcattttcaattactaaaggaaggtaccaattgttaaagaaaacaaaaaattacccacaatgactgtgaagtctttttattccccactctaggtaatttgttctgattaccaccgttccaaaagacaagattacacaccagtgaagcaaagagataaaagggggaaatctgttccctgc

SEQ ID NO: 843379 - DNA, 595 bp, Homo sapiens
acaggttttaaaaccttattccctcatcctcagttattgackttttttttttggcaggtgtgtgtgtgggacaacttattgaacttttctgaatttccagcttcgcatatataaaatagagatagtgattcattcttgcaatgtatggatttgagacaattgtgtaagtttatcaataaatagtagctatttttgtataagtattacatataatatccaggccactgctttgcataacccaaaaggggcaccattcatgcagaatacaacataaatggtgtccctggagcagtgcagtataggaaccctgaggggacctacagtatactttatagttcatagattacaaattatccctttatcagagtctctcaaggttggatgtatttgaggtccataagagcaatttaggattaacagtagctgcagaaaccatctgcagtgatattctcattttaaatccgcgggaaagaagacagctataaacttgggacctgggtttaagcattttaaatgccaagttcaccattttctaaaacacaacaaatacccagtgagagagggagaagggaagtaaatgcctctgaataagcaa

SEQ ID NO: 843380 - DNA, 641 bp, Homo sapiens
ggtctccatgctgcttggcaggtaacccctatcacagctgatagagcaggaagaattgtagctgaagtttcccagtgggtgactgcaaaccaggcttccatgctcaggggattccagggctgtacagttcacaactgaaaaagaaacccaaatcagttctgctcatctctcacctttaacagataagaacactggaaactagaactacagtttggttttttttttttttagtttaaaaatttataaaatttctaatggaatttgtaaaattgactgtaattctaccccttttcttttattcaagaaaatgctgatccataacaacaacaacaaaaaagcagtgatgacaaccataaaaaagaaatattgagtgatatggggagagtagtgtaattgtgtttacctcaaaactgttcaaattatatgaacaaacacagcaaacttaggtaccacaacaaatttcttgttacttttctcacaactgctaaaaatactacagtaagcttccaaccaggatgagaaccattcacmaagctatatttcaaatttaagtactagaatacattacaaattttaaaaccctaatgctgcactgtctactatagtagccactatctgtgtggctactcaaatttaaactt

SEQ ID NO: 843381 - DNA, 523 bp, Homo sapiens
actgccctcacgtttaattaccttccaccagttcccccccatgacacatggggattatgaaagytataattcaagatgagatttgggtggagaaatagccaaaccatataattccacccctggcccctctcaaatctcatgtcctcacatttcaaaactcaatcatgccctcccaactgtcccccaaggtcttaactcattccagcattaagtcaaaaatccaagttcaaagtctcatctgagacaaggcaagtcccttctgcctatgagcctataaaatcaaaagcatgttagttacttcctagatacagtgggggtacaggcgttgggtaaatacactgattccaaatgggagaaattgccaaaacaaaagagttacagaccccatgcaagtccaaaacccaatagggcagtcattaacattaaagttccaaaatgatctcctttgacttcatgtctcacatccaggtcacactgatgcaagaggtgggcttccaatggccttgggcagctctgcccctgt

SEQ ID NO: 843382 - DNA, 679 bp, Homo sapiens
aacattttcttgggtttatacatttcctattatccattttttctctctaaaacaaccatttctaaacatacatacagaaggaaaaaactatcttacagaataccatctaatgtagaaggaataatagatttgaaaaatcaccattttgtagccctcaaaataactgaggctaggcactgtggcttacacttgtcatctcagcactttgggaggctgaggtgggaagactgcttaagcccaggagtttgagtccagcctgggcaacatagtgacaccaggcatggtggcacatgcctgtaatccaagctactcgggaggctgaggagggagaactgcttgagcccaggagtctgagttcagcctgggcaaccagagcaagacctatatcaaaaaaggaagaaaagagagaaaaagaatgaaagaaagaaagaaaaagaaaagaaaaaagacaagtgaaagacaaggaaatagagaaagttttttcagacaaaaaagacaccataaagctgttggatgttcagtgtagtagttagttatggctgggaaaacgttatatggagccggaatcctgggaaacatctacatgtaagaaacagaagtgagayggaactggaaaggtaggaggagaaaaaagacaatagtatccagaaggtcaaggaggtctatttctgtaaatgtg

SEQ ID NO: 843383 - DNA, 713 bp, Homo sapiens
ggggaggggagtcagtattaacatcaaggaccaaattcggaaggagatagttacaagtccgtgccaatagacatgggtgtgcatgttccttgagaaaggatgtcaggcacacaggcagggacctggtcaacctttggagagctggcttccattctgagtgggtaaggatgctgccttacagggggcttagcattcccgtaaaaactgactgctctggtccctgcctagaaaagtaatataggacattggttgcaactgtgccctgaacagctggcttcaaaccatggtagaagataaattcccctgctctttggaatgctggtgtatttttggtgctgtttttctaaactatagggttctgcacacggctgagatccaaacctgttggaactgtttgtctaacttgcactggatacatagagattaaattcactgcaaagggttaaacacacgatgtctcctggacactcactagtgatgttgatgctgatgctgatgctgatggagatggcgattggtcaactgaggtgagctttccctccttcgcctgtctcccaagctttaaaatggcaggatacaatacaactaagcaatttggcctaggtgaggtagcagagcccacaaacaagtgtattaaatgaaactggacatacygattgtcactacctagttacatggaaatctgatagctattgtacttagagagtagagaa

SEQ ID NO: 843384 - DNA, 601 bp, Homo sapiens
tattgtgtggaaagttttgcttccccatgatatatctgtgctttcataacaaagctgggcaaaccagaatgaagagtgtgttctggaggcacttttaataagccacctctaaatcaggtctgtctcrattagctgttttctctaaggtaaagtaatcttgagttgcttgtgggatcctaaggtacactctggatatgtaaagaagcagcctggtaaaagttagcccaatgcctgtgtcagggcgcatgccacagttccgacaggatgccttcgatattgccagagagcctttaatggggcaggaggaagacggagaaagatccccgccaacaacactgttcatatagagcaacttgatgttgttatggcagcgcagttctcaaattcaatctcatcatggacacaaccaggaaagagaaaagagaactgcatttttcctaccctgaggctacgctcaatttaggtatcctgtcaggaaaattttgccttttccctttttcagcagcctgtaatatgagagcaccagacatcacaatgcatcattcattcattcattcattattcgacctttctctcgcacattctctctttaagtcaggac

SEQ ID NO: 843385 - DNA, 667 bp, Homo sapiens
gccactgagaggtgacagcgtgctggcagtcctcacagccttcgctcgctctcggcgcctcctctgcctaggctcccactttggcggcacttgaggagcccttcagcccgccgctgcaccgcaggagccccttcctgggctggccgaggccggagccggctccctcagcttgcgaggaggtgtggagggcgaggcgcgggcgggaacccgggctgcgcgcagtgcttgcaggccagcgcaggttccaggtaggtgtaggctcggcgggccctgcactcggagcggcccgccctgccggccccaggcaatgaggcttagcacccgggccagcggctgcggaaggtgtgctaagtcccccagcagtgccggcccaccggcgctgcgctcgatttctcgccgggccttagctgcctccccgcggggcagagctcaggacctgcagcccgccatgcctgagcctccccccgcccccgtaggctcccgtgtggcccgagcctccctgatgagcgccgccccctgctccacggcgcccagtcccgtcgaccacccaagggctgataagtgcaggcgcacggcgcgggactggcaggcagctccacctgcggccccrgtgcaggatccactaagtgaagccagctgggctcctgactagtgaggacttggagaa

SEQ ID NO: 843386 - DNA, 584 bp, Homo sapiens
agctgtgaatgctaagcaactgtagtagatgccaaatcagttgcaccaccaaagtctatgcattgaratgaagtcattgactgcaaccaatttagatatcttttagtattttttttttcaaagacggatttcaaaatgggaacagggctagaagaatcctttcaattttaagttaaaaattatgcatcatcaatgcagattgccatatggttgtagagtaagatgaaacagagtcttagagcaatagtttatttcagcattagcattgttagttgttagacatctgtcccttccaataaatgaagattttgtaaacttcttagtcatttctgtccccatagatccaagaatagaattcacacatggtgactgtttattaaaggtctgctccattaacactcaaatgctaatgcacttccacttaataaaagagcttcatctttgggtctggcagctcatgacatatcccaagtgagtaggtgactatttcctggatgactatagtcaacgcagtgccagattttgacacctacacaaatatctccctttggtgagaaaagcaagcaagagttatagtgaaagaa

SEQ ID NO: 843387 - DNA, 691 bp, Homo sapiens
agtgaaccacagacatttgttcccttaattaacagcgttgctcttttgggtgggtcttgaactgttagcactggtctcccacattctttagtcagttaagggctgccrccatcatgacatggaatagtaggactgggagaatgtactgaatcagtacctagtgcagaacaaaacccttccatggaacataaaaggtacaaatattacattcacagccatgtttgttcattcaaagagcatcttctgaagactttctgtgtgccagacactgtccccagtgctggagaaaatagacaagatccctgttatcatggagcttatatgctaatggtggagacacaaaaaagccaaataaataaataaacacgctagaccatgtcagagagtggcaagtgccatgaagaacctgaaaatgagacatggtgttgtaggagatgccttagatagggaggtcctgggggcagagtacctggaggtctgagatcagagcttttacgcaaacagagcaggtgcagaagttgtgttcgaggaacaaccaggaggccagttggcctgcaaggcatgagccagggaatggtggtacaagataaacttggaaattgtttatgctctgtctctcacactgacttggccttcgatctcagctaaaatgctgctttacttcctactgtattggtgtttgcaaccaatg

SEQ ID NO: 843388 - DNA, 493 bp, Homo sapiens
atatgattacatcaggttaacaggtttctgaccaaattagattaccattttwaaattaaccaatcacgtaattccatatacaacaataatctcaaagtaaatgttgtgaaaattttatcattcgaagctctcttcatccagctaccactcttcatctgtcacccaattttaaccacagttagttaaggtcttacgtagaataattcacggtttatcttatctatctgcttgcctacctatctatctaatataaaaaccacaccatgtcaggtaggttatgtgattcacttgacttgtaaaaattaaatttaatgattttagtttaagactttacatcttgacagtagacaccttcgattaaggtttgtagatttccaattgtgtcctgggcatgtggctcggatttttaatcacctgaagtgctttcagggtatggagagtaacattccctacaatttgtactttgtttaatgtattaactttttcaacattt

SEQ ID NO: 843389 - DNA, 612 bp, Homo sapiens
aattggaatatttataatactaccttagagagtagttgtgaggagtagataagtcaatataaataagcacatggaatactcctggaacagagtagccactaaatatttattttatgattaaattatattttatgccatttcatgcttccaaactgttgcatgtaatataaatcattcttccctagcaaattggaaaattcatacctttaaagagctacttaaatactgctttttgttttaaagaattttacaataaagagttaatattttttatagaggtccctattagaatattcaatacttaataattcacatgtccatcaacttatcaacaaatattatcaggagttttttctatgattagcactgtgattggtatcatgggaacttaaaataagaactatatgttaactgctctatgttggtttacataatttagttgggaggagtataatacaaacaaatcattagagcatartaagtcctaaactttgcaatatcagctgccaagtaacacagtttagagaaagagaaagcaatgtgatctaggtggggaaagtttggaaaaatgtatctttccccccaggttgagctccatgaaaacatgcatca

SEQ ID NO: 843390 - DNA, 615 bp, Homo sapiens
aattgaaacaataaaaagttaaagagtgggttaatgaagttaaaatttacagtttttattagttttctttgtgcttttttatttgtttatgcagtgttaagttgttatcagtataaaataatgggctatgagatagcttttccaagccttatagtaatataaaatctaaaacacacaacatcaaatctaaaatacacacagaaaggaagaatttaactcataacactagagaaaataatcttcagtaaaagaaagataggaaggaaggaaaggagtaaggaaaaacaacaaaataaccagaaaacaagtaacaaaatggcagcagtaagtccttacttatcaatattaaaattgaaaataaataaattaaactctaaagacccaaataaatctaagctgaaaaaagaaacattacaacagataccacagaaattcaaaggataattagtggctactgtgagcaattatatgctaataaattggaaaatctaaaagaaaagacaatttcctaaacatatacaacctacaaagattgaaccatgaagaaattygaaacctgaacagaataataacaagtaacaagattgaaggcattataaaaagcatccaaaataa

SEQ ID NO: 843391 - DNA, 475 bp, Homo sapiens
agtagaaagatagtcaatatcaggactttagggatcaccactcttataggtggaagagacaaagtgacaagaacgyagaagttgaatgactcagagccccagtgtttgggctcacagttcagtacttgttctactggcctatgcttcctccattttacaagtcccaggcagcagtgcttgatcttaaaagcagccttaacatattataaaatgcaaaggctgtatgtgtgtggatttatttatttattctctaataactattgtatcactcaacttatgtcaaactaaattgcaatttctgaactgagtactgtcctccaggtcagttctctttctgccattctatactcagatgtctcttttgtatgcaagtacagatttttctctgcttgattggtagacatctagagaccaagtgctgcatctgattaatttgttttttataacacttagcatgatgaagcaggcagataag

SEQ ID NO: 843392 - DNA, 621 bp, Homo sapiens
cataggggaggtaaaatgagggaaatcacaaaaattgtgacaatttctagattagacatagtgtaggtgttgtcatgtctgcagtgtagaagtcaccttggaaagagtttgctcatatttcttaaacattttttagggttgtcttagagatgatccaagaacattttctttcattcattcaacaaacttttactgagcactcagtgtgcgtaggatgagctaggctaggagataaggatgcagtggtgagtaggataaataaaattcctctgctaaagaagcatatgctctagtagggaagacacaaaaaagtgtatatttagcatgtagtatgtagcaactagagctaggaggaaaagtaagataggggaaagggacagcattgtctttgggaggacccagggtggagacagtagccactctcccctgttcagaacccaggagcacagagtgcaggtcacagctcaaagggcattgtatttggctgtcyaatgtggctgttctttttttttttttttttaatacaagcatccatttttgttttaagacatgaaatgagggaatgaccacatatcctctctgtctctaattggagacagtgagtttgggcagttaagatcc

SEQ ID NO: 843393 - DNA, 573 bp, Homo sapiens
tatgaatttagtgtaggttaagtgtacagtgttgataaagtctacaggagtgtacagtaatgtcctaggccttctcattcactcatactcactcactgactcgcccagagcaacttccggtcctgcaagctctattcaaggtaaatgtcataaacaggtgtactactttttattttttatatggtatttttactactttttctatggttatatctacccatacacaactaccatcgtgttataattgcatacagtattcagtacagtatcatgctgtaggtttgtagcctagaagctgtaggctataccatattggttaggtgtgtagtaggctatagcctctaggtttgtgtaagtatcctctatgacgttcacacagcaaagtctcctaaaaacacatttccaagaatatattcttgttctcagtgatgcatgactgtacttacacatagtaarcacacttctaggcacttgacatatattggctcgtttactcctcacaacaagctttgaagtaaggattattacgatatccattttacagatgagaaaatgaagaaacagagaagttaa

SEQ ID NO: 843394 - DNA, 497 bp, Homo sapiens
gcaactgtaatctaaggtctacatgattttgggacagcaggctgccagcaaccatgaggaagcaggtcagagagcaagctgacctcatgatgaatgctgaatgcactgcaagcttggtttatgtytgtttctccccctcccttcttcactgattaaatttataaagtttataagtatggttgcaatttcttccagagtagccttaacctaagccctgagaccactcaggtcctcagtggcacctctcttccaccagcaggagtgaaaaaattgctaccttaggtgatataaaacccacaagaccattgaatacatggagatttttattttgattttgtagggacgactcctctgtttttataaagctattttaactataaaacatttttgtgattttgatgtggccaaagatctcccaacaatactactttcagattttagttttctgtctaatatctgggaaagattagacccttccctgcttcagactcaggact

SEQ ID NO: 843395 - DNA, 710 bp, Homo sapiens
caaagccaggatcttgagaccaggctgatcaacatggaaaaacctcatctccattaaaaatacaaaaatcagccagtcttggtgaaacgtgcctgcmgtcccagctaattgagtggttgaggcacaagaatcacttgagccctgaaggaaaggattgcaatgagcccagattgcaccactgcactccagcctaaatgacaaactgagattttgtctccaaaacaaaacaaagaacaagaatgggtgggaaatacttaaaatgatcaaattttatttggttgctttgatgttctacagctgaaactcaatcacagacaaagtagtatttcattatttttccatcagtaactcaataactagatatttctggtggataaattgctacaacacgttaaaagttttcattcaggtgctctttatttctgatattccttggtaaccatccttgcagggataacattctcatcactgtagaactttagcttctctttccgactctgtaggacacgggtccctgaagttctcattgatgtcacctcaacattttcctccagccttgccccctgctgttatgttttctctctcacactgagcacttgcctgtgcttcctttaagttgcatgtggcctggacacagtcactcatgccagtaatcccagcactttaggaagctgaggcaggaggatcccagagcaacacagagaaaccct

SEQ ID NO: 843396 - DNA, 423 bp, Homo sapiens
gcctctgggaagcaggacagggcccaggctccaggccatctggcccagaaattctcatcaacatcccgcaaatccagcacttgaagtttccacctcctgtgggtaaagtaagggagaggctcagaatttagagggactcatccctgacctttgctttcattctcatcccataaatcagctgctcctgtcctcagtgctccctgttctctttgtcttttctcaatcccttttccctttggattctgagtggtccccacttctattccctttaccttccactgagtaaaggcmggtttctgttcccacagtggaccctgtatggtgagcagtcctttctctgaggatctggacaatggccaaagcctccctgagcttcctcgccaacaccatcagaagactctgggccgcacttgggttacttct

SEQ ID NO: 843397 - DNA, 553 bp, Homo sapiens
tgaacacacgaccttccttgccagagcattatgctctaatgagctttgaattacccartgaccctgccgcccttccctccacatgctatctacaatggtttcccatgaaatgtgtcatttcacctctactggagcacagatgtgcggagaccatcacagattaccatctctctctctgtaggacagtaagcagaagagtgtgcctcagaggcttccagagaaatggaggcaggaagctatcactgctgaaatataaatttgactccatcaaacttttccccttgggagaagtcctgcatggcttgagcctgcatgtcagagcccatcaaaaagtttgggaatcattatttgtaaaagaagtgaggttgccatttagtaaaagagaacccatttctaataggaattatagttgcatgtcttatgaatcatctaaggtaaggtgaggcaggatcagctgcaagaatctatcccttttctcccagaggccctgaatatgttcatgtatttatctctcatactcatctcccaacagagcacccacttcataatctgg

SEQ ID NO: 843398 - DNA, 560 bp, Homo sapiens
aagatcatacagctgataagtggcagaattgtaattcacttgatcttagccaaaaggctgagaagcaatgcagaattgtaattcaattctagccaaatctgtctgatgcaggagycaggttctcaaccattataatatagggactctgttttgtactgtgtatttatttttctgcagtagtaattctgctttttactgcatatagccactattttcttgctctatcatttatttcattgaacctgtgttttctcctacttgttcccattctgttgccatatcgtctttaatctcactgggcataggaaatagccagttgtgtagaatattcttctgattcataaagtgaacctcagaggaaaggagtttctcagctcttgactttttgtttcttttcattataaagcatttgttttctgcactatttagtctccatgattttgacttgttgatcctccttgctattcacaaatctaaaaagatggttttaactacttgtcttaaatgttggtatttgaagcttcctaggacaaggctgaagtagcaggccatatggggtg

SEQ ID NO: 843399 - DNA, 611 bp, Homo sapiens
tttaaatgtttaaatatattggtttatatttttagttttaatgtgtattctttgaggttgtcacactctttctattggagttaacatcagaaaaattactggagaaggcccaggaagtccactctcctggtgcgtgtttccataataactcaatcgttctgcccttataacttgattactgattgacgtaataggggaggttgtgcaattttggaactacatagtactttgtacagtagtatgtatactactttaagaaaataaaatatattacattttatctaaaaatacaaaataaacacatttcatgagttatgtaaaaagtgctgattttgccaaatgttttgctttcaggttggtcgtagagaattttcttagaattttctaagtataacctacagaacctatggctctttctggctcttattaaacctggcagttggcataaagcatttgtatcaaaatggttactctgaccttggatttatcatttggacaaaawaattattattttacctttccaaataattcagtagcttatgataaagcagatactccttctcaggggtaaaacccaacattagttatacgcttgacttagtatacatact

SEQ ID NO: 843400 - DNA, 559 bp, Homo sapiens
ctttttcaggtaaatcaagaatttcttcttggtttggatcccttgctggtgagctagtgtgattttggsggggggggtgttaaagatccttgttttgtcatattaccagaattggttttctggttcattctcatttgtgtagcctctgtcagaaggaaggtctagggctgaaggctgttgttcagattcttttgtcccacaggtgtttccttgatggagtactctccctttttcctgtaggatgtggcttcctgagagatgagcatagagattgttatctctcttttgggtctagccactctgcaagtctgccaggctctgagctgatactgggggttgtctgcggagtcctttgatgtgaaccatctatgggtctgtcagccgtggataccagcacctatccagtggtggttgcagggaggtgaaatggactttgtgagggttcttagctttggtggtttaatgctctgtttttgtgctggtgggtctcctgccgggaggtggtgcttttcagagagcatcagctgtggtagtatggagaggaacccatggtgcgcgt

SEQ ID NO: 843401 - DNA, 559 bp, Homo sapiens
ctttttcaggtaaatcaagaatttcttcttggtttggatcccttgctggtgagctagtgtgattttgggggggggggtgytaaagatccttgttttgtcatattaccagaattggttttctggttcattctcatttgtgtagcctctgtcagaaggaaggtctagggctgaaggctgttgttcagattcttttgtcccacaggtgtttccttgatggagtactctccctttttcctgtaggatgtggcttcctgagagatgagcatagagattgttatctctcttttgggtctagccactctgcaagtctgccaggctctgagctgatactgggggttgtctgcggagtcctttgatgtgaaccatctatgggtctgtcagccgtggataccagcacctatccagtggtggttgcagggaggtgaaatggactttgtgagggttcttagctttggtggtttaatgctctgtttttgtgctggtgggtctcctgccgggaggtggtgcttttcagagagcatcagctgtggtagtatggagaggaacccatggtgcgcgt

SEQ ID NO: 843402 - DNA, 617 bp, Homo sapiens
cagatgtatacagaacattctatccaacaactgccgaatacacattctattcaacagcgaatagaactctctccaagagagaccatatgataggccacaaaatgagcctccataaatttaagaaaattgaaattatatcaagcactctctcagaccacagtggaataaaactggaaaccaagtccaaaaggaaccttcaaaaccatgtaaatacatggacattaaataacctgcttctgaataattattggtcaaaaacaaaatcaagatgaaaatttaaaaattatttgaactgaaagacaataatgacacaacctatcaaaacctctgggatacagcaaaggcagtgctaggagaaaagttcatagtcctaaatgcctacatcaaaaagactaaaagagcacaaactgacattttaaggtcacacctcaaggaactaaagaaacaagagcaaaccaaacccaaacccagcagaagaaaggaaataaccaagatyagagcagaactaaatgaaattaaaacaaaaaacaatacaaaagactgcttgatttttaaaacttatttacacctctttgttaaacttctctgataggatcctgattcttttcattgtctaa

SEQ ID NO: 843403 - DNA, 657 bp, Homo sapiens
taatgtcatattcttattttgacattttccaatcttactatagaataatttgcaggacattsatctatgatgttgcctgaagttagagctctattttcaaagtacagattcctgaaataagtattgtacaataatttcctttctgcacataaatcgtacatacttcgtggaataattactcatttgtctatacataccatgtgtttctgaaattatctgtaaatacaagatttatatgtacaaacacattaaaatgagatgtttaaataaaagagatttctgggtttggagcattttcttggacagggaggtaattggtacaaatttaagttaaattgctttatttttattgtaattactagaagttttaatcaaaactgacagtaatttaagcacttgggaacaaagtacacttaaatcttcaactaattttaatgtctaaagctgcttctctcaatagctctgaaatcagtttggcccttgattgccagaaactgcacaaacaaaatggaaactcttaatgattcgtaccgtgtggaatgaatactgactgaagatggcaacaaagaagctgaggaagagatgtagtgtgatctgcaaatcatacttaaagcaagtcagagaagttaaaaaaagtcctctcttattactgcagaa

SEQ ID NO: 843404 - DNA, 594 bp, Homo sapiens
ttgattttacctggtgctctattctattttggctaagctggcactgaaaccacacgacaaagtttttctcagtctttcctcccatttcctcaggcaggggtgtttctcacctcttccaccactaccaccagtccacaggaagtactgccaatgtttccttaaagcccaagggcttgtcaagcagtttttgctaggtctgtgactcaccttcacagcagcagcagtggtctcccctcttgcccagggaaagtccagaaatgccatccaagatcaaagatgtggaattgagtaccccaagagcgcacttggtgctctttcccagtgtggcaatgctagcgcctaagttgcaagaaaaagttgcctttatacttccttctccttttctcaagcagaaggagtctatccatcttcatagccatcacagctgtgaatatgcttggttactccttattccagcatctctctgagtctcacccaaggcccatgacatrtattctcttgttatcggtgctgattattcaaggtccaatgagggctttaatcagcaggtaacaaatcctgtcaactcggtccttcctttcaagagagcagatt

SEQ ID NO: 843405 - DNA, 596 bp, Homo sapiens
accctgcatttcactggggatctggcaacccatttttcctgkacccctctctatagcaaagagctattctgtttctttcacctattaaacttccactcttaacctcactctttgtgtgtccacatccttgatctccatggctgtgagacaacaaacctcgggtattaccccaggcaatgagactacttcactagcacctgatcatttggaaaattctcagcccatccagatagtggctctagaaatggtgtgtggttggacaaccacttactaagagattaggtgtcttatggatttaatcaacaatttcagtagaaatcatgaacagagacgtatttattcaggaagtatctgtggggaaccctcttttctaatggcttgaatcaccataagttggacaggagaccaatacattttaaaataattttatactaacaaaaaatgttgccagcctggactgattgagaaagaaataggacaaagtgaagaaaaaaattactctaaaggcagagccatagatgcagagaatagagcatcaagccacagaggaatattctcaggccttcaaatctaatgaaattattcctgttgggttg

SEQ ID NO: 843406 - DNA, 433 bp, Homo sapiens
ttttcaccaacaagtgatgttgaattttatgaaatgttttttcagcatcaattgaaatgatcatatgttttttttccttcattctgtgatttgatgtatcacattgattgatttacatatgtagaaccatccttgaatccctgggataaatcccacttggtcgtgatgaatgatctttttattgtgttgttgaatttggttttctagtattttgttgaggatttttggatcaatattcatcagttatatttgcctatacttttcttttttcgatgtgtctttttctgtttttcctatcatgttaatactagccttgtagattgagtttggaggtgttctctccttctttagttttctgaatagtrtgaatatgattggtattagttctgctttaaatgtttggtacaagtcagcagtgaatcccttgagttcc

SEQ ID NO: 843407 - DNA, 667 bp, Homo sapiens
tcactgtcttcctcaggcctgtgggatcccatcatccycatccctgctcacacgtttacctgctgctcctgaacaacaggcctcatgcctctctttccaaaccttccacgcctcagctttgaggaagacttccagaacccgagtgtgacagaggacttggtagatgcacaggattccatagatgaggaggaggaggatgcctcctccacttcctcttcctctttccactttttattcccctcctcctcttccttgtcctcatcctcacccttgtcctcacccttaccctctactctcattctgggtgttccagaagatgaggatatgcctgctgctgggatgccacctcttccccagagtcctcctgagattcctccccagggtcctcccaagatctctccccagggtcctccgcagagtcctccccagagtcctctagactcctgctcatcccctcttttgtggacccgattggatgaggagtccagcagtgaagaggaggatacagctacttggcatgccttgccagaaagtgaatccttgcccaggtatgccctggatgaaaaggtggctgagttggtgcagtttcttctcctcaaatatcaaacaaaagagcctgtcacaaaggcagagatgctgacgactgtcatcaagaagtataaggact

SEQ ID NO: 843408 - DNA, 487 bp, Homo sapiens
agaaaaaaaccaaacaatcccatcaaaaaaattagctaaggatatgaatagacaattctcaaaagaagatatacaaatggccaamaaacatatgaaaaaaatgctcaacatcactaatgatcagggaaattcaaatcaaaaccacaatacgataccaccatactcctgcgagaatggccataataaaaaataaaaataaaaaatagatgtttgtgttgatgcagtgcaaagggaacacttctacactgctggtgggaatgtaaactagtacaaccactacagaaagcagtgtggagattccttaaacaactaaaagtagaactaccatttgatccagcaatcccactactaggtatctacccagaggaaaagaagtcatacaaaaaagatacttgcacatgcatgtttatagcagcacaatttgcaattgcaaaaatgtggaatcaacccaactgcccatcaatacatcaatcaatcagtggataaa

SEQ ID NO: 843409 - DNA, 610 bp, Homo sapiens
aggcaaggtgggtgtaactaccataatggacagcagaggcaaagtggcaatcagaattgtctcactcgtgtagagctgtggcattggctaattaatcacagtgctcctataagtgaaattaataggaagccttctggactgctacttaatttatacaaacagaaaacttctaggtcaaatggacaaaagactaatttgaattataaaaacagaaaatcacagcctctcgatcaatttccatactcaagccagtttacagacccagaaccccttgaatgaaggggaggccaggtcccttgaggaaggactccactacattaccaacaatttatgcagtgaatcttcctcccaaccttctgcaaggagacctctggccttttaccagggtaactgtgcactgaggaaagggaaatgaatcagacatatcagggactactggacaccggctctcagcttacgttgtttccaggggatccaaaatgtcactgtggtcctccasttaaagtaggggcttatggaggacaggtaattaatggagttttatctcaggtctgacttacagtgggtccagttggtccccagactcatcctgtggtcatttacccagtgc

SEQ ID NO: 843410 - DNA, 602 bp, Homo sapiens
aatgcaactaaaacaaaaataaataagtgggacttaattaaactaaaatgcttctgcacaacaaaaggaacagtcatcagagtaaacagacawtgcacagattgggagaaaatctttacaatctatccatccaacagaggactaatatccggaatctcctgggaactcaaacaaattagcaagaaaaaacaaataacctcatcaaaaagcggggtaaggacataaatacacaattctcaaaagaagatatacaaatggccaacaaacataaaaaatgatcaacatcaccaatgatcagggaaatgttaatcaaaaccacaatgtaataccaccttacccccccccaaaagaatgatcataatcaaaaaacaaaaactaatagatgctggtatggatgtggtgaaaagggaacacttctacactgctggtgggaatgtaaactagtacaaccactagaaaaaacagtgtggagattccttagggaactaaaagtagaactaacatttgatccagcaatcccactacccacagaaaaagtcattatacaaaaaagatatctgcacatgcatgtttatagcagcacaattcacaattgcaaaaat

SEQ ID NO: 843411 - DNA, 412 bp, Homo sapiens
aagacttcttgttatctgtcttttttattatagccatgctagtaagtataaagtagtatctcattgtggttttgatttgcatttccctaatggctaayaatgttgagtatcttttcatgtgtttgttggccatttatgtatcttttcagaaaactatttgttcatataatttgtccatttttcaattgagttatctttttatcattgaatggtaagtatcctgaatacaaatccattatcaaatataagatttgaaaatatttcctcccatttgtggttgccttttcattttcttcatagtattctttcagggactaaagttttacattttgatgatgtccattttatctatgttttcttttgttgcttgtacttttgttttcatgtctaaaaatttttgcctagcctaagg

SEQ ID NO: 843412 - DNA, 574 bp, Homo sapiens
cataagaacaagcagttctttccccaggcatctttctgatatgatttggctgtgccccaccaaaatctcatcttgrattgtagttcccataatacccaagtgttgtgggtgggaccctgtgggagataattgaatcatgagggcagtttctcccatactggcctcatggtagtaaataagtctcacaacatctgatggttttaaaaggggaaactcctttcacctgattctcattttctcttgccgccaccatgtaagaggtgcttttcactttctgccatgattgtaaggcctccccaaccacatagaactgtgaatccattaagcctatttttcttcccagtcttggatatgtctttatcagcagtgtgaaaacagactaatacactttccaactctgcactttaagctgtttttttcttttctccactaggccaggcattaacttttatgtgacaggcttttttattttccttttagaagacgtttgactaggccaggatcccaactatcactgtttatattctctgtaaagttttaattatatttaaaaaaaaaaaggatttttgaggtt

SEQ ID NO: 843413 - DNA, 600 bp, Homo sapiens
gctttggctttggctttggctactcgggcacattttttggtccatatgaatattaggagagttttttttttctaattctgtgacaaatgacattggtaatttgataagaattgcattgaatctacagattgcttttggcagcataggcattttaatgatataaattcttctaatccacaggcatagaatttcaatttttttgtgtcatctatgatttttttcaacaatattttggagttctccttatagagttatttcacctccatggttaaaggcattcctaggtattctatttttgtatgtgtgtgcctattgtaaatgggatttataactttttgagttataaaaaatcatttataactttttgagtaaattgtaggtgtgtatatttatggggtacatgagatgttttgatacagacatgcaatgtgtaatcatcacattatggaaaatgtggtatccatccccccagcatttatcttgtatgttacaaacaatccarttatattttttagttattttgaaatgtacaattaaggtattattgactatagtcacccttttgtgctagcaaatactaggtctcattcatcctttcta

SEQ ID NO: 843414 - DNA, 461 bp, Homo sapiens
gatgtgatcccatttgtccatttttgctttggtttcctgtgcttgtggagtattgctcaagaaatctttgtcaagtgcagtgtcctggagatttttgccraagttttcttctagtaatttcatagtttctggtcttagatttgtttttaatacttttttttttaattatatagtgagagatgggggtctagtttcattcttctccatatagatgtccagttttcctagcaccatttgttgaaaaggctgtccttttcctagcgtatgttcttggcaatattgtcaagcatgagttcactgtagatgtatggatttgtttctgggttctccattctgtttcatttgtctatgtgtatgttcttatgccagtatcatgctattttggttactacagctttgtagtataatttgaagtcaggtaatgtgattcctccagctttgatctttttgctctggatagc

SEQ ID NO: 843415 - DNA, 563 bp, Homo sapiens
aggtaatgggatcccctctggcacagatcacatctagaaattccatccaagagccaagccctgraatcggggaccccaagaacctgcttggtgctctatctccactgtggctgagctggtaccaaagctgcaagacaaagtctcctttactttttcctctacttttctcaagtagaaggtgtctttccccatgcccacaacagctgggaatgtgcttgttcacaactgaagccagcacatctgaatcttacccaagtaccatagcaagtactccctggctgccactgctgacaactcaggttcaaagggcacgtcagtcagcagctgataaatcctgccaggactgtgtgcttcaaggcagcaggttcccttttggcccagagtgtgtctataaatgtagttcaggagctaggccctggaataggagcctcaagactcttccttggatactatcttattgtggctgagctgttatcaaagttgcaagacaaagtcttctttactcttctctcttctctactcaagtgaagggaaggtgtcgctcccacagctgcaatctgtac

SEQ ID NO: 843416 - DNA, 576 bp, Homo sapiens
tctaatgaaaattatctctgaacaatactttcagttcactgcagtgtgtttgtctatttgagaaaaaaagcttttgtgggatacccacaagtgtggattttaataatttctattatggcttgttaatttttgttcatacatacacatataatgttcttagcttaattttaccaagttgatcaactaatccaattacttattattctatttaataagaaagaaataatgtgagaatagagcccattggtttttgcatacttgtcttctatttatatatgggagtaaaatgttatgcaacagccaggcaatctttattgacaaaacatttttggcacttaggattgttttttctttgatattatatacttcagctaatggactcaacatggccacttctaaattgccttgataaaatgtgtcattgagaaagaaaagagaaaaaaagcattgatatgtggcaattttgtacctttaygaagcctccataatatggaaaaatggatggtagtgtgaatggcaatctgcttccacagtgcaaatggagagtttactgccaatcttaacatttaatttata

SEQ ID NO: 843417 - DNA, 630 bp, Homo sapiens
tcttaattaatttagaaagtttattttcccaaggttaaggacgtgcccgtgacacagcctcaggacatcctgacctgtgcccaaggcggtcrgggtacagcttggttttatacattttagggaaacatgaaacgtcaatcaatgtgtgagatgtacattggttcagtccagaaaggcgggacaacttgaaatggggaagtagtgggatgtggggttacggtggagcttccaggtcatagggaaataggagacaaacagttgtattcttttgagtctttgatcacacattcacgaaataaaaaatttacttgtgagaagggggtagaggaatagttacttacgccttagtctggctcagtgaatctgcatatttacgtaaacaacaggacacaggaagcaatcagatatgtatttgtctcaggtaatcagagggataactgagttctgtccgtcctgtgccctacacgtgtgaagataagctatcattttacattgccaaggtgaaattcaacagaactgttttagggtaaagatcttgaggcccacaaggaatttgcttgtgggcaaattgtgagggaactatgtagcttttaaaaatctttgtagctatcttatttaggaataaaatgg

SEQ ID NO: 843418 - DNA, 634 bp, Homo sapiens
ctctctggtatctcctcttacgaaggcactaatcctattggatcagggccccatactcatttaaccttaattacttcctaacaccaaatacagccacactggcggtctagtgtttcaatatatggataagggggacacaattcagcccataacagcacaccaactcttaactgtcttggcccagaaatgatgcacattaagttcactgactctcttggtcagaattagtcacgtggcccaagcttaattgcaagaaaggctgagaaatgtaggggagcaaatatttgctgagcgcaatctgtgccacacactgtcttctaggctgagccttgaggaagaaggaaagtctcgaaagtcagaacagtggctcggatgtaaagtgtaaggaaacacacacctgggactgtctgccaggcaggttcaaggaaccaagaccaggaacctggttctgaatagaattcttgggggaagaggggggaggagggaacttgtccctgtgtttggtatatttcgaggtttactatgtcttctgcccaggatgtgaacacaaatscttcatcacagatatatcaatagacactcaggaaattcagatgaattaggcagagatcagagtttttattctgtttttaaa

SEQ ID NO: 843419 - DNA, 581 bp, Homo sapiens
ttcatatgtatttgatatgaatcagtatccatcaccactatctacacccaaaactttttcatcatccccacataaactctatacycatttgttgtgatattggaaaaagcaaagttttttccctactctcacacagtcaacacttccgataccagatgtgtgggggtatttccccacataccacaagtgattctgtggacacaagctgagtgtctgcttattcaatcagatagcgtcagatcccacaggtttggggctcagtcccacaagactatcccccacttcagatgtcagtcacaggtctgggcctccaaaacttttgataaaccagctacaaatcagggctcccatgactctcccttctggtttgattattttgctagagtggctcacagctctcaaggaaacactttacttacatttacccatttattataaaggatgttacaaaggatacagatgaacagccagatagaagagatgcgtagggcaagacatgtgggaaggggcgcggaacttacatgccctctctgtatgcactaccatccaggaacctccacttgtgcagctatctggaagct

SEQ ID NO: 843420 - DNA, 529 bp, Homo sapiens
agatattttctaggttttcttataggatttttatagtttsaggtcttaaatttaaatcttttaatctatctcaaattgacttttgtatatggtgataggtaggggtccatttttattcttctgcatatggagcatcagttaacccagcatgatttgttgaatagaaaatctttttctcattgcttatttttgttgtcttttttgaagatcagatggtcataggtgtgtggcattatttctgggctgtctattttgttccattggtctatctgtctgtatttataccagttttatacatgtttttatatcatgttgttttagttactgtagccttgtagtatagtttgaagtagggtaacatgatgcctttggctttgttttttttttttacttactattgctttggatattcaggctctttttggttccatatgaattttagaatagacttttttctgattctgcaaaaaatgatgttggtagattgttaggaattgctttgaatttgtaaattgctttaggtagcatg

SEQ ID NO: 843421 - DNA, 407 bp, Homo sapiens
tcataatcctctcttttatacctcacctggcccctgccttggcattccctggcagcaccctgatactccagctaggctagtatgaggtggaaaacacactcagctttattactaatatgtcccaaccactgaacaaataaaatatccctgagctgccgacagtgcctacacaggaaagccgacaactttacagccatcctccccacagggcatctcagggtgccctcagctcaactgaggagagaggccacatgtgaattaacctgagtaacttctggatggtccatacccaatggccaggatttggcagtgagggagtyagtgaagttttttctggtctgggtaggggccgtagcaccctgaaccaagtcaccaaggacctaggccctttctatcttttacatctt

SEQ ID NO: 843422 - DNA, 496 bp, Homo sapiens
taagcttactgagtttatgctgagttcaaactagtccagatattcctaatctatgagcaagggactggttagtaagcttcagattagataaggtttttataaagttttaatagtggatttgttgttttactattacatagacatgaaaagtgatccttattaaaacccaattaagatggaaagttttacaaagtgtttagaagagactagagttagaagacaaatttatatatataaacccagtgaaacttaagatcagaaagtgtaatcacagttggggcttcattagtgggagaagtggaaatgccgtcagcaccctttgtctccgatgatgtatgtaaagggcccctactaccactttagacagygggccaaactgagcaaaccattcagcattcagcacaagacagcttttcttaagtaagctagtagcaggatgagaaattacaaaactaagtttttaatctattggtttgtgtccttctaacctaacagg

SEQ ID NO: 843423 - DNA, 583 bp, Homo sapiens
ctacatattcatagacctcatgccaattgtagattctgacagaaataagccacccttgaacaaatggttcagmaaatggctctgcaacatgaaacagtgtttattttcccagagaaagaacatggatggaaggcgttgtcttttggatttcttaatcaatcataatttacttttaaaaggcaccgctttgctgttgttgttgaagaacgaatgtacaaattatttataaaataacatggacccttggtaagaatgttgaaggcgtcctgcttgagattttcttacctataagaaaccaggtgacagaaggtatgaactgtctcatatgtgagcttggtagagaaagtatttgagatccagagagacttaggagtcagaagcatgggctcatgtctttaccaaagtcagcgccattttcaagacaatagcaatataacaaaggaatcttgcactatttagaaacttctgtttaggggatcctctgtctctggggatccattacaccggggcaggaggtggcaatcttaccagagtgccccaccaaatatcacacccctgttcactgctgcactaatggtaaggt

SEQ ID NO: 843424 - DNA, 643 bp, Homo sapiens
acccgatcatccatcctaggcagtccatatacaggagcatgtattcaacaaagatgccataggtgcattatagcgctagattgtgctgggagaagcacaagatacaactgtttgtgtcctgaagtccatacgccaggagacttttccttttctttgacagatccggcatccaaggcgacaacccggaggaaagctatctccagggcttgttgcccttccggtccaatcccaagaaaattacggtttattacagcggatgtttaatgctacatttaatctctctgagaaagtcacacacctcccctcaaaacctcacgattaggattcagctctcttaacttggcagtggcatctagtggatacctccgcacaatggatatcactgattttgtgacttggtttagattcgaccatatctcagtcacatactagcacccggagggaaagtgctttggaattatagactggcttgtgcaggaaaacgtgctttttctcccctagggaagggcattttctcagccacagctaagcaaagagttgctccactctgggttagcagccctagaaggaaatgctgagtcagtcatttgctagctgtgccacctgtggcttggatccsagctgctctgagacagccctgcac

SEQ ID NO: 843425 - DNA, 563 bp, Homo sapiens
tggctctctacttgtctgttgttggygtataggaatgcttgtgacttctgcatattgcttttgtatcctgagactttcctgaagttggttattagcttaagaagctttgggctgagataaagaagtcttctagacataggatcatgtcatctgcaaacaaagacaatttgacatcctcttttcctatttgaatacccttcatttctttctcttgcctgattgccctggcctgaactttcaatactatgtgaataagagtggtaagagggtgtatccttgtcttgtgctggttttcaaagggaatgcttccagcttttgcctaattcatcataatgttggctgtgggtttgtcataaatagctcttattattttgatctatgttccttcaatacccgctttattgacagtttttcagtttttaacatgaagcgatgttgaattttatcaaaggccttttctgcatctattgagataatcatgtggctttagtttttagttctgtttatgtgataaattgtgtttattgatttgtgtatgttgagccagccttgcatcctgggga

SEQ ID NO: 843426 - DNA, 626 bp, Homo sapiens
ctggaaccccctgttgggaggtctcaccccgtcaggaggaacaggatcaggaacacactgaaataagcagtctggctgccccttggtgaagcaggtatgctgtgctggggggaatgtccctgattcaggctgccttgactctccagagtcagggggcagaaaagtctaagaccagtgatccatgatactgcagctgccactcctcctaggggctcctctcagggagatcagagttctgtccataaactcctggctggggatgctggaaatcacacagggaggccatgctcagtgaggaggaatgggtcagggtcccacttacagaagttgtctgaccacaaactgtcacagccactgtgctgcactgtggggaattgctcccagtgcaaactacccagtctcactggcactggtggcaagggaaaatggccgacaggagttgcagtgatgacagctgcccctccccctgcagaactcagtcttcttaggcagtctcctgactgctgcactggcsaatggggattccaagctggtaggttttagcttgtgggttgcatggaattggggaccgctgagcaaggctgattggctccctggcttcagcccccttcccatgggattggaca

SEQ ID NO: 843427 - DNA, 619 bp, Homo sapiens
gaatgcacagtggtcgagctccctgcttaactaccataggacagaggccatgaaggcagggwtagaccagcacatctgcccacacgtcccctgatggcaggcacttaaatttctctcaactgtgaatggcaccatgtatggtctgtaagtgtttgtatatgtaagtttttataaattataatttttaatgacagatttgtatatattttatggcagtaaattataacagactagtagctacatatatttcgtgcattcatgatataattttttcttaatttttttgatatttctaggccacatggttggcatgtttttcatgttatcacagatcttcaaaaaattttccaatacagtttttaaaaaaaatccacatataattggacccatttatttcaaactcatgttgttcaagggtcagctgtagttctgaaaagtgatattcattatgtgttgttttttatttgctgttttactttccctttcagtttctcagattagtctgcttttcggttgtatgacttttagttgatttttaaattgacaggatagtaggctgtcctactatctaggatactgtcctactatataggatcctactatactaatgagagaaact

SEQ ID NO: 843428 - DNA, 578 bp, Homo sapiens
tctcctgaccttgtgatctgcacgcctcaacctcccaaagtgctgggattacaggcgtgagccaccgcgcccggcccatwttttttttttttgagatggagtttttcgctcttgtcgcccaggttggagtgtaatggtgtgatctcggctcactgcaaactcctcctcccaggttcaagcgattctcctgcctcagccacccgagtagctggattacaggcgcgcaccaccacacctggctaattttttttgaaacggggtagagacggagttttattaccatgttagtcaggctggtcttgaactcctgacctcatgatctgcccaccttggcctcccaaagtgctgggattacaggtgtaagccaccgcggctggcccatttcatatatttttaaaattttttattgttaatttatttttagagagggggtctcgttgtattgcccaggctggtcttgaactgggctcgtgcgacgtgcccgcctcggcctcccgaagggctgtgatgacagcacagcggtgcctgtgatctatggcttcaatttttcaaggctgccaggtccatgcaggggtgtg

SEQ ID NO: 843429 - DNA, 612 bp, Homo sapiens
atgatggaaacccgtctctactaaaaatacaaaaattagccgggcatgatggcacacgcctgtagtcccagctactcagggagctgaggcgggagaatcgcttgaacctgggaggcagaggttgcagtgagctgagatcacaccactgcactccagcctagcgacagagcgagactctgtctaaaaacaaaaaaaagaaaaagtggtaaaatatgtataacataaaacttaaccatcttagccatttttaaatgtacagttcagtgatgttaaatatattcacgttgtgcaatcagtctccagaactttatcctcttgctaaactaaaactctttacccattgaacacaattccccatccttccttccccagcccctggtaactgcctttctactttctgtcttaatgaattagactccctaagtacctcatctaagtggaatctgggccaggcacagtggctcatgcctgtaatcccagcattttgggagcctgaggcaggaggattgcctgagcccaggagtttgagaccagcctgggcaacatagggcgacctcgtctctgcaaaaaaaaaaaaaaaraagaagaagaagaaagaaagagaaggaagga

SEQ ID NO: 843430 - DNA, 642 bp, Homo sapiens
acccatatctagccaatatcaacaagttgggatggtttttgtttttttcttttttttcaaaaagggaaattcctctttactgctcacagtaagctgcaaaagaaagttgtcaaggtggcttatgatgctgttgtagcagagctgtgaaaggaagtgctttgctttctctcccgccttccggaatctggcgttccttccccttcggctactgaaaggtgtgtacaactcccagaggggtggctgtaaaagttgactggaggcaaagtggagtggccttattgccaggactagccctacagaagagctttacagagaggaggacagtacatcctatgtgtgttcgccaaaaatgggaaaggtgggtatttaggcaaaacaaaataaaaacctttggaaccctttaagaagttacataccttttaaaggtagtatagtttctcaccaagtgatgcattttagcatgacacttcttgccagaaattttgggataagttggaataaatgtgtttaaaacatcatccaccgccctttttaaattttgtctaaggaattacttaagtatagtatttctgaatgtgcctttgtgagtacagagaccgtcygttctaggaagaagctatccgttggatacaaacaaacaga

SEQ ID NO: 843431 - DNA, 662 bp, Homo sapiens
ttttgtttgtgccaactttttttctggagagaaaaaaggagtttggtgtgtttttttatgccttttcaaagagttttggctttgttgatacactctgttttagcttttcttatttcattratgtattctctaatattagttatatcctctttccattacccttaggtttaatctattgttcttttttaccgtaatatgattgcttaaatcattaaatatttggatattcttcattactgtaagcatgttaaagctaggaatttccctgaaattgtgagtttagccaaatcccaagagttttatttgtattatttttatgatcattcaattctaaatagcttatctgttgcctttaagacattttcatgacataactattttgtaggagtgctttcaaacttccaaatgtataaactttaataaaagtaaaatttttgcttttctttctaacttgatctcattgtgattagagaatatagtttgtgtgatgctgactcaaaatttttgagacttgctttattgattgatttttgatttttgtaattgttttatgtattcctaagctaaatgtatattctctaatctcggagtgcagcattttatacttgtcaactggattgttcttattaattgtgtcatataaatcttttctttatttacta

SEQ ID NO: 843432 - DNA, 457 bp, Homo sapiens
gtggaaaaaataaggtctttgacataacgctaagtggaagaaagtatgttatcagattgtatctacaatataataacaaccaggacaaaattcttcctagatgtggacaaggacttaaaacaggtggatatgttgggctgtgggactgtgggtgtttcttcttccatttagagtcttagaaatgctattataatggtgtttgtgctatagtaaaaatggaaacaaaaaaggcaccaaagcctacagtttctcacagggtgcatagaagctggagagggagaaaggatgccctatcatctccaagtaaagggccctgtacagaagctctatcaaactttgtcctaatagagaactgggcacctccatttacagtatgragtcttggatttttgagtaatgattcaaattcatttttgaatgaagctgaaattcctcttggcagattccaggtaaatgc

SEQ ID NO: 843433 - DNA, 602 bp, Homo sapiens
gctgggattacaggcgtgagccaccatgcccggcctgtattagttatgtcaagaccaaatgctgtcaggctagagaacyggggaaagctgatgttgcagttccagtctgaaaggcatcggctggggaattccctcttactcaggagagctcagtcttctgatctattcagaccttcagctgatgggatgaagcccatcatatgggatgaagctcccctatgttatggggagcaatctgctttactcgaagtccgcccatgtaaatgtcaatctcatccaaaaacaccttcacaaaatcatccaaactatggtttgaccaccaatctgtcaaaccgtggtccagccaagttgacacataaaattcaccaatacaggacccataccctcacgagggttcaagtctgttgcgggcctgggtgatacaaaagtacacaaatgaaacaagtgcagattgtggaaatggtatgaaggaaagcaagttgttaagagaggaaacagaggggaacctgttttagatcaagtggacagtggagggaaaaagcctcttggaggtgaagaagaggaaggagccagccctgacgagtgtagagtgaagagcatta

SEQ ID NO: 843434 - DNA, 440 bp, Homo sapiens
tggaaagttttctaacacattaaaggagctttaattataagttccaaattcttcttagaagaagagaaccagcaggcccagacatttttactggtgagttctatcaaatgttttcaagaaatggattatttccattttataaaaacaactccagaataaaaaaaggtccatttgttcgttcattttatgaggccagtacaaccttgataccaatgttatatgagaaatgtgtaagacaggaaaattacatgccaactttcctcatgaacctaacggcaaacattttaaattaaaagttagcaaattaagtttagaartctgtaaaaaagataatatagtatgaaaattgtgtttgttccatgaatgcaaggatttctaacaatagaaaaaaaactatgtataattcatcacattaacaagttaaaggaggaaaagcaaat

SEQ ID NO: 843435 - DNA, 440 bp, Homo sapiens
tggaaagttttctaacacattaaaggagctttaattataagttccaaattcttcttagaagaagagaaccagcaggcccagacatttttactggtgagttctatcaaatgttttcaagaaatggattatttccattttataaaaacaactccagaataaaaaaaggtccatttgttcgttcattttatgaggccagtacaaccttgataccaatgttatatgagaaatgtgtaagacaggaaaattacatgccaactttcctcatgaacctaacggcaaacattttaaattaaaagttagcaaattaagtttagaaatctrtaaaaaagataatatagtatgaaaattgtgtttgttccatgaatgcaaggatttctaacaatagaaaaaaaactatgtataattcatcacattaacaagttaaaggaggaaaagcaaat

SEQ ID NO: 843436 - DNA, 659 bp, Homo sapiens
aatggccacttggagcaggaatatgatctttatatggaagactcagtggatccttatcaccttcatagaaaggtactcacctcccacgtcaagagaaaagccaacatgtttttcctccaatgcataaaaggaacttccatagggctggcaggagtcaggctgttcaagacaactggaaggagttgaataacatctatccagtgagtcctgcaagacttcaggctctactacctccagcagctccctgctgagcctggaaaaggaggaaaaagtaaagaataagccaggggaaatcagacacaacagagccccaactaggtttcatgggtagcatagggaagtggttaaaaaactaaaaggatagatccattaatgaggtaacaaattattgccttcatgttgggacagaacagggccaaatggaaaagaatgaaagagaaagacagatagacacacacacacacacacacacacagagagagagagagagagagagagagagagaacgagctcagtgaattgtccaggtgacacwctgatgagggagtaacaggacactctgagttagtgccctcaggacacacagcatacagggatcatgaaaagactgtgctcaataattttccataaaatgtgctcaagtttccatgcagtcgcca

SEQ ID NO: 843437 - DNA, 596 bp, Homo sapiens
gactcagtggatccttatcaccttcatagaaaggtactcacctcccacgtcaagagaaaagccaacatgtttttcctccaatgcataaaaggaacttccatagggctggcaggagtcaggctgttcaagacaactggaaggagttgaataacatctatccagtgagtcctgcaagacttcaggctctactacctccagcagctccctgctgagcctggaaaaggaggaaaaagtaaagaataagccaggggaaatcagacacaacagagccccaactaggtttcatgggtagcatagggaagtggttaaaaaactaaaaggatagatccattaatgaggtaacaaattattgccttcatgttgggacagaacagggccaaatggaaaagaatgaaagagaaagacagatagacacacacacacacacacacacacagagagagagagagagagagagagagagagaacgagctcagtgaattgtccaggtgacacactgatgagggagtaacaggacactctgagttagygccctcaggacacacagcatacagggatcatgaaaagactgtgctcaataattttccataaaatgt

SEQ ID NO: 843438 - DNA, 637 bp, Homo sapiens
ccctatctggaagaccaggtggaggcttatcaccttcatagtaaggtactcactgtccacgtcaagagccaagccaaggtactgttcctccaatgagtaaacagcactgctgtagggctggcctaagtcaggcagttcaagataacctgaaggagtcgaataacatctacccagtgagtcctgcaagacttcaggctctttctcatccagcagctccctgctgagcctggaaaagtaggaaaaagtaaagaataagccagggggaatcagaaaccacacagccccagctagatttcatggctaacataaggaactgtttaaaaagaaaaaggacagatccattaatgaggtaatgaattattgcctttaggttgggatagaccagggccaggtagaaaagaatgaaagagaaagacagggagaggcagagagagagagagagaggagaaagtgagctcagcgagttggccgggtgacacactgatgaaggggtcaaaggacactctgagttagtgccctcgggacacacagggaacagtgatcatgaaaagagtggrctcaataattttccataaacttgctcaagattccatgcagttgccatacagcctttgaggtatggtcaacctatagaaag

SEQ ID NO: 843439 - DNA, 590 bp, Homo sapiens
gtgtgtgtgtgtatcatatatatatatatatatatatakagagagagagagagagagagagagaaagatattacatctctcttgttttacttgttccttatttaagtagtatttgttaaacatattgctcttttttctccttatttaaaataatttcatagtcttcaaggtctgaaatattcaggacactactttacttcaagaatcagatctctttccagatccctaaaagaccaaagtcaatgcaataatactctaaggaattcattctttgctcagtttctaatcctaccttgaaacagacagtctctgctttgaaccagagttaatgagaaaggggttttgaaatgaggaaggtaagatataattccttgtccaaatttcatatttcacattcattaacttttaacttgtacttttttggctgacgctatgttgatcttgtctgccaggagcaagaaaaatatgagagataatttttttaaaatacttcaaattgaattgaataagtgtgataacattttcagaccgtcagcttggagtgaaaggtgtgaatccaggaatgaggacatgagaaattctaaaaccag

SEQ ID NO: 843440 - DNA, 507 bp, Homo sapiens
gaaaaacataaacatttttcctgcaccaggctcaatgcttcagaaaaatcaacttatttaaacctcatcataaccctcttaaagcgttactattgttatcatccttattcccagcttacagatggggaaatgtcagcacagagagattaagtaatttactcaagtcataagaaagcctaccagggaactggaacttgaacatcagagtctagagttcatgctcttaatcactatgttatactgcttcttctttttacttataagatggctatcagagttttagacatcacttcctcgtacaactcatttaaggactaagacagtttgccacagccctctaactgagctctctctgtgccttattagtgagaastacatcatatgtcctaccctaaagcagttactcacagtggaaactgggtttactttcctggaatgcagtgccacctgatacttgaaaaaactctgggttaattataaaagaagaagtagatgttgataaggaga

SEQ ID NO: 843441 - DNA, 507 bp, Homo sapiens
gaaaaacataaacatttttcctgcaccaggctcaatgcttcagaaaaatcaacttatttaaacctcatcataaccctcttaaagcgttactattgttatcatccttattcccagcttacagatggggaaatgtcagcacagagagattaagtaatttactcaagtcataagaaagcctaccagggaactggaacttgaacatcagagtctagagttcatgctcttaatcactatgttatactgcttcttctttttacttataagatggctatcagagttttagacatcacttcctcgtacaactcatttaaggactaagacagtttgccacagccctctaactgagctctctctgtgccttattagtgagaagtacatcatatgtcctmccctaaagcagttactcacagtggaaactgggtttactttcctggaatgcagtgccacctgatacttgaaaaaactctgggttaattataaaagaagaagtagatgttgataaggaga

SEQ ID NO: 843442 - DNA, 651 bp, Homo sapiens
aaaaccagaaacctcccctatctattggggaagacccttgaagtggccaggccatgcctcctgctctatctttaacctcttacttaacctctaaagggcactgaaatgtttgaacatattccttactcttgaattcatagctcttcaaacacaagttccattgtggtttaaatataaatggattctaaagatgaaattgggtcaaattgaagatttgggtggataagcaaagggactaaagtcatcttcttgaatgcctattccttcttcatcacttctccactgttgaactcattgcccatgtggcttatgagattagatgagcccagatctccctctcacgtgggagaaggcactatccaatgcttctacttcagaaatccaagaaagaaactctttcgtatctccaaggcttaatgcagtctaactgctttaaacaacacctatgcactgatgactccatattgtatgatgcggattctgatgttaatctagtccctctttattaactcccattcacagcatcattgtggctttagctatttagtgtctacactgagagaggtatatttagataacactttattaataggcttaggcagaaataggaawggacatttcaatgacttatgacactaactacccagagtt

SEQ ID NO: 843443 - DNA, 478 bp, Homo sapiens
attttcaagctagactggctggctgcttggggtttggggagtggggttgggcctgtaggaattgctgcatcagccttctccagagcatctctttccaagatctccctctgcgggtggccagctctcctctccctccctggtatttcctaatatgggtggattcactgcctgctcttgcccatccctccccgtttggcattgttttccaacttagacaggtctggctagttcctgtaggctggaggacaggaagctctgttttgacatacttggtgcattccttgtcttgccctaggagaggtcttgtgggtcaggccaaacactgtaagggtgtgggtctctctttgtggccattgctagggctactgtgtcctggtgctttgagttctccagcagaggtcaggctcttcctgcaggatcataacagccctgctgctctttttactttctrgctgtttagatcacatctgtcagggtg

SEQ ID NO: 843444 - DNA, 341 bp, Homo sapiens
tggtcaccaggtcctggccatcacagcacctcytcggccccccatggggacaaaccctctctcctccagtgctaccccagtcaccccagctccctgctgccttccagacagctgcaccagaactgctcagggtgacagttaaaaggcagactcctcagtgtcctgtccttgacccactggaccagagtgccagcagtaaacacaaatgactgtcacccagaggggcatggacaggcacccaatagtgttatttggcattaagtgtaagatttatggggaagctcacaagtggggaagcagcaggaccctggctcccatcctcctcgtgggacagtgcctgt

SEQ ID NO: 843445 - DNA, 602 bp, Homo sapiens
aaacaggcattgctgtgacccacagagggagacctcgcccacagccctctccaccctggcaggatgtgtacccagggctcagcctgtgggcgcttcagcagaggcgggacactgccccctctcatcccgggtcaccagggacctgtagtgtgcttgcggcagagggcaggtgggcaggcagggtggggtctcaccgtgaggtgccaggagcagtgggtttggggcgagtagtagctggggaagtacggggtgctgaggacgccctgggagtcgagcctgttgtccagcgtcaggttcacttcacaggctggaccaggagagcagctgttacacaggggtcccctggctgcacctcccagcaggctggcgcagcttgtaaccccaccacccctaccacctctgccagcaaattgctgtggttgaatgtgattgtgtgaatctgggtctcagtttcctcatctgtaaaatsaggacagtaatagcacacacctcatagggtagtagagtggattaaaaagacataaacattcaaacagcctggcatgtagtaagtgctcgatccgtgttagttattgatatttgcgggacagcactcgccagtt

SEQ ID NO: 843446 - DNA, 598 bp, Homo sapiens
tagtttttgcgcatctccaactacagcgctgctggcaggattacaggctcttaagcatttgcrcagcgtgggaatagtgttcgtgttatctcaacttcactgcaacccacaacaaatctgcagccgggtcctgttgttatcacccctacctcatggaggaggaaacgggcagcctcaggctgggtccctcagaagcagaccctccattgacaaggtggggcaagtggtttatttggaggtgattctgggaaacagtagttgggagggagagactggaaagtgggcaaccaacacagggccatgaatgcgcagtgtagagctgagagcatctgagctcagccgaatagggcatctctgggagacagcctggaacattctgtgaactattccccctgccagggccaaagaagctgcggtattgatccacccactccagcgctcatggttcagggttgctcctgggaataactccccggcacttctggcctgccttgctgggcagtggtcctgcagcctgagagtggcaggcagtagaccagcctccgtgcagtgagccaccatcctgtaacagaggggcaggagtggccaccgtcctgta

SEQ ID NO: 843447 - DNA, 610 bp, Homo sapiens
cttgacttctgttacttatgtaactggcatgcttactatagacaattagagatattaaataaaaagaaaaataatcactcataatgccaccgccacgagggaactggcttacgctgttggcacatttccttccaggcggttctccacagatttacattatagacacccctctgtctgtgcaattgtttatctctcttcatttgggaaacattaaagaccacaaatctatatttcagaaccatactttaatgcctgcgaaatagtctacctttcaacgactgaatttatttaaccaatttccttctgctgaacactcacattaattctacatttttgctattaaaaatactgctgcattaaatctatttggacataaactttggctgcatcgtgacaacttatgtagggcagattcccagaaggagaacttttctagagctcaggatttggcgagccagagcgttttccatcagagttggcggtggccactccgggcaggatgtggggaactggccttgccragggccctcggtgccaggagtctgcaggtggctcactgcccagtgcccacataggacaccaccttcagtcccctgccagcccggagtga

SEQ ID NO: 843448 - DNA, 541 bp, Homo sapiens
ccagctctgacatcctgtcattttcttgccaaggtctcagcctatcagttgtgacacaagtctcatcagtttcagttttcttgtccatagaatgaccacagatcggccagatgcggtggctcacgcctgtaatcccagcactttgggaggccgaggctggcggatcacctgaggtcaggatttcgagaccagcctgaccaacatggagaaatcccgtctctactgaaagtacaaaattagctgggcgtggtggcacatgcctgtcatcccagctacttgggaggccgaggcaggagaatcgcttgaacccaggaggcggaggttgcagtgagccgagattgcgccattgcactccagcctgggcaacaagagggaaactccgtctccaaaaaaaaaaaaaaaaaaaaaaaaaaaraatgacggcagatcccataaggataaggatcatgtccatctctgtcaccacatccccaatcctggcacctagtaagggctcagtaaatgttccttgcatgagctcagctagctcaggggctattat

SEQ ID NO: 843449 - DNA, 648 bp, Homo sapiens
gtcacccagccaggcagcccaggatccagcagggaaacagggagcctggcctctacagagtggccaaggacaggccaccacygccctccctctggggcgccaccttcccacagccacacgggcgatgcggggctcggccgaccccgcggggcctctacctcagcgatcttctggtcatatgcctccatgaacgtgtccacttccaccctcagggcctcagggtcgggcacagagtctgcgtagtcactgatccactctgaggaaaagggagccagggaaacggggcttcctcaggcctggcatttgggccccaccccagggcctgccaggcaaattgggaccttttcccacagggcccggggcacaggtgctaaggagatcccaggggctgcaagctgcgccctcgctctgcctgcccagtatgcctgtgccgctctgtgccaggggctcaggctaatgactccctggggacccagacacagccccatggtcctcctgcccaggcctccacatgctgctctcagggagcatggacttggcttgtgacattcagacactgtccccatagagtgtcctgccaacccggagcccagaaaggaggcgccagacccctcccgcagtactaactgtgaatgccactcttcacag

SEQ ID NO: 843450 - DNA, 626 bp, Homo sapiens
tcaagcgatccttccacctcagccttccaagtagcccaggaccacaggtgcatgctaccatgactggctaattttttaaaatgttttgtagagatggggtctctctctgttacccacrctgatattgaactcctaagctcaggaaatcctcctgcctcagtcttctaaagtgctggaattacaggtgtgagccaccatacctggcagacagatttctcttttttttttttttttttttttgagacttagtcttgctttgtcacccaggctgaagtgcagtagtgtaatctcactacaacctccgcctcgcaggttcaagcaattctcctgcctcagcctctgggattacaggcacctgccaatgcacccagctaatttttgtatttttagtagagatgggattttgccatgttggccaggctggtctcgaactcctgacctcaagtgatccacccacctcggcctcccaaagtgctggtattacaggcatgagccaccgtgctcagcctcagatagagatttcttgatttcagtttggtcattgctgtatccctggtgcctagaacagggcctggaatgtaggttttcagtgtttgttgaatgaatgaacacataaattcccgtgg

SEQ ID NO: 843451 - DNA, 564 bp, Homo sapiens
cctggctaattttttgtattttagtagagacagcatttcaccatgttagccaggatggtctcaatttcccaacctcgtgatctgcctgcctggrcctcccaaagtgctgggattacaggcgtgagccaccgtgcccggcccgaacttgtcctattcttgaccccacatgaacagaaataagaggtaacaggactgtctcaaataacctcaacctcatatgcacattaatgtgaatttttggatgccctgaaaggcagattttatgtgcagaaaagattatccaggggttttcttaagttttaaaaattaatattcaatttattaaagttataaataaaaggaaaaacctagtttgtccttacacttttaatttcagcttaaataacttattattttaattatagatctagcaaatttagcaatcacttctaagaaggctctgattaattttggtctcatttacgaacttaaactcctttaaacttttcatattgcattattcatcacatataatatatttgcttaacttcctaagtataattggctgacaaaccttcttaagtg

SEQ ID NO: 843452 - DNA, 474 bp, Homo sapiens
tcacccatctcgcagctcctctgcatctgggcatccccagtgaaactgtggcactagttggggaagaacagagccaacccaggggccagcaggagtccagccccaaaccaggacccggccactgttttggaaccaactccttcagtgttaccctacaacaccctcgccccatgaaggctccacctccagccctgggctcgccggagttacccagtcagacgatgccatttctgctccctcctgaaagaggaagtgtccaggatgagaacttcaggcaaagaggtgcctgtggatgggcagtgggagaagacttggagacagagcatctgtggctaaggasagggagatttggggtggtcatcacaaagaggagggcctgagggagggaaggcaccgttcctggggctgagaagtgaccccatccctgactctacacaaggaaaaatgagatgtggcctcgtggactaggctgga

SEQ ID NO: 843453 - DNA, 675 bp, Homo sapiens
aacagctttctcctgcagggcccgtgatgcagaggctgcacagggctggcctggaaaggggcccctgctccaactgtccccagctctgtggcctgggcaggttaccccacctctctgtgcctctgacccctcctctgtaagatgggaatggtccctgcaggcctagggcagcctcacatgagcccacccccacgcagcacttagaagagaggcctgggcctcagaattcggttctaccatgattttaaaataatgttaacacgcagagtgaaacatcaggaaggaattgagctgaaaggttaaaagctatcttttaagggtgaagagttttattctcttttgcattttcctaatgggttggggagtgggtgggcagaaatactgagagggtggggaatatacccctggaaaggccagagttgggcccgagctgggagagatcaccccagcccccctgccagcatcccctcctcttcctctcccctcagtcttcctgcctgggaaggcagcagaaattctcagggctgtggaggggtgggggaggcccagrgccgtcccgggagctgtgttcagtggacatgagccccgaggactccaggagggctccctgcatgggccggtttctctcttgtgccttcagaaatccgatggagcggatgtatcgagacacattct

SEQ ID NO: 843454 - DNA, 585 bp, Homo sapiens
aagctggggttgacccagccaggtaggtctctacccaggtgctcaaacgcagctggggcaattgaaacaagtcttgaaatcagttacagagattctttcttttttgtattttaccatttacctaactttacatgcaacttccttagttcagatacaatgtttcattaaaaaaaaaaaaatctgggctggacatggtggctcacgcctgtaatcccagctctttgggaggctaaggcaggcagatcacttgagatcaggaattcgagaccagcctggccaacatggtgaaaccctgtctctactaaaaaaaatacaaaaattagtcaagcatggtggcacatgcctataatcccagctactctagaggctgaggcagcagaatggcttcaacccaggaggcagagtttgcagtgagccgagatcacaccactgcactccagcctgggagacagagtgagactctgtctaaaaaaaaaaaaaaaaaagtctgctcttctttagagcaagggtccccaacccccgggcctcggatgggtacaggtacatggcctgttaggatccsagctgcacagcaggagatgagcc

SEQ ID NO: 843455 - DNA, 565 bp, Homo sapiens
gcgcacacctgtaatcccagctccttgggaggctgaggcaggagaatcagttgaacctgggaggcagaggttgcagtgagccaagatcatgccattgcactccagcctgggtgacrgagtgaaactctgtctcaaaaacaaaacaaagaaaagaaaagaaaaagaaaaacagcgagggagctcctagtctgagctgtgagggaaccacttgtcagtaacactgaggccgtgggattcttggagtagggctgtgctggctgccaagtcgataagggatctccctgctccactcaaggtaggagcctcttcctttgtcttctgtgcaaagatcctcttatgtgatgggacgctggacccacccaggatggcctgtgtggggacagagggaccggtgagggctgaggttgtttgaagagagagaaaactggtcaattacagctcctgcccagtacagctcagggtggctggagacaagcaagagtggggccatgtgccagccctctgggtagagaagagcatcacctggtgtccactcaggtcacaacctgcaaatggggaacctgac

SEQ ID NO: 843456 - DNA, 642 bp, Homo sapiens
ccttctgatatctgcctccctcatcagggtggaggctgtttgctgacttcttatccctcccccaccaaacaagaattgcaggactgtagggctcttgamgctcttgttcacttttgtgttttcagtgcagagttgaagctaggtgaatattttttaagtgaggggccaggcatggtggctcatgcctgtaatcccagcactttgggaggccaaggtgggaggatcgcctgaggtcaggagttcaagatcagcctggccaacatggtgaaaccccgtttctactaaaaatacaaaaattagctgggtgtagtggtgggtgcctgtaatcccagctactgtaatctcagctacctgggaggctgaggcaggagaatcacttgaacccaggaggcaggggttgcagtgagccaagatcacaccactgcactccagccctggcgacagagtgagactccatctcaaaaaaaaaaaaaaaaaaaattgttgaatgaaggagtgagtgagttcacagccgaggaagggaaacagacacacaacagacagatgcacaacaaactaacccgacagaggagggagtaattggctcttccttggcctggtggcaggggaactagaaagactcatcttgccctggatcctgac

SEQ ID NO: 843457 - DNA, 456 bp, Homo sapiens
gctgggcacagtggctcatgcctgtaatcccaacactttggaaggctgacgtgggaggatagctggatgccaggagttcaagaccagactgggyagcaaagcaagacacccatctcgacaacaaatttttaaaaattagccaggcaggctggacacggtgactcacgcctgtaatcccagcactttaggaggccgaggcaggcagatcactcgaggtcaggagttcgagatcagcctggccaacgtggcaaaaccccgtctctactaaaaatacaaaaattatttgggcatggtggcggacacctgtagtcccagctgctgaggcatgagaatctcttgaaccagggaggcggaggttgcagtgagccgagactgtgccactgcactccagcttgggcgacagagggcacagaagcagcacctcttctgggggtaccctcaatccctagcggtcca

SEQ ID NO: 843458 - DNA, 486 bp, Homo sapiens
tgccagaccaagctcctttgactgccattcctacttctgacactcctcttgtcsttttcaggacaactttatgcctattgtgccttggatcttgagaaatatgtggtaaaactggccagtggtgatggcaggcatagcagggaatcagattgaggggggctgccgggtgagagagaaaacaaaagagggaaacaggctacttgatgacggaatcaggctgcttctgcaatgacattacatgaaataatctgaaatacgatcttaactgtatctggtgggtcccgttaaccctgtaagttatggacagaacatttactcaaattgtagccaagtctaggctcatgggaacacgtgaccaattcaggtgaatgaaagggactttaaaacattaatttccagcttaggtcttcctaagactgcctgcatgttccttaacaccactccagcctgagtgtcacgtggatcctgaatgcggacttgtgtgca

SEQ ID NO: 843459 - DNA, 569 bp, Homo sapiens
taatttttatttcctatataatgatactaaaatccaggatttggcagctgtgcrcaaagatctctctgtagctggtctactttatgtgctttgctgaaggggacattcaatcaaatatgtttgagtccttcactgggaatgtctcgttaaacaaaaaggcacatggagaagactaagacagtattgaacagttgttaagtgtgtttactatcgccaagcagcccctgagattcccagaagagcctactggtcattttcctgaggcacaaatttaaatcctaaggctaatgtggagaagctactgtcttagccaagaggtaagccttgctgatcagccagcctctgcagctaaactcaactttgtagctctctctctgccagggtcgacgtattttaggaaaaaaaaaattgtgtgctctagcaatattagcaaatgtgggatcttaatttatgttgctagagaatgccaaggacctatgaaacagcacctctgctggaaaagttctctgtaaactttttgaactgacagtgggggacgatggggctgttttaggattttaagagccctc

SEQ ID NO: 843460 - DNA, 466 bp, Homo sapiens
ctttaaacagggtgttttaagaaggtgccattcataaggacaattgagcaaagtcctctgggagaggaggggccgagcccctgtggatttatctgggggaagagtacccaggtgaagtgttgagcagggcaaagaccctgagcctggagcctcacagttgaggcacagcaaggaggccagggggctgcagggcagggagtacagtgggagttggggtgagggtggagagtggccaggcccttgaggcccttgtgagggtttctgctcttacccagagtgaggtgggacatagggaagtttgagagttgggatggcataatctgactcaagtgcttctggatcagtctggccgatggggaggcatgggccagggaggttgtgttagtcctgtctcacactgctgtaaaggactgcttgagactgagtaacttaygaagaaaagaggtttaactgactcacatttcca

SEQ ID NO: 843461 - DNA, 619 bp, Homo sapiens
gacagcaggttcagaggcctgagaaaaataggaggaagccaagaaggaaacacacatgaaaggcctgcaagaggatcaggacacttgcaaaagataggctctgagctctccaggaaccagtgcaagaagggtaatacctccatcatttctttctttttgtttttttagttggagtctcgctgtgttgcccaggctggagtgcaatggtacaatctctgctcaccataacctccacctcccaggttcaacagattctcctgcctcagcctcctgagtagctgggattacaggtatgtgccaccacacccggctaatttttgtatttttattagagatggagtttcgccatgttgttcaggctggtgtgctccatcatttctaagagattaaacaagtctttgctcgagggaagttggttttctcaatgctgaggccaggcatctcttcataattaaaagtggggatgtgttttacccaaggcctcactattgatgggatttgggctctgacatgtgcacaggtgactkcctggcagccctaggacatggagagtttctcagatgcttggcacagacagtcactggccatctttgcaggaagcatcatttttgggaaactc

SEQ ID NO: 843462 - DNA, 594 bp, Homo sapiens
cttgttctgtttcaccctctgtctgcctacccatctgttccttttccctctttccttacctcccaaggtccccgacacacaggatcaccatagggcttgggaactgccctccaatgtgtgctgtgggcaattggtaaaaatgttttcaaaataaaaccatagaagtctttaatttacttggcctctgaggcgttgccgaactggcagattgtttggctacacactgaagtggttgttatttcattactttttatctataaaagtagggataataatagttcaggtccatgaggctgttgagagggtttagctggtggtgtacatgaagcccttaacacgacaattggctctcagcagatgctcagtgaatagaagcaaattgtttatgttaaaaattttcaacatacagaaaagtagactagaataattaaccccacatgtatgtatatgtgtgtgtgtgtgtgtgtgtgtgtrtagttacatcacctatatttgatatatttcaccattttgctatactatgttttcccatcccgccttttcttgtggttgctgaagtaattaacaaagcagtcacagcgttttgtgctatat

SEQ ID NO: 843463 - DNA, 497 bp, Homo sapiens
aactgagtgcgtccctcttgctcaaggacctcatggatcacggggtcacggcgtgatcccaattctggactctcatctgcctttcatactgctctgcccacacaagccagtaacsctgggggcatccctgaacctgtttcccacctaaaacacatcatccccttggaccccagtcctccaggagaggctctaatccttgactgtggtgagatcagatcactggttaagtacccggaggagcctcggtcagggagctccaggggttggggatgacgggtgtggtggtgtcccgccctgggctacagtccaccctgatgcaggaggtctgtggtcagaaccgggctgtgcagggcacaggagtccagagggagaaatgctcacctggggggtctctgagcagggctctctggaccctcagagaaaagcaaagcaaggaggccacctggagcccaacacctagcacccagaggcatgccagacctgcctggatcctggag

SEQ ID NO: 843464 - DNA, 627 bp, Homo sapiens
gggtttgtttgactctggccgccgggtaaaggatagatgtgagcrtcaagaacagaagtggggctgggcacggtggctcacgcctgtaatcccagcactttggaaggctgaggcaggtggatcatttgaggtcagtagttcgagaccagcctggccaacatggtgaaatgccatctctactaaaaatacaacaacaacaaaaaattagccaagtgtggtggcaggagcctgtaatcgcagctactccagaggctgaggcaggagaatcactcgaacccgggagactgaggttgcagtgagccaagattgtgccactgcactccagcctgggcaacagagggagacaccatctcaaaaaaaaaaaaaaatagaacagaagcaggaaaccaggcaggaggccagaggggattgggtgctgctgttccaccagggccatgcagccctgaccatctgggtgaccctgggcaagtcacctcattcattcttagtttatgcgtgcgtgccttcaggcaatgggtctttcaacaaacgttcattgaactcctacgatgtgctcagcactgtgctgggtgcagagggtacaaaaaaggcaagacagacacaacccgggacccaaggaggtccccg

SEQ ID NO: 843465 - DNA, 654 bp, Homo sapiens
ttttaggatgtctgtacatactggatcccggcctgtcgacttcccgcacgatgtgagtcatgccagccttgtatcccaggaaggctgtgaggtggaccggcttggaygggtcatccttagggaagctcttcaccttcccacgatgcctgctgctgcgcttccgaggcaggaagccgagggacccatgtctgggagcggagaactttctgtgagactaggtgggaaaaaaatcaccgtcagcacccaaaccaaagcagtgcccccttctctagttcccagctgcttaagttccaaatctcagcaatactgaagaatcctgaccagacacccagcaagccgaataaaaaggtcattatctcttccaggctcgcacgtgtcaagaatgcttttgtattcgacaaaatttaagctgaatcttatttcaaatcctctcaacctgtaagaaaacgacccattttttttatctaaccacacaaaaatacactaagtagtggcactaaaaactgcttaacaggcagctttatatgccaattagcaaggttttgaccgctaaagaaagggactcccgggacaaacgctgggtagcagctagcaatgttaagctataggctgcctccggtgcccggacactaattacactgatacacacaggcc

SEQ ID NO: 843466 - DNA, 519 bp, Homo sapiens
ccgggtgacacccagacccccagctcctgcacacccctgggcaaccctgctgtgcccccggggtgctgagcgtggctttgccagtgtgtcagaggcatcaattgctaaaacaattcggcagaaattaccatttaraacatctttgctctagagttgggcacttcactcacgtgtttgtggacgaggctgggcaggcaagtgagccggaatgcctcattcctctggggctgatgtcggacatcagtggccaggtaagtcccgactactgtgtgtgctgcttcctcctcaccccgttctcctgaggggatgcaggctgcgatcctgccgggaacagtcacagctgtacaggggtcaggtggaagtgccaaggaccccgaggtgttgggggccatgggtctctattgtactttattccttttggactagaagtgaatgtcttgactcatttacttgtaaaacggaggtaagagccattctaggtgttggggatacagcggtaaagtcaggaatgtggtccct

SEQ ID NO: 843467 - DNA, 609 bp, Homo sapiens
gcaaagacaaattatagactctgagaaaatatttgaaaatcacatatatgccaggtgcagtggctcatgcctgtaatcccagcattttgggaggctgaggtgggcagatcacgaggtcaggagatcaagaccatcttggctaacatggtgaaaccccgtctctactaaaaatacaaaatattagccgggcgtggtggcgggtgcctatagtctcagctactcgggaggctgaggcaggagaatgatgtgaacccgggaggcggagcttgcagtgagccgagatcatgccactgcactccagcctaggtgacagagcgagactctgtctcaaaaaaaaaaaaaaagaaaagaaaaaagaaaatcacatatataataaataacttgtatccagaacatataaagaactctatgaatattaagataccagtcctcctcaaattggccaaatatttgaatagccagttcactacagaagatacatgaatagctaataagcacatgaaaaaatgcttattattactcattagggaaatgcaaattaaaaccacagtgcratgctacttcacacccaccaaaatggctaaaataaaaactcagaaaataagtatg

SEQ ID NO: 843468 - DNA, 455 bp, Homo sapiens
gtgttttaagaaggtgccattcataaggacaattgagcaaagtcctctgggagaggaggggccgagcccctgtggatttatctgggggaagagtacccaggtgaagtgttgagcagggcaaagaccctaaggctggaacctcagggttgaggcacagcaaggaggccagggggctgcagggcagggagtacagtgggagttggggtgagggtggagagtggccaggcccttgaggcccttgtgagggtttctgctcttacccagagtgaggtgggacatagggaagtttgagagttgggatggcataatctgactcaagtgctyctggatcagtctggccgatggggaggcatgggccagggaggttgtgttagtcctgtctcacactgctgtaaaggactgcttgagactgagtaacttatgaagaaaagaggtttaattgactcacatttcca

SEQ ID NO: 843469 - DNA, 555 bp, Homo sapiens
cttcacgattattccacggagagtccattttatggctttggaaactgaggcccccaagatgctcagagatgttcgactccatcactccatatttactgagctctttttctggagatcagtgaggttgagrcacaacagagtgtttattttctttctttctttctttctttttttttgagacggagtttcgctcttgtcgcccaagctggagtgcaatggctcgatctctgctcattgcaacctccagctcctgggttcaagcaattctcctgcctcagcctcccaagtagctgggattacaagcgtccgccaccacgcccagctaagttttgtatttttagtacagatggggtttcaccacgttggccaggctggtctccaactctcgatctcaggtgatctgcccccctggtcctcccaaagtgctggaattacgggcatgagccatcgcggccggccgagtccttattttcaaggtcgtacagggaagggcatcaggatagtccaggctgccttagcctccagccaggataaaggggagtttggggatgaaca

SEQ ID NO: 843470 - DNA, 556 bp, Homo sapiens
gagactggataatttataaaggaaagaggtttgatggactcacagttccacacacctggggaggcctcacaatcatggtggaaggtgaaggaggagcaaagkcatgtcttacgtggcagcagacaagagagcatgtgcaggggaactcccctttataaaaccatcagatctcgtgagacttattaactttcatgaaaacagcatgggaaagatcgggctccatgattcaatgacttcccactgggtccctcccacaacacatgggaattatgggaactacaattcaagatgagatttggatggggacacagccaaaccatatcaaatacatagctaattttgtttcctctatacctcctattttctttagattattttgaagcaagtctagagattatatatatatatatatatatatatatatatatataatttcatctgtgagtatttctatatgcagtcctgaaagataaaaactctttcagaatacaaaagtgaaagtggaatacaatgccactgcgaaaaaaatgctcccttaatattatccagtagtcaa

SEQ ID NO: 843471 - DNA, 727 bp, Homo sapiens
tgtcatgtgggatcctgagtgggatcttggatcagaaaaaggatgttaggttaaaaacgaacaaaactgaataaaatatgggcttttgttaatgagaaygttagcaacattggtttaatactcgcatcaaatgtaccatgctgatgcaagatgctaaaaataggagaactaggggcagggtgtgtgggaactctctgtattatcatcttaatttcacttgtaagtctacaaatgttctttaaaaaagtctacttaaaattttttgaagataccaaataactactttataaaaaggtttgaaagcacctgtgaaagctacattgagtccaaccctttgacccagcaattccactcctaaatatatacccaaaagtaatgagatcttgtgtccaccaaaggcatataaaataaaattcagtcaggcatggtggctcatgcctgtaatcccagcactttgggaggctgaggcgagtggatcacctcaggtcgggagttcaagaccagcctggccaacatggtgaaaccccatctctactaaaaatacaaaaattagctcggcgtggtagagcatgcctgtatcccagctactcgggaggctaaggcaggagaattgcttgaacccaggaggcggaggttgcagtgggccaagatcgtgccactgcactccagcctgagtgacagagtgagactccacctcaaaaaaaaagaaaagaaaattcataacagc

SEQ ID NO: 843472 - DNA, 521 bp, Homo sapiens
ggaaaaattggatacacatatacagaaaaatgaaactagactttgatcgctcaccatatagaaaacatcaaatcagaatggattaaagacttaaatgcaggaattgaaaccacaaaactactagaagaaaacattgggggaacacttcgggaggacttcgctctgggcaaaggttttttggcactggcaacaaaagcaaaaatagataaatgggattacctcaagctaaaatgcttctacacgtaaaggaagcagtcaacagagtgaagagacaacctacagaatgggagaaaatatttgcaactattcatctgataaggaattaataaacagaatatataaaagctgggtgcagtggctcacacctgtaatctcagtgctttgggaggccacgggaggatggcytgaggccaggagtttgagaccagaatatataaggaatgcaaacaacccaacagcaaaacaataacaacaacaaagccaaatcatctaattttaaaaagggcaaataacctgaatag

SEQ ID NO: 843473 - DNA, 539 bp, Homo sapiens
cacctgggggtgagcagcattcccactggggcccccaccctggtcagcatggactcttccatttcttcatcctggactctcagtgaggaccacacaaggtggacaccaaagcacttggcratttgtcacatggggtacagacgtcggtcatcaggatcatttgacacatgttcaatatcgggttttaagacacagcccctacattctttggcgtgcctcccatcaagaggtggagtctatgcccctccccttgatcagggcaagatgctgattgctttgaccaatggtgtgcactggagtaatgctctgtgacttctagggccaggtcagaaaaggtcacacagctctgcctggttttcttagggtgttctgtcactgtcaggatgctcctgctaagaacccagctgctgtgctgtgagaagcccatttcatgaggagaggccatgtgggggtgctcaggacacagtcccagctgcatccagcccgaaggccaggcacggtggtgcaggagcctccagccccagccatgggcatcctct

SEQ ID NO: 843474 - DNA, 610 bp, Homo sapiens
ttatggggacaatttactgaaattaccatctgctccctgtcatttctcttccatggctccctgatatgaacagagkcaagttcaagttcgaagtcctttgcaaaccacagcctactaggagctaagccttgtagggctcagcactccccagtcccaggccttggctccaccggctgctccctgctctcatgccttcactcacggggcctgagatagcctggctttcgctccctggtggacttctgctcatctctgaacatggggtatgagccttccctcccccaaggagacttccttgacagctgccaccccagcaaggggctggaaggctgcttggtggaaggcccttctcagagtcttcatcatacacttctcgatttctcgcagtactcaccacactgactcataaggctccattggagagtctgtctccctgaaaaatatccagcacctgggctgggaaggagtcttactcactgtgttagtttcctagggctgccaaaaatgtcatggcctagaacaacagaaattcatctgcttgccgttctggaggccggatgtctaaaatcaaggtgtcagcaaggccacattctctgtgaaggctctaggg

SEQ ID NO: 843475 - DNA, 542 bp, Homo sapiens
aaaaaaagaataaagcaaaaaaaataagcagagcagctgggtgtggtggctcatgcctgtaatcccagcacttcgggaggccaaggcgggcagatcatctgtggtcaggrgttcgtgaccagcctagctaacatgatgaaaccccatctctactaaaaacacaaaaattagctgggtgtggtggcgcatgcctgtaatcctagcaactcgggaggctgagacagaagaatcacttgaacccaggagacaggggttacagtgagcccagatcgtgccactgcactccagcctgggcaacaaagcgagactccatctcagggggaaaaaaaataggtacagatctgtactggagtaaggaaattacactagatgttaagtctgaatccacacaaacaaatgaattaaagcagaaatgaagaataaggttagtataccaaactctacaaatagatacttcctatctttctttcagcttctttaaaagacatcaacacatgaacacagggaggggaacaacacacactggggcctattgaggggtt

SEQ ID NO: 843476 - DNA, 630 bp, Homo sapiens
gcagggcattaagtgaagtacaggatcccttcttacaagagtgtagcaacgtgtgactgcacaggtcacctagccatgaagttggccgagatacagggaattacactgactgcttttcaaatgttgaaaaagcctgccagggattaaccacacttggtcatgaggtattaataaccttgttatataccactggtttctaatcactagtgtttttgaatttatgttcatgaaggacactggtctacagctttctttccttgcaatgtctctgtctggttttgttattagggcaatgctggactcaaagaatgatttaggaagtattccctcttcttgaattttctggaaaagtctttataaattggtactattaattgtttgctggaattcactactgaagcatctagggacctggggttttctttgtggaaaggttatctatttgttttggagcaagccgtaatagctgtttatttgaatgaaactgttcatttcatcaaaatcgtcaaactgataayttacaggtatagtattccctcacttccttcataatatctatagaatcttcagtgatacatcattcttatttttgatattgataatctgttccacctagaagtttatccattt

SEQ ID NO: 843477 - DNA, 545 bp, Homo sapiens
ccatccatttagattcttgaagtcgaacccttttgattatcaaaagcaagattatataaagcaaatccctgaacatactctcttagcatcatgtagaaatgcttcaataagttaaaattttcatgggagaatgaactaaaactatattcaatagcatggatccacctcacaatgtcaaaagaaacaagccagccacaaaagagttacatggtatacacaaagttcaaaaacacgcgtaactcatcatggtgttacaaggaatcatggggataaaggcttctggaaggctgaaaatattatttcttgacctgggtgtgggctacacaagtgtgttcacttagtttaagtgataaaattatatgcttatgatttgtatattgtaggtgtgttgtaatttaatagaacacaagattttgtgggattgttttagggttcactatgacccattttttytctttttaaaactatagttgaagacaatatctattatttaatatattttacatagggattcaagcaatatgtttacttgaatttagttccag

SEQ ID NO: 843478 - DNA, 614 bp, Homo sapiens
catggtgagtgatgggctcaagttgaaagacaagtgagtgtctaggtccttagtgatgttcaagctctcaggtgatgttcaagatgtgcttggtcaggaggcagacccctgccttttctgctcatggccacagatactcaactgaggtcagaaactgctcctgccatcttcccgcagggcagtctttagtcctgtggcgggggcagaatgcccctgaccttgtaggctctactttgtatgtgtacatgtctgctgagccaaagctgttgaaagtgaaaggtctgtcactttgaacccagtctacttgtccctggtctgtcagccagaaggttctactggtgatggcaggagaacaaggagcctgcaagggagcccatctaccttctggtaccactgacttccctctcccggccctgcctgctcttttggtttgtgctgccaaaatcagggtttttcaacccttgttactcatttaaatcaccttgagaggttttgaacaatacmtatgctaaggccccgggtaccagtatttttcagaagctccccaagtggtgctaatgtgctgttagggttgagactccacaggtcataaccctgagctgtcgcactgtagg

SEQ ID NO: 843479 - DNA, 300 bp, Homo sapiens
ttcttaaacacaatcaagaatcaatagttttaatagctgataataagtttaattatcacagataaaactaacaaactttcttagagtccttggtatgtgtctctaggctatatttmtgtatcctgattggccttgtagaactttcaatgggaataggtgacttggtggggtgagtatgtgtgccctgaatgaatggactgtagtccagttacagtcaagaagcctaacttgtgagtgcagaggtggggaagataatcttttaatgggggcagactccttatcaaacacaaccatgacagt

SEQ ID NO: 843480 - DNA, 552 bp, Homo sapiens
ttctacaccctgcagagggtagaaatgattgaccttsaaatacccacgcccaaataccccaccttacaaattactgtattgtagtcaaatttgtagtgatgatttctacatatctcatttctaatttagagcacttggagaggtaactgaaataatcggtcaacttcttttaaggagaattatcaaataatgaaatgtttgttgaactgatatggtttggctgtgtccccacctaaatctcatcttgaattataagccccacaatccccacatgttgtgggggggtaattcaataatgggggctgtttcccatatgctgttctcaagatagtgagtgagttctcacaagctctgatggttttatgcactgtttttgtttgcgggaggtttgacaatttataccaggagtagggaaaggagttgaaggttaattgctcacccttctaagcttttaaagctaaaaacacttatttaggaactcagatgaggaggaatggggagctcttattatagaagtcctagcctgcactgactcatccattttaagtactc

SEQ ID NO: 843481 - DNA, 384 bp, Homo sapiens
aacaaatgggcaaatggataaataaattgtatccattcatgcaaaggaaacttattygggaaacaatatgaatgactcccaagggcattatgccaaatgaaacgctcaagtctcaaaaggttgtaggcagcatgattctatttataggacattctagaaaaggcaaaactttaggaccaagttcagtgatttccagtggctaggaggagggggaggattttattacaaagggacaacatgaaggaattttggggggtgtggaagtgctgtgtaccttcatttttaggttgggtacacttgtctacacttatattaaaactcatggaactgtacaccaaagaaagccaagtggactgcaggaagattaagaataaataaataaag

SEQ ID NO: 843482 - DNA, 562 bp, Homo sapiens
cccaagaaccccagatactgaaaaaagagaagttgctttcccaaaacagagttttttcctatgmtcagctcatgatcatctctctccctttatctttcttaaccctaaaaaaccagttttactattcatccatcctaacaaggtaaattagccaagaccttaccacacctcctttacactttcatcttcccccttttagctgcctttagcagccttatggatggggtttcacatctccctatattctgtacaggctgtgtgtgtgcatgcatgtgtgtccctgtgtgtgtgtatctgtgtctgtctctgtgtccctctgtgtgtatatctgtgtgtttctgtgtccctgtgtgtatgtatctatgtctgtctctgtgtgtgtgtgtgtatctctgtctgtgtgtgtgtgtatttgtgtgtgtgggggggggtgggtatgtgtggtgtgtttctctgtattccttttcatttctccctaggtggctgtgcccagatcgcctctctactccttcagataaaaagcaaagggctttggggaggctgaggcaggaggttcacttga

SEQ ID NO: 843483 - DNA, 596 bp, Homo sapiens
atccaaaagtagatgtttatgcaccttctatttacgacattggcaccaacmagccaattacagcagtggagataaggccatgaaatacagacataacttctggggtctactgctagaaattaaaagatagttcctaaagaatggggaactgctttaagttgagaaaccaatgcaaaagtatattttaaacgatttctgaaaaaatacactccatgcccatattacagaaattctcggtattatcctaataaaaaatctggaatagtctgtgagacagattcaactgcagtgtagtatataataaaaatagagtacctggttttaaataccatatatactgtgataataattagattcctatctccagaccagatattccctctgagtaaacagactcacagtgaacttccaacttcatatcctatgtgagtatctcaaagtcctaacatgtccagaaaatccttatgcctaccctactctttctcatactatgtttgttgctcaaacaaaaacccagaaatctatcctggatttctcaatttctgtcagcccccatactgcatccaagcttgttaattctggttccaaaatatatt

SEQ ID NO: 843484 - DNA, 445 bp, Homo sapiens
tgcatcaattattaataactttccaaagcagaaattttggattcagtggtaaattctaccaagcatttatgagaaaaattacttcaattctgtacactctctttcagaagagagaagtagagtgaatatttcctaactcatcctatgaggccagcatcaccctaataccaaagacattacaagaaaagaaaactacagaccaatatctccatgaagaaagattcaaaaatcccaaacaaatcattagcaaatcaagtccaataatgaataaaaaccacaaccaactgggttttattccaggtatgccaggctggttcaacatytgaaaatgaatgaatgtaatctatccatcacatatggctgaagaagaaaaaccatatgatactatcaacagatacagatagcaagctatattgaaaactgccccatcctgggcaacgtggag

SEQ ID NO: 843485 - DNA, 620 bp, Homo sapiens
ggagagatttctcttgttcttatgttttaataattaaagcagttgagcacagttacatgctaagaggaacawaagagatgtggaagcaatagaagtggtggactgctttgagagggtggaaggtaatggcttggtagtgactaatgaattggtgtgtacttggctgttttgtgtaggagtggcaatacttcagagaagcatccgactctatgccccgttttactcctcggatatcctcattgcttcccccctgggcttgaggaccatcattggtggagaaggagagaagaagagagattttgactttctgtcttctatcgagcttctcatcattgatcaagctgacatttacctgatgcagaactgggagcatgtcctggtaatgctggccattcacattcagtgggacagtattcatatttagagggataagacacccagtggtttaagtcctaaagaattatttaagtccagattagaactcttgtttggaagcaaggacacacactccacattttctaatttgaaaaagtcttttgtccccttttctacccagagattgtccataattaaactgtctacagattaaaattcctgtcagtcattttcaaatctccaga

SEQ ID NO: 843486 - DNA, 620 bp, Homo sapiens
ggagagatttctcttgttcttatgttttaataattaaagcagttgagcacagttacatgctaagaggaacaaaagagatgtggaagcaatagaagtggtggactgctttgagagggtggaaggtaatggcttggtagtgactaatgaattggtgtgtacttggctgttttgtgtaggagtggcaatacttcagagaagcatccgactctatgccccgttttactcctcggatatcctcattgcttcccccctgggcttgaggaccatcattggtggagaaggagagaagaagagagattttgactttctgtcttctatcgagcttctcatcattgatcaagctgacatttacctgatgcagaactgggagcatgtcctggtaatgctggccattcacattcagtgggacagtattcatatttagagggataagacacccagtggtttaagtcctaaagaattatttaagtccagattagaactcttgtttggaagcaaggacacacactccacattttytaatttgaaaaagtcttttgtccccttttctacccagagattgtccataattaaactgtctacagattaaaattcctgtcagtcattttcaaatctccaga

SEQ ID NO: 843487 - DNA, 620 bp, Homo sapiens
ggagagatttctcttgttcttatgttttaataattaaagcagttgagcacagttacatgctaagaggaacaaaagagatgtggaagcaatagaagtggtggactgctttgagagggtggaaggtaatggcttggtagtgactaatgaattggtgtgtacttggctgttttgtgtaggagtggcaatacttcagagaagcatccgactctatgccccgttttactcctcggatatcctcattgcttcccccctgggcttgaggaccatcattggtggagaaggagagaagaagagagattttgactttctgtcttctatcgagcttctcatcattgatcaagctgacatttacctgatgcagaactgggagcatgtcctggtaatgctggccattcacattcagtgggacagtattcatatttagagggataagacacccagtggtttaagtcctaaagaattatttaagtccagattagaactcttgtttggaagcaaggacacacactccacattttctaatttgaaaaagtcttttgtccccttttytacccagagattgtccataattaaactgtctacagattaaaattcctgtcagtcattttcaaatctccaga

SEQ ID NO: 843488 - DNA, 632 bp, Homo sapiens
atttaggcaatatacacatgtcttctacagctatcttacagcattcattcatccatcagtcatcaaatatttactgaaagcttattatatgccaagcacacaggccagtcttcttgacacacacacagacatatctgtcctcttttcttctgcaaggctgttgtgcccactcttctcacttcctcttgtgtcattccaattctattaaatcacttgactatagcctcatctggtccaggaagctttccctggcttctccaggccacctctgctgtctatgggccttgtgaggttaaaatcttctaagattgtgtaacccttagagggcccattagtctggcctggaaaggaacaatgttggcaaaaaccagggtatgctgagatgaccttggccagcaaaccatcttcctactgaagttgtgagcatgttgacagcagggatgtgtccactatgttccatggtaatgcttggcattgttccctacccagagtgggtactcyatcagggcttcttaactagtggatctgttatgctcaataggagatgctgttcagagaaatgatcctagagcccagttgcaaaagaaaaggaactgtatactaaagcaaaaaaccttcccacaactccccac

SEQ ID NO: 843489 - DNA, 563 bp, Homo sapiens
gatgttcaatttcactaagcgggaatgtaacgtgtggcaattttttgtttgtgtttacttttattttagtttcagggatacatgtgcaggtttgttatataggtgaattacatgtcccggggtttggtatacagattatttcgtcacctagttaataagcgtagtacccaataggtagtttttttatcctcatcctcctcccaccctccgtcctcaaggaggccccagtgtctattgttcccttctttgtgtccatgtgtactcaatgtttagctcccacttatgagtgggaacacgtagtatttggttttctgttcctgtgttttagttcacttaggataatgccctccagctacatccatgttgctgcaaaagacatgatcttactcttttttatggctgcatagtattccatggtatatatgtaccacgttttctttatccagtccaccattgatgggcatttaatttgattccatgtctttgctattgtgaataagtactgcaatgaacataygggtacatgtgtccctatggtagaacagtttatattcttttgggta

SEQ ID NO: 843490 - DNA, 641 bp, Homo sapiens
ccatataaagttcagaatcagcttgtcaagttccttaaaaamaaaaagcctttttggaattttaataggaattacattgaatctctagatctatgtggagacgatatctttaaaatactgagatttcttattcttgaacatggtgtatctttgcatttgtttaatgcctttcaataaggttttgaaaattcctctataatgatcttgcatttttttagatttatgtttagataccttatattttttgttgctatactaaatgaaattcgttaagggaaatgcaattaacttttctaaattagtgttatatgtagctatgttgctaaactatttaactatttccatagatattttgggttttctcagtagacagttatatcatcttcaaataataagttttttaatcttttctagttatactttttatttctttggcagcttcctggggaaaataaacaaaatagaactaaaaggatactctataatcctcttccaactgcttgactaagcatgatcttataaatggacaataacaagtgttggcgaggatgtggaggaattggaactcccatctattgctgggaatgtaaaatggtacagcaactttagaaaacaattacaaagttcctaaaaaaaaatag

SEQ ID NO: 843491 - DNA, 492 bp, Homo sapiens
accattgaatgtaaatggcctaaatgttccaattaaaagacacagaactccagaatggataagaactcaccaaycaattatctgctgtcttcaggagactcccctaacacataaggactcacatacacttaaggtaaaggggttgaaaaaagcatttcatgcaaatggacatcaaaagcaagcaggggtagctattcttatatcagacaaagcaaactttaaagcaacagcatttaaaaaagacaaagagaaacattatataatggtaaaaggccttgtccaacaggaaaatatcacaatcctaaacatatatgcacctaaaactggaactcccaaattaattaaacaattgctaatagacataagaaatgaggtagacagcaacacaataatagtgggagacttcattactccactgacagcactaggtaggtcatcaagatagaaagtcaacaaagaaacaatggatttaaactataccttgaaacaaag

SEQ ID NO: 843492 - DNA, 617 bp, Homo sapiens
gacagctccagtgttaggtgcatatacatttaggattgtgatattttgctgttggatgaggtcttttatcattatgtaatgtccctctttgtttttttttaattgctgttgctttaaagtttgtttcacctgatataagaatagctactcctcctcaattttggtgtccatttgcatgcaatgtctttttccacccctttaccttaagtttgtgtgagtctttatgtgttagctgagtctcttgaaggaagcagatagttggttcatgaattcttattcattctgcaattctgtatgttttaagtgaagcatttaggacatttacattcaatgttagtattgagatgtgaggtactatttcattcatcctgctatttgttgcctgtataccttgtttttttgtgtgtgtggttttttaatttgtatttttgttttataagtcctgtgagatttatgcttgaaagaggttccattttaatgtgtttccaagatttgtttcaagatttagagctccttttagcaggtcttttagtgcttgcttggtagtggcaaattctytctgtatttgtttgtctgataaagactgtatctttccttcatttataaaacatagtttc

SEQ ID NO: 843493 - DNA, 544 bp, Homo sapiens
ctcatgcctgcattgttcatcccacagagcctgcttgcctatgatgtgccatttcagagctaagaactgcacactacaatacaaaatgcagtcccctgccctccgcctacccagctcctagccccacagaagacaaacaggtcggtcataccatacatgaggagtatggggacgggggtggaccatccactctgcaggcccaggggcaaaacacctggagggaggggaaggtgaaattagagccaagttttgaaggatgagttcagcaggcaaagacgggaagaatggcatttgcagtagacaagatttgcatgggagaaatgcaagaagttcaggagtgtggcaagagatgagactcaacgggtaagcaggggtcagaccacaagtctggattttattgtgataacaacagagaaccactcaagaattttaatctcagacagtccgacccctccccgttgccaataagaacatgaagatgtggaagagggycatggaaaccactctatttggctcaagagctaatgaaaaatgctaaaccata

SEQ ID NO: 843494 - DNA, 622 bp, Homo sapiens
tgtggcaagaaaaaataacaaaaacaaataagtagccttttcacatacagaaaaggtgtttagtgatccaaattcagagagaaaaacagtcctttccggcaratgaacaaatagtttcctctacgagtgacacattctgggatatttgaactgccaaacataactcataatgacaaccaccaaggaagcaaaacctaatggaaaagccccaggatggcaaccaggagccccagttctggtcccaggacggcctctggctgtttgctccatcaacgtgctgaccaagcctggcccactttcttcatcacaggaaggaatatctattgccacctgtaccactcagaaatgttttgaggacaaaagaatgagaggtgaaagtgctttggaatgtgcatcttctataaatacaagtcatcattattattagctcaaagatgaccaggaaaataggattacagaatatcacaggtgagagggagcttagagatggaataatccagttcttaatctgggtccacgcctatgaagctgtcccccttcgtgggaaggggtcacagttgctatcagatttgcaaaaggtgaaggtcctctaagtccttcattttacaaatatgaaaactga

SEQ ID NO: 843495 - DNA, 553 bp, Homo sapiens
taaaatgcttgtgcctacaagaatacatgctgtacgattccctttggatccagcacaagaaaaggcgtaactaatctacacccttcgaagccgggacagggaagagaaagaggaggcaggcaggaaggggtgccaggagggttttggagctgtgctgtggctcttaaactggctatgggtgtgctgggcttgtgaaaattcactgatatgtacacttgagatctgtgcactttaggtatgcatattattcaataacactttttaaaatctcatacagtaacaaaaaatacagacactacaggaaagagtagatatggaaaccaacctgcaaaaacagacaggaaacaaatatttcaagggatcaatttctgctaggtgccctcctagaagatacacatgcacactcccccattccccttggcaagccaggatctaagtggtaatggccagggcagggccagttcarggcggttcctcctttcaacatggcccaagcgggtgtatgtagggatgggaaaatacgtaattggcaaaagaacatactgcaagggga

SEQ ID NO: 843496 - DNA, 664 bp, Homo sapiens
atgtaaatacaatataaaaataagtaaattaagccaggcacagtggctcatgcctataatcccagaactttgggaggccaaggcgggcagatctcttgaggtcaggaattcgagatcagcctggtcaacatggtgaaatcccgtctctactaaaaatacacaaaaaaattagccaggtgtggtggcaggtgcctgtaatcccagctactggggaggctaaggtgctagaatcacttgaaccctggaggcggaggttgcagtgagccgagatcatgccatgtcactccagcctaggcaacagagaaagactccatctcaaaaagaaaaaaataataataagtaaattgtgacatcaacaacataacctgtggggaaagaagttaaaatatagacattttgtatgcaaagttaagttgttatcattgtaaaatagacgattataactataagatgttttatgtaaccatatggtaatcacaaagaaaagaaaacccatagtagacacacaaaagataaagacaaaggaatcaaataatacaactacaaaaaattatctaatcacaaagacagcaagagagmaagacaccaactataaaacagtcagaaaacaatcaataaaaaggcagtagtaagtattgtctatcaataatgactttaatgtaaa

SEQ ID NO: 843497 - DNA, 633 bp, Homo sapiens
cctaggaaaaaggggagagtactacatcaagggagcaccctgtgggacaaaatattctgaacaacagccattgagccccagatcttccctctgacatagcctacccaaaacataaaraaccaaaagaacaattatggtaatatgacaaaacaacgttctttaacaccttcaaaaaatcatactacctcaccagcaatggatccaaaccaagaagaaattactgatatgtcagaaaaggaattcagaaggtccattattaagttaataaaggaggcaccagagaaaagtaaagtctaatttaatgaaattaaaaaaatgatacaagatatgaggggagaaattttcagtaaaatagataacataaatagaaaaccatcacagcttctggaaaccaaggacacagctatagaaatgcaaaaggcactggaaagtctctgcagtagaattgaacaagaagaagacataacttcagtgcttgaagacaaggtttttgaaataatccaacaaagacaaaaaaaaaaatttaaactgaacaaagccaccaagaagttagagattatgttaaatgaccaaacctaagaataattggcattcctgaggaagaagagaaatctacaagtttggaaaacacat

SEQ ID NO: 843498 - DNA, 596 bp, Homo sapiens
acttattaatgctatagaatatatttttgtcaatctgctcatcttatgtgcattatgcaatttagtatacctataagtaagtataaattacctgatcaagtaagaaacacaacaagcattttacttaggaatgtttggctttaaatcttgacccttaaatactactatatagtgatatagatatctaatgcattctatgatatatgaagtatatacatcagactagacattttaatatgaagctgagataacacttagaaaaccttgagcatggtacccgacacatagtaagcattctttaaatgttaatatctcactactaaatctcataagcatttaaaaactgattttattttaaaagaaaaaatgaaatgaaatagaaactgtacctaacaatacatatgaatgaccgttaataattagtcctcttttaaaaaatgtgtatagtctaatgagggcaaaaaccataaatgaataaaatatttcataatacaaaatttaaattaatagttcaagataacaagatgtgataaagcagtacacatagcacattatacagacaacaatctctytacaaaacagtgttttaatgtaga

SEQ ID NO: 843499 - DNA, 327 bp, Homo sapiens
ctctggtgagtataaaggtctagccattttggcctaactcggatgcactggaagcctgtctcactctggagattcctgtgaggttgacagagcaatcacagggcctgtgtcacagtgcatcttctccttctggccaaccctgcttccataggcatgcatctctagagaactcattaattaatatcctgccttctaactctgtctcagaatctgcttccctgagaacccaacctaagacatggagtgaaggaaaaaagtagagrttacaagtatagactactcttccaaggactcaaggaatcaaagtaagatgggtcagaaaccaag

SEQ ID NO: 843500 - DNA, 278 bp, Homo sapiens
atcttgacctctcaggctcaagcgatcctcctgattcagcaccaccccacccctccccccacccagtagcgggattacaggtctgtgcccaccacacctggctaatttttgtatttttagtagagagggcttttgccatgttggccaggctggtcttgaactcctggactcaagcgatccgccaacctcagcctcccaaagtgctgggattataggcgtgagccaccatgyctggctacatcattacatttttaattcatatatttaaaatgtttgca

SEQ ID NO: 843501 - DNA, 574 bp, Homo sapiens
atcagcctgaccaatgtggtgaaatgctgtctctactaaaaatacaaaaattagctgggcgtggtggcatgsgcctatagtcccagctacttgggaggttgaggcaagagaattgcttgaacctgaaaggcagaggttgcagtgagccaacattgtgccactgcactccagcctgagtgacagagtgatactccatctcaaaaaaaaaaaaagaaagaaataagccaggcacagaaagacaaatatcccatgttctcactcacgtggtagctaaaaaagtcgatctcctagaggtaaagagtagaattatagatatcagaggctgggaagggtaagggggataaatagaggttggttaatggatacaaacatacagttagataggagtaagttctagtgttcaatagcgcaataaagtgactacagttaatcatttactttatatttcaaaatatcaagaagaaaagacttgcaagattccaaacacaaagagaagataaatgtttgaggtgatggatataccaattaccctgatttgatcattatgtgttgtatgcgtgtatcaaagtatcac

SEQ ID NO: 843502 - DNA, 574 bp, Homo sapiens
atcagcctgaccaatgtggtgaaatgctgtctctactaaaaatacaaaaattagctgggcgtggtggcatgggcctatagtcccagctacttgggaggttgaggcaagagaattgcttgaacctgraaggcagaggttgcagtgagccaacattgtgccactgcactccagcctgagtgacagagtgatactccatctcaaaaaaaaaaaaagaaagaaataagccaggcacagaaagacaaatatcccatgttctcactcacgtggtagctaaaaaagtcgatctcctagaggtaaagagtagaattatagatatcagaggctgggaagggtaagggggataaatagaggttggttaatggatacaaacatacagttagataggagtaagttctagtgttcaatagcgcaataaagtgactacagttaatcatttactttatatttcaaaatatcaagaagaaaagacttgcaagattccaaacacaaagagaagataaatgtttgaggtgatggatataccaattaccctgatttgatcattatgtgttgtatgcgtgtatcaaagtatcac

SEQ ID NO: 843503 - DNA, 550 bp, Homo sapiens
tggacagcctgaatccagaatgcagagmggtaagcgagggcattgtaatagttataaaaaataatagcaatggcctacaaatagaacattagtggtggaaatgttgaggagaagatggatagaaaagatacttcggaagtagaagcaacagaattaaatggctaggtggcaaggcagaaatgaataaaagatgattctgaatattttagcctggaactttaagtcctgttttcaacattttgagataaaaaatacacagacagtgaaaaatataggcttggagattaggaatagagatttggaaaatatttataatgtaatccttggctttaaatttgattttccagggtgaatgggtagaggattagatataagacaagcaagatcagaacattaaggggcgctgacatttagagcgtgggtgaataaaaagtcgctgaaacagtgaagaaacagacaaaggaagaaatctagggaatgctgtgctgtagtaaaggatcttggtagattcctttctctttgttcatgaatgatgacatggcagaagtaa

SEQ ID NO: 843504 - DNA, 559 bp, Homo sapiens
ctgttgtaggagggacccaatgagaggtaattgatcatgggggtggttaccctcatgctgtgattgagctctcacaagatctgacggttttataaggcactttttcctaatttgcttggcactttttcttgctactgccatgtaaagaaggacatgtttgcttccccttccaccatgattgtaagtttcctaaggccttcccagccatcctgaactgtgagtcaattaaaactctttcccttataaattactcagtttcagatatgtctttattagcagcatgaggacaaactaatacagtaaattggcaccaggtagtggggtgctgctctaaagatacctgaaaatgtggaagtgactttggaactgggcaacaggcagagattggaacagtttggagggctcataagaaaacaggaaaaggtgggaaatttggaacttcctagagacttgttgaatggatttgaccaaaatgctrataatgatctggacaatgaagtctagactgaggatgtctcagatagagattaggaagttgtcgggatctggaataaaggtg

SEQ ID NO: 843505 - DNA, 644 bp, Homo sapiens
attcctaaataaataaaaaaccacgtttactgtctsttatccgggagcatggaagacaaagtgagcaattttagcagaattctacagatccaagtagatctgtgcaacaaacctgcatttggggggctcctggttaatggaaccatctgtatttaattgcttactgtagcatctctctgaaacagtggtttccaatctttctcaggtcacaggctctcctcctcctcttttgagaatctgattaaacttttgtatcttcattcctgaaaaatacacatatacgcacaccccctgagaccccagtcatgggcccctgggtcaataatcactcatctgacaccatgccaaaaatttgttgtgtttatatgttctttggtgtgcactctagaaatgtaccagaattgtgctgtttatattaaaacatgtgcacatactacctacatatgtgaatgacattttctctactgaatgattacatgaaataatgtgtatgaagatatatcctaaaaagtcaaatgtgagaatgtcaacattgttcttcttatttgcactggccatttaaacattcaacactaaagctgctgggtgacgttgcagctggtaagttatggaaactgctcttaaatatgatctttccattctca

SEQ ID NO: 843506 - DNA, 441 bp, Homo sapiens
ggggagagaaaaacgagaagggccctgttagaagttgtgtgtgcatgtgtgtgtgtgtgtgtagatcaggagggggtttctagggacctggggaaaggagagctaagggcaggtgctaaggggcccagccctgttaattccaaggtccggaattaattccaggatactgcacttcctacagtaccactttatggccatatccaagtccagccctgagcagcctatggtcacagaaaatcgtgagaataatcagagaaaaatgacacgttacatacatgagaacaattatgagaatgaccagtccatgtgttcataatttgtcatcagaaactatggtggtcagaagacaatgaaatggcatttttttgagtgctgtaagaaaacaacctaactcagaattrcacatccagtaaaaatattttcagggaagaaaaatgaaaa

SEQ ID NO: 843507 - DNA, 645 bp, Homo sapiens
gttaacaagtactgtgcattgtgccaacactgcacactgctcaatggatataagaagaraagaacgaattagttacttggtggcatgcagctctgcatctctcttcagttgaatcagagggatcctgtggtaccagggtctgtgatgtgtccgagggcagtgtgggaatgttgtcatccagcactgctacatgggcgactcctcctccctgctggcccgaatgcttacctcccagccggctccaatgcctcccactcacagttacttcggcttctgatggtgcactggaaatctgtactgtaaagatggagtgttgaactaaatttaggctgttgaatgataaagcaggaagtagctcaagacagaaatacaaaatcaaatcaaactcactcttcaagagaagaagctgggacccaggaggatgtctcagaacaggacaaatatttgcatgtgatcggcagaggtgaggcatggtcatccaggtgagcgggcaggggctcccctccacaaggagtctcctttacttggttgaagagagtttgttagtcttacggagttgcttttctagtttgtaatgcaaaaggatgatcattgctaaacaaggatgtgatagaatggagtggagttaaagagctctaaggcttc

SEQ ID NO: 843508 - DNA, 612 bp, Homo sapiens
accaacatactataaggatcaaatgcaattatttatttaaattcyttctgtaaacagaaaagcacaatgccaggtaagttctcatgatgattgttaatatcatcatcattatcattcgaccacttatgaacggtgtggccttatgtaggtaactgttaactggtaaaatgatgatggtaatactgtctcgttgtgaaggtgagcccagcacagtagttgacactgaataaatgctcaatacagagctgccactgctattgaccttggtctgttacatggttcttgttcatatttccctccgggacaagttgttactccctggtaggtaggagagctcctaactaggcttcatcatcccccctctctcggtcacaccaaaactttggccaaagcaaccaattagaatgcccattaaagatgtcttgatcacattgggttccagcagtaagtcaaagaaattccaaatatcagtgtcccttgttctctcatataactttaagccttttagtttaaatgttgcagctctgattttccagtaatgtgaataaagtgaacaatgtgtataaatcggtgatcaatttttctaaacatccagtgactcactcatagcca

SEQ ID NO: 843509 - DNA, 592 bp, Homo sapiens
ttccatttcctgtcctacagtctcttccccctacttcttgagaaaaggcagaccatgatttactggccctcttggccctcaaaaaacatctgatgcggggaagtggagctcaaacatggccaaggacagcatctctggctctattatctgggtgaccacaaaagccacttaggggcagatgacactccaaccttcaataagaagtcctggggccacctcctccccagccaccagcctggccctgagacaacttatgcccacagttaacgactccatttgcacttagtgcctttcaggcctgggtgcacaccccagagaatggtaacctaggcatcaccgtatacgccatacacatagccagaaaggacacagataggcttcccattttgctcatagcatcacattttttcattgatatttatgttttaactcttctatatttttagatcctctgcatcaaataagtaactgccgttaatgaactartctcactttctatactgtcttgattattgatgtgatggttaatcccgaatgtcaacttgattggaatgaaggatacaaaatattaatcttgggtgtgtctgggtgg

SEQ ID NO: 843510 - DNA, 540 bp, Homo sapiens
ctcgcctgtaatcccagaaactcatgaggctgaggcaggagaatcgcttgaacccgggaggtggaggttgcactgagccaagatcgtgccactgcactccagcctgggcgacagagcaagactctgtctccaaaaaaaaaaaaaaacaacgacaacaaaaaaaagagtatttactaatttttgtaatgtacaggtgatccctttattgtaacgcactgacgtttacttcataattttttgaaaatttttttaataaaactactttatgtctatcactacaacaaatgtattggtcaaaaaaaattccaaaagattgtataacaattttcagtcctccttttgctttcatgtgcctccatttgaatgataaattatattgtcactcaagttgtaacactgtgaggaatgtacacagaagcaaattagtaaaataaaacaaattgccaattcatatccctgaacatgtaatacccactgactcaggtctatgcctttaacaatgattgacmtatcttatctggatcctcatttattcagcaa

SEQ ID NO: 843511 - DNA, 657 bp, Homo sapiens
agacaaaaaacaaacggcatccaaattgaaaagaagtaaaactatcactaytcattcacaattctatatataggacacgatcctatatatagaaaatcctgaaaaatccacaggaatgctactaaagctaataaattcagcaaagttgcaggataacacacaaaaatcagagtgtttctatatactagcaatgcatgctaaccaaaagtgataggttcatgcaaggcctatcaaaattccaacagctagtggggcacggtgattcatgcctgaaatcccagcactttgggaggccgaggctggcggatcacctgaggtcaggagttcgagaacagcctgaccaacatggtaaaaccctgtctctactaaaaatacaaaaattagctgggcttggtggtgggcacctgtaatctcagctactcaggaggctgaggcacaaaaattgcttgaactcaggagatggaggttgcagtgagccgagatcatgccaccacactccagcctgggcaacagagtgagactctgtttcaaagaaaaaaaaaatccaacagccttttttgcagaaacggaaaagcttgtactcaaattcatatggacttgcaaaaggtcccagaaagtcaaaacaatcttgaaaaagaaacagttggatatgtcacc

SEQ ID NO: 843512 - DNA, 516 bp, Homo sapiens
tgtgctactacctcaataactgaccatctgtgcatcaccgtatttctcaaaccccaattcattgtaagaattagctaaagaactttttttttttttttttttttttgagatgtagtctcgctctgtcatccaggctagagtacagtggtgcgatctcggctcactgcaagctccgcctcccgggttaacgccattttcccacctcagcctcccaagtagctgggactacaggcacctgccaccacgcccggctaatttttgtatttttagtagagacagggtttcaccgtgttagccaggatggtctcgatctcctgaccttgtgatctgcctgcctcggcctcccaaagtgctgggattacaggcatgagccatcgcgcccagcygagctaaagaactttttaatggtaaagattctgggctgcagcttcaggatggggtagggtctgcacacgtccgatggttcagatgtttgggaattattgctgggcagcaggaatgtgttagagtcatatc

SEQ ID NO: 843513 - DNA, 550 bp, Homo sapiens
ctgggtgaagccagctgggctcctgagtctggtggggacgtggagaacctttacstctagctcagggatcgtaaatacaacaatcagcactctgtgtctagctcaaggtttgtaaacacaccaatcagcaccctgtgtctagctcagggtttgtgaatgcaccaatccacactctgtatctactctgtactactctggtggggccttggagaacctttatgtctagctcagggattgtaaatacaccaatcggcactctgtatctagctcaaggtttgtaaacacaccaatcagcaccctgtgtctagctcagggtttgtgaatgcaccaatccacactctgcatctactctgtactactctggtggggccttggagaacctttgtgtggacactgtatctagctaatctggtggggacgtggagaacctttgtgtctagctcagggattgtacactcaccagtcagcgccctcaaaacataccactcggctctaccagtaagcaagatgtgggtggggccagataagagaataaaagcaggctgcgcga

SEQ ID NO: 843514 - DNA, 627 bp, Homo sapiens
gagtggcaggtagctccgcctgcagccccggtgcgggatccactgggtgaagccagctgggctcctgagtctggtggggacgtggagaacctttacctctagctcagggatcgtaaatacaacaatcagcactctgtgtctagctcaaggtttgtaaacacaccaatcagcaccctgtgtctagctcagggtttgtgaatgcaccaatccacactctgtatctactctgtactactctggtggggccttggagaacctttatgtctagctcagggattgtaaatacaccaatcggcactctgtatctagctcaaggtttgtaaacacaccaatcagcaccctgtgtctagctcagggtttgtgaatgcaccaatccacactctgcatctactctgtactactctggtggggccttggagaacctttgtgtggacactgtatctagctaatctggtggggacgtggagaacctttgtgtctagctcagggattgtacactcaccagtcagcgccctcaaaacataccactcggctctaccagtmagcaagatgtgggtggggccagataagagaataaaagcaggctgcgcgagtcagcagtggaaaccctctggggtcctcttccac

SEQ ID NO: 843515 - DNA, 550 bp, Homo sapiens
aagttcaacacctagatttgctgctattgattgcatttccccctccttttatgacccatacttcctgtgtctttcttcacttgtattataattttatgttgaaaactagatacttcatttcatttatttttatttttaaaacttttatcttaagttcaaaggtacatacgcaggtcatgggggtttgttgtagagattatttcatcacccaggtattaagcatagcatccattagttatttttcctgatcctctctgtcctcccatcctccaccctccaccaggccacagtatgtattgtttccctctatgtgtccatatgttttcatcatttagctcccagttacaagtgagaacatgtggtattcaattttctgttactgtgttagtttgctaaggataatggcctccaactccatctatgttcctgaaagggacatgatctcrttcttttttatggctgcatagtattccacggtgtgtatgtaccacattttctttatcgagtctatcattgatgggcatttaggttgattccatgtctttgctat

SEQ ID NO: 843516 - DNA, 629 bp, Homo sapiens
actgaaatatatccaagcacatttcttgacatatagtagtcactctgtacatgtttggtcaacggagttcatacatatgtaagagaagtgtaagaaagtggaaggagcacttaagtagaattcaggcaacctgggctctaattccagctttgtctttcatttaaatttatctgattttggtttcttcatctgcaaaataaggataatatctgctttgagtattttataggatacttgcgaggataaaagaaataagaaattgaatgtgaaattattttgaaacacaaagatgttattaggtcattataatgatgatgatgatgatgatgaagtacacttgcatgtacagaacagtttgcttttaaaatagccgtcattaaaggtcacaataaaggtaaccacgtagtatgggcatacacataaattcatgtctcacaaatatctgtttttacatatatctacataagcagtataatgtatgatgctcctacacaatagctaacagtttttaatmgactaaggcttattttctgttcctgaaaatcatatacattttctagatagaataatagaaaggttgcattacaacatcacttgaatttgtttggcttttctatctgatagaactc

SEQ ID NO: 843517 - DNA, 541 bp, Homo sapiens
ctgaagcactcagaaccttttctccattctattggatttgccttcaggccctcaatatttctcctttggacagtagcaacggatattccttcatttcattaccttcattgctatcaaccctccaggcaattgttttctgatcatttactcagttccttagcaagggctccttttacctatagaagtttctttaagaataaaacaaaacaaaatcataagtgaaggagaacatataaaattctaactgaggcagaagtgtggagcatgtaagtacttcctcacttctatgtcagccagtaaggaaagtcctgaaagacactttggaaaccactggtctaaagggaaaaacttaaattgcttaacatggtaaatcaaaaactggtttcagaagctggcttttccctccctttctattccaaccacatcacctataagtyttctaccttaaagctctgctccagtctcttcaacttaactgctactccccataacacactgggctttttctcatctatctgtactcttctatctgcttggaatg

SEQ ID NO: 843518 - DNA, 541 bp, Homo sapiens
ctgaagcactcagaaccttttctccattctattggatttgccttcaggccctcaatatttctcctttggacagtagcaacggatattccttcatttcattaccttcattgctatcaaccctccaggcaattgttttctgatcatttactcagttccttagcaagggctccttttacctatagaagtttctttaagaataaaacaaaacaaaatcataagtgaaggagaacatataaaattctaactgaggcagaagtgtggagcatgtaagtacttcctcacttctatgtcagccagtaaggaaagtcctgaaagacactttggaaaccactggtctaaagggaaaaacttaaattgcttaacatggtaaatcaaaaactggtttcagaagctggcttttccctccctttctattccaaccacatcacctataagtcttytaccttaaagctctgctccagtctcttcaacttaactgctactccccataacacactgggctttttctcatctatctgtactcttctatctgcttggaatg

SEQ ID NO: 843519 - DNA, 433 bp, Homo sapiens
ggaactcaagggattcactgctgacttgtaccaaacatttaaagcagaactaataccaatcatattcayactattcagaaaactaaagaaggagagaacacctccaaactcaatctacaaggctagtattaacatgataggaaaaacagaaaaagacacatcgaaaaaagaaaagtataggcaaatataactgatgaatattgatccaaaaatcctcaacaaaatactagaaaaccaaattcaacaacacaataaaaagatcattcatcacgaccaagtgggatttatcccagggattcaaggatggttctacatatgtaaatcaatcaatgtgatacatcaaatcacagaatgaaggaaaaaaaacatatgatcatttcaattgatgctgaaaaaacatttcataaaattcaacatcacttgttggtgaaaa

SEQ ID NO: 843520 - DNA, 656 bp, Homo sapiens
acttcttgatgacagtcgtcagcatctctgcctttgtgacaggctcttttgtttgatatttgaggagaagaaactgcaccaactcagccaccttttcatccagggcatacctgggcaaggattcactttctggcaaggcatgccaagtagctgtatcctcctcttcactgctggactcctcatccaatcgggtccacaaaagaggggatgagcaggagtctagaggactctggggaggactctgcggaggaccctggggagagatcttgggaggaccctggggaggaatctcaggaggactctggggaagaggtggcatcccagcagcaggcatatcctcatcttctggaacacccagaatgagagtagagggtaagggtgaggacaagggtgaggatgaggacaaggaagaggaggaggggaataaaaagtggaaagaggaagaggaagtggaggaggcatcctcctcctcctcatctatggaatcctgtgcatctaccaagtcctctgtcacactcgggttctggaagtcttcctcaaagctgaggcgtggaaggtttggaaagagaggcatgaggcctgttgttcaggagcagcaggtaaacgtgtgagcagggatgrggatgatgggatcccacaggcctgaggaagacagt

SEQ ID NO: 843521 - DNA, 607 bp, Homo sapiens
ggtggtttcctcccttaatacaatttacatttcatatgcattttgcttgtttacccattagttgttaatattttctaatttcccaagttggttcaacaaagcagagttgaagagacatttttatttgttccaaattatcatattcaggtgtctactcagaatacatttaacagtaaggttcaatatttcaatttacatagatttggattttgaggtctgattaagtgtcggttagttttggatcaagaatgaaacaaatgtgtaacttaaattgtcagaattccttcgcaacttggggatctataacggcttgggatctgtacttttcatttccaagtgttgtagtgttattctgagaaatttggttactagaagcagagattgagtgaaacatccttagtagtcattggggaaacaagaatctgctaacatttagtctacataattatcttgtttcatttctgtaaataccaaggattgtactgccaaaagtgtgyaagtattttagatagctcttaaccacagaaagaggatatcaaattggcatatgtctggaatggtactggttcttccagaaatttcctaaatgggaaacagaaactctcat

SEQ ID NO: 843522 - DNA, 607 bp, Homo sapiens
ggtggtttcctcccttaatacaatttacatttcatatgcattttgcttgtttacccattagttgttaatattttctaatttcccaagttggttcaacaaagcagagttgaagagacatttttatttgttccaaattatcatattcaggtgtctactcagaatacatttaacagtaaggttcaatatttcaatttacatagatttggattttgaggtctgattaagtgtcggttagttttggatcaagaatgaaacaaatgtgtaacttaaattgtcagaattccttcgcaacttggggatctataacggcttgggatctgtacttttcatttccaagtgttgtagtgttattctgagaaatttggttactagaagcagagattgagtgaaacatccttagtagtcattggggaaacaagaatctgctaacatttagtctacataattatcttgtttcatttctgtaaataccaaggattgtactgccaaaagtgtgtawgtattttagatagctcttaaccacagaaagaggatatcaaattggcatatgtctggaatggtactggttcttccagaaatttcctaaatgggaaacagaaactctcat

SEQ ID NO: 843523 - DNA, 524 bp, Homo sapiens
agtgcagtccattctaacaccaaaattcgagtgtrtcattcattgtctatctctccacttatctaaggcagcacctctaatagaagagacatagagtgttttcattgccttcccttcttgtctctcttgcctggatgcctttatctccaaatgtattcttcatagtgttgttacccttttattcccaatgtaggttgcattatgtcactcacctccacaaaagtcattatttctccttaatctgattccaatcattaatttgtaatgaactaaacatttcttagaatgagttttaaagtttttgattattaactattctcttagttgcttactccattatttacaattaattgtatcacatactgtgccccatcagctctagaatacttaacatgctccaaacacattgttatatttttctgtttctgccaaaaaatatactttacttgtatagtaagagagagccgttaaggttatgggctttgtggttagattgttttagtttgaatctttaatacttgcca

SEQ ID NO: 843524 - DNA, 550 bp, Homo sapiens
gatcagtgaggcagtaaactagtaaagatattctggacttaaatttgacaagaccaattggacctaagagacatctatagaatatgccacatagcagccatagaatatatgttcttctcatctgcacaaggaacatatttaagatcaaccacatgctcaccaataagtcaagtcttaatacatttttaaaaaatgaaattataccaaacatacctttggatcacaatggaataaaaatataaataaataccatgaggaactcctcaaatcacacaattacatgaaaactaaacaacttgcttcttcatggctttagaataaacaacaaaattaaggcataaaccaaaacatttgaaacaagtgaaaacagaaacacaacataccaaaatttctggaatgtggcaaaagcagtgttaagaggaaagcttatagcactaagcaccyatatcaaaaagactgaaaaatctcaaatgaacaatctaataccgtacttaaagaaactagagaaacaagaataaactagccccaaggtagcagaaaaaaagaaata

SEQ ID NO: 843525 - DNA, 394 bp, Homo sapiens
ctacacatataaaaccttaaggactctgatgaaagtatcctagacctgataaataacttcattaaagtttcaggatacaaaagtcaacatgcaaaaatcagtagcatttctacacaccaataatgttcaacctgagagccaactcaagagtgcaatttcatttacaatagacacacacaaaaatcttaggaattcacctaaccaagaaggtgaactagctctacgaggagaactacaaaacactgccaaatgaaatcatacatggcagaaacaagtggaaaaacattccatgctcatggattggaagaatcactataatttaaatgaccatatggcctgaagcactcaacgattaaatacyattcctatcaaattaccaatgccattttttaca

SEQ ID NO: 843526 - DNA, 622 bp, Homo sapiens
tcacttctcagaagaagatatacaaacatccaataaacatatgaagaaatgcttaatatcactaatcatcagagagatgcaaaacaaaaccacaatgagatatgatctcagtcctgtcagaacagttatcatttaaaagtcaaaatataactaatgttgttgaggctgcagagaaaaggggatgtttacatactgtaagaatgtaagttagtgcagccactgtggaaagcagtttggcgatttctcaaagaactaaaaatagaactaccattcaactaggcaatcccacaagtgggtatatacccaaaggaaaataaatgattctaccagaaggacacatgcactcttatgttcattgcagcactatacacaatagcaaagacatggaatcaacccaggtgcccatcaacagtggattggataaataaaatgtggtacatatcacaaaatactacacagccataaacaagaatgaaatcatatccctgcagcagcatggctgtagctggagtccatyatcccaagcaagttaacatagaaaccaaaaaccaaatattgcatgttctcacttataagtgggagctaaacattagttgcacacggacataaacataagaacatg

SEQ ID NO: 843527 - DNA, 622 bp, Homo sapiens
tcacttctcagaagaagatatacaaacatccaataaacatatgaagaaatgcttaatatcactaatcatcagagagatgcaaaacaaaaccacaatgagatatgatctcagtcctgtcagaacagttatcatttaaaagtcaaaatataactaatgttgttgaggctgcagagaaaaggggatgtttacatactgtaagaatgtaagttagtgcagccactgtggaaagcagtttggcgatttctcaaagaactaaaaatagaactaccattcaactaggcaatcccacaagtgggtatatacccaaaggaaaataaatgattctaccagaaggacacatgcactcttatgttcattgcagcactatacacaatagcaaagacatggaatcaacccaggtgcccatcaacagtggattggataaataaaatgtggtacatatcacaaaatactacacagccataaacaagaatgaaatcatatccctgcagcagcatggctgtagctggagtccattatcccaagcaarttaacatagaaaccaaaaaccaaatattgcatgttctcacttataagtgggagctaaacattagttgcacacggacataaacataagaacatg

SEQ ID NO: 843528 - DNA, 622 bp, Homo sapiens
tcacttctcagaagaagatatacaaacatccaataaacatatgaagaaatgcttaatatcactaatcatcagagagatgcaaaacaaaaccacaatgagatatgatctcagtcctgtcagaacagttatcatttaaaagtcaaaatataactaatgttgttgaggctgcagagaaaaggggatgtttacatactgtaagaatgtaagttagtgcagccactgtggaaagcagtttggcgatttctcaaagaactaaaaatagaactaccattcaactaggcaatcccacaagtgggtatatacccaaaggaaaataaatgattctaccagaaggacacatgcactcttatgttcattgcagcactatacacaatagcaaagacatggaatcaacccaggtgcccatcaacagtggattggataaataaaatgtggtacatatcacaaaatactacacagccataaacaagaatgaaatcatatccctgcagcagcatggctgtagctggagtccattatcccaagcaagttaacatagaaaccaaaaaccaaatattgcatgttctcacttayaagtgggagctaaacattagttgcacacggacataaacataagaacatg

SEQ ID NO: 843529 - DNA, 507 bp, Homo sapiens
tttaacatgatagattcagaaaataaaaggtgaaatgatcaaaacccctagccaaatgcgcaaactttgcaaaacaaaacaaacaacagcaataaaacctttcgctagaaaaacagcatcaccaaaattaatctgctccttgtgtaacttgtttggcatgatttggcacccagtaaatctgtacctaaagaatgataggccagtgattcctggactcagtaccaattcagctctagactaatgggtcactgtcaggccaagccagagggctgcccttgtcctttcatgtaacactggttgtaattccagaataaaatagcacagtaagatatgcaccatcacctactcctactttctcttctcaccctcagtccttaaaaggagactgtcaccacatttattgtacaagatcataataagactccaattttctcatacttcctctaggaaatcctcctactctgyttgtgcctctgtcccactgcctggcccactcaggatgaagga

SEQ ID NO: 843530 - DNA, 481 bp, Homo sapiens
gtaattaggataaatccaaatagaagtgaaataaaagrtatataatcagattagagtacttgccagaaaagcaatgatttttttaaaaagctatgcagcatggggaaaattttgctatctgttattataaatattatatttatatagtttgtttagttgcagactgaatgagaggtaagattttgttgttacatttttcttttaaaccatctctagacctctttgcttctaggtagaaagtcttgttttgtagtatggttcgtaaatgttgtccggaaggtgtcacaggttaactcttattaatgctttttttttttttttgaggaaaggagtggacaggcaccaattctgtctataaactccttttatttcatactgagaataggcgagatttgattgtttcacattgttatcttgttttgattgatagtcacatccttcccatttgggcattagtgatatggaaaagttagactctttt

SEQ ID NO: 843531 - DNA, 552 bp, Homo sapiens
gagctgaaaagaggaccgtgtgggaaggtaatcttcccctggagtccggccagggacagactcttctctgaagctgttccaccaagctgtccatctgaagtcaagcagcttccctcggacatcaaactgtagtcccagatgtccagttccttctcctcgctctgccagctgagccttgggtttttatgggcataggatgggggcagggcaggccatgggtggttttggaaaaggcaacattggagtgggaaaacagagatgtaggttctcactttgagttgtggtcccaggctttgcggcttgagggtggggccctcactggggacctgccctcttctgcccagaatttccctgcctgctgtaactatcagagatacatctcaacatgttgaggtgagaaataaataaaataatacatgtgaactctctagcatggggcctgataaaaaccagttgttactaaatactagtttccctttatctctccacttatggagtttttatctattccrttccattgtccttttctaagccacaaaaaaatttttggtc

SEQ ID NO: 843532 - DNA, 491 bp, Homo sapiens
taagtctttgctagccttatgaaatctttattgattatcctgctagcttgaaagctgtattccattagtgtcacatgtgagtgttgaggtaaagacaagaggaaggatacaaacaagcaccctggtggtctgggactctctttccaacatactctaaaacaaaatatagaggcatcagacatttggagccttcatctagtgaaaattctgcagctccagtaagtgctgcaatgtgcctgtgcaatccacatcgtctgccactcactgattccttccaacgtcttcccacaaaggccttggtgttctcatggctttgtttctacttctggctgtatggtccaatacagtcttctctcaactgytcagaataactggtccaacaaatgacctgtcaatttagtcaaaatacttgctctgagacacgtctgactataacctttgcaccatcctgagtttaaatctcactgaataatatggggacttgacatcca

SEQ ID NO: 843533 - DNA, 623 bp, Homo sapiens
agggagtttttttttttctttcttttttaaacctttcagtccttttgttactcttatatccaaccacccatttgggtaccacacatgtaaaggcactcccrattctcatcctgatctgagttaatagcccaccatctatacaatcatctttcctattaatagtttccacaatgctgagggggaacacatactcagcaagtcaatggtctgggcaacatatcagcaggaaaaggactttaattttataattaaggtaggtttagaatacagtataaatatcctccaacagagacgattcactgacagatactttaacgcagtgctgtttaatagaactttctgatatgatgaagatgttctaaatttagccactaaccacatttgcctatttgaatttaaatctaaattaattcaaattaagtaaaatagaaaaggaaatttgaaaaacaactctatttcctatagcatccaaaggaataaagtacttaggaatgaacttaacaaaggaggctaaagatctgcatactgaaaactagaagatagtgctgaaagaaattaaaggcaacacaaataaatggaaggaagtcctgtgtgcagggattagaagatttaatactgttagg

SEQ ID NO: 843534 - DNA, 579 bp, Homo sapiens
acctttaagtcacctgagtcatattatcacacttaagaaacactgttccaatcccagatctacgtctatgcgctagggtattaggcatgcgttgatgactaaggtggtgaygcttcagctattgatgcatcggccctaggtctgaggtgctagctacaggtcaggcaattggcaatcacagggatgtctgtaccagcttttctagtaccaccaaaagttatgaagtggtggtccaggcctgctaaatccagagaggagaatgatgattcaacaaaaccacctggagacagaatgtaaaacaatgatttttcaaagcaaatttaaaaaaaaaaggttatcagattcacacaaataaaaaaataaaaactgacacactatgtaaaattccaggggtattgaatttacagtacaaaaataaagcctttcagtaaatccaaatttcaatatgattttatgtccattcagaaaggaggaaatagcttagtcatttactatttctagctcaataaacctatatattttcttacagagcattagtgttgcatatactttagggtcagaatacataagctcatagta

SEQ ID NO: 843535 - DNA, 579 bp, Homo sapiens
acctttaagtcacctgagtcatattatcacacttaagaaacactgttccaatcccagatctacgtctatgcgctagggtattaggcatgcgttgatgactaaggtggtgatgcttcagctattgatgcatcggccctaggtctgaggtgctagctacaggtcaggcaattggcaatcacagggatgtctgtaccagcttttctagtaccaccaaaagttatgaagtggtggtccaggcctgctaaatccagagaggagaatgatgattcaacaaaaccacctggagacagaatgtaaaacaatgatttttcaaagcaaatttaaaaaaaaaaggttatcagattcacacaaataaaaaaataaaaactgacacactatgtaaaattccaggggtattgaatttacagtacaaaaataaagcctttcagtaaatccaaatttcaatatgattttatgtccattcagaaaggaggaaatagcttagycatttactatttctagctcaataaacctatatattttcttacagagcattagtgttgcatatactttagggtcagaatacataagctcatagta

SEQ ID NO: 843536 - DNA, 619 bp, Homo sapiens
agggattgttgagatcagttagtttctatacatgaagtacttagatcattgcctgaaaatagtttttgtcatgtagatgttagcgattattttgctactgaaaatagaggtggagctattttgggacccagttggtgatttctaaatccaggagatcctaaacatccccaaatcagatctcaggtaaccatttgccacagtgcctccttcatcactggcaggccttggtcaggccagttgctgagcctggctctggagtgagatgcaaaacgttagaagtaaaaatgctattttccctctcgcaggcttttgccactggcaaataatctctttagcaatatttgaccttaagaacttaaaatgaaaaggtcaaaacatttcaaggagtgggaaccgggtcccttcccagatttcccactgtcacagagttagtgaatgtcagttgtggttgccagaggcccacaggacccccctcccataagaaatagygaaagcagtggaacagggtgagtgcagagagagagacaggtctctgcacttctcactgtctcctgggccttcagccacaaagaaggatgctgcttgggagggctctgttgggtcagagtgaagacacggc

SEQ ID NO: 843537 - DNA, 630 bp, Homo sapiens
tgcttctgcctgaaaccctcctctcctccgccccatttaagttaacccctccttcttcagatctgaaggcaatcatcacttcctcagagaagcctttttaagcyatctattagtagtggctatttcttttgtaggactaatcacagttataactttactgttctatgtgacattaattgatcaatatcagcctccctcattagactggaagttctgcaggagaaatcatgtctactttttgcttccctcacatcctcagctcacagaaaagtacttatagtttaaaaggaacttggtatttactaaatgagcaaacagtaatgagaaaagatgtttaaagcagtaatatagaatttgtggtgaggggaccgtcagcttggagatatgttcacagcattaggactgggttgtagggataagagaaactcaggagttgcagtcagtgggctcagctgcccaattttagacgtcagggcagcatgaagatctggagtgagggcagcgtgctactgactttgcgtgaccttgaacaaatgacttcattcctctgagcctcaatttcctcatctgtacgtggagataatattagtactggtggttgtggggatcaagttaaatgagataaagcac

SEQ ID NO: 843538 - DNA, 611 bp, Homo sapiens
tttacctctgaggtatgaggtggggaaaactgggggccagtaaacactgaacccctttctgcatcgggctcagccaccctctctgccctgagccggggaggggctactaaagctactgggggccacagcctggtcttggcaggggcagatggtttgaggaggggccctgtaccaggcctcccaggtcctctgcagggtggacgtacctcgagagaacctcagccctttgccagcaaactctgttttcagggcttccacgaacttctcccggatcttctctttctgcagaggggagggagcggatggcagctcagaggacctgctgtgtgccaggccctggctgggcacacagtccacgtgagcgtgctgagcattctaggtgggtaggacccccaactgtgcagatgcgcaaactaaggctcagagaggggttgtgccttggtcaaggtcacctagccctggtggcagagccagggcctaaatccagaagggatggggctgccaatggggctgtgggctgggtcttctgaaggagacctcagaggagagacacgagtaggaagggcgaggagacrgggcaatctggatcccacatcagtgtccacctcagg

SEQ ID NO: 843539 - DNA, 635 bp, Homo sapiens
tggataaagtccagagaataaacatatgccaagagaaaacaatctcatgctagttatccttttgccaccaactcaacttttaatgttcaaaacttctagtgatgtttcaaactgggaaaatgaaggagtaaagtaatgtaaaatgaaggaatatcccaaactacgcaggacttatatgttgattattttaagttgaaaacattggagaaattgtagtttcaggaagggctagctgacctgtctcttcctgcatacagcaagccataaaggttcttcttggaggggtactctcactgtaccagggtgagaaaatagcccttatcaccagagactgggaacagggggaaattgacctaaataaacatacttaatgaagtaactcttatgttccactagttttatatcccccatatatctcccagtgactcccctagaaaacgtactgcccctagccagattttctttatccagtcatttcttctcaaatttatcattttttgtctaaaaagyataaaagcatgttgtgctttgaccacttctttggacttcactggcttcactctctcatgaagagccccatgtacatgtacaactaacacaatttgtatgcttttctcttgttaatcaacctgtca

SEQ ID NO: 843540 - DNA, 602 bp, Homo sapiens
ggcatgcacagtgtgtttagaaagttgtacacatgcccatctgaggctttcttcccttttccagtggagtgccctcagaaggtcatactctgccattttgtctcttaatgcacatgcctgggaagttgcatmttcctggcacctgcattcaattaaccctttagtgcaacaggtgtggaccatcagaaaatggcctcttcctggcaccagctgccaatttatcattttcagagaggcaatgtgataactgccagaccatcaactgatattcccagtgggtgggggaagagccctctcctgaccggctcatgcttatctaactacttgtaacactctcgctttgtgatttgcaagctcccccttcgccttccaccatgattggaagcttccaaaggcctccccagaagcagatgccactatgcttcctgtacagcctacagaactatgagccaattaaacctcttttctttatcaattactcagtctcaggtatttctttatagcaatgtgagaatggactaatacaatgggcatctccatacactgcttgtcctcacatgaccactggcttccttaagagcaagtgttccaaaagagggaga

SEQ ID NO: 843541 - DNA, 478 bp, Homo sapiens
cctgtagccccttttggccagtgtctcctattcagaatggctgtaattatccatttcctgtgcctccattgttatctaggtagtaactaatttgcttttgattttaatggctcataggcagagggacttgccttctctcagatgagactttggactctggacttttgagttaatgctgaaatgagttaagactggggggctgttgggaaggtatgattggttttgaaatgtgaggacatgagatttgggtggcgccaggggcagaatgatatggtttggctgtgtccctacccaaatctcatcttgaattcccacgtgttgtgagagggacctggtgggaggtaaatgaatcatgagggcaggtctttcctgtgctgttctygtgatagtgagtaagtctcacaagatctgatggttattataaggggaagttttttggcacaagttctctttctgcctgctgccacccatgtaagat

SEQ ID NO: 843542 - DNA, 427 bp, Homo sapiens
gccatgattcagggaacaaggggacttacacagggtagaggcaagcagtgtccgacaggttctgatgtgcggtggcccagccatcctggagaagcgagggctacctgggaaattctatgtgaataaagaggggaggctgcttttcatcttttcatgttgtttaatgtgtttgtatttttacttcaaaagccctaaaagaccagtcacaacaacctaggtggtcatttccacactacttcatggtcctctgtctgcaggactgtaagcagacaatttccacagggacaggtgggaggcagagatttaggcagcaaatactgtacaaggaacaacacaaatctactcmacaaaaatcacttggggtcaatgtggtgggtggtccatgttactggaatggggaactctggctgggcagtgagaagtaaaa

SEQ ID NO: 843543 - DNA, 427 bp, Homo sapiens
gccatgattcagggaacaaggggacttacacagggtagaggcaagcagtgtccgacaggttctgatgtgcggtggcccagccatcctggagaagcgagggctacctgggaaattctatgtgaataaagaggggaggctgcttttcatcttttcatgttgtttaatgtgtttgtatttttacttcaaaagccctaaaagaccagtcacaacaacctaggtggtcatttccacactacttcatggtcctctgtctgcaggactgtaagcagacaatttccacagggacaggtgggaggcagagatttaggcagcaaatactgtacaaggaacaacacaaatctactcamcaaaaatcacttggggtcaatgtggtgggtggtccatgttactggaatggggaactctggctgggcagtgagaagtaaaa

SEQ ID NO: 843544 - DNA, 560 bp, Homo sapiens
taaggaaaaagtctatcactcacttccttgcaatctgctatctgtgtgaaaatcaaaacaactctagtgttcaaatttctcatgtgaattaggaaatgagtagacgccataaatgaagcaaaatatgtctatgatctctttcagaataaatgcatttcattgattcagtgcacatctgttcaagccattcttttagtcttttcttccctaagcatcttcataaattaatctgcaaatagaaagaccaaatggtatcaataaagataaagtggacacaaccagggatgcatttatttgctgaaatttagagttggaagatgggtaagtgagcaaacatcccaactccttatcattataaaacacactgggtccaggtgggttgcggtgacccccggggctggtgcaggatcctgtcagctgctctcttwccactgccctttggtctcagtccagcacccaatgggttaaaacaggtgtgcccacactcctccattactccaaatgccccagtgatttcccatctcagagcaaaaaccaaagtccacatagtagaggagatg

SEQ ID NO: 843545 - DNA, 649 bp, Homo sapiens
ctaattagacaaggtactaatgagttaaggctttctctttgtcataaactgactcttcctctgaacccctaattagtgcctctttttttaagttgaggtttatcaattatacctyaatataaaataaagtttataatctcaagtgtacagtgctatgactttttgcacatgtacacatcactataaccatctcccagatcacaatatagattatatgcttcttttccaatcacataactcataacacctcacattacagtaacttatgtatatttttatctctttcattgaattgtaaacaaaagacaaggtcctagtctttttcatacttgtagttcctgcagtccctggcatgacatatggcttatagcaggtgtttcacttttttaaaattgatgaaaaattatctatgtaattttgaagtcagagtaggtctttaaaaatatctcatgtacctagtatggccttaacaaacaggaagccaatgaaagaagaaaatacaagaaaatggaataaaagaaagcctccccacttcccaattgccaacatttagtttccatcagcaaatattttttgaggaagtgctaggtacaggctctatgttctcacaataatcagtgaacaaatctctgccctcatggagtttata

SEQ ID NO: 843546 - DNA, 594 bp, Homo sapiens
agaggagtgtaagaatttatatgagagattattacaagacaacaaaaaatcctagacatatttgaattgtgtgttagccaaattttaatggagtctgatttactcttctattccatagagaggtcattgcaatacaaatactgctagcccaacactgaaggaaaggcagaagtaagaaatctgcatattgattttaattttatgtatgaacactttggtcatggcatatcaaaacttagtccctggatggagactagtaaatttaaaatcattgccagtaacgagatggacccaaaccccataaagtgtactcagttgattgccaaatgtccctattaattgatttttaggaaagttttatatttctccagtagaatagttcttttctatctctgctttcatttcttcttccttggtcttaacaaagttccataaaatggtatctaccctcataactcccatgtggaaggaggcccatcttatttttcaagctagtcttgaaagacattgtttaaaaaaaaacttcagacaagttaaatttgaaggagtataattgagcaaaaaaaaaaraaattatttgcaaatcaggcagcc

SEQ ID NO: 843547 - DNA, 526 bp, Homo sapiens
tgtaagctttagccagcagacaacttattaaagaaacatatgcaatatttttgtgctgatgttaattttgttcccatggttgttggtgtctttcccaaacagggacatgtgagacaccacaacagagaggaactatgcccttgttactatagacctatctttaaaatgtttacaactccaagctgcgtaggcctatgcttactagtttttagttcctacagctacttaaacttttgagttgagtttgttatatgctcttggcccatatctttcctcccatacatacctttggcaacacttttctattgggtgtctgttcttggcattaccttcccaaaggcattacttctcatttaatgcaattacttcaattaatatgtctaatgggagcaaaagagctattatcccctgctttactttcatgagaggtaaaactttgacgcagatgaagagatagaacaattgtagcgagtrtacttgaaattatacacataacagcatctgatttcctctcaggcaaataaat

SEQ ID NO: 843548 - DNA, 605 bp, Homo sapiens; identical to SEQ ID NO: 839269

SEQ ID NO: 843549 - DNA, 601 bp, Homo sapiens
tttattttggttaaggatatttttctactgcttgacatgttcagtwatttttattggatgatggacattgtgcgctatgttgttgaatgtctggaatttgttgtcttcctttaaataaagtagaattttgtttttaataggcatttaaactacttgtagatcagcttttttttgtttgtttgagggctatttttaagtattgtttgggtggatctatgttagcctttattccagggctatgttagtgccactatttaggcatgagacttcttgggtctctactgaatgcctgttgtagacaataaggcctcttctatgtgattagtcagaactggaatacatctctatcctgaatgagctttgagaattgtttagcctattgcttgtagtaggtagacttctaaaatgacccccaaagacattcacctttgtgtattcccctccaattgagtttgggcaggatgtgaatatgattattcttgtaactacattactttatgtgggaaaaaggaaaattttctaagatgggcttgatttcatctggtaagccctttaaaaagagatttatctgactgattgctgagtaaaaagtccattatct

SEQ ID NO: 843550 - DNA, 526 bp, Homo sapiens
ccaagcagctgtctttttgcttcttggcctgagagctttacctggcgtcataggmgctatctcatcctgcacacagggcaacccagatgtgctgggaatttaaacccttgtgagcaaatttaacaatgaaaaatagcagtcatggccgagtgcagtggctcatacctgtaatcccaatactttgagaggccaaggtgggtggatcacttgaggctaggagttcaagaccagcctggccaacatggtggaaccccatctctactaaaaatacaaaaactagcctggtgtggtggcttgcacctgtcatcccagctacttgggaggctgaggcatgagaatcgcttgaacccaggaggcagaggttgcagtgagccaagattgtgccactgcactccagcctgggcaacagagggagattctgtctcataaaaaacaaacaaaaaacccagcagccgttggataaaaatccagtctccctgtcttcaagcagaactattttgaggtacattctacagagctctttaga

SEQ ID NO: 843551 - DNA, 587 bp, Homo sapiens
gtttaataatatgaacactgccaaaaaatgggttcaaagtcgcctggagaaacagtttcttcttctggagtccatctcagcagcagcgattttctcccacattcattcccaagttaggcagatgtgtagaagtacctgggcttggcattgcccagaaggtcatcttcgtagttggggaggcagcagaagaagaaggcacagccaatcaggataatcgtggctgcccacccaaagccgtaggcccagttatagatgtaagtgacagcagggttggcatgaagggtgaaggtctgggtgtacttcacggggtaaattaccagggagatgatctggaacacagctaaagggaagaaaaaaatcccagggtatgaatgcatacatgcatgaaggaataaatacacattagcgacagattacctccttccaccaagtttctgccttgaaataagtataaaatctacctggaggcaggaggaatctggttaggcagaggccaaaaaagattcttgactactgtgtgtaagagatgcctggcactgagcagyatcacacacatatgccaaatatgtgaaaaacacacaaaaaaa

SEQ ID NO: 843552 - DNA, 644 bp, Homo sapiens
atattttttattctggtaaaatatatataacatttatcattttcactttcaattgttcactctaagtgtacaattcagtggyattaaatgaattcacaatgttgtataaccattaccactatctatacccaaaactttttcatctgtacataaactcagtatctcttaaaaaataactccccattcttccctccccccagcccctggtaacttttattctactccctgtctctgtaaatttgcctattccaggtagctcatgtaaatggaataatatatttgtccttctgtgcctggcttatttcacttagcataatgttttcaaggtccatcatgttgtagcatatatcaaaatttcattcctttttatggctgaataatattccactgtatgtatatacgcattttgtttgtccatgcatctgttgatggacactttggttgtttccaccttttggctgttgtgaatagtgttgctatgaacatgggttacaagtatcttcaagttcttgtttttaattcttttggatatacacttaggagtggaatgctgggtcatatagtatttactaggatttttcaactaacattaatgtctcagtgtgttatttattatttatttatttattgagatggagtcttgc

SEQ ID NO: 843553 - DNA, 644 bp, Homo sapiens
atattttttattctggtaaaatatatataacatttatcattttcactttcaattgttcactctaagtgtacaattcagtggtattaaatraattcacaatgttgtataaccattaccactatctatacccaaaactttttcatctgtacataaactcagtatctcttaaaaaataactccccattcttccctccccccagcccctggtaacttttattctactccctgtctctgtaaatttgcctattccaggtagctcatgtaaatggaataatatatttgtccttctgtgcctggcttatttcacttagcataatgttttcaaggtccatcatgttgtagcatatatcaaaatttcattcctttttatggctgaataatattccactgtatgtatatacgcattttgtttgtccatgcatctgttgatggacactttggttgtttccaccttttggctgttgtgaatagtgttgctatgaacatgggttacaagtatcttcaagttcttgtttttaattcttttggatatacacttaggagtggaatgctgggtcatatagtatttactaggatttttcaactaacattaatgtctcagtgtgttatttattatttatttatttattgagatggagtcttgc

SEQ ID NO: 843554 - DNA, 644 bp, Homo sapiens
atattttttattctggtaaaatatatataacatttatcattttcactttcaattgttcactctaagtgtacaattcagtggtattaaatgaattcacaatgttgtataaccaytaccactatctatacccaaaactttttcatctgtacataaactcagtatctcttaaaaaataactccccattcttccctccccccagcccctggtaacttttattctactccctgtctctgtaaatttgcctattccaggtagctcatgtaaatggaataatatatttgtccttctgtgcctggcttatttcacttagcataatgttttcaaggtccatcatgttgtagcatatatcaaaatttcattcctttttatggctgaataatattccactgtatgtatatacgcattttgtttgtccatgcatctgttgatggacactttggttgtttccaccttttggctgttgtgaatagtgttgctatgaacatgggttacaagtatcttcaagttcttgtttttaattcttttggatatacacttaggagtggaatgctgggtcatatagtatttactaggatttttcaactaacattaatgtctcagtgtgttatttattatttatttatttattgagatggagtcttgc

SEQ ID NO: 843555 - DNA, 572 bp, Homo sapiens
gtgagaatctcatgccactgctgatatgacaggaggcggagctcaagtggtaatgctcgctcacctccacttacctcctgctgtgcagcagttcctaacagccaacagaccactagtgatccgtagcccaggtactgggacccctgctttacaggctatccattgctgcacaaattttgtagtagctttattccgcacaaattctgcaacttgtctaagcaatagactttttaaaatgagaggaagcttctttaattcccatgtgccttatttaatgttggaaaaactaaaaaagaaagagaagttaagtcaactatcatttcacagaagacacagatctattttcaaggaagttaaaatctactcagacagtatacgaacatgcatacatcagatagcagaaacatcacaacagaacgacatgccagcaagtaacacctgaagacaatactctcagcatattcaaatgctgaggctcattcacaaaggaaaatgcaggctagaataatagacctctttggttctgtacgtttstaaataacataatcattgtcttatatattattaccaag

SEQ ID NO: 843556 - DNA, 570 bp, Homo sapiens
agcagctcggtcgggcacaaaggcacaggcagaaagrggccatgaggagaagatgggcttggggtggtgccgtgcttgcacatgaagtgtggttgtcaggttccaaaggcagagctggggccatgctccagggccccgagttgggaagcagaaatggcaccaagttcaatgacctggccagctatgcatcaactgtgtgcccaccctgctaatagtatcaagttcctaggtctaaaaaggagttctgtgtgaatcttcctgaggctgcatttccaagatctgcccccaagaggggtgaacacagagcctgatgcttccgattgctgggcctgtggaccacgatccactcctaaaggcaccacctcttggctgggttgtcagccaggcctgtgccccatgtccctgaggcagccaactgtgccacccataccctctcacggctaaacgggacttgcccctaggtccgcagtctccaccacagcctcgacctcactccccactttgtgctgttagcctgcaaactcctggatcagagcgcagttggggctcattaaaccggacccaggagct

SEQ ID NO: 843557 - DNA, 589 bp, Homo sapiens
aatgtcttccaaacaccaaggagggaggggtcaaggagaccactggyttattaattttcatccttcattccactgaatcccagaaccaccggacagtgccactgaggatcctgaaagccaagctctacctctttgaggaaaaatttcttgtcacttaccaccctaaagcaatgagaatgagagtgtcctgtggccccagacagcctccattctcagtttacaccataaacatgctgggggaacactaaagggactccctaaaatcgatgccattattttttattttgaaaattttctaccagaaatggaccaggtgctgtggctcatgtctgtaatcccaacactgctggacaccaaggcaggcagttcacttgaggtcaggagttcgagaacagcctggcctacataatgaaacgatgtctctactaaatacaaaaaaattaagaatcatttgactccagaaggcagaggttgcagagagccaagatctcaccactgctctccagcctgggtgacagagttggactcagactcaaacaaaaacaaattgataaattaattaattaaaatgttagccaggtgtggtcat

SEQ ID NO: 843558 - DNA, 631 bp, Homo sapiens
tgggacgaaccccgtgggtaagcagtgcatcaagcccattgagcacagcttggaaggtctccagacaaggcatctttatcagaggcctcagagggaggcggcggaagggccaggcctgtaccatcagcttcagggcctcacagcgtctcctgctgaaggcctccatgaacagtggggggaaaagttctgtgggcagctcctccagggtggacatggccaaggcttggtccctcagcacgctccgccccgccagctccaggagtctgggtggagtccggatgctcatcttcatgaatctgcagggaaaacttccagaggacaaacccagagaaaaggcatcactctcaggacaagcccatgcaatctcatcttctcccagggccaaagtcactgctttggcaatggtgaaacagccctcagtttactccaattctactcagtactcagtggccattaagccagcattctgcctctgctgcatcagcatgagcgtctccgaagcagtgaggaggcagggccacaactagcccttcctttctatccagtgctccatccagtgactagtgagtgtggaggaasctgaaagcaaacccctccgaccattgggggaaattactaattactcaaggtt

SEQ ID NO: 843559 - DNA, 585 bp, Homo sapiens
tctcggaaacacagccttgggtggatccgcatagaacctcccttcmagacctgggagcttgacaccgctagcaggatgggcacagtgaccagatagctggccaggtccttgaagcaggtgccatttctgcttctcaccctggccccctgatggatggccccagctatgccttctgggcctggcatccgcacatcttgtgcgagcgtggcaccaccccattcctatcttctccttggggcccctctctgcccgtcccttcgcgcctgaccgagctgctccccttgggcaaaaaagtaagaaaaaaactgatgactgaagagaagtaaagaatgggtggagatcatctgtatgcctgttttcccagcgctttgggaggccaaggtcagtggatcactcaaagccaggatcttgagaccaggctgatcaacacggaaaaacctcatctctattaaaaatacaaaaatcagccagtcttggtggaacgtgcctgcagtcccagctatttgagtggttgaggcacaagaatcacttgagccctgaaggaaaggattgcaatgagcccagattgcaccactgcactccagc

SEQ ID NO: 843560 - DNA, 454 bp, Homo sapiens
cttaaaaattagccacctatrgaaggtcttagcattggcttacatcctgtccctgagtaaagaatctgatcatgagttcatgagtacctcaaactctacaagtactgatgaagtcttcacctgctgacagtgagaaggacactgattttattctgatcatgaagtcatgctggttgtcttgcaaggaaaatgttttagcctgttatgttgtcatctaaagctaacgattgtaacctctgtcttgtaccttccaatgggaaaaacaaaaacaaaaactcaactctatttgagccttgccaggtcaataaaacaaaagaaaattaaaaaaaaattgataggaggagtcccattcccttcttttaacctctcttacaaaagcattccaacttgtaacagactttggaaaacactcactttgtcagtgtgtgtcttccaggtcgattctcacatttag

SEQ ID NO: 843561 - DNA, 454 bp, Homo sapiens
cttaaaaattagccacctatggaaggtcttagcattggcttacatcctgtccctgagtaaagaatctgatcatgagttcatgagtacctcaaactctacaagtactgatgaagtcttcaccygctgacagtgagaaggacactgattttattctgatcatgaagtcatgctggttgtcttgcaaggaaaatgttttagcctgttatgttgtcatctaaagctaacgattgtaacctctgtcttgtaccttccaatgggaaaaacaaaaacaaaaactcaactctatttgagccttgccaggtcaataaaacaaaagaaaattaaaaaaaaattgataggaggagtcccattcccttcttttaacctctcttacaaaagcattccaacttgtaacagactttggaaaacactcactttgtcagtgtgtgtcttccaggtcgattctcacatttag

SEQ ID NO: 843562 - DNA, 621 bp, Homo sapiens
cccttcctggaccccgggtgagagcagcctcatgcccggggcctgcagtcgaggaggagagaactgagcacctgtcatgctgccccgagttccccgctgyggatgggacctggcatccccagctgggttggggggatgcacctccacctttcccggcccccctcgcctcctgaacctggtttcacgggtgccctcttccctctttccttctttccaggtctggctgtccatcagatcatcaccatcaccgtctccctcatcatggtcatagctgctctcatcacaactcttgtcttaaaaaattggtaaggctccttgggcccttctggcccagaaatgggggactaccggggtccctgggtggtgaatacagaaaggcccctacttttcaaagccagcctgttctgctggcttctgccctgggcagttcagctgccacaggctgctcaccgtccagcgctgccctttggcccggcccctctcctggtttccctgcagaaggccagcgagcccagcctttgtgacagagcttctcagggtgcgtgtggtcctgggttccagattctttctctggatccaagtgtcccttgggatgttgtccacccagagcacagtccctat

SEQ ID NO: 843563 - DNA, 602 bp, Homo sapiens
aattacagtagaggcatcaattcaggtaatggatacaatgtatggtaagctggagatagtgatgggctggtctggcgagggaaccactaactccatccatcagccctyctccatcccaacccaacatcattgcatcagtgcatgcttagcggcctctcaggggcccctcttcttaggcaccactctgatagtgaagcaagaaggggcaaggtggacagtcttcggtaaagccatctgactggggtcaatctctcttcccttccagggcgaatggtggaggcctttgcccgcagagccttgtgggatgctggtctcaattatggtcatgggacaggccacggcattggcaacttcctgtgtgtgcatgagtgtaggtgtctcctcagcactccccaggccaccccccttttattataccctctatgaaggtagagaatttcacaggtatggaaatgacaaagacccacaaagatgccatgatctacccaaggttacccagctccacagggtaagtgaggaatgccagcagcaggccagtcctgctggctgcttggcattcaagagggcaccagaaagagggtcaagccctagtgactaactta

SEQ ID NO: 843564 - DNA, 596 bp, Homo sapiens
ttgtggcttaaagttttttgaattttatatctgaaggtagagctgtatctgtaagaaatttatgtgttttaaaaaaataaaaaatagaatgatttatagggacgtgaatggaggtggaggccatttccttagcaaactgacacaggaacagaaaacaaaataccacatgttctcacttaaaagtggaagctaaatgatgcgaacacatggatacatagaggggaacaatagacacgggtccatcagaggggagggagtaggaggagggagtaggagaagggagaagatcaggaaaaatacctgatgggtactaggcttaatacctgggtgatgaaataatctgcacatcaaactcccaagacacaagtttacctctgtaacaaaccagcacttgcacccctgaacttaaaagttaaagaaataaaaaaaattttaaagtgtgtggctatctagttttgagaagatgtaaacctgagtaaagagatcaggagtagttgtgaaaagggaggggaagcaggagatattatagaagagaattgcctgagtgttggggtggggaggcaaatcrgagataattccagggctttgtgtctggg

SEQ ID NO: 843565 - DNA, 613 bp, Homo sapiens
attagccatgcgtggtggcaggcacctgtaatcccagctatgcaggaggctgcggcaggggaattgctygaacccgggaggtggaggttgctgtgagctgagattgcgccactgtaccactgcacttcagcctgggtgacagagtgagacactgtctcaaaaaaaaaatcttttattttaggtttgggggtacatgtaaggctttgttacatagttaagcacgtctcatgggggtttgttgtacagattgtttcatcgctcaggtatcaagaccagtactcaatagttactgttcctgctcctttcactcctcccaccctcaagtagactccagtgtctgttgtttccttctttatgttcataagttcttatcatttaaccctacttataagtgagaatatgcggtatttggttttctgttcctgtgttagtttgctaaggataacatcctccagctttatccaagttcccacaaagtacatgatctcattcttttttttatgactccatagtattccgtggtgtatatgcaccacactttctttatccattctgtcattgatgggcatttaggttgatttcaggtctttgctattgtgaatagtgctgcagt

SEQ ID NO: 843566 - DNA, 653 bp, Homo sapiens
gatttctaggtggttggtgttatcagcagcagaggcagagaggtccaagggggagaagttttcctgaggaasatgttgagtttagctttggacatgatacttttgtggctcccacaggatagcgaggtgcagagattggcagatcattggaactgcaagtcaaaaacgacagtaggggagaacacagagatactgatttgatgatgctgtcagagaagagatgctctaatccagagagaacatagtaaaaacagggtaaagatgaatcccagaggagagtgtttagtgttattaacccggattttaggttaaagatatgagagaaaacatctggaaagaaggagaggcaatggcaccaagggccagaatggatgaattggtcttgaatgagagaggaagcaccttcatctacttggtttacagaaacaggtatatactttaataggtgctgggtcaaaatgttgagggaactcatcacataagtaagaaatgttgttttttaccattcactaaaataggggtaagcaaactatttttctgaaaagctggatagccaatagtttaggctttgtgggccctagagtctctgtcacaacttactattctcgttatagcataaaagcagccatatacgttaaacaaatggtgtgttc

SEQ ID NO: 843567 - DNA, 603 bp, Homo sapiens
ctacataactggaaataataaaacacattgctatataacttatgggttaaagaagaaatcataatggaactcaaaaaaattcccagaactgtgataataaaaacaatayacagcaaagcttgtgagatatagcttcataagttagaaaatgaaccaaaaagtaatctcaaagaaagtagaagaggagagatgataaagatgagagaaaattaataaactgggaaacaataatacaggagaaaagaattatcaaagccacacacacatgaagagccacataagactttaagggagttcactgaaggctgccttgtactggttttagttagttaatggaaagctgccttggactagagcttcgtcctgtctttcggataacaacaaatgaacaaacttttctctcaaagagtgcttctagtcttcatccaagcatgtatttggtagtccttcatagtcttttaggtttctttttattttttgcttttcagaattggtagaactcagaactgggcaacagttctctatagtgctggaacactgttttttaaatggctttgggacccttcatttgatcacttgcacaatggaagtaagtttgggttt

SEQ ID NO: 843568 - DNA, 594 bp, Homo sapiens
cagcctggtatgacagagcatgactctgtctcaaaaaaaaaaggaaaaaaattaaactatactgataaatatttctaaagtaattgatgaaaacatatatatgacacttagcaggtrttgatcaattccagtgcgtgcatgagctgctttgcactgtggctacagcactcagcagtttgcttagtgagtagatggccatagctcactttaggtatctggagaataatgctcattcctgtctccagctttgtaaaattgcctaatagacggaaggcattaaaatatgaagatgggattatatcttatgaagctgcttggaatgggttttccctcttaacaaataatttctgatcatccatatcccttaagaacaccggatttctgggggccagggaggtaagattctatctgacaaagccttcctggtgtcaaccacttgccatctgttggtcagtgctggccctgctgggtctatagaatgagcttctttgtctgacgctcctgttgccatccctttctccatcagccttgtagcagtacctgggaacctgcatcctgtggaaagatggaggagcagatgacatcttccagtca

SEQ ID NO: 843569 - DNA, 614 bp, Homo sapiens
ggcactgctgagcagtataataaacaagcatgggggcaacagaacctgggttccaggctagactccacygttttcaaacggcatgactttaattcatcaagtgaacacaattaagcaaagtataagtttgggaccatggaatatccttcactcatcacacaggttactgtgaagatcaaatggatataatattgctttcaagatggcggcacacttgccactatacacaggtgatattattaggcagagtcgccacatagtccctgtccttgaaatgcaggcaaggagccctcaccaaaggccagggtggttttttgtttttcgggtttttgtttgtttttttcattgtggtatattatttcctctggcatgctattccctgtcccactcttacagaactgtgtcagtgggtcaccaaaagagagagctgattcaactgattccttgaaataaaggtagtcagacctcgcggtatgatggagatgaagcaactgatttactggttttctctatttttctgctgttcgtgttgtcatttaaacagacatggaaaccgtctgcacacgacagagatctttccgagcctttttcatctagtgtgctgtgctgacccg

SEQ ID NO: 843570 - DNA, 490 bp, Homo sapiens
tacaatttgagtttgtctcttcatatttgaataccctttatttctttctcttgcctgattgccctggccagaacttccaatactatgttgaataggagtggtgagagagggcattcctgtcttgggccagttttcaaagggaatgcttccagtttttgtctattcagtatgatattgcctatgggtttgtcatagatagctcttattattttgagatgcattccatcagtacctagtttactgagtgtttttagcataaaagggtgttgagttgtatcaaaggccttttctgaatctattgaggtaattatgtggttttgttgctggttctgtttatgtgattaattacgtttattggtttgtgtatgttgtaccagccttgcatcccrggggtgaagctgacttgatcatggtggatgaactttttgatgtgctgctggattcagtttgccagcattttattgaggattttggcatcaatgttcatcag

SEQ ID NO: 843571 - DNA, 398 bp, Homo sapiens
aaaaaaaaatttagttttcttaatgtttccaattcagcgaataatttacttgttgacagctatgggtgtggatcaaagaaaaaaaagtttttcagaaggacaaaatatgacactgaaggagaaatggaaggcgtcatttttgtgccccttacagtcagcttgacatatatgtgttgacatcttccacccagatctctctcctttactctggatttgtatattaagccacttactgtacactccatctgctgcttgcacatttgccttcaactccatacatccagaattgaatttactgtctcactaacttacttcttcctcatctgccttttcttcctatattccttaaatgagtgartggcaacaccatttaaccaagtgctaaagctaaaaacttg

SEQ ID NO: 843572 - DNA, 549 bp, Homo sapiens
cttacattctcaggagttaatatattcctgagagaggaagaacacacccctgtgagatggtatgaatctcttcatgaaggatccactycatggcccaaatacctcccactgggccccatgatgtcccaatgcatcagcactggcaattaaactttaacatgagttttggtggagacaaacttcacccaaactacagcaccatgctttctctccaggatccgggccagtggaagagcatggctggtggtgggtaactgaggaaaaaggtagcctggttgctatgacctgaatgtgtgtgtcccccaccaaattcatgtgttgaaatcccaagtcccagtggaatggtattagaagatgggggactttggtgagtgctccctcatgaatgggattagtgtccttataaaaggagccccagagagctgccccaccccttctactgtgtgaagatgcagcaagaagttactaagaggaataagccctcaccagacaccaaatctgccagcacctggatctcggacttcctaacctccagaaatgtgaggaata

SEQ ID NO: 843573 - DNA, 586 bp, Homo sapiens
aaacatgaaattcatttatatttcacatatatcttatacacatagcctgaaggtaattttatacagtattcttaaataattttgttcatgaaacaaagttttggttgtgttttgactgtgacccatcacacgaggtcaggcgtggaattttccacatgtggcaccatatcggtgctcaaaacatttcagattttgaaatattttggattttgaattttcagattagggatgtgcaacctgtagtaggtttacctgggacttggaactagggagagaaaacagaaagctgatagcaggcagaaaacagcatgagtcaaggtgtggtgtgttctgaggctagcagatggctgggcatcattagagggtgagagacttggaaagaatgatgggagatgaggtcacagaggaagaagaccagattttagagagccttgaataccctgtggaggagtgctgggctttgatctatggtacacggtgcatcttggaagattttgaggcagaggaggaaggtaatcagatttagcatcacaaataaagaattasatgttgggggaagtggacaagatcagcaatgggaaaagca

SEQ ID NO: 843574 - DNA, 586 bp, Homo sapiens
gacaacatgtgtcttgggagcaggctctgagacaaccagtggatgtggggaagggaagcaccatattaggaattactgtttcaccccagcaaaatggaaattcaaattattttgatgaagaaggacttagagaaacagataaagaagcaatgtgctcacaattgtgtagctagttagtagatgaacaggaacagtacctagatgtctaacccccatctcaacagagtgtccttgctctaacagggaatagtatttctgacaaaaacccttgcctgaaagggagagactaaaagaaatgttctccagatttagttatatcagcagtatcaagtcacagcagctggatataaaaccttatggctgctgacaatactcccttgccagttcagtctttctctctaaaaggaacgttgtcagtgtctttaggagacggccctccagcacctgtctggtgtctatagccataaggcactyaccttttcccagagatgcaggctaatttcaatgttggaaaacttttctgattggaaaatttaggaagttaagctaagcaattttcttaattgaatacataggcatacaccat

SEQ ID NO: 843575 - DNA, 591 bp, Homo sapiens
aggagagagggattcgctcagttgcactgagtgtgtgatttcttggcctgttcttagcagggataaaactgccctggtagccccccatcatgaaaaggagtcagacaaaaagtgtcctgtgttctggctgctacaggagcagggctgtgatctgcttagaagaaattatcctgcatccctggtactctgagaaataaattcttggtgcttctgcataacaggaaaaaaaaaacaatctgtatatataagcataatacaacaaactccttatctcatatatgatttaaaaatattttcttccattctttaggttgccttttttgttgttcattgtttcttttgctgtgtggaatgcttttgttttatgtagtcccacttatctatttttgcgtttgttgcctttgcttttggggtcataccaaagaaattattgccagccaatgacaggaagcttttttccctatcttttcttctaggagtttcacattttcaggttatacatttaagtctttaatctatttttagtttacttttttattgttttagataaaggtttggttttattatttygcatgtgtatgtctagttttc

SEQ ID NO: 843576 - DNA, 589 bp, Homo sapiens
ttattcacgctgctgataaagacatacttgagactgagcaatttatacagggtttaatggacttacagtttcatgtggcttgggaggcctcacaatcgtggtggaaggcaaggaggagaatcttatgtggatgacagcaggcaaagagagagcttgtgcaggagactcccatttttaaaaccatcagatctcgtgagacccattcgctatcacaagaacagcatgggaaagaccagcccccatgattcagtcatttcccactgggtccctcccacaacacatgagaattatgtgatctacaagatgagatttaggtggggacgcagagccaaaccacatcattgagcctctgtgacatgtagcagccctacagggaactgccaacaaaattagttttaaaaaggcttgtccaggaagcatacatgggagctggtcactttgctctttcagccctcmtagaggtgcttagacctctggagagagacactgagacaggtaagagggcagaaatgactaagaggtaacacactgtggagtcccaaaaccagcacacgcttcagcccacaaaaagcctaggccacagctctgt

SEQ ID NO: 843577 - DNA, 589 bp, Homo sapiens
ttattcacgctgctgataaagacatacttgagactgagcaatttatacagggtttaatggacttacagtttcatgtggcttgggaggcctcacaatcgtggtggaaggcaaggaggagaatcttatgtggatgacagcaggcaaagagagagcttgtgcaggagactcccatttttaaaaccatcagatctcgtgagacccattcgctatcacaagaacagcatgggaaagaccagcccccatgattcagtcatttcccactgggtccctcccacaacacatgagaattatgtgatctacaagatgagatttaggtggggacgcagagccaaaccacatcattgagcctctgtgacatgtagcagccctacagggaactgccaacaaaattagttttaaaaaggcttgtccaggaagcatacatgggagctggtcactttgctctttcagccctcatagaggtgcttagacctctggagagagacactgagacaggtaagagggcagaaatgactaagaggtaacacactgtggagtcccaaaaccagcacacrcttcagcccacaaaaagcctaggccacagctctgt

SEQ ID NO: 843578 - DNA, 558 bp, Homo sapiens
aggtttatgggtgtccttcatatgttgtaaaagaatatgctctgtttcaaatgataattcacagattttgcaaatagctgaaagtggaaaaaaacacattataccatttaaggatgtatataaaaaaagattcattttgtacatccacaacaagtaataataatagtagaagtaacagtgatgtggttctaacaattctatagctgttgactctgtaatgctgttccaaggatatattagcttatttaattctcgtaacatcactgaggaaggtactgttatttttattcctatttttcagatgaggaaccagaagcacagaaaaattaagaaacttgcttgagatctcacagctgtagtaagaggcaaagttggaatctgaaccaaatttgtccgcgtctcagactctaaatcttaacattgtagttaacttttgtctaaagtgtaaatcaagacaattaacttcaaatttgaaaaccatggaatctrggtgttctaatttagtcccctacaccaatgcatgtgccaaggaagtttccactaatgaattgtttataa

SEQ ID NO: 843579 - DNA, 631 bp, Homo sapiens
tttcattgaatgaatgcaaagatggatgatcataaagacaaatggacagacagatgcgggagacagagacaggataatgttcttagcatcattaaaaagcctggarcctctcaaagtgatcgctgtgaagaggataacactcaggaaattacatatacaggggtccctgtatccatgggggattggttctaggacctcctgcaggtatccaaatctgcagagactcaagtctctgatataaaatggcatagtacttgcacataaactatacatatcctgctgtatactttaaatcatctctagatttgtgaacctatgatacctaatacaatgtaactgctattacatagttttatactgtattgtttagagaataatgggaaaaaggtttgcacatgttcagtaaagacctaattttttaaaaacacttttatctacagttggttgaatccacagatgtggaatgcaagagctgatcatatttatttgataaatatattgaaaacacttaacattttatgttaaaaaataaccactttttgaaagacataaaagaaaaaaaagtcccatagaaaaaacaaatttccctaacaaactcattttaatttcattagtctaattgttctcagag

SEQ ID NO: 843580 - DNA, 629 bp, Homo sapiens
gctgggactgatatgcactttgttctcagactctatgctatgtctgcactgccatattgttctccacaatgacataggagggggagaaagaagaaaaacaatatgtcactctgtttggagattggtaggctacagaaacagtatcaattcagacgctcctaaaaacagccttgctgaaaagcttttgacccagagcgcgtcaggatgcttctagtccaattgtttccaattatacctaattcacctacaggagaaatttatcttctcacaaagcaccagggggacccacgatatttgctagtgactaacaaaaaatgcatttaggagttaatacatcacttccaaactggtcttcgtctgcttgagtttccaacaagccttgcagattctcctaaattcccacttattctccatacttttttcagcaaccaaatcctattttcgaatatgacaagaaataaaatgattttaggcactagagttgagaatttatagataaatgttacayttcgatgcttaattcaaataaccacacaacggtagcacttagtcttttaatctttcagcaaactcattggcaacttgagttaagagtaaaattcaaaaacctggtctccgcagttaacaaa

SEQ ID NO: 843581 - DNA, 616 bp, Homo sapiens
aacttcctctagctctggaacacacaaacatcatttactacttaggtgaatgggacagtcaatctacctagctgcctcattttaaaatacaatcaaagaaagcaggagctgaaactagcatagagttttgaggtttaagtagagtggaagagacaaatgcacaccattgcaccattctgagcatgcttgctggcatcttccttattgtggctcatctcttaataaatttttatacttcattttctcaacactaggaaatatatacaaatatcctgaagattgctgagaacagaaattaagaatgactaagtattcattttagaaggatgagggctaaggtttttatactcttaaaatgtatccttggctgtcggctaccacttatagatgagtaaaatatatgccacagtgagttgggaaatacgtttcttctcttatgctaatgatatgtttttaatatctgcaaccaggaacaatgaaaagaagaaactaagagagaaacggcatgtgyatttaactaccagaaaggactctttacaaactggatcaaaatgaaaactaccctccctagaagaagaactccattttgaaactgatttggtatcctgggatttta

SEQ ID NO: 843582 - DNA, 605 bp, Homo sapiens
tgagtgttcccttttctctgcagccttgccagcatctgttgttttttgacttttttttttttttgagatgcagtctcactctttcatcaggctggagtgcagcagcgcgatcccggctcactgcaacctctgcctcttgggttcaagcgattcttctgcctcagcctcctgagtagctgggattacaggcgcatgccaccacacttagctaattttaattttttttttttaagtagagatggggtttcaccatgttagccaggatggtctcgatctcttgacctcgtgatctgcccaccttggcctcccaaagtgctgggattacaggtgtgagccaccacgccctgccttttttgactttttaataatagccaatctgattggtgtaagatggtatctccttgtggcttcaatttgcatttctctgatgattagtgattatgagcattttttcatatgtttgttggccgtgtgtatgtcttcttcttttgagaagtgtctgttcrtgtcctttgtccattttttaatggggttatttgttttctgcttgttgatattgtgtttaaattccttacagattttagatattaggactttgtcagatg

SEQ ID NO: 843583 - DNA, 589 bp, Homo sapiens
atatcatttacattccatttcatagactgtcccctgcctttttatgatgtatgcttcttaccatgtctgtatgtcaatgtgaccccacctctttcaaacctgactcaaaytcttcttttctgggtgtgttgaacttattttactcttcttgttccttgattctgcctcaagattcttgcattgttggtactatatttatttacttttttatgtattttgtatttccaaataaagatacaagataaagatcttaaaggtcttgtgccttctcagtaaatgctgagtcttaattctttttgttttgagacagagtttcactcttgttgcccaggctggtgtgcaatggagtgatctcggcccactgcagcctccgcctcgcaggttcaaacgattctcctgcctcagccttcctagtagctgggattacaggcgcctgccaccacgctcagccaatttttttgtatttttagtagagatggggtttcactatgttggccaggctggttttgaactcctgacctcaggccatccacccgccttggcctcccaaagtgccaccgcatgagccaccgcatccggccgagtctta

SEQ ID NO: 843584 - DNA, 204 bp, Homo sapiens
cactggtggaaggactgattttartatagccctccccaccttcccgtgttgggatcatccagctaaggctaccgtgttgcactgggaattacaccagcattttccctcggggcatgcctcaggccagagtgagagactagggctgtggggatgtggggagacagtgaccttgttatctgtcctgtttctctttgccacttctta

SEQ ID NO: 843585 - DNA, 204 bp, Homo sapiens
cactggtggaaggactgattttagtatagccctccccaccttcccgtgttgggaycatccagctaaggctaccgtgttgcactgggaattacaccagcattttccctcggggcatgcctcaggccagagtgagagactagggctgtggggatgtggggagacagtgaccttgttatctgtcctgtttctctttgccacttctta

SEQ ID NO: 843586 - DNA, 598 bp, Homo sapiens
attcagaacccatgggaggctcatgctgtggaaagtgccctggattgatgtcacgacatcctgaagttcatgttcctaactccaaaataaatcactgagtaatgttgcacatacatttttgaacttcatkttaaacctgctaatttcttcataaagcaaagaacattaacctgtgctccatagataggctttatgagatctgtgaattcattctaattgcatgcaatttttttgtatatactcattctagagagttaatcacatttttataaggatccatgacctccaagagattaagatccacaatcacaagatgttatgagctccaaggcagctaatgaaatcaaagtggaaagacctgctattgacagcagcacctgatgggctcaaacctggtagcatgaggtagtggcagaagaacatcacagcaaatgacagcaggaaggtgctttgtgctacatgtaaacactttatgaggttcttttcagaagtgtgtctatgggaactgaaaaaaaatatgagagacaaggatatctgtatcctttgtcccccttccttcttccctcgaacttgcagaagcagttgctgcaggtgacct

SEQ ID NO: 843587 - DNA, 543 bp, Homo sapiens
aggattaagtgtgtgtttgtgtaagagaagagtccattgtcctttctgccttgatttgttttgggggttggttgggagctcctccacagagtaaaatattcattcattcattcattcattcattcattgtttactgctatatgctggacactatagtagcaagcaaggccccagccttcacagaggtcatcatgtagtgatgatacagataaacaaatagctgtttaccaggtagggtggtgagttcttcaaagggggaagcacaaggtgcttaaatgaaaatacagagtggtgcctggcccagtttctttaaataataaccagtaagtttaggggagtaaataaccagtaagtaaataaccagtaagttagtgaatgagaagaaaagagaaatgtgcaaaatgctcagtaccggggggcaaggaatcaattctgataaatacagagaggagaatgtaaaaggaaaggtggtgagggaagatgctgctttccagtgcagctgaggkcacgtttcttctagaatccttgtgttttaacataatc

SEQ ID NO: 843588 - DNA, 570 bp, Homo sapiens
attcagctattctgtgacagtaggtggggaaatggttttttcaaaaacccatttcctttccaagcatgctctgtcccttgaaattttactctgaataatctgttgtttctgatgttaccagacgtttggaaatagggctttttgtgtgtcttattgcttatagccataatgatgagttttttttacttcagatctttccaaagaaagcaaagcccagagatgcagtgaatgtgaaagaaccattatgatagagatcagtgatcacacgtattgatcaaagatgctcagccggagtaatggttatttacagttgagggggtttcaagagccattctttaacttaggataatcaaatccgatactgtgaattaagaaggaataaaagggataaatcaagtagagtaaaagttggaaaatagatttgaacattcatatgcctagtttcaaaatctttttcatgmgattgtttaacactatttcctactgaaaaaagaacacgtaaaaagctgagtttagaagtatcattctgattacataccattttcccagtattgtattaagtactgtgaa

SEQ ID NO: 843589 - DNA, 547 bp, Homo sapiens
caaaaaggagaaaatagggactcaactgagaaagaagacaattgggaaatggaaagaattagggaaacatttcatacattacaaagtcttgagtgaggtggaagctcaaaccatgctcawtggaggagcggcagggaggtttctatggaagggtggtgacaaaggcatcagaggaatcataattaatacatatacctggtgtgcaggactacattcttgtgtttttgcttatggtcttttccttatgctttgcccctaggatattgagtcattgatgtctgagggaaataagtctcgaacggtagctgctaccaacatgaacgaagaaagcagccgctcccatgctgtgttcaacatcataatcacacagacactttatgacctgcagtctggggtaagggattaggcagaacctttttggagtgggggtggaagaactgaaagtgtccatataggtaaagtctttcatggttgggttcagtggctgagaattgtatgttggctcttctgcttactaggtgagctactttgcttatcatttaatttg

SEQ ID NO: 843590 - DNA, 608 bp, Homo sapiens
cagaaagcgtcgactcacagcacatcagaaaagagcagactctggatttgctgtttttaagaactaatacttaactaggaaagtctggtttktttttttttttttttttttttttttttttgagagggagtcttgctttgtcgcccaggccagactgcggattgcagtggcgcaatctcggctcactgcaagctccgcttcccaggttcacgccattctcctgcctcagcctcccgagtagctgggactacaagcgcccgccaccgcgcccgcctaattttttgtatttttagtagaggcagggtttcaccttgttagccaggatggtctcgatctcctgacttcatgatccacccgcctcggcctcccaaagtgctcggattacaggcgtgagccaccgcgcccggcccattcttgaagttagtgtgaagcaagaacctactcaatattggacgcagtaggtatctacagtccaagatacttgcgagcctgaggtcgtggggggattgcttgaacctaagaatttaccaaaggattactttagctcaggagttaagtgttctaataagtttacaccactgcgttcaaatctgggtgcctataagatc

SEQ ID NO: 843591 - DNA, 564 bp, Homo sapiens
atcatcttcttcatcatcactatctccagattcatcttcatctccgaaaatggctttccgacgcattcgaccagtgttcaagtccatttgtttttcctcctttggcatcattagcctgtattaccaaggaaatacaaaataattcaatttgtacattaatcagctaatctagaaatggcaatatagtcaatgaaaatacaaagaaatagaaaatgtcaaggaattgtttaagatgacatagcatagggaaaatatgatttgataaacattggaagagttaagaagcaaactcgggcatggttccctaacaccacacttcaaaagaacttatagagagaataaaggaataacccttaaaaaacaaaaatctaattttagaaaaaaattgctcaaaagagaagttactgttttgtagatcttttggaaagctgattaatttctaagctaaaaacacatgatccttaagagaaatgggtaagtccaggcccaaagcagaaagaaggcaaaatgagcctggatccwcttgttctgtcagaaagtgagaaatgctcaaagactaacaga

SEQ ID NO: 843592 - DNA, 632 bp, Homo sapiens
taaaatggataaacttctaggtggaacagattatcaatatcaaaaataagaatgatgtatcactgaagattctatagatattatgaaggaagtgagggaatactatacctgtaarttatcagtttgacgattttgatgaaatgaacagtttcattcaaataaacagctattacggcttgctccaaaacaaatagataacctttccacaaagaaaaccccaggtccctagatgcttcagtagtgaattccagcaaacaattaatagtaccaatttataaagacttttccagaaaattcaagaagagggaatacttcctaaatcattctttgagtccagcattgccctaataacaaaaccagacagagacattgcaaggaaagaaagctgtagaccagtgtccttcatgaacataaattcaaaaacactagtgattagaaaccagtggtatataacaaggttattaatacctcatgaccaagtgtggttaatccctggcaggctttttcaacatttgaaaagcagtcagtgtaattccctgtatctcggccaacttcatggctaggtgacctgtgcagctcacacgttgctacactcttgtaagaagggatcctgtacttcacttaatgccctg

SEQ ID NO: 843593 - DNA, 577 bp, Homo sapiens
actcaccaaggccgaactctctacagcyaccaatatgtccagtctaccagcagcagagaccaacactgagtccccagtatgacaccatctcccagagtgatcagccagccacttagtgacaggttgattacctacgaccttttccaccatggaacgggcagtatttgttctaagtggaatacacactttgcatatggatttgccctccctgagtacagtgcttctgctgaaactaccacctgtgggtttacggaacgccttctccactgtcatggtatccacacagcatttcttctggttaaggaactcacatcacagcaaaagaaatgccgcgatggcccaatgttcatggaattcactggccttccaggctcccactgtcctgaggcagctggcttgacagatggtggaataatggcctttggaggactcagtgacagtgcagctcggtggcagtgcctttcaaggctggggcaaggctctcagaaggctggatatgctcggaatcagtgtccaatacatggtgctattcctcccatagccaagactcctagcatagcactactcaccatcaccc

SEQ ID NO: 843594 - DNA, 542 bp, Homo sapiens
aacccctcaataggccccagtgtgtgttgttcccctccctgtgttcatgtgttgatgtcttttaaagaagctgaaagaaagataggaagtatctatttgtagagtttggtatactaaccttattcttcatttctgctttaattcatttgtttgtgtggattcagacttaacatctagtgtaatttccttactccagtacagatctgtacctattttttttccccctgagatggagtctcgctttgttgcccaggctggagtgcagtggcacgatctgggctcactgtaacccctgtctcctgggttcaagtgattcttctgtctcagcctcccgagttgctaggattacaggcatgcgccaccacacccagctaatttttgtgtttttagtagagatggggtttcatcatgttagctaggctggtcacgaacycctgaccacagatgatctgcccgccttggcctcccgaagtgctgggattacaggcatgagccaccacaacccagctgctctgcttattttttttgctttattctttttt

SEQ ID NO: 843595 - DNA, 587 bp, Homo sapiens
ttgttggacatttgtgtatcttcttttgagaattgtctactcaagtgtttagcctatttttgatgggattgcttgtttttttcttctaatttgtttgagytctctgtagattctggaaattagtcctttttcagatgaatagattgtgaagattttcttccacactgtgggttgtctgttaaccctgctgattatttcttttgctgtgcagaagctttttagtttaattaagtcccatctatttatctttgtttttgttgcatttgcttttgggttcttggtcatgaagtctttgcctaagccaatgtctagaagggcttttctgatgttaccttctaaatgtgtatggtttcaggtctcagatttaagtatttgattcatcttgagttaatttttgtataaggtgagaaatgagaatccagtttcatttttctacatgtggcttgccaattaccccagcatcatttgttgatctgttaagtcctttcctcactttatgtttttgtttgtattgtcaaagatcagttggctacaagtatttggctttgtttatttagattgtctatttgtgctgtttcagacttttt

SEQ ID NO: 843596 - DNA, 479 bp, Homo sapiens
taggatccttttttaattcttgacctttggcagtttgattattaaatgtcttgtggtagtcttccttgggttaaatctccttggtgttctataactttcttgaacttgaatattgatatctttctctaggtatgggatgttctctgttataatccctttcaataaaatgtttacccatatttctttttctacctactttttaaggccagtacatcagatttccccttttatggctatattctaaatcatgtaggcatgctttattatttttttaaattttgcttcctctgagtgtttattcaaataggctgtccttcaagctcactaattctttcttctgtttgatcaattctattattaagagactttgacacattctttagtatgtcatttgcatttttcagctgcagaatttctccttgattctttttaattwttttaatctctttgttaaatttatctgataattttctgatttt

SEQ ID NO: 843597 - DNA, 525 bp, Homo sapiens
agtctcttcctttagtcacaatcactttaggtccacagtgagtactgcctggctaccgttgattttcactcaagacccaaaggctcttcagtcagtttgtggtaaatgttgccaggcctgagactcatgcttcaggaaagtgggctctcctctggctcaggaaatgtccagaaatgccatgcaagaggcaaggcctagaatcagggaccccagagcctacttgatgttctacctgactgtagctgagctggtacctaagctgcaggaccatatctccttacttttccctttcttttttctaaagcatgagtctcttcccatagccaccacagctaagaatgtgctgggtcacatttgaatccagtacacctctgagtctcactaaatgcccaaggtggagtacrgcctgggtatccctgctgattatttagggcctaaaggttttttagtcagcaggtgatgaattgtgccaggattggatccttcacttcaaggcagtaggttcccttgtggcttagggagtat

SEQ ID NO: 843598 - DNA, 611 bp, Homo sapiens
cagccagagggcttagcccaatgcagagtacattaatgtattcttgagaaagggatgcttaaggtgacacctaaaggataaaaagaagctagctagatgaagaagggtcagagagagcatttcaggtagtatgaagaatgtgtgtagagatctctactccagagggaatatgatatgttttaggaattaaaaggtgtcagatttggctttagtgtagattgtgatgtaaaaaaatggcaagagaatgtctattatcaaaaagacaaacaataacacatgttagcaagggtggagaaaagggaactcttgtatactgttagtggcaatgtagcttggtacagccactatagaaaacagtatagaggttctttagaaaatgaaataataaaacaatcatcagacccagcaatcccttttctgggtatataaccaaaataaattaaattagtaccttgtagagatatctgcattctcatattatattgcagcattatttgctatagttaagatatggaaactacataaatgtacttcaatggataagtaggtaaagaaattatgttttatatatatatatatatatraatattattcagccttaaaaaaggaga

SEQ ID NO: 843599 - DNA, 509 bp, Homo sapiens
gagaggttttcaggggttcttactctgccatgtcttctgacgtcactcctatctattcatttttaatttaatatgtttgtggtcatagaaattactttttatgctttcaatctttctaaaattgtggagaattaatttatagcttatcatatgatctattttggtgaacatactatagatatttaaaaaattgagcattttgcacttggatctaatgctctattgatgccaattagatcatgtttgttaatattgttttgtttatttttattttattttatgttgcagggtacatgtacaggatgtgcaggtttgttacctaggtaaatgtgtaccgtggtggtttgctgtacctatcaacccatcacctaggtattaaccctcacatgcattagttatatatcctgatgctctcccccmctctgcccccacgacaggctccagtctgtgttggtcccctccctgtgtccatgtgttctcattgttcagctcctacttaaaagtgagaa

SEQ ID NO: 843600 - DNA, 561 bp, Homo sapiens
gacagaccctatgaactatgtctcataacatctgaatcctattgctacagatttcttgtatgaccttgagcaatttgttaccgatttttgtcatttatttggtcatctatgaataaaaacctaatgtggggtggtgaaaagacctgtggaccaggtaggcaacaggaaacaatatttttcaagggactattatgagcagggactgttatgagatgcattgcaaatgttaccacatttaggtcttcatcttcactattttatagataaggaaattgaggctcagagaatgaaataattggcaggcctagtcattggcagagatgggataaaaagtcaagtctctctgactctaaaaactctttttccttcatccacgccactgcccattctgagaattaggagacttaagttccaactctacttccgccactaatagtgcctcttctstgggactcagtttccccacctgttaaaaagaagaggttaaaccataaccaagggcactttccaggtttattagtggattgatgatcatgactcatggagaggatatgtgaacag

SEQ ID NO: 843601 - DNA, 543 bp, Homo sapiens
tctcggtgcctcctcagcctcggtgtccactctggmtgcacttgagcccttcagcccactgctgcactatgggagcccctctctgggctggccgaggccggagccggctccctctgcttgcggggaggtgtggaggtagaggcgctggcgggaatcgaggctgtgcgcggtgctcgcaggccagtgccagttccaggtgggcgtgcctcggcaagccccgcactcagagcagctgccagccccaggcaatgaggggcttagcacctgggccagcagctgtggagggtgccccagtcccccagcactgccggcccgccacgccgtgctggaattctcaccgagcctcactcgcctccccccggggcagggctcgggacctgcagcctgccatgcctgggcccccacccccggtgggctcccctgcagcctccccaatgggcaccaccccctgctgcatggcgcctggtcctatccaccgcccaagggctgagatgtgtgggcgcatggctcaggactgtcaggcagctccccggggacaggccc

SEQ ID NO: 843602 - DNA, 463 bp, Homo sapiens
cttctccctctcaacacttgtcacaattgtcgtgcaacatttaactgtgaaatttgtttcacttctcttcattctactgaaattttagtttcaaaattataaaatccacgtgtatgcatactctgtactgctrtatgttctttgcatacagaaggacctaattggatatttattcagtgagatcgttttattaacgaagagaaaaaagtctccatgaaattttggatgctatgtcatgcatggagttacaattgcctaaaaccattgggtttctttgtaacctaaactctcatgcctaattatgtggacctaagtacagaactataaatgtatttattgcttttaaacaccatcctattagattgagcccactcattggatttaaattatctcccactttcatatcatctgataaggtgataatcaagtcactgacaaaagggctgattaggacaaaactaga

SEQ ID NO: 843603 - DNA, 620 bp, Homo sapiens
gaagccagggccaatctttgcatttctgttactcaccatagtttggaataggaattcataaacttcacaaattaactaactgctgagaagcatgagccagattcaccttccacatcccaaaggtttgccaacaaattcattcctcctcttttctttattaatatacataaacatagttatacagcagcaacttatctttctcttcttggtaacacatatgcaaaagtacatagccaagaaatagtgtgatttaaaagtaatctttcaggaaaattttgcttaagaaagattagacgataaaaaaaaattactgaaaatcaacataaaattccaaataaaaactaaaaacaggccagacgcagtggctcacacctgtaatcccagcactttgggaggctgaggcaggcagatcacttgagatcaggaggtcgagatcagcctggccaacatggtgaaaccctgtctctactaaaaatataaaaattagctgggtatggcggtgcatgcctgtaatcccagctaytcgggaggctgaggcaggagaatcacttgaacctggaaagtggaggttggagtgagtcaagatcatgccattgcactccagcctgggcaacagaaaa

SEQ ID NO: 843604 - DNA, 605 bp, Homo sapiens
ttggttcccattctatgcttgttcttcctggctttccttctattttgctgctgctgtttttaaagagatttgcattgattttgtgatgtggctggtgggtgccaggaggaacttaactggaaaggaactgtgaacaatttgggaatgtggggactgtaaagccaggggtaaaaatgtaaaaatatttagtgtacaacacagtgtgggcaacaaccaatcaccatgtgaacccttgactacataccgactttctgctctatgccagaattaaccctttagtaggtgactgatcttgggggttctagagggagaggctgggattactgggataacctgaggattatatgagtggctcagagccatggctagttaccaaatggtgcttaagtattacatattttaacaagatgtgaatacttgctgaatctcagccctgtgtataacctagataaaactttgtcagaatttgcttctttcttccaggtgcagtggtatgtkcttatgtctcaggatccttggagtgtcacttcaccagctgggaacatctgtggccaatggcacctttgcctgagttttgcttgggcccactggacttgttccaccca

SEQ ID NO: 843605 - DNA, 637 bp, Homo sapiens
ctgacatttcagattctgcagctttgcaaagcagccagagagcctttgctgcccttrggggagtgcagaaggccatgaaacatcttcacttttgcaatataatttttcttcaagaactcaagccagagttgcatgagtttccatccagctttgggagggaaaaacaaaaacgaattaattaagcttaccagacagccttcaaaaagtgtaatgtcagccctttattatgatataatatcagccaacacttggttcactttccccgggagatactggattggagctgctgattatggaagaagcacttggctgtcccagcccacacactcaagtgatttaaatctagtctcaggagagacttgacatcataaagggaaagtgtattcaggttttctaatctatgaaaacattacctcaatactgctaaactcaagccttaccaccatttatttctttccttctatcacaaaacttcacggaagaggaatcaatgcttcactacttcactacctaacatttccttaactctgagatccactgccatagaaaacgtgaatgatgctcttcttttaaaggtcactaaggacctcacattcttcaatccaatatgtatttttcagttgccatggactttacc

SEQ ID NO: 843606 - DNA, 627 bp, Homo sapiens
aaaatttgctagtgtttctatacactaaaaataaacgatctgaaaaacaatgaaaaaacccattcaaaatagcaaaaaaataaaaataaaaacaatacttaggaataaatttaaccaagaagttgaaaaayctatacatttaaaattataaagcattgataaaagaaattgaaatatactttttattattgactataggccccctgttttgctataaaaaatacacaaatacatggaaagatctcacttatttattaaataaaaagtttaatattgttaaaatgtccataccatccaaagcaacctacatattcaatgcaatccccatcaaagtccacacgacattgttcacagaaattgaaaaaaaaatctaaaattcatatatatccagaaaagactccaaatatctgaagtaattttgaccataaagaacaaagccctaggcatctcattgcctggactgaaatctattacaaaataatagtaatctaaatagggtggtactggcattaaaaaaaaaaggaacagaatagagagcccagaaataaatccatgctcttaaggtcaattgagtttcaacaaagaggccagaaacacacagtgggaaaagaacagtctcttgaacaa

SEQ ID NO: 843607 - DNA, 465 bp, Homo sapiens
tctagtgcctactctggaaacactcatttgttaggtacwccttgctctctgaaatccaccctccaccttgttgataaatacaatgtttgtttatcttcaaggttcatctgtcatgtcttctaattcttttggtgaggatatcatgatctctatttcctgcctcagttccatttgccttggtgagtgtggggaggttgataagccacatttactcaaaatgcatatcttctcctgatgggcttctggtgattttaactacactcagatccgaagctcttctctcagagtgaaaatgttcagcttcactgtggctccaggggactggacatgatttggagtttctcattggctccagggttgtatgtgcactgaaaacaactggcccagaattttgtattatgtatatatcaccaaactccataacctgcacacttatgggaagatgtgtgatagaaggaaaagact

SEQ ID NO: 843608 - DNA, 434 bp, Homo sapiens
gtatgtagtttttcaaatcgtactgtaattcagattttcaacactttyggttattagctttttctctagaattttcttgatcaatttcttaaccgtttacagttacttctacttcttactgaagttgactactgctgtttttctcacagtacctcttggtcagtttatatggggaacttcaaattcagttcagctgcaataggatctgtatttttttctatatatattctgagagaagggtcatgctttaggaaaaagttgatgaaaatgagaaaagagatggtttattcatgtctatgcagtatactattaacagttctttgaaaaagtagcaaagaaaggtaatgttaatctcatcttaaatgaaggtaaaactcttgcacagctaagagaaaatctatatactaaaagagtttggaaaactacttcagagg

SEQ ID NO: 843609 - DNA, 434 bp, Homo sapiens
gtatgtagtttttcaaatcgtactgtaattcagattttcaacactttcggttattagctttttctctagaattttcttgatcaatttcttaaccrtttacagttacttctacttcttactgaagttgactactgctgtttttctcacagtacctcttggtcagtttatatggggaacttcaaattcagttcagctgcaataggatctgtatttttttctatatatattctgagagaagggtcatgctttaggaaaaagttgatgaaaatgagaaaagagatggtttattcatgtctatgcagtatactattaacagttctttgaaaaagtagcaaagaaaggtaatgttaatctcatcttaaatgaaggtaaaactcttgcacagctaagagaaaatctatatactaaaagagtttggaaaactacttcagagg

SEQ ID NO: 843610 - DNA, 434 bp, Homo sapiens
gtatgtagtttttcaaatcgtactgtaattcagattttcaacactttcggttattagctttttctctagaattttcttgatcaatttcttaaccgtttacagttacttctacttcttactgaagttgactactgctgtttttctcacagtacctcttggtcagtttatatggggaacttcaaattcagttcagctgcaataggatctgtatttttttctatatatattctgagagaagggtcatgctttaggaaaaagttgatgaaaatgagaaaagagatggtttattcatgtctatgcagtatactattaacagttctttgaaaaagtagcaaagaaaggtaatgttaatctcatcttaaatgaaggtraaactcttgcacagctaagagaaaatctatatactaaaagagtttggaaaactacttcagagg

SEQ ID NO: 843611 - DNA, 599 bp, Homo sapiens
gccacaccatattgagtccctctcatgtgccaagcaatgaggtttcaccgtcagagcagccccggcagcagatcagaggagcagtctgtctacatctcaggtctgcctgaatycaaagctcaagatcttctcctgccccatgctgatgattcagtggtcaccatgttagtatcatgatttggagcgctttccccacatgtcatcttattagattcctattcactgaacactttgaggacctacagtatgccagacactgtatggaatccaggatgcaacactgaataatacataatccttggcctcagagtgctttgggtctggtgtaggagagagatcaatgttttaaaaaattaaaatacaatatgaagctcaccatgatggggataggcagaggtgctatggagacgatcaggaaaagatttatttgcccctgaaggaactgaggcttagaaaatttccctgacttgtctaaggtcccacagctaatacatggcacagctaccttcagcatctgccaactacctacattctactgggtgttgattttcccatctgtaacgtggacatactgcctcacaggctttttgaaatgcatg

SEQ ID NO: 843612 - DNA, 581 bp, Homo sapiens
actacctgttgctctattctactgtggttgagctagcacccaagccacaaaatgaagtccttcccacttttccctaccytttccacaagcagaaaattctctcccatgaccactattgactgctccaggcccatggcaagtaatgtgtagctatcacagatgttcattcaatgcccaagggctcttcagtcagcttgtggcgaatgctttcatgcctagggctctcccttcagggcagtgggcacccctctgacctaaggcaggtgcagaaatgccatccaagagccatggcctggaatcagggaccccacatgccgacttggtgccctatcccactgttgccaagctggtacctaaactgcaagaggaagtcccctttattcttccttctccttttctcaagtaaaaggagtccctctccatagccaccacagctaggaatatgctgggtcacacctaaagccagcacatctctgagtctcacccaaggcctgcggcaagtactgccttgctactactgttgattattcagggcccaagagtgatgaatcttggtagcaggtgatgaatcttgccaagat

SEQ ID NO: 843613 - DNA, 324 bp, Homo sapiens
ccatgtgtcagacactgctatgagtgtgggttccttgcggtctctacaaaccccgtgtgagaatgagtgccatgtgggagggagaagccrtgtgatctgtacatatcagctggggtggggaagggaggtccgtgatggctaatggggtgtgctggggaaggaggtgtgtccaggtcccagctctgcctaacagctccctccctcatgctccagaatgacttgagcctgcattttccctttctctgatcctactccactcagcaaatgacctcacacctattgtagagaaaaaacagcagccatcaggtggggactcctggagcc

SEQ ID NO: 843614 - DNA, 324 bp, Homo sapiens
ccatgtgtcagacactgctatgagtgtgggttccttgcggtctctacaaaccccgtgtgagaatgagtgccatgtgggagggagaagccgtgtgatctgtacatatcagctggggtggggaagggaggtccgtgatggctaatggggtgtgctggggaaggaggtgtgtccaggtcccagctctgcctaacagctccctccctcatgctccagaatgacttgagcctgcattttccctttctctgatsctactccactcagcaaatgacctcacacctattgtagagaaaaaacagcagccatcaggtggggactcctggagcc

SEQ ID NO: 843615 - DNA, 276 bp, Homo sapiens
cccgcagtccagtggagaggattcaaacttccactgagagcctactgaaaatataataaccatttctacaaaggcatatgtttcttggattgatctggagagcaagtcaataactcagagaaaaggcacatggtaagagaagacaaggggacaaaatgattgtctgaaatttatagataatacctgacaactccaraatggttgagtgcattttcacaatgctggtcaggccagatcttcagccaagtcataattctggaaccgtccatcttggtg

SEQ ID NO: 843616 - DNA, 489 bp, Homo sapiens
ccctttttaagtccctctccctagcctaaagttgggaatggtcttttaaaggcatgagcctggctattccccaacttctagcatttgaataaagttgctttcctttcaccacacctcgcttctygtgcttttgacctctgagcggcgagcagcaggacttgagctggttacactgcatctgaagcaccctgggctgccctcatcactactgttgtaactcatgttctgcaggaactgagagcctgagcaaatgaacctgaaattcagttttttcttcctttttggtcctccttacccccttctattatatgaatgatatagtcatagaatttgcctataaaatccagaaaacttagttccagcctatcaaagtcacccagttatgggattaagatgataatgatggagcaactttgtaaagggctttgaagatcagactgagactcagatattcctggagagtggaggctggtaaccccctttaccttg

SEQ ID NO: 843617 - DNA, 628 bp, Homo sapiens
gcttgagccactgcacccagtgaaaacactttttctgcaactgaattctaggagaaatttactacaagaaaccttatgtagggacactggttaagattacagtgttctcagtctcagttccgaaaatatagagaaacattatttagatggatattcctgatatcacccctacataaaagcctaggtaatgatattccattttaaattcagtgaagactttccagggggagtaaagataatatagtttggatacgttcttttctgataatatagtttgaatacctttttttctgattatctaatgacccaatgttgataaatatattgcatatatgctgatcctctgagctgtcacacctgtggcagacatgactagtcaatcacgacagaatttcccactgagcccagacgtcatagatctcaacatagcatccaccaccaatgattgaaattggcgtatatgatgaaaagataaaacccctgccatcggccgggcgagggggctcacaccwgtaatcccagtactttgggaggccgaggcgggcggatcacgaggtcaggagatcgagaccatcctggctaacaccgtctctactaaaaatacaaaaaatgagccgggcatggtggt

SEQ ID NO: 843618 - DNA, 565 bp, Homo sapiens
ttgactacatcatttaaattcttttcatgaaagatttctctagcatgtgatgctatttgatagtattttatggacagaacttctttgttttctttttcttttttttttttgagatggagtctygctctgtcgcccaggctggagtggagtggcgcgatcttggctcactgcaacttccgcctcccgggttcacgccattctcctgcctcagcctcccgagtagctgggactacaggcacccgccaacatgcccggctaatttttaatatttttagtagagatggggtttcaccacgttagccaggatggtcttgatttcctgaccttgtgatacgcctgccttggcctcccaaagtgctgggattacaggtgtgaaccaccgtgctcagccagaacttctttcaaaattggagtcaatcctctcacattctgccactgctttatcaactaagtttacgtaatattttaaatcctttattgtgatttcaacaatgttcacagcatcttcatcaggaatagataccatcttaagaagctactttgctcaactataagaagcaactca

SEQ ID NO: 843619 - DNA, 593 bp, Homo sapiens
taaatttttttctcaactgttaccttactaattcagtgtttctataaaaattttagtttatgagatgacattatcaaagtgatctaataaataagtatgccaattagactggtgagctatagattcttcattttcactttaacattaaaaatataattttcagtatggcttggtgctatggactgaatatttgtatcctccccaaattcctatgttgaaatcataccccaaggtgcagttattaggaggtgaggcctttgggaggtgattaggtcttgaaggcagagcagggtaacattagtggccttgtaagagagaccacagagagctagccagcttcttctaccatgtaaggacacagcaacagggcaccttctatgaggaacaggccctcaccagacactgaatctaccagcaccctgatcttggacttcccagcctccagaagtataagaaaataaatgtctactgtttacaagccacattgtttacagtattttgttacagcagcccaatggactaagtyacttggattcagagttctctcccaagtcaaacactgggaagggcttggagaaaatggtggccatgtg

SEQ ID NO: 843620 - DNA, 339 bp, Homo sapiens
ggtgagctaagtgcagctataaagttatgtacaacttatcaggagaaccgttatctaaggcatccagttcacagaagggaggagggaacaccatgtaggcaaggggaatttcactattattgccatatatccaaggccaagagtggtgagagaatgggctggagatgtaacaaaggtgctctgtgacagagtttgaacttcagtttgctggtgaggtgtggggaagtctatgaacgggattcgaacagttgagtggcatgattatatttgtgttctagaagaatccctctggtggctctgtgcaatgtggttttcrgggagtgaggactggagacagag

SEQ ID NO: 843621 - DNA, 572 bp, Homo sapiens
tcatctagtatcaaaaggagcatgcatcaagcacrcagctcataatagctggctcaaccacacctccacaagaaacagcagtgataaaaacgaaacagtaaatgaaagtttgactaagcgatactaagcctctagggttggtaaatttcatgctagccaccgtggtcatacaatttacccaagcgaataaaacctggttaaacgtgtgtttaagataaccctcataatatagttaaactaagtcgtaaaaagctgcagttaaaataaaaataaactatgaaagtgactttattgccctgaggacatgatagctaaggcccaaactgggatgagataccccactatgcttagctataaactcaaataatttaacaaacaaaattattcaccagagtatgacaagcaatagcttaaaactcaaaggacatggcggtgctttacatccctctagaggaccctgttctataattgataaaccctgatattcccttccatctcttgccacataccctatataccatcatcttcagctaaaaaggtcttaaagtaagcacaagtattaaaatgttaga

SEQ ID NO: 843622 - DNA, 578 bp, Homo sapiens
taatgccttttttgtcctttttgatctttgctcagttaaagyctgttttgtctggaactaggcttgtgaccctcgctattttctgttttccatttgcttggtagatttttgtccatccctttaatttgagcctatgtgtgtcattgcatgtgagatgggtctctcgaagaaagcatgccaatgtgtcttggttctttatgcagcttgccactctgtgtcttttaattgtgacgtttagctcatttacatttaaggttagtattaacatgtgtggatttgattctgtcatctgttagctggttattttgcaggcttctttatgtggttgctttttattgtcactggtctgtgtacttcagcgtgtttttgcagtggctagtaatggcctttctttccatatttagtgcttcctttaggtgctcttgtaaggtatgtctggtggtaatgaatttctttagcatttgctggtctgaaaaaaatcctacttctccttcacttattaagcttagtttggccaaatatgaaattctgggttggaatttttttaggaatattgaatattggtccccagtctcttc

SEQ ID NO: 843623 - DNA, 495 bp, Homo sapiens
aaagcttatattgatataacctcaagcttactgattcattccttagccaagtgcagtctactaatgagcccattaaaaagcattctttatttccattacattgttttcagtctctaacatttattttttattccttcttagaatttctacttctgtgctttacattacccacttgttcttgcaagttgtctattttcagttagaattcttagtattaatcatagttattttaagttgatggtctgataaatctagcatttttgtcatatctgattctggttctgatttttgctttgtctcttcttgcactttttgccttttagtgtgtgttgcgatttttcttataagctggccatgatgcagaatacaacatcaacatacaaaaatcagtagcattttatatataccaacagtgarcaatctaaaaaaaaaagaaaaaagaagaaagcaatcccattaataatagctaccatatatataaaatgtcttttatat

SEQ ID NO: 843624 - DNA, 583 bp, Homo sapiens
actctggaaaaaagtttggcagttccttataaagttaaatatccccttactatatgatccagaaatcctagttctaggtatccaccaaagagaaatgtgaatgatgttcacacaaaagcttctacacagcacctgtaatcccagcacactgggaggccacagtgggtggatcacttgaggtcaggagtttgagaccagcctggctaacatggcaaaacctatctctgctaaaaatacaaaaattagcttaatgtggtggtgggcacctgtaatcccagctactcgggaggctgatgtatgagagtcatttgaaccttgggggcagaggttgcagttagccaagattgtgccactaaactccagcctaagtgacagagcgagactctgtctcaatcaatcaatgcctctatacagatagtcatagtaattttattaacaagagctaataactggataaaatmtaaattccctttaacagtgaaaagttgtacaaaatgtggtacattcataccatggaatactactcagcaataacaaatagtaaactattgacacatacaacaacttagatgaatctccagag

SEQ ID NO: 843625 - DNA, 720 bp, Homo sapiens
ccttataatcaaccatttctccaaggatccctgtgtccttttattggagaatgatactagaaactaagatacgagcacargatgtgctttttgctactatggtgtcattccttccataataaggccatatgtgagaagcccacagctaatattacacttgagtaaaaaattgaaagtctttcttctgaaaattgaagcaagataagggtgccaactctcaccacttctattcaacatagtgctggaagacttacagaaattttgcaagaaaaagaataacaattttccatagaggaaagaaaaagaaataaaattggatatattggaggcagagcaagatagcagagtagaaagctccatgtgttgtcacctttgcaaagacaccaatttatcaactatctacacagaaaaaaaaaaccttcataaaaaaacaaaaaatcaggtgagcattcacagtacctgattttaacttcatatctctgaaagaggcactgaaaagatggaaaaaacagtcctgcatcaccaaaatcctcccccaccccaagcagcagcactacagtgctgagaacatttctggatgctgggaaaggcagaacacagcaattgtgaggcattgaactcagtactgttctgttagggcagaaacaaaaaaaacaccaaactcagctgatgtccacccacagagggagcatttaaatcagccctacatacagggtaatc

SEQ ID NO: 843626 - DNA, 581 bp, Homo sapiens
tgtgtccttttattggagaatgatactagaaactaagatacgagcacaggatgtgctttttgctrctatggtgtcattccttccataataaggccatatgtgagaagcccacagctaatattacacttgagtaaaaaattgaaagtctttcttctgaaaattgaagcaagataagggtgccaactctcaccacttctattcaacatagtgctggaagacttacagaaattttgcaagaaaaagaataacaattttccatagaggaaagaaaaagaaataaaattggatatattggaggcagagcaagatagcagagtagaaagctccatgtgttgtcacctttgcaaagacaccaatttatcaactatctacacagaaaaaaaaaaccttcataaaaaaacaaaaaatcaggtgagcattcacagtacctgattttaacttcatatctctgaaagaggcactgaaaagatggaaaaaacagtcctgcatcaccaaaatcctcccccaccccaagcagcagcactacagtgctgagaacatttctggatgctgggaaaggcagaacacagcaattgtgaggc

SEQ ID NO: 843627 - DNA, 596 bp, Homo sapiens
ccatcaattactttttctttttctttttttttttttttttgagacggagtctcgttctgtcacccaggctggagtgcagtggcrcaatctcggctcactgaaagctccgcctcccgggttcatgccattctcttgcctcagcctcctgagtagctgggactacaggtgcccaccaccacacccggctaattttttgtatttttagtagagacgtggtttcaccgtgttagccaggatggtctggatctcctgacctcgtgatctgcccgcctcggcctcccaaagtgctgggattacaggcgtgagccaccgggcccggcccaattactttttctaaccaagacaaaatcctgattcaagtcaccacataacaatgtaattgctggtaacacatgcagtgtatggatgttcataaactcaagacccaagtcattacctgccactgtggagtcatcaattctcctgctctgggcgaaaggagactctgtagcagccgaggccatcagctggccaccaatggcactgctctctaagccgtcaatatctgtcaaggaaaaagaaagaagttttccctaaataaaacactccagtcaaaa

SEQ ID NO: 843628 - DNA, 428 bp, Homo sapiens
tgattcttctcactttattcttcttgttcaaatttgtattagctattctagttcctttgcttttctatatatgctttagaataatcttatctgtaactacaaaaacttaactaggatattgagcgatatcgtatatcaatttgggaagaatggacgtctttacaatgttgagtcttccaatcaatgaacatggtttgtctctccatttataaaactatttgatttttttaaatcaatattgtataaattttagcaaacaaatcctgtaaatgttgcattaaaataacacataagtattcctctttttggtttgaacaatygaaaataatactctattttaaattttagtgttcatgtgtttactattagtatataaatgtacacaatttattttatttaaaaaattgtaagagtattctgaaaccttg

SEQ ID NO: 843629 - DNA, 548 bp, Homo sapiens
ctatccagataatccaggatcatctcctcatgtcagaatttgttctgttttcactctttttttttctatagrccatcttcaagctcagtgtttcatttctaggccattgtcaagtctacagataagtccattgaagacattcctcatttctgtaacagtgttttttatttctagcatttccttttgattctgagtttccatctcctgctgaaatgacctatctggtcttactagttttccaaatttttgctttcaatacatcaatcatagctattttaaactttttgtcagttacaatacgtgtgtcatgtctgtgtctggttgtgatgctttcatgtctcttgggagtgtattgcttttcttgccatttcttaagcttagtgtttttctttaagccaaacatcttgtagaggacagtagaaactgaagtaagtaatatttacgcctggaaatgtgcatgcctttcatttcggtaggcttctaattcaggggttccagttaatctaattaggtattgggctgggactgaagtttgttgttgctatggt

SEQ ID NO: 843630 - DNA, 667 bp, Homo sapiens
ttcttgacttatttttcagatttttygccattggcatatagaaatgcctctgatttttgtctgttgattttgtgtcctgcaactttactgaacttgtcagctcttatagttttttgattgagtcattaggtttttccaaatataaaattatattaactgcaaatgaggctaatttgacttcttcctttccaatttggaggtcctttatttctttctgttatttaattgctctagctagggcttccagtattatgttgaataacagtggtgaaagcgggcatcctagttgtgttacagatcttagaggagaagctcttagtttttccccattttcagtatgatgctagctgttggtctgtcatataatagctcttattgtgttgaagtatgttccttctgtctctagttttttgtgggtttttatcatgaagggatgttgaattttatcaaatgcctattcagcatcaattgaaataataaggcttttatcctttattctgttgatatgttacatcacattgatttgcacatgttgaaccatccttgcatccccaggatgaatcccacttggtcgtggtgaatgatttttctaatgtattgttgaattcggtttgctgttattttgctgaggatttttgcatcaatattcatcagacatattgcctgt

SEQ ID NO: 843631 - DNA, 629 bp, Homo sapiens
agtgacagaaaatttagtgtgttgttaatgagtgacagaaaattatgtgttgctgacttatattcaaatctattttataggaaaatatgttttctttaagtcagggatggcaaaaataaagttgccaattaataagtacccccagttaaactggttataatgaatatgtgtgtgtcagatttagtgtagaagggaaaataaagaatgattaaggtagaaacagttcttgccagggaaaagagataaacgttatgcattttcttacctattaaattagtctgttctcacactgttaatgaagacatacctgagactgggtaatttataacagagggaggtttaattgactcacagttctacatggctggggaggcctcacgatcatggcagaaggcaaggaggagcaagtcatgttttccacggatggcagcaggcaaagaaaaagcttgttcaggaaaactcctgttttttaaaacatcagatctcgtgaggctcattcactatcacaagaacagcacagaaaagacccacccacgtgattcaattacctcccaccaggtccctcctatgacaygggagaattatgagagctacaattcaagatgacatttggatggggacacagcaaa

SEQ ID NO: 843632 - DNA, 583 bp, Homo sapiens
aatgtgctcatgtgctatgatcaagtgggatttatctctgggatgcaagagtgtttcaacacatgcagatcaataaatgtgatacatcacattaacaaaatcaagaacaaaaaccatatgattattttaataaatgctaaaaaaattgataacatttaacatcactttacgataaaaactctcatcaaaatgggtatagaataaacatacctcaaaataataaaggtcatatataaaaaacccacagctgatgtcatattaaataggaaaaaaatgaaggcctttctctgaagactgcaatatgataaggtttcccacttttaccacttttatttcacataatattgatagccctggccaaagcaattgggcaagagaaagatataaatgactttcattttggaaaggaagaagtcaaattagccttatttgcagacaacatgacttgagacttaaaaaaacstaaagacgcaatcaaaaaatgttataacttaaatgaaattagtaaagttgcaggatacaaaataaacatgcacaaatcagtagtgtttatatgagacaacagcaaacaatctgaaaaaga

SEQ ID NO: 843633 - DNA, 615 bp, Homo sapiens
ggaggtggagattggagtgagccaagatcatgccactgcactgcagcctggacgacagagcgagactccatcacaaatcaatcaatcaatcaatcaagtgaacatgcctaaagaaaagattaaattacctttttattgtcactgtagaaaagaatcttatgaaactgttatgagagaatctgcagccaaaaatggagtaaaacaggtgtaatagaggtgggtcaggccggtgatgatgatggtgatgatggtgatgatggtgatgatgaggatgaggatgatttatcacttattttgattttcaggtgcttgtggcatttgccacctttttaacatttccaacttaccatgattccttttatcactttaaataaatattcatgtccatacttaattttatatgtgtagtttgttttttcttaaaagaagtccttaacattaaatcagcctggatgagccccttgctggccagagaggtgctaggacagaggatgggaggtcagctgcaaactgagtgtcctcctgtccctggaggctcagcctgagttctcccccttgtcctcycttcctccctccactggccacttcaggatccagctggaagagccaaatctt

SEQ ID NO: 843634 - DNA, 650 bp, Homo sapiens
ctggaactctgatcttccttttttcaatgaaggcccaaatcattactctttttttaccctttctcaaaggaccttttcctccaggacaatgagtrtagcctctttaaagaacttagcctttttcaaaagaaagggaattatcttgcaggaagcttctgcttttggctctgtaacttcttaggcatcccattatcacagggcataaaattgtctggctacttgcttgaaagggtagaaagggaaaaatacagggaggacaaagccatgataatatttcagtatggctcctcccataaacaaatatatgggtatggaaagctaaggtaataagctgctttcaattagagttatggaacaagagaaacattttctatgtggttgtagagtctgtgactccgttactgagagcaagtgctcaggtcacatgacatactttagcaacaggatcccttaaccgggtcagttgctcctgtgaggcctttgggtgactgagggcaagaccacccagccatagcaattctaatgcgatattatttatgtcacatggaaaattgatggttctgggccctggggcaagattccaccacacttttgagttatggattgaggtcattttatgatcccaccaatgatattggtcaatagaaata

SEQ ID NO: 843635 - DNA, 614 bp, Homo sapiens
aggtgcagcgggtgaatcagagccactgattaaaaataaaggcaacataaagtactgggtaactttgaaaacaaaacagcacagacttctctgactttagttggtcataagaaattttctccagctcttcatttttaaaaaagagaaataatttaaagagcaggtttgaatgaacaataactcagttggtatctcaataaggccactttactagcgggcaatctgggcaaactagtctcttaagtttgaccttagtttccttatctgtaaaatggggtaataacacatacagttgttagttataaagtgtgacactgtttacttatatacttgtcccagtacacacacacacacacacacacacacacacacacacaaatgttaaaatatgaaacacttggtaagcaaaagttaaccctggaagcggatttggcacaactatgggaaatggtggccttgcctcattgagaacagagattttctaactgtgaagcttctgggctctgcagtggtttgaattttgggaagtgttctgtatgtcctttaactatctggytgtcactgaacgctcccagcccaatcatccccagagactattgtaattagtaactgag

SEQ ID NO: 843636 - DNA, 577 bp, Homo sapiens
atttgtgaaatttgtcacataaagtaacataaatgattacatgtgaacacatttcagaaccagcataaaacagaccatgttctctgaccacgatacaattgatagtaatcaataacaaagagataatgtaaaagaacctacatgtttgaaaattcaaaattcatttgtaagtaactcatgagtcaatatgtattacagtggaattttaaaaatactaattaaagaacaatagaaaaggtttaatatcaaaactttccctctctttttctctcagttatgtatcaaaaatatatttaataaagggcttatatctagactacagaaataactcttacgactcaataataagacaaaaaatgaggaaaacacatattgataagatttatgaatggctagtgatcacataagttgttgaacatcactagactttggggaaatgtaaattaaaactacagtgagatgactttamatattattgagaataattaaaaaagaccgaaaataccaagtgttggtgaaaatatggagcaattggaaatctcaaacactgttttccaaagtagttgtaaaattgtat

SEQ ID NO: 843637 - DNA, 627 bp, Homo sapiens
gggagtcccttaatccccagtattagaatgcccccagaatcacactttgcagtcctacaataaggagagttttcttctcttcaaaagtgtcactttctgacatttcctgaatctgggcgtctgctttggttgccatctgaccttttggctggtagcctattctcctctgtccatcatcattataagcgtcaactattattttgctgataaactcagaagtgccatttactagattattttggtcaataaaatgccagatagactagatttactatatcttttaaagtagtcaataaaataaaatcctctaagcgagatcagaaaatggcttaccgaagaaacagacctatgaaagtagacgagggacatgtcattcttacaataacttggggcctgtttatcattccactttctctattccagcaaacaaagaaatatcataagtaccatcccccactttttaaaaaagttccttattccagaaactttgttccagaaaagatgtagtaaaaatggggtgttaacaatatctgtgtcctaaagtgtttcgtttttkattaaaacgtatcacacttgagaaatgattgaacaactggttggaagtcacaaaaatattaactgtaatga

SEQ ID NO: 843638 - DNA, 458 bp, Homo sapiens
tcaaatagtaaaggctgttctggctttttatcttcttagctcatcttaaataagyagtacacttggatgcagtgcgtctgaagtgctaatcagttgtaacaatagcacaaatcgaacttaggatttgtttcttctcttctgtgtttcgatttttgatcaattctttaattttggaagcctataatacagttttctattcttggagataaaaattaaatggatcactgatattttagtcattctgcttctcatctaaatatttccatattctgtattaggagaaaattaccctcccagcaccagcccccctctcaaacccccaacccaaaaccaagcattttggaatgagtctcctttagtttcagagtgtggattgtataacccatatactcttcgatgtacttgtttggtttggtattaatttgactgtgcatgacagcggcaatcttttctttggt

SEQ ID NO: 843639 - DNA, 592 bp, Homo sapiens
tatccagctcttctagcttttctagtttgtgtacatagaggtgttcatggtttttgtctcagatggttatttgtatttctgtgggatcagtggtracaacccctttgttatttctaattgtatttatttgaatcttctcttttttctttattagcatagctagtggtctatcttatttagtttttctttttttttttttcaaaagatcaagaaatccaggagctgtttacaaaaaaaaaaaaaaaaaaaaaaaaaaacagctcctggatttcttgatcttttgaatgctttttcctgtctcagtctcttttagttcagttctaattcttcttgtcttctgctagctttgtgtttcgtttgctcttgcttctctagttcatttatgtgtgacattaggttgctaatttgagatctttctaccttttgagtgtgggcatttatttagtgctataaattttcctgttaacactgcctcagccatgtcccagagattctcgtgtgctgtatctttgttctcattagtttcaaagaacttcttgatttctatgttaatttcattgtttatccaaaagtcgtttaatagcaggttatt

SEQ ID NO: 843640 - DNA, 563 bp, Homo sapiens
tacacttaaaattggagatggtatattaaaattaagatggtatattttatgtgtttttatcaaaataaaaagtcatgccatttcttcattgaatggaatatttatctataaataattgaataaataattcaatcttttattttacttaaatcacatggcgatagtgtgattctgtgggtcagcaatatcacagtggacaaatgaaagcgttatgaatagggcagacaagttataatggataattacatggtcatcaacacagattttgctggtaacccaagaattgtagtgttcttaataacgtatgttttaatagatagaaatagttttttaaaaaaaaaattatttccataagcttttggggaacgggtggtatttggttacataagttctttagtgttgatttgtgagattttggtgcacccatcactcaagtagtatacactgaacccaatttgtagtctttcatccctcaccccctcctgctctttttcctgagtccccaaagtccactgtatcattcttatgyctttgcatcctcatagattagctcccagttatga

SEQ ID NO: 843641 - DNA, 618 bp, Homo sapiens
aaaccacaatgtgataccacctcactcctgcaagaatggccataatcaaaaaataaaaaaataacggatgttggcatggatgtggaaagggaacacttacactgttggtgggaatgtaaactagcacaaccactatggaaacagtgtggagattccttaaagaactaaaagtagatctaccatttgattcagcaatcccactactcagtatctacccagaggaaaagaagtcattatacaaaaaaagatacttgcacacatatgtttatagcagcacaatttgcaattgcaaaaatatgaagccagccccaatgcccatcaattaaggagtggataaagaaaatatgatatatatatatatagactactactcagccataaaaaggaatgaattaatggcattcacagcaacctggatggaattggagaccattagtataagtgaagtaactcagaaatggaaaaccaaacatcgtatgttctcaytcataattgggtgagctctcttgaaagtaagagaaataattcaaatgagcctgagaataaatggaaatttatggtttcatattaataaaaattccaaaagtgaatttgttttaaggtaatactggctggaga

SEQ ID NO: 843642 - DNA, 651 bp, Homo sapiens
atccctgagctagacataaaggttctccacgtccccaccagactcaggggcccagctggcttcatccagtggatcccgcaccagggctgcargtggagctgcctgccagtcccgcgccgtgcgcccacactcttcagcccttgggtggttgatgggactgggcaccgtggagcagggggcggcgctcatcggggaggcttgggccgcacaggagcccacggagggggtgggaggctcaggcatggtgggctgcaggtcccgaggcctgcgccgcgggaaggcagctaaggcccggcgagaaatcgagcgcagcgccggtgggctagcactgctgggggacccagtacaccttccgcagccgctggcccgggtgctaagcccctcattgcccggggccggcaggtgctccgagtgcggggcccaccaagcccacgcccaaccggaactccagctggcccccaagcaccgcgcgcagccccagttcccgctcgcgcttctccctccacacctacccgcaagctgagggagccggctccggccttggccagcccagaaaggggctcccacagtgcagcggcgggctgaagggctcctcaagtgccgccaaagtgggagcccaggcagaggaggcgccgagagcgagcgagggct

SEQ ID NO: 843643 - DNA, 630 bp, Homo sapiens
tttataactctttatctttgcaaaggtagagtctctacttttctttcttccaagaatgctcatcctatcccacctccttcatctggctaacaattgctcatacttcaaagacaactcaagcacgctctgttccaaaaagccttctcaggggttgtttgtaggtttaagatatgcaccaatatgtcaccaaagcatcctattcttatctatattcagacattttcatactgtaaattttactttgaatttgcgtgttttctctctggactgtgagttcttgtgggcagaactttgttttttcagttgaactttctatagttcttaatactctgggcacaaaataggcaatcaatgtgcattttcaaaataaatgattgacgcaattctacaatttatagtgttttagtgatatgggttcacatactgggatctcaattacatgaaaattcaaggggaggacaattctttcatattttgctttattgtgttttgcagatactgaatttttgcaaattgaaggtttgtttcaaccctgcatttagaaagtttatcagcaccattttccaacagcatgtgctcactccatgtctctgtcatatcttgaycattctcacaatatcccaaacttgt

SEQ ID NO: 843644 - DNA, 457 bp, Homo sapiens
cattgattttgtttcttaaaactttactatagctgtttatgagttctaggagacttttggtggaatttttaggattttctaggtatggaataatattttccgtgaggagaaataatttgacttatttcctatttggatacctttcatttctttctcttgcctgattgctctggctatgacttctaatactatgatgagtaggagtagtaagagagatcatccttgtcttgatcgtgttctcaatggtaatgtatccacattttgcccattaagtatgatattggctgtgagtttgtcagagatgactcttattactttgagttatgttcctttgatgtttagtttgttgaaggttctttatcatgaagggatgttgcattttattgaaagytttttcattgtctattgagatgatcatatgggttttgttttcaattctgtttatgtggtgaatcac

SEQ ID NO: 843645 - DNA, 678 bp, Homo sapiens
gctcacttggaaatcttaaaggaacattgaacgtggggagccaaaatgggatgttgtatttctcaactttaccaacttctgaagacatttatttaacaattagctataattaatcttcctaattttggtgacaaaaattgatgagaaaaagtaaagcttctggtcagtctcatggtgactgagctctgctgaaagaaaatggacaaattattaagctagagttaagtctggcagaggaaaattcagcaggcagaacccagaaaatcaaactgaacaggctgaattgtctgatgaatgagtcagaagtgggtctgattccctaacctccatcagaaaggccacagcaagcttgctgctcacagattgctaagccgcattggctgctggcagaggacaaagtcagtgaaagagtgagtcagactccacctgggtttgtgaattttttgcagtttgcaaccccattttctcaataactgggctgctgacatttatttgttcactctattaataaaaaccatgctgctctcagctcagtaacattggacagaacatagttcactgcttccttggaaaaagcaaaatagccagcaatcagaattacccagaactaattggtaaattgtgtggggagagtacaggttatcaagttcaggatccragttcagtcacaaagtgtgc

SEQ ID NO: 843646 - DNA, 586 bp, Homo sapiens
tcccttctccattcttgccctgtagcctrgttaccatgctggaatactgcagtttctgctgacattttcacctggacttgctgacagctataaataaaccaaacctatcaactttctatcaaaattcacaacccatcctaacctctattctggttaacttttcaacagtttcaaattcaaaatctggaaagcattgtccactaagccttcctctgccctctcccctcagatgtactgtacccactccatctccttggtcttttctagtccctctacactaaactaactctggctctccttcttctgagacttctcctgggttttccagtaactccaggctctggtcactacagttcagtggccacatttatgttgagcagatattcaatcaaaaatccccaatgataagcaaagtgcatcagctgaccacacaatatgtgcatcataatgaaacttttatgggtttaagcctttgggtgtacatggaagcacattctacaagaaaaacaacaaaatatagattctatctaaatgaacaggatctgaagctctgtgtactggattgaataatatataccttgtaaaa

SEQ ID NO: 843647 - DNA, 465 bp, Homo sapiens
tatatatgtaatcagtaaaatttcacatccactacctcctttgattttcatgacaaaatggaaacagatggaacaagcattgttagctgtaattttagatgagaaaagtaaggtttagagaagtgaggtgacttccccactgtcaatcagcctgtgaagaaataggacttgaagcaatgttcattctaaccatacctcattatacatctgtacatacacacaaacacacagacacatgtgcacacacaggttcatttcaataaagaataaaaataaaggccaggcgcagtggctcatgcctgtaattccagcactttgggaggctgaggcaggtggatcacgagctcaggagtttgagaccagcatggacaaaatggggaaaccccgtctctaccaaaaatacaaaaattagccaggggtggtggygggcgcctgtagtcccagctactcaggaggatgatgcaa

SEQ ID NO: 843648 - DNA, 587 bp, Homo sapiens
tggaggagtctgtaggtttttcaaggtaaacgatcatatcgtcagcaaacagtgacagtttgacttcctctttaccaatttggatgccctttatttctttaagaactagaagtagaactaccatttgatccagcaatcccactactgggtatctacccagagggaaaaaagtcactattagaaaaagatacttgcacaagcatgtttatagcagcacaattcacaatttatgtttatgtttatagcacaatttatatttattttatagcacaatttatatttatgtttatagcagcacaattcacaattgcaaaattgtggaaccaacccaaatgcccatcaatcaatgagtggataaagaaattgttgtatatatatatatatatatatatacactatggaatattactcagccataaaaaggaatgaattaacaccatttgcagtgacctggatgagactggagactaatattctaagtaaagtaactcaggaatggaaaaccaagcatcatatgttctcactgatacatgggagctaagctatgagaatgcaaaggcrtaagaatgatacagtggactctggga

SEQ ID NO: 843649 - DNA, 604 bp, Homo sapiens
atgaccatcaattcagcttctcacaatgatggactgaccgtgcagtgtcctctgcattgcttaacacaatccctccaattcttcggtgcccaaggtggtggccsgggatacctgggcacctttagaagtgatagtgactcttcatcacatctctctgctctctgaaatagtgcttattgcatcgaccaaaaagaagtgaatgctggagtggcttgtgcatgccaaaaaatctaacttctgagatcttctggtctactccctagcttcccagggtgataagatgagactttgttttctttataacctctacccagtagacaaataggccaaagataagaacaaatcactctcacaaaggaaaaaaaaaaaagcccacacagcaaaataatacatgggaaaaggttaaccctccttagtaattagaaaaatgctaactaaagcaaccttagagtagcattttatagacgctggattggcaaacacaattttacttctaacacccaatgctgtgataaagcaggcacccgtatgtgttgctggaacatcatacactggcctaacctttctgaacaatcaatgtggcagcctataccagtaaccacaa

SEQ ID NO: 843650 - DNA, 365 bp, Homo sapiens
aactaaacaaaaatgagagagtttgtgtatgggagggcaaagattttctgaaaaaagaaaatgattaaaaattaatgaaagttacaaaactttgcatgcatctctgctgcatgaaaatctcttatacttgaagatcaaatgatcaggaaacataggttatctattttcatgtgttccagaggtttctcatgtaggccatatagttttggcatgacaagttctaattcctcttttacaatctaagttcagtgatgcttttattatcataaaagtcaawatcaatttttttccaactgggcatcttgtttctgattatatgaaacattcttttattacttaaaagtatagcagaattttagaaatgt

SEQ ID NO: 843651 - DNA, 284 bp, Homo sapiens
gtggattactgaatattttaatcccgctgttgagacctactgctcagaaaaaaaaattcctttcaaaataatacttttcrttgacaatgtacctggatacccaagatctctgatgatgtataagaagagaaatgcttttttttcttgcctgctagcaacatccattctgtagcccatggatcaaggggtcatttcaaccttgaagtcttatttaagaaatatgttttgtaatgctagagctgccattgctctgatggagctgggcaaagtgaattgaaaatctt

SEQ ID NO: 843652 - DNA, 567 bp, Homo sapiens
acctcagtggcaagaggtttcccatttcttccactgtaagacctgaccgcatggcctctgccatcagggttcataccctgggagaggctcagcctcatacttcatacagaatggcagctatcctttggaygccctgggccatgtcattcgtattccttggcccacaatccttgttgagaatcccccgagagagtccccagagctgcgtgtctcactctgccctgccacccgctgcctggcctcttcccacctccttttgggctcctggcccttcacagctgaggggctgaggaagagcggatgaattattataattctgatgagtcagcctccttccagagtctgtgagtgcagctggggcctgcagcacctgtgggcagctgggctggtgtgcaaggaaggagggctcgtggggtaggttagcgacactgagcaatcctgggccttgttctttgggcctgtaggtgagggctgtgtacttttgtgtgtggctttgtctgttcacggcgggatagagtctggaggaaactcagaggtcctgagtggacgcctgtcccggaggctgag

SEQ ID NO: 843653 - DNA, 640 bp, Homo sapiens
cccatatgcacccatatctccgtagccatctctgctctgtctcttgcyctgacactcttcctcctgcaagctatgtttgtgtccagctgtgagtaccgactttccccaggagcagctagaatctgatcatcttctcagctggaggcaggagaacttctgttccaagttcccacttggaacaggggttctcccccttggactctgaatgctgttctcctcatggagcctctcctggctttgctgtgcagccaatcccagccgtcctcacggagacttgctgccctcacggagggtttgttttgcatgtggttgctgaactttgattcggtgactcatgctgaggtgcaaactttaagtcccccccgcccctttaattgctttcttcctttcctttttttttttcttaaaaaaaaaaaaaccaaaaaaacccaaagcataactacttttgcagctgaacgtgactgtggcgtgcaggaagtggagcattggcatgaagtggctcctagtggctgcttggcgcacgccagctgccctcctctgactccagtggcacctgggggcctggcctcactgacgggagaacattggcgtgaaggctgctggcgactgggccagcattcattgtgaagaccggagggac

SEQ ID NO: 843654 - DNA, 517 bp, Homo sapiens
cacagcacttattttcaaaatatttattgatcatcgtgtgtgtgtcaagcaaaacatcaccaaccaaattctacaaaccactctaatttataaataccttttggacttctgttccacttttcccccaacccccaggttgctttaggccatgtatgccagaacctatcacagtctttctcaatcttgtatctcagaaacatggaacttgctcttttgcctatctggaacatttttcctctcaggctaaatgtcacctcattagagagaccttccttaaacatcttacccaatatggaagttccttttactccctatgctctactattcttaatttttctccattgtacttaccatcatcagatttgtacattgtctattttgttcatgtattccccgctatctagaacaatccctggcacacatgaggtactcaatatttgtgaatgaataaggaaattattttcaccattkaaggagcttatatgtgcctattttaattataccatcatcattttga

SEQ ID NO: 843655 - DNA, 555 bp, Homo sapiens
tggaatcaatgtcagctcagagccagtgtccagtaggccctgaaatgtctgatcatttcccttcccccaatgcacagttaccctgctaaaaggccggaggtctccttggggaaggatgggagagcgattcactgcataaattgtcagtaatatagtgaggtccttcctcaaggggacccggcctccccttcattcaaggggttctgggtctgtaaactggctcaagtctggaaattgattgatgggctgtgattctctgtttctgtaattcaaattagtcttttgtgcattcgacctagaagttttctgcttatataaattaagtaggaatgcagtaggcttcctatcaatttcacttctaggaacaccatgattaattagcaaatgccagagctctacacgagtcagactattctgattgcagtagtctgaaagcaatagtcagactattgctttgcctctgctgtccattacggtagctatgcccaccttgcctttgatggytgagtgctgccacttggcccctgccacctcaggatccaattattcccatta

SEQ ID NO: 843656 - DNA, 548 bp, Homo sapiens
aatgagaaccatgtgtggttatcacctaagaccaagaaaagtagagattcttgtgccagcacatggcaatgagctgtggtgggactgtctgactccaggatcagatcttttaacactgagctgtatgaactgactgcggtgtgctgggtgtatggtgaagaacccagaggcccagaccaagcttgagcgccctccccaacacctctgttcccaagcccctgcccactccatcctgccccaacacaaggctgaggccctgtcttgttgctcagggacccccaggccccactggacccaaaggaatctctggccacccaggagagaagggcgagagagtgagtacccaggtggccccaggtgggggaattctggggagtcctgagggccccaggtcagagtcctcaacagctgacgccattcgtctcctccctcttacacagggactgcgtggggagcctggcccccaaggctctgctgggcagcrggtaagtgttgctgtctgtcccgcattcatccctgcaggatcccttagtcccagattcctcctg

SEQ ID NO: 843657 - DNA, 462 bp, Homo sapiens
tccctccccacaaacctctccacagacaccaaccaccagtcccctagaaaatccccaaactttggggatctcttyattcaggcccccttcccagggaccccactacattcagtgctcaccctcagggtcccccaagtgtcccatcgggatcatttcagtaatctgtaaggaaatactcatgtgggtgaaagcttcttttatggatttttttgaagactgagtctgtgacccttttttgtcttcatttctcatacattcattgaatatttaatgtttgccaggaactgtgcccagtattctctctctctctctctctctctctctgtgaagcccagagagattgagtctctgaatgattctgccctccacccacagcctcctaccttgtccaccactttctgtggcactttctgtgtcatgggtgttgcaatgaaccctgggaggacagagttacagcggatc

SEQ ID NO: 843658 - DNA, 578 bp, Homo sapiens
tcaggcaatctgcctgtctcagcctcccaaagttctaggattacaggcatgagccaccactcccggctgaggattttttttwaaaaaagaaataaattagatattttgaaattgaaaaccaaaaaacttttgaaggattcataagaaactgacaggagctgctgcctaagagaggggagctatttggccaaggaataacaatgaatgggaaactgacttttcactacatccttttgtattttttaaagttttatatttcaactaaaagttgctgtgaatagactaaaattgatactactggcaagtgcaaaaaaaggaaacataaaattggaaaaacaggacacaaaaagaagcaataaaattgtaagagaatatgtgtgttaataaatttggataaaactaaatagatgagtttttaatcaaaaatgtaaaattctaacactggcaaaaataaaatacctaaccagaccaacatcttttaaaaatcaaataactaggccaggcgcggtggctcacaccagtaatcctagcactttgggaggccgagacgggcagattgcctgagctcaggagttcgt

SEQ ID NO: 843659 - DNA, 526 bp, Homo sapiens
tagatacaagcattcacttgcctcatagtttttccccttactatctggtacacctttcttcctccatatacttcctctcccatcccttgacttsgtacactcttactggtccttcaggtttcagcgtaaacacttctttctctaagaagctttctctaactacccttgcatctccccactgcaaatactgggtcgatgatccttctgcttgccattctgttttatccctctcatggaacctaacatgctaaactataatttctttttattcctctatatcctcactaaactgtaaattacttgaggtgaagggttctgtctgccactcttctccatggaaggcatttacatcaatattggtatatgaatgccaacttacagaataagcatctctggacaaatcatttacttactgaagccatttcaatagaaccctgaacttttttaaggctaaatattcagattccagaggaaataatactaatgttggtgttaggaagcccatcttctaaatgttgctgctatc

SEQ ID NO: 843660 - DNA, 475 bp, Homo sapiens
cgagtggccgttacaggccggaacggcggcagcacgaaagggaggaacgtcccccgaggggcctgcacgcgcgccaattcctagtctcttccccaccattgcccccaggcctcagtgcagtggtggccttcgcccgaaccgtcagaaaagagtacaatctgttacctgggtcactgcaaagatcactatgggccagcggaagcgaagttaaacagccggcggcccaggcgcccgccacagcgaacctgcccgacctcactgaacccctggcgcgcgttgataatgtcacttccgccagttctgccctcggcttcagcgagttgctcccactagggccgaggccrtgagaagtgtgagcataggtcacttcctgtgtttccataggtaaggaggggcgaagctcttgaggagttccggggcggggccgccgtgccacagccatctctaattggcccttgctggacgtaggaaagat

SEQ ID NO: 843661 - DNA, 510 bp, Homo sapiens
agaactataccgcctagaattaaaacatgatcactttatttgcttcagtgtattttaataaaagaaaatattactgaagttgaagtccccttcatacccacataaattttgctacatcaaaaaattatttaaaattttttaattacagttttactgctaagtcttctatcttttaagccatacctttgagtttttagccttcatttacatggatttaccttgaggggccttttccagttctagctatctttggatgataaaaatctcaaagaataactgagccagtgcttgcagattgagtttatggcactgggaagcagtgagccatgaaaaaaacaaaagtacagagagaacattatcaaaaccaaatcactgctcttccccaccaccccatatttggccctcccatmcattctctattctctcagccaaaggccactctgcccgacgggccatccaggggagacccgcatggtcagcatccactcttctcttgccctcactccccag

SEQ ID NO: 843662 - DNA, 591 bp, Homo sapiens
tttatcttatattaacaggtcagtgatacactgtaggatttaaagtatatatagaaataaaatacagagcaaaaatagcttagaagttgaaagaagaacaatggaattaaaatgttctaaggtccttgcattgtccagggaaaaatagaaggattaatttatattagacattaataagtcgaggatacatactacaatctcttgtataaccactgaaagtttataaaagcgtacaaaatcaccatactaataggaagggaaaatgagtataaaaataatcaatccaaaagatatcaggaaaggagagaaaaaagaattgtaaagaaagctagtatactatgttgctatcagacaaagtagacttaaaaattaaaaaaaaaaaaacccagttctagcaatcaaaaacatccttcataataacaaaatgatcaatttaacaagcctccaaacatgagcaaaaaattgacaaactgcaaaaaactaaacccagaagtgaaaaactaaacaaaaagcaagcaatacagaaaaattgaacayaattaacatattgactaacagacatatataatggatcagttgtgcctgacaagt

SEQ ID NO: 843663 - DNA, 565 bp, Homo sapiens
aagctctctctttgccccctgccatccatgtaagatgtgacttgcttctccttgcctttggccatgattctgaggcctccccagccatgtgagactgtaagcccattaaacctctttcttttataaattgcacagtttcaggtatgtctttaccagcagtgtgaaaatggactaatacagcaggatatgtaacttctctttgccattgatttgcatcgtatggtctgcattatcagacaattatcagagactgaccacaaacacatttgtgaaatacatttatgggaatgatatccagagtagactgtactgtcaaacagtcctgttggatatgtgtttgaggaaaagtaaacttttttttttgaagacagagtcttactgtgtcacccaggctagagtgcagtggtgcactgactgctcactgcagccttgacctctcgggctcaagctgggactataggcatgcaccaccatgyccagctaattttttcattttttgtagaaacaaagttttaccatatttcccaggctggtctcaaactcctgacgtcaagtcatctaccca

SEQ ID NO: 843664 - DNA, 578 bp, Homo sapiens
tggactcctgggcaaaggcaccatcgggaacattaagaaagcaatcccacctcaaacccacaaccaaaatattttataagaaccctcccttccccccccactctctttttgtcaagtaaaggatacacacggcctttctacttgtaacctggccaagaataatttgtggcaggaaagtttgagcatttgtcaaaataaaataaaaatgtaaaaaaaaaaattgcgagcacttgagtgtacatttgtgtgaaactaaacagagggaaagttatttaggtggtaaaatgtctctgcgtttccctcctgccccctgtcccctgacacacggcccccctccccaagtgttgaaaatgtgattgttcgggtatttgttttgttaatctcccaccagggctgaggggctgcaggctgggtttcttcttgttcacgcagggccctggctgccaaacaagtttccccccacctagcccagggccagggactggtgcacctgttccctgcccgtctagggaaacggtggggttgggggagtaagtttttgtccttycagcaaaggtagctttgccccacctgagacc

SEQ ID NO: 843665 - DNA, 606 bp, Homo sapiens
cttccagagcctccctgagacctgcctctcctgagcttactcctccagcctcctgttggttcagagagcccctgtgctccttctagtacattcccctctgcttatgtcagccagggctgacttggctgctgacgatgagggaggcctggctaattccaggccatggtgggcttgaaccttacgcttctctgtctcccatgcctgggctcttcctgccatcatcctccctcctggtacccacagtcatctctatgcctgagccctgtagacctcaaggctgaccttggtgggaccaaccaagtcacaggatttgtctgagaagaaccggggtatgaagagttttgtgggtttgagatgccataaaactgtccaacaacaatgacttccaaactacctccctctgagctgtggtgtctgcagagatccctcatgggctgtcaggatttgagagtgcgttggggcagttgagtacaagggctcactcccttccctacccccacacctattttaaccagagtggctttacctagcacagtattcaagaggcatgccctctgggaccacgctgcctgggtttggatccsatctccaccacgcatgagctat

SEQ ID NO: 843666 - DNA, 548 bp, Homo sapiens
gtgcatttacctgcagaacccctctccagccagcatctgacctgtggcccaggagtgtgcaccctctggcaggtgagggcttggagcagagacctggccattacaggaagcagmctggagctatggacagaacggagagagtgggggccagcggcgctgctgccttcagacaccggttgatgaaccgtcccatgtggtcctgcccagggagtggagcccagcgcacaaggcctggcaggttcagacttgggttttcaccaaatgccctactggccctggggcgctggcttggccgatcaagatattgcagataaacaggcctcacctggtggtggggctgttgcatggggaggcgtcaggctttgtctgttgcggtgactcagggcaggttatcacccggcggcagccttcacacctcatgcccgtgggctccaggatagtcccaggaagcatctgcatctgaggttggcccagacccacccagtgagcccggcttcttgtagatgccttataaaggagtgctatcttcctgcacgctttggagatag

SEQ ID NO: 843667 - DNA, 632 bp, Homo sapiens
ggagcctgagtatttcccagcacactaggctgcctccccatccacctgcgcctcagctstgctgccaccgcgggccccggctcctcctctgctccacgggtcaccccagaactctgctgtgttgtgctccctctgcagccagccatgccaagggaaaaggggcacaccataaaggcaagtgagggagaccttgggggctgcagcgcagggttgggggtggactgtgaccttgcatctgcttcagcctgaaggtcctggggcagctggggagcaaggtgctggcgtgacgctcctgagagctgatgcagctgccttgcatagtaagaactcatgcatactctgggtgacagtccacataggaagaacttgtgcatactctgggtgacagtccataggcatccattgtgccaagccctgtgctggttgctgtgggagaaactgaggcaaggcaagtgttgtttctagcctcaaggagtttatgatccagagccagaggaacaacaagtaactggggtgagctggagtgcatgggaggccagggcaggtcaaaggagttcaaagagactcgtatggtgattttaggggacaaaaccaaggctttggggacagacctaaggctttggagccagagg

SEQ ID NO: 843668 - DNA, 608 bp, Homo sapiens
gccaggatcgaaccctggtcttctaacttgagcctctattttttttttgttttaaaattactttttaaaaattggggtataacttataacatgtctacattaaattgcacaaatcttaagtgcacagtctaatggattttacatatagttacctctgtgtaactgccatgcaggtcaagattaaaagcatttccatcaccctaaaaggttctctcaggtccctcctagtctgtagctccccaagggtagctgctgttctttttttacttttcttttccttctttttttaaatatagacagggtctagctctgttgtccagactggagtgcagtggtgtgaccatagctcactgcagcctctaactcctgggctcaaacaatcctcccacctcagcctctgggtagctaggactacaagcacgggacaccacgcctggctaattttttaaattttttgtagagatgaggtcttgctatgttacccagrctggtctcaaactcctggcctcaaggggtcctcctgcctcagcctcccacagtgttgggattacaggcgtgagccaccatgcctgactgagtggccactattctgacttctatcaccatag

SEQ ID NO: 843669 - DNA, 586 bp, Homo sapiens
cccctgcacccgggcgcagatgctgagggacagtaaggacctccggtgccacccgggaggcaaatacttgcttctgtgtggtctgtgaagggctccactaagtgcaggagagtgtaggaagcacccggccycaggacagcacggggccctgtcggaaaagccttccacccggggccaggcgtggtggggccatgctcactctaacggtgacaatgttgggatgctgggccttgaggatggtgttgatctccctcagggacgtgatcgggaagccctccttctccttctccatcttcagccgctttagagccacaatttcatctgtgaagaaaatacagacggcactgagaggcattctcaaagtcacggtaccaacagtggactcgttcagtgaggaccgcaggcagtgcccaaagcgccagcatttcacggaggggggtctcgttctaggtgggggcacgtgggcaccaggagaacgccccagctgaggtctcggcaacacccacggcttcccactcaacacaccacagacactcacagccacctacagccacctgggatcccagcggccacgccgactccacat

SEQ ID NO: 843670 - DNA, 585 bp, Homo sapiens
gtattggcctgtttctggctgtgaagtccttgctccttcttgtttctagctttttttttttttttgagacagggtcttggtttgtcacccaggctggagtgcagtggcgcaatctcggctcactgcaacctccatctcacgagttcaagtgattctcatacctgagcctcccgagtagctgggattacaggtgtgcaccaccacacccaggtgatttttgtatttttactagagacagggtttcaccatgttggccaggctggtttctaatatttcttaacatctgttttgtctggtatgagtacagccattcaagctctcctatgacagctgatgtttgtacgctgcgtcttttcctgttctctagcagacagcatacagttagatcttgtttttctatctgataatctgccctgtctgtttggggcacagagacctttcacatgtcatataattacacrtacagttggatttactttccttgctttgttgtgtcttttttattcttccctttttgattttaaattacatacgtttagcataccattttaatttatttgtactttttagaacactaagaaaaca

SEQ ID NO: 843671 - DNA, 585 bp, Homo sapiens
gtattggcctgtttctggctgtgaagtccttgctccttcttgtttctagctttttttttttttttgagacagggtcttggtttgtcacccaggctggagtgcagtggcgcaatctcggctcactgcaacctccatctcacgagttcaagtgattctcatacctgagcctcccgagtagctgggattacaggtgtgcaccaccacacccaggtgatttttgtatttttactagagacagggtttcaccatgttggccaggctggtttctaatatttcttaacatctgttttgtctggtatgagtacagccattcaagctctcctatgacagctgatgtttgtacgctgcgtcttttcctgttctctagcagacagcatacagttagatcttgtttttctatctgataatctgccctgtctgtttggggcacagagacctttcacatgtcatataattacacgtacagttggatttactttccttgctttgttgtgtcttttttattcttccctttttgattttaaattacataygtttagcataccattttaatttatttgtactttttagaacactaagaaaaca

SEQ ID NO: 843672 - DNA, 623 bp, Homo sapiens
aagtaaggcccccagcagggcacgtacatacattgggaaagaagaaaccccttagtaccatgttggtcaaaggcaagagagagaattctatttccatctggaatgtcattcttgtttacttcttccaacagtgaaatacttccaggccttcgaaaggccatcctttggacacatgtaaaaagctgtcttgttggcccgttattcccactgacccgtctgagtgatcacccaggagcgcggcggcagcaagcagagctcaccggatttgggacaaggattttaaaggcagctacaaagctgagctctatttgctgatgatagtctctgttcagctgtttaaaatgactgtctgactcaccatggtaatttttcacaaattaaaaacacattttgggttgtgcaacagtgttctcatctttccaggcaggcagattattttaatgctgttatacagggaattgggactctcggattttcttttttaacctttttatgcctttcagtaggggaagtttccttgaaagttagagagctgcaaatctctaagtatcaatgtaaagaagcmgatgacccaattcggaaggtggttcaagtgttctgtttgtttacaaaggcacagacca

SEQ ID NO: 843673 - DNA, 556 bp, Homo sapiens
gggtggggccgcagcagggactccgggcgccaggaacgaggccaccagggcctctcccaggcaaagcgyagaagcagacgctaaaatattaagaaaaggaaacacatcacccgttttgaacatttaatgtcctcaaaggtttcaaccaccaatttaaaatcactttgaaaatgcaattgggccgggcacggtggctcacacctgtaatcccagcactttgggaggccgaggcaggtggatcaccttaggtcaggagttcgagaccaccctggccaacatgacgaaaccccgtctctactaaaaatataaaaactagcagggcatggtggccggcgcctgtaatcccagctactcgggaggctgaggcagaagaattgcttgaacccaggagacggaggttgcagtgagccgacatgataccactgcactccagcctcagtgacagagtgagactctgtctcaagaaaagaaaaaaagaaaatgcaatcgttcactgtccaaagatttttagcaattgaatcccgtttttctctgcgcgtgttggcggatccttgct

SEQ ID NO: 843674 - DNA, 530 bp, Homo sapiens
ctactttgcccaggctgggctcaaactcagggctctctggcctcagcctcccgagtagctgggtctgcaggtggctgtcaccgtgctgggcctggggtgtgcgtattaatgattttggaatagtgtctggaagcctgtgtgccttcctctcttcctctccccagaaggacctcccacctcgtcctcccaaagtgttgggattacaggtgtgagccaccatgtcccctctctttgctattttgcctgggaggagtgtattaataattttaattttaaatttctttgattatgttctagtttgattattgatcatttacttcttagctatttatattcttccttgagtcatcggtttctgccctttgacaatttttctgtgaatgttttgtgttgattatatgagctttgwctgtattgagaacatccacgcattgtattattgcaactgttttcctagttgagaacatcgacctgctgtattattgcaaatgttttcctgcttgcatgtagtcatttgttatgcatattaa

SEQ ID NO: 843675 - DNA, 613 bp, Homo sapiens
caggctggttccttccttaggatccccattagtcttcagaataaaaatccaggtcgggcacggkggctcatgcctgtaatcccagcactttgggaggccaacgtgggtggatcacctgaagtcaagagttcaagaccagcatggccaacatggcgaaaccccgtctctactaaaaacacaaaaaattagctgggcgtggtggagggcgcctgtagtcccagctactcaggaggctgaggcaggagaatggtgtgaacccgggaggcagagcttgcagtaagccaagatggcgccactgcactccagcctgggcaaaagagcgagacaccgtctcaacaacaacaacaacaacaaaacacacacacacacacacacacacacacacacacacaaattagccaggcatggtggtgggcacctgtaatcccagctactcaggaggctgaggtaggagaatcacttgaacccaggaggtggaggttgcagtgagctgagattgcaccactgcactccagcctgggtgacagaacgagactctgtctcaataaataaaaaaataagtaaataaaaatccagacccctcaactagcccaggaagtgtgcctgagcacct

SEQ ID NO: 843676 - DNA, 494 bp, Homo sapiens
ctctagtaaaaacctggaggggatcctgatccagccttagggtgaagttgctctacctctggtcacctcctcacagggcagcccaggactctgcctggggcactacagtgcatytgaggaaggccaccagcctcagcatccccatccctcagtactggacagtccagtcccctggcatgagctttacggggcttgggacttagttctaaccctgcagccaacttcccggaactgtgctcccatccatgtgcctggcagaaggtctggtacatggtaagtgtcaaggaaggaaggaagagagagagggatgtagggagggaggaagggatgaaagaggaagaaaagaaggaaggaattggagtttcctcattttctacaatggccccagccactggccactgagtgtaaactgaatgtgtggagccccagagaataaagccagggccaggagctacagggaagtggaaggtggaaagtggatactttattgacca

SEQ ID NO: 843677 - DNA, 638 bp, Homo sapiens
ttttcatatatgcggtatttgcattttctcctatttacctaaatggcaatttggctgggttratgttagacccaagaatagaattctgtagccattgcttcattgtcttctggattttctttcctccttggtaacttactttttctgcctaaacatctaaagcaattccttcaaagttttttttttgtagtttgatcatttaatagtaatttattttttaaaaatgttcagataggaataattttgcattattacttcttagtatataaaattccctctcaatttttttcttcatttcaggaaaatttttgtcattgtggtatatctttacatcatagtagctctttccttcagggataccaattgcctttatgttatattatctttactttttcataactatcatctcttccaattgctttaatctctgatccgtgaccatttcagtgtatcccccatgccataaatacagtttttgtccatgtctatttccttccttgttcttattattatttacaaagtctattgtgctattatttcagttcataatctgtttcattaattctataactttcatctcattcttttgcctcatcccattttggggctcatagttttacaagttattttctataatg

SEQ ID NO: 843678 - DNA, 571 bp, Homo sapiens
tttagtgagaaggaggaggaagagcaacctaaaacagagagagaggaggagtcatatgaaagtaaaaaggagaacagaaaagcaggagtcacaggacaggaaagaatagcgtgttaagaaaggagtaataataataaactgcagcccagaccaggccaaaccatgagaactaattctagttacagccagataacctcacagcttttaccagagaattttccttagactgaagcaatggggaaaactgtaatatatttaaccagtgaaagatcactggtgccagctgctcccatttaatttttttcaatattgtattgtaaaaatatttagatgtacaaaaaagttgaaagtattttacagtgatactcaaatacaaccaccaccaaattctaccattaacattttactatacatgttttattacaaatctatttatctactcatccttccatcaatccaccttagaattgctttgcaaggaattctaggtaaattatagccgtcattatacyccccatgaatatgccagcaggcacatcattagtttagtatttgtttacagttttatttc

SEQ ID NO: 843679 - DNA, 559 bp, Homo sapiens
cgggttgataggtgcagcaaaccaccatggcacatgtmtacctatgtaacaagcctgcacattctgcacatgtatcccaaaactgaaagtaaaacaaacaaaaacaaaacaaaacaaaacaatcccagaaaagtcttttaagtagtgtgaggctgttaagctagtttttttttattttttatttttcaagagacagggtcttgctgtgttgcccaggctgtactcaaactcctgggctcaagcgatcctcttgccttagcctaagctgatttttttttttgcttgaagctaaaattttatcattggcaacaaatactgtcagttgttttcttcgaattgactgtgttagcttgttccattgagagaaaatgtcttccaaatacccaagtccttacaactatagtttgtcagttagttgttctttaaagtaaaaatggtactctgtgaagaaaatggttaatttaacttgccactcaaacaattgcacaagtgcattttcttctgaaaactattatactttggtgtgcagcagaaatactttgtgtatttcctactttgt

SEQ ID NO: 843680 - DNA, 534 bp, Homo sapiens
ggtcatgcataaacatggttgtatcyactgtaactctatgaatgaaggtatgctggagggtagaggatagagtaacacttctcagaaaagtaggagtaaaggattaggcagactaaacaatgtctgtccacttcctgagaataaataaaggaaaagagggtaaagaggtcagaggacagaacctttatctaaccaacactatccaacagagctttctgcagtggtagaaatgctttatatctgtgctgttcaatacagtagccactagccacgtgtagctgttgagcatttgaaagatggttagtgcaaccaagaaattgaatttttcattttgtttacattgaaatagctacaggtagtatcttagttttctgctgctataacaaaataccaaagactgggtaatttataaacaaaggaaatgtatttgggttgtggttctggaggctggaaagcccaagagcatggcaccagcatttgctcgacatctggtgagggccttcttgccacaccataacgtggcagaagatatca

SEQ ID NO: 843681 - DNA, 611 bp, Homo sapiens
gttgcccacactggttgggacctcaacatttctcatctggacttttgcagtgatttcctaattgctctcccttcctccagacctgtgcccatcaatttccttcattctctctattgctaatacagggttctttctattgtgtctcttctgctaaaaatatctcaggaactccccattgttttcacatttaagccagactcctttgcaggtagtaaataagtctttgtctttcagccttctgtctcttcaaatctctttgtgcacactctactccaggcataaaaagccttttccaacatagttttctaaaaaatgcttgggctttgcactgtctgtttgcttgatctaggattgaatatttgtcccacctgtggggtgacactgggcaagttgtattagattcttgtgcctcattagcctcaacatagttttaatagagtttttataacagggttttaatagtaatgcttatttcataaggttacagtgaagataaatgagataaatgagttattataggcagtgagctcagtctaatgtcttgtacataattgtgcattataaatcttatctatttcattatccatcacaraagtattgttgttgccaca

SEQ ID NO: 843682 - DNA, 605 bp, Homo sapiens
ggtgatacatccccagtccctgaagttcccacttttgtgctcatgttattttctaacctggagcgccttcccttctaccttcacatggcaaaaaacttgctcatttttttcaattgcttctcacacatctctaatctcatgaagactttcttcatctttctgtttgatgagatttaaggttcccataacccctattgtcctcttctaggataatcaatatatttgactgatattttattagatgtgtgttcttgcctttcctcactattcaattgtaacctctttaacagcaggtgaacttggggctccactaggccatttgatgccttttgggagaattggaaaaaggcatccttttatctgagtaaatgcaagtcagcatcagagactatggcttgacaatccaggtagcagggctggatttctggacatattcactccttggaccaggcagccttgggcaggacacaacctcacacctttatgtggtggctctgaaaacactgtattacccatttttggatctctggtactgccttatatagtgtcctttcytgccctaaataaaaccttgaaatatgttgaattgaatttcaactctgatt

SEQ ID NO: 843683 - DNA, 486 bp, Homo sapiens
tgttggtcagtctggtctcgaactcctgacctcaagtgatccacccaccttgggctcccaaaatgttaggatgacaggcgtgagccactgckcttggccgggaaggattctttatctttgactaggagtgcttgatgaaacaccggggctggggaaggggtgggaggatgagaagtggaccagtccttgcagtgtcaggactccctccctggggggccatctcctccctccctaacaggctgggtgcttggctccagccactgccaggcgagcaaaccctctgagtgccgaggatgcacaagctgcctctctcctggagacgagcccctgcctgacagatgaaatctttattatggtgatttttatttgggggcgtgtgagtgtgtgcacatctggggcccaggcggcagccgaaattcccacaaacgtggctcatgaatattccacagtgttgcctaccgcactttgcagccatcgattatttat

SEQ ID NO: 843684 - DNA, 486 bp, Homo sapiens
tgttggtcagtctggtctcgaactcctgacctcaagtgatccacccaccttgggctcccaaaatgttaggatgacaggcgtgagccactgcgcttggccgggaaggattctttatctttgactasgagtgcttgatgaaacaccggggctggggaaggggtgggaggatgagaagtggaccagtccttgcagtgtcaggactccctccctggggggccatctcctccctccctaacaggctgggtgcttggctccagccactgccaggcgagcaaaccctctgagtgccgaggatgcacaagctgcctctctcctggagacgagcccctgcctgacagatgaaatctttattatggtgatttttatttgggggcgtgtgagtgtgtgcacatctggggcccaggcggcagccgaaattcccacaaacgtggctcatgaatattccacagtgttgcctaccgcactttgcagccatcgattatttat

SEQ ID NO: 843685 - DNA, 590 bp, Homo sapiens
tgagttgcctcctctgacctcctggawtcatcactcgcccctactgtccactcccaacctccacccaacaggttgctaagctccctgccttctcttccctctgccccagggttcctcatctggctttttttaaaaaaactggctgttcttacatctctctctcatctttcagttgcagagaggcttcctctgaccaccctttgcaaagctgccattcctcccacccccattattttcgctattgcagagctataattatttccttcaaagcacgataaagaatgcctactcaatgtctcttccagtagaacataagctctttgagggaccttgtctgtctcaactccacttcatccctagtgtttggcaccgtgtttggtacaaagtagccactctttaaagttattaaaataacacataaaccatgaaggacacagctgtcccagaagagagcaattactgagtgtggggaggagtagtcagtcctggacttttcggggtatgggcgagatgcaggagggctctcttctgttacagtcataggctgggtgatgacaagcatgggtctaaggggaggtgacacccccagt

SEQ ID NO: 843686 - DNA, 546 bp, Homo sapiens
gttgctaagctccctgccttctcttccctctgccccagggttcctcatctggctttttttaaaaaaactggctgttctyacatctctctctcatctttcagttgcagagaggcttcctctgaccaccctttgcaaagctgccattcctcccacccccattattttcgctattgcagagctataattatttccttcaaagcacgataaagaatgcctactcaatgtctcttccagtagaacataagctctttgagggaccttgtctgtctcaactccacttcatccctagtgtttggcaccgtgtttggtacaaagtagccactctttaaagttattaaaataacacataaaccatgaaggacacagctgtcccagaagagagcaattactgagtgtggggaggagtagtcagtcctggacttttcggggtatgggcgagatgcaggagggctctcttctgttacagtcataggctgggtgatgacaagcatgggtctaaggggaggtgacacccccagtagctgaagacagtttttacaaaatgcc

SEQ ID NO: 843687 - DNA, 589 bp, Homo sapiens
cagaccttccagcggaataagctgtggaggtcaaagacagtgaaattgatgatcttgaccctgtgtaggcctaggctaatgtgtgtgattgtgtcttagattttaacaaaaaagtttcaaagtaaaaataagtaaataattttaaaaacagaaaaagcttacagaataaggatataagaaaatattttggtacagttgtacaatatgttttaagcatagtattattacaaaaaagtcaaacagttaaaaacattaaaaagtttataaagttatagtaaataacattattgaagaaaaatttttaataaacttagtgtagcctaagtgtagtgtttataaactgtatggtagtgtacagtaatatcctaggccttcattcactggtaactcagagcaacttctagtcctataaatgccattcatagtaaataccctatacaggtataccatgtatcattatatttttacttttctatgtttggacactcaaataattaccactgtgttataattatctacagtattcagtacagtaacatgctgtatcagtttatagcctaggtgttartaggctataccatctatgttt

SEQ ID NO: 843688 - DNA, 385 bp, Homo sapiens
aaactttattacagatatctcgaaagtcccttgctactttcttgttctaataattagtttttgcagttttggagttggtacgcatgttcttgsttaggatatacaaagacaatgattaaaccatggaccttcatattttgatatttctgattaagatttaataatgcccttagaattatattctaggtttgggaatataataaataagttacacatgactgatggcagtctgatataatggtaggactaatgaattaggagttacaaggctagggtttgaatggcagctctaagaatttatagctttttgttcatgggacaaacccattgacctcttgagatttcagtttattcctcataagataggataaccatatgtgtatcc

SEQ ID NO: 843689 - DNA, 655 bp, Homo sapiens
tgaaatggctgcaccattttatatttcactagctatggatgagtgttctcatttctttttattccatttttttttttttgatggagtctcgctctgtcacccaggctggagtgcagtggygccatctcagcttgctgcaagctctgcctcctgggttcacgccattctcctgcctcagcctcccgagtagctgggactacaggagcccgccacagcgcacggtgagaaggggtttcaccatggtctcgatctcctgacctcgtgatccacccgcctcggcctcacaaagtgctgggattacaggcgtgagcacctcgcccggcctccattgttttaattataaccattctagtgaatatgcattggtatctcatggtagttttgatttgtatttatttcactaacagttaatgatgctaagtatctgtcatgtccttattgtctgtttcgataccttctttgaagaaatgcctattcaaatactttgttcatttttaagttggattacttgtattttcattaccaaatgtaagagtttttaaatgtattttgtaaatagtctccttctcaaatatatgattctcaaatattaaaaaaaaaagaaaagaaaacatttattcagccaacaaacatttttaaaaaagctcattatcac

SEQ ID NO: 843690 - DNA, 572 bp, Homo sapiens
tgcttactatgcactaatttaccagggtcagataagaatttttattaaaaatatttcatgggaatgatgtccacaaaatggcagagtagkctgttacacacttccatcctccaacataaatattgaaaaaaaaaaaaagaaactgtaagaaacaacttggtgagaactctgaaaaagcagtcaaaggtttacagcaaatatgcaaacactaaaaacaataaagttaagatagtaggaaagctttataatatttttaactggcttgccttattttctttctggtttggcaagagcctaaaagagagaagcctgtattcttagtacaggatactatgtcctgtctatgaaggaacagaacaaatcctaatcacaaattgttggataagtcttttctaacatctatgaagtctacttgaaagagttatggaaggcatttgtctctgtttggcctacctcagaacacacccatgccagaaaagtgatgggcattgctcaaaaacattataatatgaacaaacagctttcagacatttgagaaaaattaaggttgtatcctatagtagcccaactaa

SEQ ID NO: 843691 - DNA, 615 bp, Homo sapiens
agagacatagtttgaaagtgaaaggatggcacatcaatgtcctagggctgccattaaaaagtatcaaaaactagcatactaaaacaagaaaagcgtattgtctgactcttctggaggcaataagttcaaaacccaaatattggcagggtcgtccttcctccaaagattttatgggagaatatttccttgttgttttcagcttcaggatgcttcaggcactccttagctttttgcagtgtaactcttatttcagcttcccttgtcacttagcatattctgtgtgtgtgtctcttcttatatgaacccgagtcatattgacttggagccaactctacccatcttatattaacttgattacaactacaaacaccttacttcaaagttaggccatatttatatgcaactagggttaaaacttcaatatattattattagagacacaggataacacataacagataggaaaagatatgtcattacagttgtaaccaaaacagagcttaagtagccatactatatgacaaaataaaatgtaatcaaactgttacaaaagatatcagacattgtacacggatrtgtttcaattcatcaagaagatacaaatattataaacac

SEQ ID NO: 843692 - DNA, 565 bp, Homo sapiens
tgcccctggccacccagaacccaatgagtttaacaccaaaggcgtcaaagtggtcttgcccccaaacatctgtcatccagcctctagatcagagggtcattacacatggaaccctatggaaagggttgtcaatgctatggaagataactttgatagagagagcatcatgaaaatctggaaagattgcaccattgaagaggccattactgttataggaaaagccatgcgggccatcaaccctgaaacaattcccactggagagaactgtccagagttgtgcatgacctcacgggatttatgacagggccaatcaaggaaatcatgaaagagatcgtggatatggcaaaaatggtttcaagctatggatcttggagaaattcaagagctaacagacaccacaccagaggagtgcttcaaaccaatgccagacagtgaggaagaagacatggaagaagcagtgccaggaaacaaattgacattaaacaatctggaagaagggttctgatgactcaatgcttttgaygtctttcacgacacggatccttctatgatataggcactgaaa

SEQ ID NO: 843693 - DNA, 637 bp, Homo sapiens
ctggggtccgctgtcagctttattgtctcctcactcgatgctgcctctgactttatcatacttttcctcatcttaaactgtgatctctgattattttccaaaagccccagcgtgtctcctttagacccatttgctccgggcattcccccggcagcgctgctgtgctcacagtccggactctgagccaggccaggcatttccttcccgggctgtggcctcctctcctcctgacttgtcacctgcaactcccagagcctgagcaggagccgtggagccctcctgcaagctcatcctctatctcatcggcctcctcacccctcgctgttccttatttcacttctgcagattgtacagattttttcttttttaaccagtttctatgtctcaaatgtccctgagcctaaccttccgtccagctcccactggtctcactgtgatgcccatgtgccctccccatgtcccctccaatctcccctatcctgtgcccggggcactcacgcagcctggcacagagtggagaggctggagcttgtcatcctgcagagttggagtcacctctgtgcctcccttkggccccccttctgttctcagaagcccctgacacagctgtaggtgctctacactcccccatatgctg

SEQ ID NO: 843694 - DNA, 554 bp, Homo sapiens
ctggcggtggcattgcggagtctaccaaagcgcagggcctgctcccggaggtccgcatcataggtctggaagcaagggtggcaggccacgcacaccgggtagcgattrcagtagcctcgctggcactggtcacagcggggcccggtcaagccagggcggcagaggcagcggcctgatgccttgtcgcagcccgggccctctgttccccggaaatcacagtcacaggctagggccaagaaaaatgacagtcagagacaggggtcagggagacagaagcagctgtcagggagagccctgaagaggaggtctgacctgaggctctttctacatgacttagaataacagaagtcgcagccagaataaaagccatggtaacagctgcagtgaaagcaaacgcttacttagcacctaccatgtgccaggcaccacttaaagtcacacacacacattaactcatttgatcttcacaccactctgggaattagcactcttgttttcccactttttctagatgaggcaactgagggacagagaggttaagtacagcatgcctc

SEQ ID NO: 843695 - DNA, 622 bp, Homo sapiens
ctggggaacactatttgacccactacagtcacaaactcaaacagcctttggtaaacataccttgcagcaaatgggaatagaaaacacaacccctactcaggttaaacaacagaaatttattttctcacagtgytggaggctgaaaatccaagatcaaggtatcagcagatttggtttcttcaaagacttctctccttgacttgcagatggcaccttctcactgtctttatatggcctttcctctgtgcacttgtatccctggtgtgtcttccccttcttataaggacatcaatcctattggctttagggccccacccttatgacctcacttaaccttagttacctctttaaaggccctgtttcgaaatatagccatgtaccacataacagcttttcagtcaataatggactgcatatatgttggtggtgccatacgattataatggagctaaaaattcctatcacctagtgacatcatagccatcataaggtagcacaacacgataatcatgttgtttatggtgatgctggtataaacaaacctgtgctgccagtcatataaaaatctagcacataaaatgatgtaaggtatatagtacttaataaatggctaggttactgg

SEQ ID NO: 843696 - DNA, 559 bp, Homo sapiens
agatttttaacaaggcgctatactacttttaaaaaagatttaagtaattttttcaagagctttggcttttgctatttttactgacattttgaaagtagcagtgcttacaacattttaagtctagatgtctctatggaaacccaagataactcatattttatgaccaaatgacaacctacctagagtgtttatcccattggatcaccataggtcatctgcagtatcagaaacatcttaggtctattttccaaaaccctatcttatcaggcataatgaaatttatataattattacttttgctgaggaggaaattaggaaggaaagaatttatttctcaggcttaattttgatgcttattaagatatcactatttaaaacattcttattagaaaaattttttttatcaattttggcagacagtaaaagaggargaatgcaatcaaataatttaatagttgctttgaaatttatgtcattaattttcctcctctcctttccatcagtgtcaaatacattttctgtttaaaatgtaacagctcctcttcccacagactgctta

SEQ ID NO: 843697 - DNA, 519 bp, Homo sapiens
gaatgtacattttcttaaatactgcacataccttcagcttactccagtaccagacatctgcatgcacaccccacattctacattacacagatattgcacaagtttcaatgccaaaatactaatgcagtctggcaagatttagggtttacctttcagtattattttgtgaaagtattcagattcaatactatttcgcagaaaagctacatgaccaatttcaggaaaagaatgcttgctatctttccttgatccacagtattaaaatctgtaacaatatatttaggcatttcatttatgttttccagcatttaaaattccgcaaaacctgtgtttgaaatttcttatagcattcctttacaaacaggagaagcttcgtctaatgtaaaaaaaattaaaggagtccacagggcaataatttttccaccagaggtctcactctacattctgaaaagcamtgcagagcaatatttaagtctgtcactttcagagagccattaggagcaaagtctgctgaaaacc

SEQ ID NO: 843698 - DNA, 562 bp, Homo sapiens
gcaacctcaccttctaaagcagcatgattcagcagaactttctatgatagtggaaatgtttcatatctacaccatctaacttggtagccattagccatgcatggctattgagtattgaaacatggctagtgcaaccgcaaagctggattgttctatttattacatcttaattaatttaaatataaatagtttcatgtatccgggagctgctgcattggacagagcagttttatagagaaaacaatgacagataccaaccatattaatccaatgtagtgagcatcatgagagtggatgcttaagggaaaatggagtcagtgatagagtcgcaaaagcaatggcgtatgtcaggtcagacacgggctattaggtgttaaaacagcatgcataaagacacggaggaaagaaggaagtgtcatacaatgtctagagcatggagtttctggaagaagtgaggctgcagaggtgacttgtagataactcagtaccgtgctctagagaatttgaactttgtccatgggtgtaaaacagaagagtgaartgttcatatttatctttaaaa

SEQ ID NO: 843699 - DNA, 562 bp, Homo sapiens
tcttcaaattgcaacatggaaataattataactcatagtttttttctgagacttaggcaagataatgtatgtaaattacctggcaattggcgcatagttgtggtcaaattaattgtgagttattattactgacagaaatatatacgcaattacaatgactcttgtcccttttccaatcaagggatggttcccatggttttcatttatttgttttggttcatggaaaatctgggtattctaataaatcaagatccagaaacagggacatactcccaggctcaaaattatgtataaaataccccagatttcaagagcactcaaaaatctgtatataatccccttagtttttagggcaatctattttagagtttgttctgaagatggtctcatagaaataggaactgtgggtttaggaatggtgaagtgtgattctgtattagagaactcaagggacatctgaggacacacatcactaaaactgtaagtgtgctgcttctggtttctctggtatcatggcctccaccttccccracctctggttcctgtggatctgccttctgtt

SEQ ID NO: 843700 - DNA, 542 bp, Homo sapiens
aattaaacctctttttgttctaaattatccagtctctggcagatttttatagcactgttaaagtggaccgatacagtaaattggtactgtaragagtagagtattggataaagatatcctaaaatgtggaagtgactttggaactgggtaacaggagagcttagaacagtttggagagctcagaagaagacaggaagatgtgggaaagtttaaaacttcctgtagacttgtgaaatgattttaactaaaatgctgatagtaatatggtcaatgaagtccaggctgaagtggtctcaaatggagatgaggaacttattgggaactggagcaaaggtcacacttgctatgctttagcaaagagactggcggcattttgtccctgccctagagatctgtggaactttgaacttcagagagattatctgaaattggaacttatgtttgaaaaggaagcagagcataaaggtttggaaaatgttcaggctgacaatacaatagaaaagggaaacccattttctggggtaaaattcaagccaactgca

SEQ ID NO: 843701 - DNA, 526 bp, Homo sapiens
ataaattacccagtctccagtatttgtttattaaaatgcaagaatggcctcatacctgtggtttaacygagcacttaattcctttattattttagtgcagatgtctccatttttttcctttgttcatgaaacttttattgggaaaatgctaaatgagagttttactactatgaccacggagagtaggatgcacttgtgcaaagtctgggacctccagaagcttgcaatttaatcagtgaaacagactggacataaacaactctcttaacttctcagtgattggaaatgcaaacagtattctatttaaaaatgccatctggctttcataaggtttggaaaatacttactacttttaaacagcaaatcctccaatatttgaggtttgcaatgctaagcccatagggcatgaggcaacataaccctgatatgagtaattttgatgaattctccatatttagaagtaaattgtgtatcttgataataaattttataatttcattattgagtttcttcatacattttggaa

SEQ ID NO: 843702 - DNA, 540 bp, Homo sapiens
gaaattcctgagaagctggagttcgatcaagtaagtacacattcataggttgtcatgagctgagaacctaaaacatcagcatggtaaattattttcagaccaacagtctcaattccatagkaggcccagtcaatggcaggcaaccacagacaaattaaaaacatctttagtttgctgaaaacatttgtgaaacaaaggcatattatttgagattttgttcttttatctttaagcagcccacgatgacattatatagtcaggaagaataaatgtatttaagaacagataaacaaaactttaatatatactggtgctgttcaagggagcctaataaaaataagtcctgtttgtggtgtaagttctgaattaatttaacaataaggcaaaagagctagtatataagaaactatttcctttatttttgataacactggtattggaggatgcggcttctacctgtaggcatttgagcttcccaatactgaacccaaggattaaacaaacttctccatctggccaatggcattgctggaccactgc

SEQ ID NO: 843703 - DNA, 564 bp, Homo sapiens
gtataagccttctgactggtgcccatgaaatgaccgtgttgcaatcaagtttcccaagcaatgtgacagccgttaaatgcaggatccgcgagaaaggaagataaacgatgctgaacatttggaggaaaaataaagggtgccacattggacctggggactctgatgttaatgatgggttgtgtttagttgctccaagaggcaaggatgctttttcctttaactgtcttcttctatgtgggatcccatcttctgtggtttcttttgtaaaggtactatcactcttaaagactcaccatgccaaatagaactcatcaccctttttaaatttttgttaggcttctattcatgctaatggctttctgatcctttgtagcttacctcctcaaggtcatggcccctgtcttttcttctcatctcatggattagccctcttcggttcccaacacctggcttttyttctgtccagtactcctaactactactctggcttaaactttcatttttaactattagatccagcctctatataggggcagatgaaaagtattataaactgatcatatt

SEQ ID NO: 843704 - DNA, 602 bp, Homo sapiens
gcccagaaatagattcacacatttactctcaattgattttggacaaagatgccaagaaaacacaatgaaaaatgaactgtctcttcagtaaatggygttgggaaatatggatacctacatgcacaagaattaaattagacccttatctcacaccatatgcaaaacatcaattcaaagtggactaaggacttaaacatatggcctgaaactgtaaaactactagaagataccagaagacaaaagctccatgacattgttctgggcaatgatcttttggctataacctccaaagcaggggcaacaaaagcaaaaatagatcaatgagattacatcaaactgagaagcttctgcacagcaaagaaaatatcaacagtgtggagagacaacctacagaatggaagaaaatatttgcacaccatacatttgataaggggttaatatgcaaaatatacaaggaactcaaacaatagatgctaagaaacacctcaaacaactcaatactaagaaaacaaataatccaatttaaaaatagataaaggacctgaacagtcatttctcgtaaaaaagtcatacacatggccaatagatatattttttaaaaa

SEQ ID NO: 843705 - DNA, 522 bp, Homo sapiens
cagggagcagcaacccccttggggtcccctccctttgtatgagagctctgttttcactctattaaatcttgcaactgcaaaaaaaaaaaaaaaaagatgaaagataagtgttgktgaggatatggaaaaaagggaacccttttacattgtttgtgggaatgtaaattagtacagccattatgaaaaacagtagagaggtttctcaaaaaattaaaaatagagctaccatatgatccagcaatctcgctactgggaatatatccaaaggcaatgaaatcagtatgtcgaagagctaatctgcactcccatgttgattgcggcactaataacaataaccaagatattcaatcaagctaagtgtccaccaactgatgaatagataaagaaaatgtggtgtatgcctatgcacagtggaatactattctgccataaaaaaaaaatcctgtcatttgggacaacatggaaaaacccagaggattatgttaggtgaaataagccagggacagagacaaatactgcctg

SEQ ID NO: 843706 - DNA, 638 bp, Homo sapiens
ttttcatgttgtattttgtaacattgctccaaccataattcttcattctagaaagagcagttggttccagtagagcagttggttacagtttcrtttgtttgtttcttgaaatggtgttttgctcttgtcgcccaggctggagtgcagtggtgtaatctccactcactgcaacctccacctcccatgttcaagtgattctcccgccatcgcctcccgagtagctgggattacaggcgcccgccaccatgcccagctaatttttgtatttttagtagagacggagtttcaccatgttggccaggctgatcttgaactcctggcctcccaaagtgctaggattacaagtgtgagccacagtattagctgtgtattatttaaactatcaaaaaatcagaaaagaactaaatgtaaatcaagaggagagatttaaataaaatatcaaatgtcaaataccatggaatggtatataacaattaaaaaaagagagattggctcatgtaagaatctgaaacaagctccaaaatttactgttaaatgaaaatacatggcacagaacagtgaatgcatcatggtttcatttttatttaaagtgatacatgtataggtatataacagaaaaaagatagaaatcttcatcc

SEQ ID NO: 843707 - DNA, 638 bp, Homo sapiens
ttttcatgttgtattttgtaacattgctccaaccataattcttcattctagaaagagcagttggttccagtagagcagttggttacagtttcatttgtttgtttcttgaaatggtgttttgctcttgtcgcccaggctggagtgcagtggtgtaatctccactcactgcaacctccacctcccatgttcaagtgattctcccgccatcgcctcccgagtagctgggattacaggcgcccgccaccatgcccagctaatttttgtatttttagtagagacggagtttcaccatgttggccaggctgatcttgaactcctggcctcccaaagtgctaggattacaagtgtgagccacagtattagctgtgtattatttaaactatcaaaaaatcagaaaagaactaaatgtaaatcaagaggagagatttaaataaaatatcaaatgtcaaataccatggaatggtatataacaattaaaaaaagagagattggctcatgtaagaatctgaaacaagctccaaaatttactgttaaatgaaaatacatgkcacagaacagtgaatgcatcatggtttcatttttatttaaagtgatacatgtataggtatataacagaaaaaagatagaaatcttcatcc

SEQ ID NO: 843708 - DNA, 625 bp, Homo sapiens
ggacctcgtctaatccatactcctgtaaatgtggaaacaggctcaagaagctaggtaacaatgttcttaagtcccaccaaccaagggcagagccaagattttgatccaaatctgttattgtctccaaagcatayatcctctgtcacaagtgaggatttctgggtgcatctgggacctccaagccagctgttactgccatatgcctatgtcctccctctgctggggttcccaatagggagaagaggacagagctcttaaggctttgacaaaagttgagtccttggtctaagtcaatagtttctggattctatacactatattaggaaaggagaggaaagaaataattatgaacagtgttcttgtctgtcacgatcatatatgattaccatcattgcatctccataactagaaaactgaacaggtaggacaggtttgaaaaatccaaatgtgattttcagggtgggggattgaacaaggatatatgaaggtatcagtgtgacaatttagtaatcagtttcttcctcaataaatttaaagaaaaacccagaggcagtaagtttttttgtgaaaactaattatgacactttgaatttcaaaatgagtaaacatactttggaggaaagaa

SEQ ID NO: 843709 - DNA, 595 bp, Homo sapiens
ttactaaatcaaatcaacaatccttacatttaactaatccatacccaaaattaaagactgtcaggayaatttattccttgggtaaaaaaaataaaaaataaaaaaatagtaaaagccatattgtaggtggagcatgaaattacagcaagaaaagaagaaatgcttactattgtggatacagtttatttcagtaatgtgaaattttctaaactatatggctttgatgtccccagctcccattcccaaatcaaaataaataaaaactgaaaacaaaacaaaaccaccaagactaaaaataactcacattataaagaacttatctacacattaaatcctgagtatttcaaccaagtatctctaaataggtcaattcttggtataattcataagtatatactattaacatgaaaatcaatgatttctattaaattccacttctccctgccaaaaatggtagttttcttccttagctatgttatcttctatacatttaataagtagtcactgaacattctactgcaaaatactatttttcaatgacagaaaaatcatgtaggataaaataccaaattttatagtacatttggctgctcac

SEQ ID NO: 843710 - DNA, 595 bp, Homo sapiens
ttactaaatcaaatcaacaatccttacatttaactaatccatacccaaaattaaagactgtcaggataatttattccttgggtaaaaaaaataaaaaataaaaaaatagtaaaagccatattgtaggtggagcatgaaattacagcaagaaaagaagaaatgcttactattgtggatacagtttatttcagtaatgtgaaattttctaaactatatggctttgatgtccccagctcccattcccaaatcaaaataaataaaaactgaaaacaaaacaaaaccaccaagactaaaaataactcacattataaagaacttatctacacattaaatcctgagtatttcaaccaagtatctctaaataggtcaattcttggtataattcataagtatatactattaacatgaaaatcaatgatttctattaaattccacttctccctgccaaaaatggtagttttcttccttagctatgttatcttctatacatttaataagtagtcactgaacatyctactgcaaaatactatttttcaatgacagaaaaatcatgtaggataaaataccaaattttatagtacatttggctgctcac

SEQ ID NO: 843711 - DNA, 612 bp, Homo sapiens
ttgtctgtaacatcagacctaattgaatgtagctgtctcttgaaacattctcttccctaatattcgagtcaccatttgttctgattttattactaattttcctgctacctttctgggtattcctctgcagtcccctttatatgctcctgtttctcgctgtctcaaaatatgttagcatttctgaattgtatcttagagagcctcctcttcttactgtgaataaactgactatgtgtggtctttcatctcaatggcttcaaaccccatttatgtgctataggccataccttttctctgagctccaaatggattagtttagctgctattgcacggctttgtttgaatgtcttacatcaaattcaacattttcaaaatgaaaattcttatctttttcctcaaaggtgtttctacattaatcttccctatcacagtaaatccccatctctaaaacagaaacctgggagttacccttgattcatttctctgtgtgtmtttctctacgtctctctgtctctctccacattccaccacattcaccatattcctcacatccaatcaatcacggagtctccaactaacctcttatggttttttttttaatctatcacttct

SEQ ID NO: 843712 - DNA, 595 bp, Homo sapiens
acaactttttctttctttctttttctgaaagtaaaggagaactccatatgtctggaaaaataattcgaattaaccttcacatcggacaatgcacaaacccaggctttcccactactgtagatttgggttgctkagtttcaggttacattgctgagacattaatgctgttggggtctgaatttcttgaatcattgttgagtactggtgactaaaataaacaatgtgatatggtttagaaactttgttacgttctatacacttgtttatctacgtgtacatgttctaaaaatgtttacatatatgtgctatggtttgttctgttttgataggatgaatgggtgtttgtggctgggaattctaagaagcaaaatgtaaaaaaataaattatttgtagtaatcaaaacataattaagtgctagagagcacagtcatggatttcatcatggcttttagcatagtgagtgtgatgaaatggtagaggtttcctgtaatgccttagaaaaagcctgtatcacacttcactgcatagggacagtaactgctatcatataaaaccaatgctctgcaaaactagacatgagcctttgagatttat

SEQ ID NO: 843713 - DNA, 555 bp, Homo sapiens
ggcacaaactggtaaatagggtctgtggtttggttagtaagtgttcattgtcgttttcctgctttgattatgcactgtggttatggaagatatgactggggaaagctggaggaagggtgcatgggaactctacaccatttttgtgagtctaatattatcccccaataaaagttaaaaaacaacatggagatcagaggggtctaaggtggaaaaaagttgacaacctgatcccctaaatggcttttattcctttcttcttgtaaggcacagtcataagttttgatcattttagtttcctaaatggaagagagcttagccaaatcctagacagactggcagatgggtgatttgaaaacagctcagcggtattttctatgatttgctgctgcaggtgcaatattttacctggacttcatcggggaggacgtgctgcacatmtgcatgtttgcactggggtgagttctgtcctgcttgccagccccaaaacattgtgtgtagaattccaagcaggttgcccctctctctcccttattgctacagccgccccatccttta

SEQ ID NO: 843714 - DNA, 459 bp, Homo sapiens
aattcctacccttgttgctcaccacatcaacaataagagtgagcatttcatcagtgacagagccttgagcacaaataagtaatgtctcttgacctccttaattccatctaatatgtttgatcatcaatatctctcttagaatgctttatgcataactgaatccagtcaccagtcacttaaatcattcaaaagtccttagagcaatcaatggcaaaaggaaaaataatacaacataggtctctcaaggattcaatttcaacacaggctcttcaagggttcttctgatttaagctaccactactaacgtacacaactgaccaaaacaatattagtaattatgagaatgggactatatttaacatgaaattaacaaatmagtggcaaaagaaaaaaataggaaaaagcagagcaaaggtattcaagattatgaatgatccctgtagccctttccaaaacaaa

SEQ ID NO: 843715 - DNA, 634 bp, Homo sapiens
gatatggtttattagcaagtatatagtgtttaatttaatatgtaacccaccatttcagatactgacatatactttttaggtaaaataacattgccacactttcrtagctgttaatgttatgtaaggacattagtgaaaactaaactactgatcaattttaataaatgatgtttaatttgttgtctggatatggaaactataacttgatgtctaccttatatccccaaatcataattctaaacagcaaagtaaaactttctacatatactattaaacatatatatatatatatatatatatatatatatatataattttttattttttattttttcctgagacagagtcttgctctgttgcccaggctggtgtgcaatggcatgatttcagcttactgcaacctctgccgcccaggctcgggcaattctcctgcctcagcctcctgagtagctgtgattacaggcacatgccaccacgcctggctaatttttgtatttttagtagagacggggtttcagcatcttggccaggctggtcttgaactcctgacctcatgatccacccgtcttggcctcccaaacttctggtattacaggcgtgaaccaccacacccggcctatttttatgattgcta

SEQ ID NO: 843716 - DNA, 634 bp, Homo sapiens
gatatggtttattagcaagtatatagtgtttaatttaatatgtaacccaccatttcagatactgacatatactttttaggtaaaataacattgccacactttcgyagctgttaatgttatgtaaggacattagtgaaaactaaactactgatcaattttaataaatgatgtttaatttgttgtctggatatggaaactataacttgatgtctaccttatatccccaaatcataattctaaacagcaaagtaaaactttctacatatactattaaacatatatatatatatatatatatatatatatatatataattttttattttttattttttcctgagacagagtcttgctctgttgcccaggctggtgtgcaatggcatgatttcagcttactgcaacctctgccgcccaggctcgggcaattctcctgcctcagcctcctgagtagctgtgattacaggcacatgccaccacgcctggctaatttttgtatttttagtagagacggggtttcagcatcttggccaggctggtcttgaactcctgacctcatgatccacccgtcttggcctcccaaacttctggtattacaggcgtgaaccaccacacccggcctatttttatgattgcta

SEQ ID NO: 843717 - DNA, 625 bp, Homo sapiens
atattttaccaccatttttaaaatttaaattaaaaaaaatgttaaatcactgttatatacatcaactacaataagttatttgttccagaaccatctggtgatttgctccttagaccaaaaattagataatatgtttctttataaaatcataaagtcatctcactgtatacataatagcttgtagtgtttttcactttatagttttaccaaaaagttagattttaatggccagtgaaaatcaggctgcagtgtgtgataaatgtgtacagtcggtgtagtgtcattaccaaatttaactgtattcagatcatttgcatggcggttgtgaagagtagcctgttctttttattgtattctgttatctaaatgggtgcattaattttactgttgtctaaattagccacatagtttgcttgtattgtgttggagacctggggaagagttaaagaaaaaccctaccagtgctagtgaaagtgccacaacagcagacctggcctcatgtttagcytaaagggagactcaggtaaaatagtgaatgaataattccttattaaatgctggagaggaacacaagtttggctcctgtgttttccaggggccagcatttcttcctttcccgttagat

SEQ ID NO: 843718 - DNA, 603 bp, Homo sapiens
gcttaaaaattacaataactgacaggaaataatcactaggggaactaatagcagatctgagcaggcagaagaaacaatcaaagaacataaagtgcgattacattatccttagcaaactaatgcagaaacagaaaaccaaatactgtgtgttctcacttataagtggaaactgaatgatgagaacacatggacacatggggagaacaccacaaaacggggcctgttggagggtggggaatgggggtagggagagcatcaggaagaatagctaatggatgctgggcttaatacctgggtgatgggctgatctgtgcatcaaaccaccatggcacacgtttccctatgtaacaaaccagcgcatcctgcacatgtaccccagaacttaaaataaaagttgggaattaaaaaaaagaaagagagagatcaatgaaaattatccattctgaggtatagtgataaaaaaaaagaatgaagaaaaatgagcagagtctcagagacctgctctatgatgtgggataycatgaagcataccaatatatgcataatgggagggccaggaggaaagaagaaagagaaagaaatagaaacatatttgaataaata

SEQ ID NO: 843719 - DNA, 591 bp, Homo sapiens
gactccacattctgtgctttaaaagccttctagatgattctaaaagcaagctaatgtgtgaaaaccattagtctagataaatgatgtgaccaagagaagatttttttttctccaaaatactgagacgttgctaagctacaatttcaaatacattaaattcatcatgttaagaaaaaatattgggtaatgaaagcagcattgtcaagggaataaggcagtcaggagtttaaatactggctctgccgttttctagctgtgcaacattgagcacactttgtaacatctctgagccatacctttctcatttgtaaaataaagtcattgtacgaattgatttaaaggtccctaccagccccaaaattctgtatttctttataggcaagtatttagtatgaatttactgaatgcctagcaaaattccaataaatctgaaggatggtaaacaacaaaagataacatctaatttgaagaagttcaaaatccaactaggaaaacatgtcacttatatatcaaggcaaaagattagagagtgacataaaaatgtgagcctgacggtggcwaggtcaactcagaatttagaaagcctgccct

SEQ ID NO: 843720 - DNA, 513 bp, Homo sapiens
cccacccctccattttataaaatctctggtgtctgccaccagctggaagcagtcaactctttgcttaccagttgattgcctgctcctcccactcacgagggctctatcaaggcagggccttgcttgtctygttccctggtgtgtggcctggacgtagtaggtgctcaagaaaaatgtactgaatgaatgagtgcgtgaatgagtgagcatgtgggatcaccacactgctgtgaggctcatgtgaggaagggaatggaagctgctcggttctgggcctgtgcacagaaggcacccagccttagctgcccgggtcactgtcgtctgcttgacctgaaagcccacactctaaatgtctatgttgacgacgaactgagctgaattccagcaacccactccggcttctggacctttaagtaaggaggattgcaggcctcggctgggggacagcggtggctgcagagcggacagccaggcacaacgcgggcatgcacaagaccagctcacccgtccaca

SEQ ID NO: 843721 - DNA, 541 bp, Homo sapiens
agaagatattttcagtacctgtgatcaacagaggatttatatccagaatacaatgcagaactcctactaatcaataagaaaaagacctagtagaagaaaaaaatgctcaaaagaaacatagaaatttcacagtagagaaaatccaaatggccaataaatgtggagggggaaatacaacttaattagtaatcaaggaaatgctagttaaaccacaatgaggtcccattttatactcataaaattggcaaaaattaaaagaattaagaaaataccggccaggagcagtagctcacacctgtaatcccagcactttgggaggctgaggtgggcagatcacgaggtcaggagatagagaccatcctggctaacacggtgaaaccccatctctactagaaaaatacaaaaaattagccgggcrtggtggcgggcgcctgtagtcccagctactcgggaggctgaggcaggagaatggcgggaacccgggaggcggagcttgcagtgagctgagatgcgcccgtctctccagcctgggcaatagagt

SEQ ID NO: 843722 - DNA, 619 bp, Homo sapiens
gcctagtgtgtgttctgagtgcagttgctcaccaggggaaggatccgtccagatcacctgtgagaagagggagtcaggaaagacttcacagaacaggtttccctaagcctgcatcttgaaagttgggaagaaatttgtcctgtccgtgggaaggcagtccaggtgcaaacagcacgttcaacggcacgcgaaaccacgtggtgctcaagggaaatggaaaacaattgggctttggaggcgaaggcagtggggcgagcagggaccggggtgagcagggaccaggcctcgccgaccgcagtgggaatggggttttatctacagggtggttgaggcacattgcaaaggcagtaaggatttctactttttaaaggtaattctagtggtgtaggggaggggtgggtcttgagggtaggaaaaccagttgaaaagataactagcttaagagtggtgagaagctatgccagaagcagggcagtcagtggcagtaggaataaggaagtatatactagaatagttgggaattagaactgacagtttggtgagaggaaggaactgctgatgttcrcagacttctgatttgagtgggatggcagtattcccaagtgaggcagaagaacac

SEQ ID NO: 843723 - DNA, 620 bp, Homo sapiens
taacaaatttctcaaagagagttctgctattgttgtgaaagcttctattgtaaatgctgaaggaagacaagttgacagagttwttgttaatgtaaaacttcagatgcctctgaacatatcctttggaggaacagtgaatatttcttacatttttcccaaggaccacttcagggcttatttaatttttctgctgtgtatgtgagagataaaattgaatcaaattaacagagttacccatggatctgtcttattgttccatatttttagaggttaaatatgaaaattaccttctgtgactgggtgcagtggctcacgcctgtaatcccagcagtttgggaggccgaggcaggcagatgacttgaggtcaggagtttgagactagcctggccaacatagcaaaaccccatctctactaaaaatacaaaaattagctgggcctgttagtgtgcacctgtaatcccagctgtgcctgtaatcccagctactcgggaggctgaggcaggagaatcagttgaacccaggaggcagaggttgcagtgagccaagatcacaccactgcactccagcctgggtgacagtgtgaaactccatctcaataaagacgagacgagacgggacgg

SEQ ID NO: 843724 - DNA, 627 bp, Homo sapiens
cagcatctgcctcctgggttccagtgattctcctgcctcaccctcctgagtagctgggattacaggcgcatgctgccatgcccagctaatttttgcatttttagtagagatggggtttcaccatgttggccaggctggtctcgaactcctgacatcaggtgatcctcctgccttggcctcccaaagtgccgggattacaggcgcgagccactgtgcctggcctgcattttatttatatactcaacagttgatgaatatttggatgattcccaccttttgactgctatgaacattaataatattatgaaatgaacattttaatgctgctttgaacatttgtgtacaagtttttgtgtggaatatattttcatttctcttagttatatacctaggagtggaactgctgggtcatatggtttaactttttgaggaactgccaaactgtttttcaagtgactacaccattttatattctcaccagaaatgcacgagggttccagtttgtctgcatcatcaccaatacttgttattgtcatccaaaagctttaaygttttagcccccacagttaggtctgtgatccgcctcaaattaagttttgtatatagtatgtgacatagaggtcatgg

SEQ ID NO: 843725 - DNA, 597 bp, Homo sapiens
taattattagttccagggaaaccaaaattatacaagaaaggaaatttaattatagcattccatatgattcagctgtatatatttactacataatagcactgttagcactgaatattgagttgaacaaaaacggtaacttacattgtgaggaagggaggatggaggcttatgttgtgagggtggggcaggggtggaaagtactgtttttgtttgtcagccggtagtattaatgttatttgactttttaaataatgtatatgtatttaatataaattttaatttttaaataaaattagtaatttaaattataataaatcattaaagaaagggaataattccatttatgaaattatattaattaatattaatattaagaaattattggctttctttatttttttttaagacttagggtctcgctgtgttgcccagactggagtgcagtggctattcacaggtgtgatcatagagcgctacagtcttgaactcctaggctcaattgattctcctgcctctgycccccgaagtagctgggacttacagggtcatgccatagccctcagccttttctttatatctttaaatataaaagcatgg

SEQ ID NO: 843726 - DNA, 474 bp, Homo sapiens
aatacattttatagaacagacctgaagaaaaatgacaatgtaaaggacccatgcagaaaatgagaaattaaagcatatccaagtataaaattttgtaggtatgggagatgaatgtcacttgctgccttaagtatattcagaggaagagaaaggttcaatacatgattaatatatgagaagcttgtgcaagcatatgataatcagaaacaatcccaacatataaaggggcaaaagtcatccacaggcccattacaaatagaaaatgttatttgttaacaaacaaatgggaaaatcagtcttaacagtcttcaaataaatgcaaatgaagtgactgatatagtgactggagcctactgwaaagagtagttttgcttgcacagacttttcacacagatcgaattcaaatcccaacatcaccatttggaagctgtgtgaccttaggcctgctacttggcttctctgaaattcctcatg

SEQ ID NO: 843727 - DNA, 641 bp, Homo sapiens
gtagcctcgtagcaaccccacagaatgtgagaactgcaagttcttttcaggtcatccagtgggtttggtcttgctgccagctctggctgctgtgcagagaaagataatgaggccgcccctcagctgggctggaaggcattgccttcattgaacagcggagggccgggggttgcacatgctctgtatatttcccagttcctccttttacaaatgagtcaacttacatccaaagttcccttagtgttaactaaaacagaccaaattctcaacgtgtgctggacatagtagcattgcggttactagctccattctgtgaatagagaaacattagcttggaaccttgaaccactcccttgaagtcccccaggtaacaggaggcaaagccacgattcaagcccttgtccatctgatcccgggtacagctctgtccatcaaaccaaagtgtctcaaaatatggcttcttcctactgaggcagcaaaaaaatgttcctccacacaaataaaatactatagaggagtcagtgagaaggagcctgtttacttttagaatctctytttttttttttttttttttttttgagacagagtctcgttctgtcgccaggctggagtgcagtggcgtgatcttggctcactgcaac

SEQ ID NO: 843728 - DNA, 628 bp, Homo sapiens
aagaatctgaaagcatcctgcagacacatacatttcaatgaggtgcgaagcttttcaccacataaagccaatctccatccagaggaagagatgtgagataaattttacactcaggattccttcccacagattctcacaaatgccgttcaggtactggcagcaaccaaaagttcattgcagtttttttttttttttttttttttttaatatcacttgttccaggaattggggagggtgaaggctgggatggaagacttttccttggggccctaaatctacacagctgctttcaaatgagactaaaagcattatacagcataacttctatttatttcctttttttgttgaaaattttgttttaaaacttttctcctttctgtgtctctctgagctattatgccaggatgggccttggaaacacaagtagttcaagcaattagaacaaatgaaggaccttttcaaaccattctactttcttttgttcaattcatttaatgtatccattcattcagtaaaccattcacycattcattccttcatttgttgaacaaatttttaggagtgcctactacgtaccagacacagttctaggcattacaaatacatcagtgaggccaagcgccgtagc

SEQ ID NO: 843729 - DNA, 586 bp, Homo sapiens
gagaggcaatgggcatgtgtttttttttgttttttgtttttgagatggagtaccgctctgtcacccaggctggagtgcagtggtgcgatctcggctcactgcaagctccgcctcccaggttcatgccattctcctgcctcagcctcccgagtagctgggactacaggcacctgccaccacgcccggctacttttttgtatttttagtagagacagcgtttcaccgtgttagccaggatagtcttgatctcctgacctcgtgatccacccgcctcagcctcccaaagtgctgggattacaggcatgagccaccgcgcccggccatgggcatgtttaaaacaaaagaatggttattcttcttctcttttactacctcttttccggaaacaaattctgacagtccttttgctctacccccatttctggataacaagaggaagaagagtaatcaaaagaaggtgagaagcagcagaggtgaggggtggaatgggagggcatcccagagagcatatctacatttttatagcactgggaactttttttttmaaaagggatacttcctgtgaagtagatagtatgaaagtata

SEQ ID NO: 843730 - DNA, 619 bp, Homo sapiens
taatgctgctttggccttccccacaaagggctatgtgaggttttcaagtgagatctgtgaaagtattctgtaatgtgttaagtacaatatgtatatcagtaagtcatgaatattagagaatattgccatagtaaggttgtgagtacatttattagatttttttttgctgaacttgtgaatcagatagacttttttatgaggatttatcataatttggctgacaacatacaaatctgctttacctaaaattaaaagagaaaaaagaatgggatggaaacaggaaaagaaaacaacaaaaaaactatggccaaatttgttagtgtggatgcacctgttagaagagctgaagagttttgatgatataagatcacagttagcagcagcgtgaactggtagaaagaagagtcaagggaggagacttcaaattccaagtatgtttttgactcattgtgtgactatgggaagacattccttagccttcaagaatctaaatgttgagctttatcctcagaattactggaatcctaacgatctgtgggattctttctgcaacctcaatatcacaaagtggaatctggmaatactggaaaattggatcctgggtattgtcaaaagaaat

SEQ ID NO: 843731 - DNA, 575 bp, Homo sapiens
tgggaaaataaaatacctgctatgatatggacaaaacttatcttaatatacttgtttgaagatgggcgcttccaaaggaagctcatgagcatatggcgctttactgtgcgtttaaaaaattgtgctaaaaacatgttttgtcctagtaaatgtttttttaaaaatagactttgttttttagaggagttttacgttcacagcaggactaagtggaaggaagagaggtttctcatataccatctagccctacgaacatacagcttcccccaccatcaaaacttcataccacaatggtatgttacaattgatgagcctacattgatacaatgtcagccaaagtccatagattacattaggtttcactcagtgttgtacatgctataggtttgggcaagtattcaacgatgtgtccaccactatagaatcatacaggttgaacatctcaaatctaaaaatctaaaattcaaatgctccaaaattcmaaacttttgaagtgctgataagatgtccaaagcaaatgctcattggagcattttggatttcaaattttcagatttgggatgctcaactggtaa

SEQ ID NO: 843732 - DNA, 580 bp, Homo sapiens
gtacccaagacctctgatgaagatgtaaaaggagattaacgttggttttatgctggctaacacaataatcacttacagcccatggatcaaggaataattttgactttcrggtcttattatttaagaaatgcatttcataaggctatggctgccatagatactgatttctcaagaccaattagccaagactcattatactcaagctatcaaaaatcagggagaaaaaaattctgaaaaaagcaagagaaaagaagcatatcgcatacaagaaagactcaatacagctgtcagtcaatttctccactgaagcctcacaggtcaggagagtgagatgatatattcaaaatgctgaaggaaaaaagcttccaaacaaaagtattttactgagcaagtccttgcttctgaaatgaagaaaagataaagactttcacagacaaacaaaatctgagagagttcatttctaccaggccagtctatcaaggaatgctaaagaaaatatttcaagctgaaaggaaaggatgttaataactaaaatgaaaacaggtgcaagtatgaaactcactggtaaaagtaagtacac

SEQ ID NO: 843733 - DNA, 635 bp, Homo sapiens
atgctgggaatagctccagatacctaggcttgggatttggtggattctgtggtttttttggacccacctgatattcctgctactcaaagtgtggtccatgggccagcatcgccggcatcacctaggacatgttggaaattcagagtcccaggacccacccagaactactcaatcagaacctgcacattaatgtatttccccaagagatcagtaagcacattaaagttggaacagcacacctccagcccacaatctgcctcttcactaaccaggaggaaggagagttttaaaatcacatcccgaagcaggacagaggactgactgcccttactcattactgtggtgtatggcactaattaaagggagctgcagggctctttcctgcagagtcccgcttcagctccacatctgtattaattagggcgagaaatacaggaagagcaggtgtgaccgcagtgtgaaaaaggcactggagtcaggtgactccagctctgcgtctagcttgctgtgtggccttaggcttcagtttccccctctgaaaacaaagggaggarggatggaccagatgaagcttttcaaataggttctatgccatgtgcaattctcgatcatgtggcagcacccaccaggagctg

SEQ ID NO: 843734 - DNA, 582 bp, Homo sapiens
ttcaatagcagagtagggtgactatagttaacaaccatgtgttgtacatttcaaaatagccagaagtgaggacttgaaacattgyttacacatagaaatgataaattctggaggtgatgaatatcttaaattccctgacttgatcattaaagtgtatgcgcataacaaaatatcacgtgtcccataaatatgtatgaatagtgtgtatcaataaaaaataacaaagtaatcaacaaatctaaaatgtatggtttaatgctttcgtacttatatttgcaaccatgtaaacatctcctagatcaagatctacaatatttccaacacaggtgaaagttcccttgttttcctttccccagatataagcacattctgacttctatcaccacagagttagttttacctgctcttgaacttcatataaatggaatcatacagtatgtatacactccttgtgtctggcaattttctgtcagcataatatttctgagatgcacccattttgttatgtgtagccatagtacattcctttttattactgactactgttccattatatgaacatatgccacaatttatccattc

SEQ ID NO: 843735 - DNA, 515 bp, Homo sapiens
atgcagatattccaaaatctaaaaacaaccgaaatctgaaacacttctggtcccaagcattttggataaggaacactcaagctgtagcagcaaactggacacgagtggaggcacatttttgtttcttcactttaagtctctgacactgccgtgagagcacatgagaaggctggcctgctggcgggtatgcgcgacttgcagagagtggagttatctcgttcattttaccagctgacaatagatgtgtgagcctgcagctgagatcagccatgcctttcccagagccgtgggaacacccagccaacctataaccatatgagaaataggaaatggatgttgatttgagccactgagttttgatattttttgttatgtggccataactaactgatacagccaagctctgggaacaggaagatgataaaasagtctcatttcaaagtcccagagactgcagctttcaaaagccactggaatcacctacaggcacggaacatggttttctcagggagtga

SEQ ID NO: 843736 - DNA, 462 bp, Homo sapiens
tagtgactgtcatgattggattttcattacaaaatcatattagtgggtagatagcattttgatttttgtgtaaaaaatcaattagaagaaaggaaaatagaggcaagggacttgaaatcaagtttccagtctcaatttgtgtatgttcagattatctcttgagcaggacaaattttacaaaaagttcaagtaggaaatccactctctcttattgtcataagtttaagggattctgagaagtgagggccctaaacttggcttccatttctaacagtgctgggctttgatattctgacatcaaagcattttgtaaccttaaggattcacrttatatgaaaattaaaataacactaagatcttttgccttgggaaggtggattaatcaaatatttcctaaatttcttaagagattacctaaaagagcattaagacactcaagttatgatgcaaagtaggtgttca

SEQ ID NO: 843737 - DNA, 428 bp, Homo sapiens
tctccagggctgggattgagaagagaggagacgtatggtcaggaaaggttgtacttggcgggtactgtcatgagctggtgttactagtctctggrattggcagctgttcaaagctgagtcttaactctccttgaccgaatctatcttccttctgtctggccatctggtattctatctcttctgttgggaatcccatcccagctgtttcctcccagtcattcttgggagaaatccaagatgaccctggtatggcacccctccaagggctgctcaaaacctatatttttccttagcctttggagaaggccagaaagcatttaattttatcaatctcatacagtctggctgcttgtattggaggcagtcggctggtgtaaaggttcagggtggctttagagcccactctaataaacattgagaagctttgc

SEQ ID NO: 843738 - DNA, 428 bp, Homo sapiens
tctccagggctgggattgagaagagaggagacgtatggtcaggaaaggttgtacttggcgggtactgtcatgagctggtgttactagtctctgggattggcagctgttcaaagctgagtcttaactctccttgaccgaatctatcttccttctgtctggccatctggtattctatctcttctgttgggaatcccatcccagctgtttcctcccagtcattcttgggagaaatccaagatgaccctggtatggcacccctccaagggctgctcaaaacctatatttttccttagcctttggagaaggccagaaagcatttaattttatcaatctcatacartctggctgcttgtattggaggcagtcggctggtgtaaaggttcagggtggctttagagcccactctaataaacattgagaagctttgc

SEQ ID NO: 843739 - DNA, 614 bp, Homo sapiens
aagacaatggaaaaaaggcctcaaactcatttcggaaatcttcgaggcagcccctccaatcacaggtccgaaggaaagaatggttttgggagtcagacccagagtgccactgccctgtgcttcctcatgacactgctcttcacatcttggcagctgtggctccaatctcagctcaaagggtcccacatatagctcggggctgctgctctgaaaggtgcgagccgaaagctttggtggtttccatgtggtgttaagtcttcaggctggcagaatgcaaaagcgaaaaaagcttggaagcttccacctagattgcagaggatgtgtcagaaagactgagtgcctgggcagaagcctgccacatgggtggaacccccacagagagcctctactagggcagtgtggaggggaaatgtgggattggtccccccacacagaatctccaccagggaaccgcctagtggaactgtgggaaggaggctgccatcctccagacctgagaaagctacagccaccagcagcttgcaacctcagcctggaaaagccacaggtattcaactccgacccatgagagcagccttgggggcwgcaccctgcaaagccacagaggcagagct

SEQ ID NO: 843740 - DNA, 516 bp, Homo sapiens
tagctgatgaaatactttgtcttatgaaatctttataasaaatctcttaaggtaagtacagttagtgtctccattttgcagacaatgcaaccaaggcacgtgagtgtgaaataattagcccaaaattaaccattggtggagacataattcaaacccaggtcatatcactcctaggctagctctcttaactaataaatgaaatggcttctcctcactccttatgtagttaactcacccgtcaaatctcagcttaaatgtcccatccttggaagtcttccataactgccttcatcaccgttgtaagcacacagaattccctttaagttttcttcatagtgcttatcacaatgtgtaattttagatttattttcacaattatttgattgatagctttctcctcaagttgcatgtgggtaggaatgacagaaactgggtttctgttgtgtgccttcttgtgccgtgcccacagcaaggagactggctcagagtcagtagtctaaatattgttgaatgaat

SEQ ID NO: 843741 - DNA, 653 bp, Homo sapiens
ggctggcgggatcctccatatgctgaacgctggttccccggttccccttatttctttctctatactttgtctctgtgtctttttcttttccaaatctctcgtcccaccttacgagaaacacccasaggtgtgtaggggcaacccacccctacaaataccatccttctaagagagtattgtaaaactttatttacaagatggtgttgcaatcctttagccctccctctccctgacccaatatctcatttctggacaagttgtatccatccttactgtgttcatctctgtatctccagtagtctgggatgtcattgattctcgccagtgtttgctagaaagttgaatgtatgaatgaatgaataaatgaagatggtgcctacacatcatcataataacaatcaaggatttatcgagtacatactgtcttccaggcaccattctaaatgcttggtatatgtgcattccacacatataagagcttgacatatccaagcctcattgtgacgatccctgcatatgtgttgaaagaacacaaagcatgcatgaggaagtcaggtcttggtgggtcctgggtagagcttctgggtagaactttcataatccctcaaagccaatggtgtttccttactttacaaagccttctcagagccagg

SEQ ID NO: 843742 - DNA, 694 bp, Homo sapiens
ctacacatcatcataataacaatcaaggatttatcgagtacatactgtcttccaggcaccattctaaatgcttggtatatgtgcattccacacatataagagcttgacatatccaagcctcattgtgacgatccctgcatatgtgttgaaagaacacaaagcatgcatgaggaagtcaggtcttggtgggtcctgggtagagcttctgggtagaactttcataatccctcaaagccaatggtgtttccttactttacaaagccttctcagagccaggttctactgagctgtgtccggcccagtacagtgcagtttctggaccgtttttctcccctgccgggaagatgcagaagctgccgcttcaccgagtcctctaatagcaaggccttattttctctgccaccctggggcccttgctcaccatgagcttacttctgtgcagctccacacaacacaccgtaaaaggaaaatggtaattagaagtaacgcttgagcaggggaacttgcgtggaaaaatgctttagttaaaagaagcagtaaagattcctttaaagtgttagacacacacacacccatctagctgttctccttttgaaaggaggagatgagaggacacacaaggtgtattgtgcatctgtaggcaccgcctccttagggmttgaggtcgggccagtcctctagggatcctgctgaa

SEQ ID NO: 843743 - DNA, 493 bp, Homo sapiens
tagctgattgtcagaaatattcattttgtgttcatggtgttacacatggtgttacagtaggtagctagtcaggcatgagcggggcaggaaagggctccccscacaccccaccaagaaagtcaggtgaccctgggcaggtggctgttaactgtctctctaaaataataattggtcacagccagcaccagggaaaggcagtctccctatatagataggaaatacctgaaactggtgatgcgcagcttcctcatgagatctcaggagttgggcgagtgagctcacacatgtacattaagaggcaaaatggcaaagtttaactggtatatgaccttcggagggcattccaccggaaaagggacaaaagatgcaggaagtaggacagcatgtaaaaactgtaagtccgggatcaaacagtgcacttgacctccaagatgtccacatgaccctcttccaagtgtactttactttcttttcatttctgctctaaagcttt

SEQ ID NO: 843744 - DNA, 314 bp, Homo sapiens
ctaaaataataattggtcacagccagcaccagggaaaggcagtctccctatatagataggaaatacctgaaactggtgatgcgcagcttcctcatgagatctcaggagttgggcgagtgagctcacacatgtacattaagaggcaaaatggcaaagtttaactggtatatgaccttcggagggcattccaccggaaaagggacaaaagatgcaggaagtaggacagcaygtaaaaactgtaagtccgggatcaaacagtgcacttgacctccaagatgtccacatgaccctcttccaagtgtactttactttct

SEQ ID NO: 843745 - DNA, 314 bp, Homo sapiens
ctaaaataataattggtcacagccagcaccagggaaaggcagtctccctatatagataggaaatacctgaaactggtgatgcgcagcttcctcatgagatctcaggagttgggcgagtgagctcacacatgtacattaagaggcaaaatggcaaagtttaactggtatatgaccttcggagggcattccaccggaaaagggacaaaagatgcaggaagtaggacagcatgtaaaaactgtaagtccgggatcaaacagtgcactkgacctccaagatgtccacatgaccctcttccaagtgtactttactttct

SEQ ID NO: 843746 - DNA, 632 bp, Homo sapiens
ctcctgctcctcctctggggaaacggagacagccaggcagaggtgtctgcccagtggaggtggaccttgggcaagctgcatctccccggggggtgccctggggctgagctgctgccacctcgccatgtgacttgcagggtcaggttcactcacaaggcctgccctcctatctctcttccttcctttcctgcccagtgcccagcaatgaggcctcatcctcccactgcctccaaggcattgcatgatctagtccctgcctgctccacacctgccttacctggaaatccctccctgaatccctcactggttcagccacactggcctctcatttcctaaaacaaaacaaaacaaaaaccgagctctgatcctccaggcctttgcacacactgtttcctatgcccggagccttctttcttcccattcttgggctggcaaactcttcttcatcctttaggttttagccaaaatgtcacctcctctgggaggccttccctgattgcccyaatctccattgagcttccccatctattctctccacactaccctgcatttctgcttttgtcctttacagcagcacttactttgttacccatggagctacttgttcctgagggcatgaaactatttgtcag

SEQ ID NO: 843747 - DNA, 393 bp, Homo sapiens
tgacaggattaaatgagataataggtgtgaagaccctagcgcagtgcctggttcttggtgggcgtgtaggaaacggagttccttttctggaccatttgtttgttaggtccctaacaaacaggtcccccttcttagagagtttgttacttccttcgttgttgttatttgtatgttaggtcataagcttttttttttttttttttgagacagggtctcactgtgtcatctaggctgcagtgcaatgcgatcatatttaaagctcactacaacctcaaactcytgggcgtgagcgattctcccaccttagccttctgagtagctgggactataatcacatgccaccacacccagccataagctttacttgcagtgcttagagagcctggcacatgg

SEQ ID NO: 843748 - DNA, 393 bp, Homo sapiens
tgacaggattaaatgagataataggtgtgaagaccctagcgcagtgcctggttcttggtgggcgtgtaggaaacggagttccttttctggaccatttgtttgttaggtccctaacaaacaggtcccccttcttagagagtttgttacttccttcgttgttgttatttgtatgttaggtcataagcttttttttttttttttttgagacagggtctcactgtgtcatctaggctgcagtgcaatgcgatcatatttaaagctcactacaacctcaaactcttgggcgtgagcgatyctcccaccttagccttctgagtagctgggactataatcacatgccaccacacccagccataagctttacttgcagtgcttagagagcctggcacatgg

SEQ ID NO: 843749 - DNA, 619 bp, Homo sapiens
ctgactctgaaagcatcctgaaccattgcagtgtcagctcatacatttcctgcctttatcttagcatcttgagatatatttttctttctttcaagagcttctatgaatttttacataaaaatttatatcttggattttactcaggatttctgtcagtttgttatgggagggagtacttttttcagaactcctggtatgtcatttttctagaaattcaaaatctcttcattttatttttaacttttataattatattatctctgcaatttttcttgatcttaaattacctttgtgtctgactgcagtagttttagtagtttgattcttttccctaatacttttttgcccttttacttatttaatctgattcttctgaatgcccattttttttttaattgaagtatctctttttagattcagggtcttttgactcttgacaaaacataaaaccctttagagcagtgcttctcaacctgctgtctagaggctaccagcattagaaccatcttgattctttcttagaattgaaaattccctggcgttcctctcattcaasatgatcaaaatcatggaggcaggatcctagaatctatatttcaaacaaagattctatacactt

SEQ ID NO: 843750 - DNA, 633 bp, Homo sapiens
tgactttataactgcttatacagcacttaaaaggaagagaaataaaaccgattcattagatttaaggaattttaagagatattcctcttmcaaatttattgtttttaaaaaagtagaagtgcaataacaattatcattgaaaaatcatgtcacctcttaaagagttcaggaattcaagtcctctctgggtgtggtcatgagtgtctctagggaaatataggcaacttcaattagaaattctctggcctatgtggttgttctcaaggttcaggtgtctactgatcagagggtaaaatgaagttccttctttactccctttccagctccttcagccagagccaaagtatttctggctatagggcttaggcttattagaaatgcaaaataagtatctaatagtaggctttttaatagaactgttcttagctgtcaaaagcaaatttatattaccacattgattagttgctgaagacttgcaaagcttctatttctgatgggattgggactgactatagttaatgttttttttttcctgttgtgttgcatattccttgtttcctgctctgtgtgtatgtgtgtgtgtgcatatacatgtatatgtatatatgtaatagttcacacatatataataca

SEQ ID NO: 843751 - DNA, 633 bp, Homo sapiens
tgactttataactgcttatacagcacttaaaaggaagagaaataaaaccgattcattagatttaaggaattttaagagatattcctcttacaaatttattgtttttaaaaaagtagwagtgcaataacaattatcattgaaaaatcatgtcacctcttaaagagttcaggaattcaagtcctctctgggtgtggtcatgagtgtctctagggaaatataggcaacttcaattagaaattctctggcctatgtggttgttctcaaggttcaggtgtctactgatcagagggtaaaatgaagttccttctttactccctttccagctccttcagccagagccaaagtatttctggctatagggcttaggcttattagaaatgcaaaataagtatctaatagtaggctttttaatagaactgttcttagctgtcaaaagcaaatttatattaccacattgattagttgctgaagacttgcaaagcttctatttctgatgggattgggactgactatagttaatgttttttttttcctgttgtgttgcatattccttgtttcctgctctgtgtgtatgtgtgtgtgtgcatatacatgtatatgtatatatgtaatagttcacacatatataataca

SEQ ID NO: 843752 - DNA, 565 bp, Homo sapiens
aacaccatttcatatttgacaatgcttcctgtatgatttttataccaaataagccaaatatgtcatttttggactttaggggacctaatagctataagattaattaggtcagaaaaagacataatttrtaatttggttttggaaagtttgttactatcaaaggtttaaaacacttgatattatagaagagaatcataggccaccataagtcatctagccaaaataactcaaaaattttaaaaaggcaaaaaactttattcatggaaaatcttgttcaagagaaagccaaatttcacctttgcattagtgtactattaatatcaaacccaattcttagtagaaccttagacaaatctcttcaattttaatgtttgaccctaaggtaagattcttataaatcttatgaccctttacaatttttgttaaagagcagatcagtgctccaaggaaatccttttgtgcttttattccaatgttcaatttacagaaaaactgaataatgtcactttagctttagccaatatgttcacatataaaatttcttttaccagattaatctttcaca

SEQ ID NO: 843753 - DNA, 565 bp, Homo sapiens
aacaccatttcatatttgacaatgcttcctgtatgatttttataccaaataagccaaatatgtcatttttggactttaggggacctaatagctataagattaattaggtcagaaaaagacataatttataatttggttttggaaagtttgttactatcaaaggtttaaaacacttgatattatagaagagaatcataggccaccataagtcatctagccaaaataactcaaaaattttaaaaaggcaaaaaactttattcatggaaaatcttgttcaagagaaagccaaatttcacctttgcattagtgtactattaatatcaaacccaattcttagtagaaccttagacaaatctcttcaattttaatgtttgaccctaaggtaagattcttataaatcttatgaccctttacaatttttgttaaagagcagatcagtgctccaaggaaatccttttgtgcttttattccaatgttcaatttacagaaaaacygaataatgtcactttagctttagccaatatgttcacatataaaatttcttttaccagattaatctttcaca

SEQ ID NO: 843754 - DNA, 633 bp, Homo sapiens
tttttgtttgtttgtttgtttgtttgtttgtgatggagtttcactctgtcgcccaggctggagtgcagtggtgcgatctcggctcactacaacctctgcctcccaggttcaagcaattctcctgcctcagcctcccgagtagctgggattacaggcacataccaccacacccggctaattttgtatttttagtagaggtggggttaccatgttggccaggctggtctcgaactcctgacctcaggtgatccacccgcctcggcctcccaaagtgctgggattacaggcatgagccaccgcgcccagccaccccctatggcttagaagggactctaatttttctaagttaagcctttaacccaggtttggtcaagcgtcgttgctttttattaacaggggcctttaagcctctttgtcttaggagggactctaactctcctaagttgggcttctaacccaatcccatcctttacccaggtaaaacgtaccccaccacatatmcagagttggccaattggtgctgcagtctttttctttgggtcagaagtctcttcagtatagtcgcttcatggtggccaggaagatgttaccagaaaggagtccggatccagaccccaagagagggttctcaga

SEQ ID NO: 843755 - DNA, 596 bp, Homo sapiens
ccattgctcatccctgactagrtatgagcgagcaggacaaaaggcctcactggcctttatgaaacactcagggctagatccactgtccccctacacagaactgaataaataccatggacttaagaatctaagtggctcttcagcatctaaattttaaaaacccttttattgttaaataattaaagattcacaggggcccaggaacaggggcttatgcctatgatcccagccctttgagaggctgaggtgggcagatcacttgagggcaggattttgagaccagcctgcccgacatggtgaaacctcgtctctactaaaaatacaaaaatgagctgggtgtggtggcaggcatctgtaatcccagctactcagaaagctgaggcagaagagttgcttgaacccgggaggcggaggctgcagtgagccgagatcgcaccactgcactccacactgggtgactctgtctaaaaagaaaaaaaaagattcacgggggttggaaaaacagcacaagaggttccaatatacttcactcagtttcctctaatagttaaaccaccacaaagatctctctcatgctactccccttaataaccaca

SEQ ID NO: 843756 - DNA, 596 bp, Homo sapiens
ccattgctcatccctgactaggtatgagcgagcaggacaaaaggcctcactggcctttatgaaacactcagggctagatccactgtccccctacacagarctgaataaataccatggacttaagaatctaagtggctcttcagcatctaaattttaaaaacccttttattgttaaataattaaagattcacaggggcccaggaacaggggcttatgcctatgatcccagccctttgagaggctgaggtgggcagatcacttgagggcaggattttgagaccagcctgcccgacatggtgaaacctcgtctctactaaaaatacaaaaatgagctgggtgtggtggcaggcatctgtaatcccagctactcagaaagctgaggcagaagagttgcttgaacccgggaggcggaggctgcagtgagccgagatcgcaccactgcactccacactgggtgactctgtctaaaaagaaaaaaaaagattcacgggggttggaaaaacagcacaagaggttccaatatacttcactcagtttcctctaatagttaaaccaccacaaagatctctctcatgctactccccttaataaccaca

SEQ ID NO: 843757 - DNA, 587 bp, Homo sapiens
ctaagtcctcagatccctctctctctttactttttttaaatgtatactcactaccttggggatctcttagagtccatggttgaagttccatctatacrctcacaacttgcaaatttatacatccacttcagacctctctcctgaatttcagacccggagagtcaactacttacctactcccttcgatattgtgttagtccattcgggccactagaataaaataacttagattgggtaactgataaacaacagaaatttattgctcacagtcctggaggatgtgaagtacaagatcaaggtgccagcagatttggtgtctggtgagggcctgttcctcatagatggtgtctttttgctgtgacctcacacagtggaagggacaagaaaactcctacaggtctcttttataagggaactaatctcacttatgatggtggagcccttatgacctaatcacttctcttatgacttaatcacctctcttatgacctaatcacttccaactcttttgttgttgttgttcctaaaaggtcattctggcttcagagccccacctcttaataccatcaccttgaaggttaggtttc

SEQ ID NO: 843758 - DNA, 645 bp, Homo sapiens
tatcctggttgtgatattgtactacaatactgcaagacgccactacgaggggaaactggataaaaggtatatgcgatttctgtattatattttgtgactgcttctgaaatatacagttatctcaaaataaaaagtttaattagaataaaaatgcaattgcagtctgtgtattttaagtttttataataaaatgttgggcaaaatgcaatgtaactgtagtaatgcaatcaagttcccccagatcactaccaagatagggatttctttcttaatatgaaagacggtgtaaatgaccaatactgcacatttgactcaccgtttgtttctggaggccatctactttgtcctcagcattgtcttctttatctgtgttgcctctaaataaaagtaaaaaaaggcatcacatactacctaggtcccccttatccacagtttcagttaccctggtcaaccacagtccaaaaatactaagatattttgggggagagacagggcgagagagagagatcacattcacatwacttttattacagtatattgttataattgttctattattattgttgttaatcccttactgtccctaatttataaattaaactttatcataggtatgtttatataggagaaaatacagtttataca

SEQ ID NO: 843759 - DNA, 598 bp, Homo sapiens
atggccccaagtaaaggtggcatctctatcctatcctcgcctttatctaaactctgtgaccgatcaatagcatatgatggtggtggtgctctgccagtctcccagtcccagactgaagcactagcagcttccacttattatctcttgggactctagctcttgggacccaaccaccatgctgtgaagcagcccaggccacacagagaggccacgtgtacatgttcagctgacagcagtatcaaatgtcagacatgagagaggaaggcttcaagatgactccagcccagccaccgtctgagaacaaagtaagaactgcctcactgatgccattcaaagcccagcaccatgagagataataaaacgttgtttgaagatgctaacttttggagtgatttgttgtatcagtagataaccaggacacaggcccacagaggttcagtagcttgctgtgcttctcagggggctaggttaagagtataggttttgttgctgggcrcggtggctcacgcctgtaatcccaacactttgggaggccaaggcgggcagatcacgaggtcaggagaccgagaccatcctggctaacacggcgaaaccccgt

SEQ ID NO: 843760 - DNA, 609 bp, Homo sapiens
tttattttgagatggcgtttcgcgtgtgtcacccaggctggagtgcagtggcacaatctcagctcactgcaacctccayctcccgggttcagtcaattctcctgcctcagcctcccgagtagctgggattacaggcacctgccaccacacccagctaatttttgtgtttttagtagagacggggttttacctagttggctaggctggtctcaaactcctaacctcatgtgatccacccgcctcggcctcccaaagtgctgagattacaggcgtgagccatcccgtccagcccttttttttttttaaactgagacggagtctcactctgtcgcccacgttggagtgcagtggcgcgatctcggctcactgcaatctccgccgccaggattcaagcgatcctcgtgccttagcctcttgagtaactgggactacaggtgcgtgccaccacgcccgactaatttttttgtatttttagtagagatggggtttcaccatgttggccagtctggtcttgaactcctgacctcaggtgatctgcccgcctcggccctccacagtgctgggattataagcgttagccaccacacccagcctgtattttcattttca

SEQ ID NO: 843761 - DNA, 609 bp, Homo sapiens
tttattttgagatggcgtttcgcgtgtgtcacccaggctggagtgcagtggcacaatctcagctcactgcaacctccacctcccgggttcagtcaattctcctgcctcagcctcccgagtagctgggattacaggcacctgccaccacacccagctaatttttgtgtttttagtagagacggggttttacctagttggctaggctggtctcaaactcctaacctcatgtgatccacccgcctcggcctcccaaagtgctgagattacaggcgtgagccatcccgtccagcccttttttttttttaaactgagacggagtctcactctgtcgcccacgttggagtgcagtggcgcgatctcggctcactgcaatctccgccgccaggattcaagcgatcctcgtgccttagcctcttgagtaactgggactacaggtgcgtgccaccacgcccgactaatttttttgtatttttagtagagatggggtttcaccatgttggccagtctggtcttgaactcctgacctcaggtgatctgcccgcctcggcccyccacagtgctgggattataagcgttagccaccacacccagcctgtattttcattttca

SEQ ID NO: 843762 - DNA, 550 bp, Homo sapiens
tacctacatatggttttactgtgatgtgcctaggtgttcactggtctcaggcrgcttctttaatatgtagcttgatgtcttatatcagtttaccaaattctcagccattttccctttctttgctctattctgtctttcttctccttctgcatctccaattacacatatgttagttctctcactatatgctatatgtcacattcattcttttctatactttctagtattattttcctctccctgttttagtctggatatgttctgctaacttatctttcagtttgatcaacctctcttcagctgggtccaggcttctctaaatagcatacactgattattttatttttatcattgtatttttatttttgggattttgattattttcttttttattataatgagtctcttgaatacagcacacaggtggattttgactctatctggcttgccactctgtgtccttaaattgggggcatttaacccatttacatttaaagttaatattgttatgtgtgaattgtatcctgatatcatgatgcctgttggttat

SEQ ID NO: 843763 - DNA, 480 bp, Homo sapiens
tctcaggcttgtcttcacctttctcaagagcttcccttggacaaggaggtcttaggaaagagatcatgatcaaccatcaacacagacaccatcagatgtactctgtgggctgtaagggcatgatctccaagagaccttatttggtgtttccttggatagcctcccttaccaagcatcctctcaagccacccccaaacatgcctactagacactacaggcatatcttgttttattgagccttgctctattgcacttcacagctatagcgtttcatacaaattgaaggtttgtggcaactctgcatcgagcaagtcatctggcaccatttttctaacagcatgtgcttacttcatgtctctgtgtcacattttggtaattctcaaaatatttcaaacttgctaggcgcagtggytcatgcctgcaatctcagcactcgggaggccaaggcaggtgaatcacctgaggtcaggagttcgagac

SEQ ID NO: 843764 - DNA, 635 bp, Homo sapiens
aaatgctttcttctgctcaatttcttatctattccatttttcatttcattgtattttttagctccagtttgatatttgatttctgtttgatatgttctataatttcaatctctcaytaaatttatcattttggtcattttattgtttgcctgatttgattgaattgtttctctgtattttcttgaagttcactgagtttccttaaaacaattattttgaattgtctgtcaggcagttcatatatctccattcctttggtatcagctactaagagatcactgtattctttttttttttcttttttttttttttattgatcattcttgggtgtttctcacagagggggatttggcagggtcataggacaatagtggagggaaggtcagcagataaacaagtgaacaaaggtctctggttttcctaggcagaggaccctgcggccttccgcagtgtttgtgtccctgggtacttgagattagggagtggtgatgactctcaatgagcacgctgcctttaagcatctgtttaacaaagcacatcttgcaccacccttaatccatttaaccctgagtggacacagcacatgtttcagagagcacagggttgggggtaaggtcacagatcaacaggatccc

SEQ ID NO: 843765 - DNA, 613 bp, Homo sapiens
gtggtctggtcttatatccctcagtacactagataatctcaaatcctgcacttagattactggcactgcatggataggcacctagccaaagcaaacaataaaagtgccaccatcccaaatctgaaatttttcctaaataatagccaaatacaatgaccagcatatgataaaggaaagctgggcaaacaaacaagacagatgagcaagaactagcagaaacaactgacaatggaagcacacccgcaaatatgtgagatattagaattgttagacacaaaatataaaacaactatggttactatattagagatttttttagagcttaaaaaatatctaaaagaactctgaaaagtgaagtaacaaatctgaacaatgaaccaaataaaatgtctagaactgaaaagtatgatcaccaaaatttaaaactaaatagaagcatttaacagcagattagacacagctgaagagaccattcattaactggagtcayccagaatgcagcatgaagatataaaaagaggtggtacagatggagtgagaaagtccagcatccctttaactggagtcctgggaggaaacaagtgaatgctggaggggcattatgtgaagaagt

SEQ ID NO: 843766 - DNA, 659 bp, Homo sapiens
tccgggctctggagaaacatgtagatttgagagagaacgacaggtttgccttctactcattcttaaaactaaacacttcaaactaaaaatgcagaactaacccactgacccctgttgctaatggtgctatgtggcccttcctgccgacaagctcgcagcccctgatgggggctgtgtagcccttcagcctgagtaggggttgtgagcccagccccgtcccggaatgccacggtcatctggtgctctaccactgggcagagggagggcaggactgcctttcggggtcctgaacccaccttccgggttcaagatattcttgtgcatcagcctcccaagtagctgggattacaggcacctgccaccacgcctgactaatttttgtatttttagtagagacggggtttcaccatgttagccaggctgtcctcaaaggtgatctgcccgccttggcctcacaaagtgctgggattacaggcgtgagccactgcgcccggccctcgcttccaaagatttttcattgttgttcccagaagaggctgtatacccattaaacaataacttttgctagtattttgttgagkattttagcatcaatttttgcatcataagggattggtctgcagttttcttttctggactgtagtgtccttgtctggctt

SEQ ID NO: 843767 - DNA, 519 bp, Homo sapiens
acattgcacgaatggcggatgtatccagggccacttygagcatgcaaccttgtcctaagtaagcttctctgcactgctccttcagaggggttcagttctaaatcttcaatctcaatccagattagaattatagagctaatgttcaacagtgcatcgagtttaattttacatttcctatccagttctactcaaagcatggaggtttttatagaaagaaagctttcaggaaagaaactattaaaaaaagagtacttcaaaaatctctctccaaatttcaactgctttacttacctagtcattagattacttgatggttatctcggttctgagaaggggttttagtgctgcctccacagcagatcagcatatacccagtgccaggttgtgggtatggcatggtaccagggactgcgggagatccacagaaacataaggaaggtctttgcccttaggggttttacattgtggttgggaaaatgggacatatgtatacacatggaaaatgaaataactaaacaa

SEQ ID NO: 843768 - DNA, 458 bp, Homo sapiens
ctgacttcaaaaatgaagccgcggacactggcagtgagtgttacagttcttaaaratggtgtgcctagagttttttttcttcagatgtgtccggagttttttccttctggtgagttcgtagttcttgctggcttcaggagtgaagctgcagaccttcgtggtgagtgttacagttcataaaggtggcgcgtccagagttgttcattcctcttgtctggagttcgtccctcccagtgagctcgtggtctcaccggctccaagagtgaagctgcagaccttcgtggagactgttacagttcataaaggtggcgcaaccagagttcttgtttcctcctgtcaggagtttgtctctcccagtgggctcgtggtatcactggccactggcttaaggagtgaaactgcagaccttcccagcaagtgttacagctcataagagccacgcgcactcagtccgcagc

SEQ ID NO: 843769 - DNA, 587 bp, Homo sapiens
aaaaccaaaatgagataccgtctcacaccagtgagaacggygatcattaaacagccaggaaacaacagatgctggagaggatgtggagaaataggaatgcttttacactgttggtggttagtgtaaattagttcaaccattgtggaagatggtgtggcaattcctcaaggatctagaaccagaaataccatttgacccagcaatcccattactgggtatatacccaaaggattataaatcattctactctaaagatacatgcacacatatgtttatttctatttgcttatttaatgtctttctggactaattctataaagtctgtaatttctataatgtgccattgaatctgcttggttaacttaatagttagccaatgacagggcagaggttttcttaaagaccttgaatcaataaggctttttgtttttaccctttgctaaggggctctgttgtgtatatcgggacatatcctcaattctcaagcaggcagttttaaactctgctatggccttcacctcctgtttttaaagagacatcaagtcaactaaaggtgagcacttagggccttcttagatatttcctgg

SEQ ID NO: 843770 - DNA, 593 bp, Homo sapiens
gtaaagaagaaaagaaggaaggagraagagaaagagggaagatgtatccgtgattgcttccttccagactggcacaaaaatgaaaagctagctctccttgatgggacatgttgatggtatgcaaggttggatccactttgcacacacaagctccttctgctatgaaagagatttaacaacctcaatgaatccttagggtgtatggagtggtgacggagattattagaaaaaaattcttatctacctttgatgtggaaggaaaggggggcccaaagtggtcattataaccaacttgaatcattacttgagaaccagcacagcatatcgtcaagtgtggagactccagaggctgagtttgaatctaagctttgacacatatcaatatgaccttgagcaagtctcataatagctatatgtctcagcgtcactatttgtaaaatgggaacaatagtatctactgagaaaacttgttagaaagattaaacaagtcaatagatttaaagtgctcaaaagagtagctggcatactcttctgtaatactcaataaatgcttgctataataattagtggtgaagaatgtgtactccaaagcc

SEQ ID NO: 843771 - DNA, 557 bp, Homo sapiens
aggtgttggttcaaaaaaaaaaaaaagcattctggagtaattgacagcactaaacattttgcttttcagtgaaatttaagagttggtggttggaagctattcatatacacagcatcagcaggaaatccccaactctggatttttaagcatgaggctatttttattttttcattcctatttaagactatttcagaatacgaattatagactcctggttctcactttggagtaatttataatcttagaagattataaatatatagattttctaaaaggtctatccaacattgtattatttaaagtattgattatttaatatgaggtttattagtctttggttttttccctgctaaaattatttcatttatttattcgctttctcccttaagcaacttgtgtttattaactgctgaatctactagaatgtcttcctataagtattaagagtcctagtaaaaataacaacaaaattcataaacatgcacaaaawgctcaaatcataaggtaaagcacaaacaaaataagttaagccacagaaaggcagaagatatttgcaa

SEQ ID NO: 843772 - DNA, 684 bp, Homo sapiens
tgcaaggtctcaaaagatctgcctttaagggccctttcttgagaagytgttggaggatatcctgcaacaaagaaggagtaagctaggtaagaagaaaatatgtttgctacatgaaacaatagaaccaacttaggatacaagttccagggtgatgctgaagggagacccaggatgacagctgacaactggaggatatcctgcaacattaaaggaataagccaggtaagaagaaaatatatttgctacatgaaacaatagatccagcttaggagacagattccagggcgatgctgaagggaggccccagaacatcagctgggaatttggtataaaaaccaatcagtccagggcacaacagatcagaagactccaagcaaaacttcctcaggatgtcaaatctgatagaatacctggtgtgtctaaaagtcttgagaggctatttaaaaaattagtgaatgtttgggattgaaatagtagtgggtgtatagaaaactaagccaatataaaggctagactttgaatcattaactccagggaagggaaagcaaaatgttactgaggaaaggaaaagtaaacatgattttactacatggatcaactgtgaatttacaaagcttaataaggtaagcacctgatagtaaagtaaccaatgttatgacttaacagtactgggaggatgggaga

SEQ ID NO: 843773 - DNA, 684 bp, Homo sapiens
tgcaaggtctcaaaagatctgcctttaagggccctttcttgagaagctgttggaggatatcctgcaacaaagaaggagtaagctaggtaagaagaaaatatgtttgctacatgaaacaatagaaccmacttaggatacaagttccagggtgatgctgaagggagacccaggatgacagctgacaactggaggatatcctgcaacattaaaggaataagccaggtaagaagaaaatatatttgctacatgaaacaatagatccagcttaggagacagattccagggcgatgctgaagggaggccccagaacatcagctgggaatttggtataaaaaccaatcagtccagggcacaacagatcagaagactccaagcaaaacttcctcaggatgtcaaatctgatagaatacctggtgtgtctaaaagtcttgagaggctatttaaaaaattagtgaatgtttgggattgaaatagtagtgggtgtatagaaaactaagccaatataaaggctagactttgaatcattaactccagggaagggaaagcaaaatgttactgaggaaaggaaaagtaaacatgattttactacatggatcaactgtgaatttacaaagcttaataaggtaagcacctgatagtaaagtaaccaatgttatgacttaacagtactgggaggatgggaga

SEQ ID NO: 843774 - DNA, 579 bp, Homo sapiens
actccagggaagggaaagcaaaatgttactgaggaaaggaaaagtaaacatgattttactacatggatcaactgtgaatttacaaagcttaataaggtaagcacctgatagtaaagtaaccaatgttatgacttaacagtactgggaggatgggagatgggaaggctatacttggcatgatggtggtaggaatatgagaggggtaagctcttatttgccatagggacagttgtcactatttttctggcaaatcaagaagtagcaattattttcctcagagcatgttatttagaggtatgaaggtaaatttaaaaataattaggtaaaaaagttgaatttatcttgtaactttgtgtagcaaattcccacaaacttagcagcttaaaagaacatctatgaaaaaagtcattgtttctcaaaagttcaacagaattatcaaaaaacccagaaattccacttgcaagtatayactcaaaagaagtaaaatttccaataagcacatgtgcaggcatggttatggtagtagcatttacaatagctgaaaggcagaagcaacccaaatgcccatcctcagatgaa

SEQ ID NO: 843775 - DNA, 602 bp, Homo sapiens
agaattataccatgaggtagaattataaccttatttacttttttaaatttatttaggcaattctattctttctcttcaatttataccattccaaaaaatggagtaatacgcgcctttttctttttttgagatggagtttcgctcttgttgcccaggctggagtgcaatggcgcaatcttggctcactgcacccttcgcctcctgggttcaagcgattctcctgactcagcctcccgagtagctgggattacaggcacccaccaccacgcccagccaattttttgtatttttagtacagatggggtttcactatgttggccaggctagtcttgaactcctgacctcaggcgatccacccacgtcagcctcccaaaatgctgagcgtgagctatcatgcccggccgttcttctttaaaaacaaaacaaataaacaaacaaaaaaaccctaagagtggaggaaggggtgtgcttattagtggtgtcttttgaaaatgtcctgggtccttttaacttgagttatcaactaaataggacaagtctgtattctgcarcatgaggaagaatatccagaaatcatgaccttgtctatgtgaaataagact

SEQ ID NO: 843776 - DNA, 627 bp, Homo sapiens
tacctcagttctttgggatttgcatggtgttattctaactctgtgatttcattgttatagttttctaatggtaattatttgtgggtattagagagaccaaatggatcattttcttaaatgaatgggtagcttaactcctctacattaaaatgtataagtctatcagaatttgaagtgcaagaagaattcaaatagagcttctacctacactaaatgacatcaaaagcagaaatagagtttcaaaaaaatctggaagtatcaaaagtaattattggcagcctgtgatttattaacagccacattcaaatcaatcttgtttgtaacaaactttgtcacattgaaatgaagttaaggtggccaatgtccaacacatgccctttgttggctggaggttggtaaagagactggagacaatttgctcaggcaggagaatccataaactctcctcactgggccttgccttggagatcagcattcaggaaagggggttatacactggattccttcttatatgacctagtagtttgatagtgaattaaaaaatcagttataacagatggactcacacagatgcaaatatatatacatactgtgtrcattttgaattgtataatatggaaatattca

SEQ ID NO: 843777 - DNA, 504 bp, Homo sapiens
cgcgcctggcctcagttcttagtgttgaataagagtcacttttaattatttgacattgggaaaacagaggtgtagggaaacagacttcagaatcagaactgtgaaggtaagtattgggcatgatggaggctgtcttcctccccattccgccccatttgtgtgatctcttaatacctccctgaagtaattattctctttacccactaattggtgagcttctggagcaggctcgaggctttcaatctctagggcctagcactgtgccaaacacataaacactttgtgcgttaattggatagttataggacatacatttgatgtattactgaagcttatttttttctgcattaacatagggaagatcataccttaacgccacgtagctcacagttctttttgtatattttgctgttgattcttaccacataccatgaaatcctagttccatttatgggggaggacacttamatgctttcctttggtcaaaataaggacttggacaag

SEQ ID NO: 843778 - DNA, 495 bp, Homo sapiens
tctaacttcccccaagagcatcttgtttttgttttgagacaatctcactctgtcacccaggagggcagtggtacatcacagctcactgtagcctcaacctccygggcccaagtgaccctcccaacctcagcctctcaagtagctgagaccacacaggtgtgcaccaccatgcccagttagttttctttttatagagacaaactttcccactgttgcccaggctaaactggaactcctgggctcaagcgatcctctggcctcagcctcccagcgttgggattacaggcatgagccgctctacccagccccaaagaacatcttgttacacattctagctctggagttagagtgctcagggtcgaattctggcttcaatatttattagctgtgtgagcttgggcaagggacttaacctctctgatcctctgtttctcaatccgtaaaaagagggaaatagtagcacctactgcatagggttcttgtgagaagtaaatg

SEQ ID NO: 843779 - DNA, 640 bp, Homo sapiens
ttaattcctctcttgcttgggtgagcagttttatcagtcagtctctttattacagttctgggaattcttacccagtccaaatgatatgattgaaaacttaccagaaacctgtagttaagagtgcctgtcaggaaaaaaaagtgcttgtcagggtcttttttactttttccatgaatctccttgaagacatgatactctaggattttacttcttgagaagagttttcactttatttttaattttttatttttttgagacagggtatcaccctgtcgcccaggctagaatgcagtggtgtgatcacggctcactgcatccttgacctcccaggtttaagcctccctggtagctgggacccacaggcatgcaccaccacacccggctaatttacttttattttttgtagagacaggatttccctatgttacccaggctagtctggaactctcaggctgaagcgattttctgaccttggcctcccaaagtgctgggattataggtgtgagccaccatgccagmcaagaactttcagaaactgcatcagaattaagcaattaactatagaaccaacttaattgtcattgttaaagacacaattgacaaatttgttcatttctgtgatctgcagtaatttaacata

SEQ ID NO: 843780 - DNA, 573 bp, Homo sapiens
tggttgagatggaagaaaattattttttgtttcaatttatgtgagttattttttcaaacartgactcagctgttagggcataaagagttgtaagttgtctgcacctaattacttaataaacaaaactattaggtatttctttaggccttggggcaccatgaaaaagttactgagacactgaaggcattgggaacggagaaactgtgggagtccccgtgttaggcattttacttcatcttatctgggcgtcagttttcctatagataaactggaggccaggcacagtggctcgcgcctgtaatcccagcactttgggaggccgaggggggtagatcacctgaggtcaggagcttgagaccagcctggccaacatggtgaaaccccatctctactaaaaatacaaaaattagccaagcatggtggcagacacctgtaatcccagatacttgagggactgactgagacaggagaatcgcttgaacccaggaggtgggcgttacagggagccgatatcgcaccattgcactccagcctgggagacaagagtgacactccatctcaaaacaaaaaaaa

SEQ ID NO: 843781 - DNA, 605 bp, Homo sapiens
tctgtagtcacagttggctaccttctatgacaaacagtccaaattcccaatggtttarcacaataaagtcctatttcttattcacttcatagtccaatgggactggttcttgttggcagtcttcttccacatgctccatcagggacccaggcttttgttccactctcctctgtccgcagagaactatctattcaactggcatgtgaggagaaagagaaagctaagatcagtcaggggaattttctggaccattccaagaagtcaagtaaatgcactacattcatatttcactggcctcactcagtcacatgaccatatcccagccctttgggagactgagacaggaagattgcttgatcccaggaagtcaaggctgcagtgagctatgatcacactactgcacacctgcctgggtgacagagcaagagcctgtctcaaaacaaaacaaaacaaaaaaaggtaccaaacaggaatggaaaaggaaagaaataccctggcctatgtctcctcctgctctcacatcatctaccagtgcctagatacaagggagactgggaaacataatccactatatgcccaggataaacagggaaaggatttggtca

SEQ ID NO: 843782 - DNA, 604 bp, Homo sapiens
gatacaagcatacaatgtgtaatatcaaatcagggtaactgggatatccgtcacatcargcatttattatttctttacattaggaacattccaatttcactcttctagtaatttgaaatatacaataaattattgttaaatgtagtcaccctattgtgctactgagcattagatcttattccttctaactatctaatttgtttatccattcatctgttgatgtgcatttgagttgattctaacttttgcctattagaaatgatgctactatggacatttatgtatgaactttcatatatatccctctacttcccttgggtgtacatctaggagtgtaatgggtgggtcatatggtaggtacatgtttaactctataggagactatcaacctgttttctgtctgagagttccaattgttccaacactttatagtaagtctttttaaaatttttgctaatctgataggagtggtgatatctcattgtggttttatttcacatttccccaatgactaatgatgttgaacatcatttttatatgttacttgccatttgtacatcttctctggtgatattgtctcttcaaattttgtgttgattttaaa

SEQ ID NO: 843783 - DNA, 604 bp, Homo sapiens
gatacaagcatacaatgtgtaatatcaaatcagggtaactgggatatccgtcacatcaagcatttattatttctttacrttaggaacattccaatttcactcttctagtaatttgaaatatacaataaattattgttaaatgtagtcaccctattgtgctactgagcattagatcttattccttctaactatctaatttgtttatccattcatctgttgatgtgcatttgagttgattctaacttttgcctattagaaatgatgctactatggacatttatgtatgaactttcatatatatccctctacttcccttgggtgtacatctaggagtgtaatgggtgggtcatatggtaggtacatgtttaactctataggagactatcaacctgttttctgtctgagagttccaattgttccaacactttatagtaagtctttttaaaatttttgctaatctgataggagtggtgatatctcattgtggttttatttcacatttccccaatgactaatgatgttgaacatcatttttatatgttacttgccatttgtacatcttctctggtgatattgtctcttcaaattttgtgttgattttaaa

SEQ ID NO: 843784 - DNA, 478 bp, Homo sapiens
aaggtgatgaacgcatttaaaaaggaagataatcatcaaatcatttagggtttccctttrtctttaatgtagcatgcaggattttcaaagtgcttttctgatttttatagtacataaaatatttaacacaatacctggaaaatagtatgagtcataaagagtctactgttattattagatggtatatttatgtattataatgtgtgtcctgcaaataattgatatattattccaaattagatgtcacaatgcaaagcataattaaggaagggtctaaaaatagtagaaatgaagtttaaatttataaagcttctatgtagactggcagtctttttgcttttaaaaaaagtgaattataacttgattattaagggtgacactaatattaaaaatagtgataaaaatttgctattttcatattttattcagaggaaaaactcgagaaaaaagatagaaaatggagaactgtcagtattgg

SEQ ID NO: 843785 - DNA, 456 bp, Homo sapiens
acggaaacctcaaagcaggtaagtgactggtcasaaaaatcacaggtaataaagccaggaatcaaacattatcgcagcatgctagaaagcctatctgcttttgatttctcagtcacattattttttagtaattcttaaaaaaaaaaaaaaaaagccttggccaggtgcggtggctcacgccagcactttgggaggccgaggcaggtggatcacctcaggtcaggagtttgagaccaggctggccaacatggcaaagcccggtctctactaaaaatacaaaaattatctgggcgtggtggcacatgcctgtagtcctagctatttgggaggctgaggcaggagaatcgcttgaacccaagagatggaggttgcagtgagccaagatcgcgccactgcactccaacctgggtgacagagagaaactctgtctcagaaaaaaaaaaaaaagcttgtgtg

SEQ ID NO: 843786 - DNA, 569 bp, Homo sapiens
ctcccaaagtgctgggattatagctgtgagccactgcacccagccatcagcttttatttcatatgcatgcatagcatcctacaacaataactttaaaaaaaataagwcatcaccattttctatgattgcaacctatatagagaaatagcctggtgttatcctacaagacaatttccttaaaatgtgtgagtaatggctattaaatcattttatggagccatttctaaaataatactctttgtcactgttaccataattacttttagttgtggccatattttaaagaacagaatgctttatcgtgactgttataaatacaaattatttttccccttgtgggaatcatcaggctaatttgtttaccattttccttctaaaacagatcattattaaaaggaaatcagtacaatgattgtgattaagatcaacagctctcttaattctttgttctgttgaatatcaagttttttctgccttcctacctctgtctttccgtaagacaaatccttttgctggcaaggggtatatgtgtgcatgcaactcctgacttatatctccactcttacacg

SEQ ID NO: 843787 - DNA, 548 bp, Homo sapiens
catatgttgaaccatccttgcatctctgggataaatcccacttgggagaatcatagctcagtaccttgyttgtggtgggcaacttctgtgttgcaattcatgctccagagcaccctgtgggatcagtctgagactggagtttgcctgaggccacatttcgacttatcttcttccctgtcttaacctgcttgcctcacctccctgcagttttttcctgagaccattctctcagttactcatgtgctcaacatgtgctcaagaatcctcatgtccacttctgcttctagggaaaccagcaatgctaagtagcttgctgttttataaataaatacaagaatgagttccctatctgaattaattcttaatcaaaattaagaatttaaatatttgaaaatagttacatctctcattctgatatttcttcagttataatagtgctttttctcttttccatggcctttaaaagattaagaaagactgttctatgagtttctcattttactcatatgaacatcagtatgaaattaatttctctttggaaatccacc

SEQ ID NO: 843788 - DNA, 548 bp, Homo sapiens
catatgttgaaccatccttgcatctctgggataaatcccacttgggagaatcatagctcagtaccttgtttgtggtgggcaacttctrtgttgcaattcatgctccagagcaccctgtgggatcagtctgagactggagtttgcctgaggccacatttcgacttatcttcttccctgtcttaacctgcttgcctcacctccctgcagttttttcctgagaccattctctcagttactcatgtgctcaacatgtgctcaagaatcctcatgtccacttctgcttctagggaaaccagcaatgctaagtagcttgctgttttataaataaatacaagaatgagttccctatctgaattaattcttaatcaaaattaagaatttaaatatttgaaaatagttacatctctcattctgatatttcttcagttataatagtgctttttctcttttccatggcctttaaaagattaagaaagactgttctatgagtttctcattttactcatatgaacatcagtatgaaattaatttctctttggaaatccacc

SEQ ID NO: 843789 - DNA, 548 bp, Homo sapiens
catatgttgaaccatccttgcatctctgggataaatcccacttgggagaatcatagctcagtaccttgtttgtggtgggcaacttctgtgttgcaattcatgctccagagmaccctgtgggatcagtctgagactggagtttgcctgaggccacatttcgacttatcttcttccctgtcttaacctgcttgcctcacctccctgcagttttttcctgagaccattctctcagttactcatgtgctcaacatgtgctcaagaatcctcatgtccacttctgcttctagggaaaccagcaatgctaagtagcttgctgttttataaataaatacaagaatgagttccctatctgaattaattcttaatcaaaattaagaatttaaatatttgaaaatagttacatctctcattctgatatttcttcagttataatagtgctttttctcttttccatggcctttaaaagattaagaaagactgttctatgagtttctcattttactcatatgaacatcagtatgaaattaatttctctttggaaatccacc

SEQ ID NO: 843790 - DNA, 619 bp, Homo sapiens
aatgataaacttatcttgatggtttaaagtgaatacttgttcatttattcctcctacaatactgtgtcttattaattgactacttctaacctcaccattttcaatatccttctaccaacctgtgtttgtccattttcacactgctataaagaactacctgaaactgagcaatttataaagaaaagaggtttaattgactcacagttctgcatggctgaggaggcctcatgaaacttacaattatggtggaaagtgaaggggaagcaaagcacacctcacatgaagggagaagagagagagtgaggggggaactgccacacacttattaaaccatcagatcttgtgagaactcactatcatgagaacagcatgagagaaaccactcccataatccaatcaccctccccaaatatgtgaggattacaattcaacatgagatttgggtgaggacatagaaccaaaccatatcataacccattaagtgaaagggaartcatatttctactcttgcttctattccattttgcttataattcaacatttgctgaagagcatttgtggctctttaaagtattctcttatgtctttgttatttgcatatcaaaattccttatggatt

SEQ ID NO: 843791 - DNA, 435 bp, Homo sapiens
gagcaaaagcctatcagggcaaaagcagcttccttgcttattacctttctaggttcaatgtccccttcagtttgaccctgatcattaagttgttgtagttctctgggtctttaaagatagttttaatggccaggcatggtggcttatgtctgtaatcccaacactttgggaggccaagacagcaggatcacttgaggtcaggagtttgagaccagcctcgccaacatggtgaaacactgactctattaaaaacaatacaaacattagtcaggcatgctggtgtgcacctgtaatcccagctaccctggaggctaaggtgggagaattgcttggacctgggaggtggaggctgcagtgagccgagatcatgccactgcactccagactgtgtgacagcgcaagactctatatygaaaaaaaaaaaaagctttagta

SEQ ID NO: 843792 - DNA, 633 bp, Homo sapiens
atcagcagtgtgaaagtggactaaaacagtaaagtggtaccagaagaatgggacattgctawaaagatatccgaaaatgtggaagtgactttgaaactgggtaacaggcagaggttggaacagtttggagggctcagaagaacacaggaaaatgtgggaaggtttggaactccctagagacttcttgaatggcttcgaccaaaatactgataattatgtggacaacgaaatccaggctgaggtgatcttagatggagatgaggagcttgttgggaattgagcaaaggtgacttttgttatgttttagcaaagagactggcaagattttgcccctgccctagagatttgtgaaactttgaacttgagagagatgatttagggtatctggtggaagaaatttctaagcaacaaagcattcaagaggtgacttgggtgctgttaaagatgctcagttttgtaagggaagcagagtataaaagttcagaaaatttgcagtctaacaatgcaatagaaaataaaatcccattttctaaggagaaattcaagctggctatagaaatttgcataagtaacaaggaactgaatgttaatccccaagacaatggggaaaatgtctccagggcatgtcagagg

SEQ ID NO: 843793 - DNA, 582 bp, Homo sapiens
aggtaaaaattgtgtgttcagttcattgtcatccttacttgattttgtctaaagcgcatgatcttgaataatgagaaattaaaacttrgcataagagaaagacttctctatttaccatacatgtgcacatgcatgcacacaaatctacagtgcaggatccaacttcatagtgataaacatattctagccattcaatgaaatgatcaaatgagaccaaaaagaaaagtgagaggggaagacagagagagagagagagagagagagagagagagaaagcaaatagaattttaaaaggccagtaaaaaatagaatacagctacagaaggaaaacatttcaagataatcacttctaatgatattttgaagagtgatttatacaatttaagcaggcagatgtatatttataaaaattttttaaattaaaaaatagaatatacctaacgtaatatattgcaaaaatgggcacaagttctttccctctctatagccatgccatcattttcctcctacactaactctgattttggccatgtgacttgctttggttcacaaggcaatagtaaatgtggcacaagcagaaac

SEQ ID NO: 843794 - DNA, 582 bp, Homo sapiens
aggtaaaaattgtgtgttcagttcattgtcatccttacttgattttgtctaaagcgcatgatcttgaataatgagaaattaaaacttagcataagagaaagacttctctatttaccatacatgtgcacatgcatgcacacaaatctacagtgcaggatccaacttcatagtgataaacatattctagccattcaatgaaatgatcaaatgagaccaaaaagaaaagtgagaggggaagacagagagagagagagagagagagagagagagagaaagcaaatagaattttaaaaggccagtaaaaaatagaatacagctacagaaggaaaacatttcaagataatcacttctaatgatattttgaagagtgatttatacaatttaagcaggcagatgtatatttataaaaattttttaaattaaaaaatagaatatacctaacgtaatayattgcaaaaatgggcacaagttctttccctctctatagccatgccatcattttcctcctacactaactctgattttggccatgtgacttgctttggttcacaaggcaatagtaaatgtggcacaagcagaaac

SEQ ID NO: 843795 - DNA, 634 bp, Homo sapiens
cttctcacaccaactcagggagcccagtaatgaaagtgttttcatccatccatttggacttaagatgtgatttaggcacaggttcctcatctttcaaatgtggatggaaatcgtccctagctcatagggcagtcytgaggattacacaagacaacatgagcatgctgagagcactcagcgtgctcaggaagtgcgagctactccagtgaactgtgaagagccaagatactgaggccgaaaaggccatgtgaccaacttatagaccagagcatgggaagagcctgctgcggtgtgtgtgagtcacatttggcctcctgccaccatgaaggcatgatacagcagcagcgttgtcactgatccctgcctaccttctagatcccctcaaagacaaaggagacaggctccagtgtctcggtgtcagttgttcagaggaggcattgcaataagacaattcagtggttccatagagtctcccttgctgtgtcacaaatcctgcaggcccaccaggccgccagctcattcacagggcatttttgtcatgtaattaacaaaattttcagccaagcacatttgggaaatgctggtccagaaaccattgctcttctttctttgatgtctgcacaaagcagtaaac

SEQ ID NO: 843796 - DNA, 562 bp, Homo sapiens
gttggtctgcaagcttctccctaccactctcacctcacacctgcctgactcctcatggcccagctacactgatctactctgagttcctccaagtgtatgtgttctgtcttcccacagaaactttgcacctactattacttctacttgaatactttgctccttcttttctcttagttttcttctgctcatcctccaagtctcagcttgaatgtcattttcttgggcatttttctctgaactaccaattaatcagatcattgagaggtgcagtttatccatcaggagcctcatcccggtatacacatttatttatacaattgttcaacccttgcctggcccctcacttgtctatcctccccataagggcagaggtagcacctgtttggttcatgcttttgcccccagcacctattgcagctcctgggattggggaatgttctatacattttggtkgaatgattgaataaagaaataactgatgaaaggaaagagctgagcacaataaattatacaccagcagcagcattccatacttgtgatagattattactatggtagtttg

SEQ ID NO: 843797 - DNA, 598 bp, Homo sapiens
ccaagctggcttgagaatcagcctcacaaactctccagccacggctggtcatctgccatcagcatttggtgagggacctctgtgtgccagacactgctgagagccaggtggatttgacagtcggtccatgatgggcaaaagatgcccgtagagaagtgaacatggtgccttaagcatgagggggctcaatgaccagaccatgaaggatatgaggaaggcttctcagaaggaacgtcttgtgagccaggcctgggaggcttattttcagacagaagatacagaaaaggggcatgtcagacttacccccgcctccccctccacctttttttttttttttagtacagaagaaaaatatgctcctgggagctgttgtcacctttccttggttatcagaatcatacctggttttgaagaggtatacttcataaacgatcatctccaaagtgagctgacacatttatctttgcaactgaatatgtaaatgagttaccccctttttgatgttgttaccttcatgaatgccagaaagcaaatgtcttctgtttcttcrgtaacttgaattcattttcagctttgatttgttgctatgatagtgtgt

SEQ ID NO: 843798 - DNA, 585 bp, Homo sapiens
gaattgacttgtgctcctgtaaggtagaaacaacacactgaggaatcgtattaagtgctcccagactgtcctagacttggtctcaagggaatggcaggcaagagaaggccttggyttcctatctgctgggtccagggctggagagtgggcatttgcttccttctctggaacagggtgctggatgggaggccaggaatgtgcatcaaagtgcacaagagatgattctagaaactctgctcttgccaagtatagcctggccagcatgcagcctggtactctaagaggtaagttccttgagagcaactaggaagagcattaatattttgtgctgatttggaagaggcaaggagagtgcaaactgatgtaacgaaggtcagaaatgtagatgccagagacctgtgtgcaagtcagggtctctatgggatctgggcttctctataactccagtaattttttttgagatggagtctcgctctgttgcccaggctggagtgcaatggcatgacatcggctcactgcaacctccacctcccaggttcaagtgattctcctgtctcagcctcctgagtagctgggattacaggc

SEQ ID NO: 843799 - DNA, 651 bp, Homo sapiens
attatgctctgttaattccttatccttatgaaataaacttctttatccctggaaatacttattactctaaaatgtattttgtctgatattaacatagctaytctagctttcttttaactgttagcatggtatgtattttcctaacgtctactttctaaccaattgtgtctctaaagtgagtttcttgtagttagcaaataatttggttttactttctcatataagcttgataatctccaccttttcgttgaggtgcttataccactgggtctcaatggggagaagggaagatcttgccctctaagggcacctggcaatgtctgggtgatctttttggtggtagtaactgggtatgtaggcatgctgctggcatctagggtgtaacagccagggatgccaagatcctacatgcatgcgacagcccccataacaaagaattctctgatacaaaggtaaatagtgctcaggttgtgaaatcttgtgtttttatttttacatttactgtgattattgatatggttaggcttgagcctaaatcaaatagatttctatttgtcatatctgttcttcccccttttctcctttattctgctttattatccttaccctattttggattgattttttttttttaggattctattttatcac

SEQ ID NO: 843800 - DNA, 596 bp, Homo sapiens
ccgtctaaaaaatatctcacaacaagagagagagagggagggaggagcctgcaccggctgaactatttcagcgtcctggggctgctgtagtgcaggcttacaacatcagaaatttattctctcccagttctggaygccaagagtccaaaatcacggtgtgggcagcacgcagcacactccttccggaggccctggggaggatccctccctcttccagctctgggggctccacgcccctgctgcggccgacgctccagtccctgcctctgtcctcacagggcctgctctgtgcatctgtctctattctgctctgctcttcatggaggaacaccagtgactgacttgggactcagcctcaatccagggtgacctcgtccccagatccttaattacatctgcaaagccctactaccagggaaggttgcattctgaggttctgggcggacatgaattttgggggcaggacactgtccagctcagtgccgggcgccgctgtgggccaggccctttgactcttgcaagcccacgatggctacagagctccaaggaggaggcttcctggaggaggcggcccagctcatcagagaaccagcatg

SEQ ID NO: 843801 - DNA, 513 bp, Homo sapiens
ctggaaagcccaaccctctgcccgcccctcggccagcagagcctttcacggaactggaggacacctggctgagctgcctggaaggtctgcagctcacagcctgaggggacgcctggagctggctcagcacaaaacaggatgtgcctgatgctgagttcgcaaaactgcgcatgagcacgggcggctgagagcagcaggaggaccggggccgtgcaggggggcggtcagggacccctcgggtcagccttggggccgttctggggggtggtcagggacccctcgggtcagccttggggccgttccaggggggtggtcagggaccccctcgggtcagccttggggccgttccggggggtggtcagggacccctcgggtcagccttggggccgttcyggggggtggtcagggacccctcgggtcagccttggggccgttccaggggggtggtcagggacccctcgggtcagccttggggccgttccggggggtggtcagggacccctcgggtcagcc

SEQ ID NO: 843802 - DNA, 576 bp, Homo sapiens
tactgaaacccagctgctgctcctgcctttctgccaattgggacctcactgtttggccttatttatttctatttttatttttttattttttttgagacggagtctcactctgttgctcaggctggagtgaagtggtgccatctcagctcactgcaagctccgcctcctgggttcacaccattctcctgcctcagcctcccgagtagctgggcctacaggcacccaccaccacgcctggctaattttttatatttttagtagagacggggtttcaccgtgttaaccaggatggtctcgagctcctgacctcgtgatctgcctgcctcggcctcccaaagagctgagcctacaacagtaggcatgagccactatttttttttttttttttttttttttgagatggagtttcactcttgttgcccaggctggagtgcagtggcgcaatctcagctcactacaacctctgcctyctgggttcgagtgattctcctgtctcagtctcccgagtagctgggagtacaggtgcatgccaccatgcccggctaatttttgtattttttgtagagacagggtttc

SEQ ID NO: 843803 - DNA, 615 bp, Homo sapiens
cctgcctgagggacaggggacgcgccccggacatcctgaactctggtcagggcaaagagggctggacccagggcagaggagcccggtctcgacttcatccargttcaggccctcccgtgcccctgccaggggtgtcctgtggcctgtggtgagtgggactttcattacggatcaggggtgctctttccctgtgaggagctcgggggaccagggaggcctgaggtccacctcacatgccatgtccagagggggtctcaatttctcctcctcacttcgtctcgttttggatatttacgtcatctctctgtatttcgtgcgttctgtcaggcatctgaaacaaggtggcttgggaacagatgaccgtgtgattgaatctcgaggcaggcgagccagagcctggcgctagctgagggggagccccacccctctctccggtggctccacgtggctccgtcaccacgcatgccccgccacacatcaaacgggcacgtaagaccctgcctgaatacaggtggaggacagagctcccgggcttcaccccctgctcggccaggacccagctgaaccacgttctcaccgacacctttaaaagtcagctgctaccacgcacagcca

SEQ ID NO: 843804 - DNA, 537 bp, Homo sapiens
  misc_feature 465, 466: n = A,T,C or G
cttagccaccacgccccagccctaaatttcagattagccttaggggttgccttttcctgcccttccctcatagaccctctgccaccagccacacccagagccggggcaggacatgtggccacctaccagctcccgggtcacaggccgagagcactccccagctggctgcttccccagagggcagtttgtgctttctcaagcagaggcaggtgggtgctgccaagcaggagcactgcctggaggtcgcgcgatctggccgcctccaggaagaagacgcggccactcctcgggcctgaacagatcagaccacaagcacaggctgcaaaggtaccgaccgcagcagtgggcctgacagtcgcatcagcacccagccaaggccacagcaaaggccggccagctgactgaagcgtgggtggggggactgcagtgctcatgaggaggaaggaggccgagggacaagcaganntaaagcagagaaaacagtctgcargggaagttatgggaataaatacttgttaaacttctcttataaatatg

SEQ ID NO: 843805 - DNA, 596 bp, Homo sapiens
ttttaggaaatatacactgaagtattgagagataaaggggaattacatctataacatactgttaaatattataaataattaaattcatatgtacagaaagacagaaraaaggatgattaacatggtaaaatattaacatttggcaaatataggtaaagggcttgtggaaagtatttttttaaacttttctataagtctgaaattatttcaaaatggaatgataaaaatattaatcagtagaaagaacagaaagagtactagatttggagttggaagaattgagttttattctagccactatttcctagtgctcttaggcaaatcatttagactctctgagcctgtctcctaatctaaaaattgaagataataaaacctacctcattggatttagtgggcatgtaagtttctgggtgaatttataaagttgtagcacattatacaaataatacttttttaaaaaggacatatggccccatgttcccactctgaaactagtagcccaggatgggctctgctacaaatcagctacagtaaagcttcagggatgggttttctcagttatgaatgccaagcaagcagaggggaaaaactca

SEQ ID NO: 843806 - DNA, 587 bp, Homo sapiens
tgtaaccattgtttggctcccacttacaagtgagaacayagcatttaatattatcggagggagaaaagatcccatactacacatttgtctcaaataataaatacatctgtggtttttcaaagaataagccctaatttccaaggcagacttcctagtccatagctataccatgagatggaaatttaaatgctacagtgatttggggtgattcacacaggcattctgtataaattaagcaaaaatgaatgtatttatcaataattacagataaactcaccaaaagtacagccaaagccctttggagtatgacataatttagcaataaaatcaggtggtgtacctaagggacagactataacatacatattctttaaatcccagtgacctcttcccaggggttaaatcagaggagtcatatcaaatccaagaaatatcatctttgaatatatttcaaaagcctcaaatgattaaacccaatgaccttttaataaatgtaaaataaatacacaaggatatcagctctaggtctgccttactccttcccttccttccacagccatttgtcaataatcaactaagttactgat

SEQ ID NO: 843807 - DNA, 587 bp, Homo sapiens
tgtaaccattgtttggctcccacttacaagtgagaacacagcatttaatattatcggagggagaaaagatcccatactacacatttgtctcaaataataaatacatctgtggtttttcaaagaataagccctaatttccaaggcagacttcctagtccatagctataccatgagatggaaatttaaatgctacagtgatttggggtgattcacacaggcattctgtataaattaagcaaaaatgaatgtatttatcaataattacagataaactcaccaaaagtacagccaaagccctttggagtatgacataatttagcaataaaatcaggtggtgtacctaagggacagactataacatacatattctttaaatcccagtgacctcttcccaggggttaaatcagaggagtcatatcaaatccaagaaatatcatctttgaatatatttcaaaagcctcaaatgattaaacccartgaccttttaataaatgtaaaataaatacacaaggatatcagctctaggtctgccttactccttcccttccttccacagccatttgtcaataatcaactaagttactgat

SEQ ID NO: 843808 - DNA, 628 bp, Homo sapiens
aagatcatgcttgtacatacttactatmtggagctaatggttattgttttgctacagtgtcactaaacaaaaatcaacatacaaaggtgaaagggtggcacatgtctgctgattacatttaagggcccccaaagtctctctttttgtccttgcaagtggtaggattgtttcactgcgatataaataaaacgccttagtaattacatcctgagaacaccatggctcagtactattcatgccaacttaactgaactgaaacatggcactggtgtcagtggcttttacttattgatggatttgtaaggtggcaggctctttcatgtccaaaagcggtagtttcccagggtctcaagaagatttaaaaatattttccttccatcacaacacaaagcctactgactttaagtaatgctgctgagggttaacatttgaaactgacaagcagcacatgtgtattacagagataaggcctggcacatgttgctgcagcctcctgagattttgaaatgctagcagctccagctggtggctatgctccattcctaatgtgcactttttagggaaacttgagcccctccttctgactgtgatagggacatgtctgattggaatagggttatttttaaag

SEQ ID NO: 843809 - DNA, 510 bp, Homo sapiens
ttgtgggcaaagaccatgtttccttctttctcaagcatcttgcctgacatactgtatgcacccaatgactgtcagtccaattaatgaatttattcgtgtttgaaatcccaacagaggcagctctcattgctccctagtgtcagatgtgtgcttgccagcatgcccctacacctgggtacagtgctcatttctcaccctactctcagtattacacactctccatccctggctagtgtcacacgcatccatgtgaagagcaacaaggctgtttatttcacctgggtgcagtgggggctgagtctgaaaagagagtcagcaaagggttgtgggattatcattagttcttataggttttgggatgggcggtggagttaggagcaatgttttgcagacagggtggtscatctcaaagtacattctcaagagtggggagaattacaaagaatcttcttaaggatgggggagattacaaagtacattgatcagttagggtgggcagaaacaaatcac

SEQ ID NO: 843810 - DNA, 510 bp, Homo sapiens
ttgtgggcaaagaccatgtttccttctttctcaagcatcttgcctgacatactgtatgcacccaatgactgtcagtccaattaatgaatttattcgtgtttgaaatcccaacagaggcagctctcattgctccctagtgtcagatgtgtgcttgccagcatgcccctacacctgggtacagtgctcatttctcaccctactctcagtattacacactctccatccctggctagtgtcacacgcatccatgtgaagagcaacaaggctgtttatttcacctgggtgcagtgggggctgagtctgaaaagagagtcagcaaagggttgtgggattatcattagttcttataggttttgggatgggcggtggagttaggagcaatgttttgcagacagggtggtcsatctcaaagtacattctcaagagtggggagaattacaaagaatcttcttaaggatgggggagattacaaagtacattgatcagttagggtgggcagaaacaaatcac

SEQ ID NO: 843811 - DNA, 606 bp, Homo sapiens
tgttctttgttatgccatttaaaagttattcttccatcatgatgtgattttataattcttttttttttttgagacagagttttgctctgtcacctaggctggagtgcagtggcgcaatctcrgctcactgcagtctccgcctctcaggttcaagcgattctcctgtctcagcctcccaaatagctgggattataggcatgcaccaccatgcctggctaatttttgtatttttagtagagacaaggtttcaccatgttggccaggctggtctcgaactcctggcctcaggtgatccacccacttcggcctcccaaagtgctgggaggtgtgagcatgagctaccatgcctggcctgctgctgttttataattcttatactcaaagccaaatacgactacaaagtcaaatattttcttcaggaaatttcctagattaaaaaaaaaaatggtccttgactatataaactttgaggagtcagcctttaatgaaactaaaaattctctttgtgccctttgcagaaaggaaaatttaactttggaaaagaaatagccaaagggcccaaccttgtaagtaaggacttggaaatgaccttgcctgtaaatcaac

SEQ ID NO: 843812 - DNA, 506 bp, Homo sapiens
gtgtggtagctcatgcctgtaatcccagcactttgagagactgaggcaggaggatcctttgaaggcaggggttcaagaccagcctgggcaacatagcaagaccccatatccacacacacacaaaaaatttttttaagtctcctgttaaaaaaaaaggggtggggccaggagtggtgactcacgtctgtaatcccagcacttccgaggcaggcggatcatgaggtcaggagatcgagaccattctggctaacacagtgaaactccgtctctactaaaaaatacaaaaaattagcctgtcgtagtggcgggcacctgtagtcccagctactcggaaggctgaggcaggagaatggcgtgaacccgggaggcggagcttgcagtgagccgaaattgtgccattgcactccagcctgggtgacagagcgaagactccatctcaaaaaaaaaaaaaagaaaaaaaargggggtggggaatcatatgctctgtgagaactaaatgagatgat

SEQ ID NO: 843813 - DNA, 487 bp, Homo sapiens
gtgatttatcagatgtattaaatgacaggtgcaagcagctgtgcatttgaataacttacaaggttgaaatggctacattctagtttaaatactttaaactcacatgtagattgagaaatgatgaacttgctacattataaacctaaagaaacaaaatcctttccctcaagccttttcccccttgtgctatcaacacttactaaagctaaacatggaggatcttccttatttctcaagagatggggaccaaaggcaggtaaatgtgtctttgaaaagcaagtgggaagccagaagttttttctaaatctaaatcttatgtaaagttgaaatactcattgaaaaccaaatattaaaattttmcatacccagattatgatttctgcctcttcaagtggctttgttaattaatgatatatagcttaaggcaaatgatcctatcagaacaaagctgtctctagagctcagggtggttaatgtaaattcaagt

SEQ ID NO: 843814 - DNA, 528 bp, Homo sapiens
gcagagctgctggctccaggctgcgctgcccaggaggaaggaagggaagccccacgggaggtcaggcctctcggccttttccggcccctccggccagggcgagccgcccgggccccggcgggaggtcactcgggcggcgggcacagacccgaggagccggagcagcagcccgggtgcggggtggagttgcagcccggaggaggtggtcggggttggcaggtggcaggagagtcgcagagctcttgagtggaagacagtgtcggggcacaccctcgtgccggagccgcggggttctcctcccgggtggtgcattccccggcacgcggcggggaaccggctcaggaggccacgctgctccccggcggaaaccaaagtgccttctggagaaggtcacctggagcatttcatagacaccgccaggccytgatgcgagttgctgtcattcccgacttgccacctgatttatttgaatcagagtagtctggggcctgaacttagaggggtgatgatctggaatgagaattgcgc

SEQ ID NO: 843815 - DNA, 508 bp, Homo sapiens
gctgaagtttgaggacaaaagggccacttstgatgcccctctgagtttgttcctgtggtttcacttgaaccagggatgctagatgcaaaagtcatattttagcaatttcttcagacgatatacagaaccccagcgctcagccgttcttatttctttttccttatcgtagaattaagatagggagagcccgatcccacttgcccctgtatcctgtaaatgttgatttatcatctactgtaagcgaggcactgttgtaagcagcagagataaatggataaatagacacaggcttctgccttcaaggagcttagagtctgatggaaagacagacgtgcaaacacaactctgaaagaagtgttttaatggagaagagaggtgtaggcaaagtacactgagaacaaaggagaaggagcaactatgtctccctaggatggccccacaggcgacggaatgcctgcgctgggacccgaagttgactgggaatcccagacagaaggagggtagcctc

SEQ ID NO: 843816 - DNA, 640 bp, Homo sapiens
aaaaaaaatcagaaggtcaggtataggtattatgaccacattttaatcactcataaaatggacattctggaatgctgtatcagctcagggcagagtactggggacactatattgagtaaggtgtggttctcctggctctatgaagaaagcagaggagaaaggctgtggctttcttgcttctgaaaggggcacattaaggatggggcggggcgggcagggagtgaggggcagcatgcccaaacccactccaaagccactcacccggcttgacagcagaatcaggactagaaccaaggcctcccaaggtgatggctgagtcttttccattctaccaggctgctccagaaaacgcagcccctggtcttatgctgctcaaacggaagcaagcaagtgaggtttgctgccgactctgacccttacctccaactcctccaggatcttcagagatcacctcatccaaacagctttctgggaacggccagccataacaaatgctaagcatttattatgtgccagacatggtggcaggtgctttgcagcattatctgagtgattmtcacaattctatgtggtaggtgctaggattcccacatcacctccatattgcaggtgagaaaatcaatgttcagagagggaaagt

SEQ ID NO: 843817 - DNA, 571 bp, Homo sapiens
tctaatacctcctgaaacttgtgcacactgcctcctggatcccggcacctcctcgacaggcagtcctaatggcccggccccaccgcttcccagacagtctcagctccggtacttttcctcagccacctaagggcccagggacacccctacacctctccaaacaccccgataccacacctgtacacaaagacagcctcagctagtcacaaccctgcacccattctgtgctccgcctgcaccccacggcaccctgtcacataccccgcctaatccttctgcagccctcactcccaccgttggcacattccagcacaccctctcccccaccttgttcccctagacagcctcagcctgtcacacacattgctcactcttgtgtgctctcgctctctctctctctgctgcccaggcctcccgctcttcccagagcctcctctgcctggggaggcatctccaccccttcaccgccccaggcctttcattcctggacagygaggctggacatctggttcaaagctgccccacccaagaccctgtgctctgggcaccctggcctgggcttaaaggtttg

SEQ ID NO: 843818 - DNA, 383 bp, Homo sapiens
ggtcttgaactcctgacctcaagtgattggcccacctcggcctcccaaagtgctggaattacaggcacaggcatgagccaccacgcctggcctgtggggcacctttcattgggacaggctctcaaggagcaagttggcccctggcaagttggcagtagagcctgggccagagaatgccaatatcctgggtagcccaggactctgcccctccctactgccttctagacgaggagatttgctcctagagcttccagaaggaacatgccttaaactacgaaccctggctccaaraccagcatccctgccaccaagtccttgaaatgacctatacacaaggctaagatacaaaagccccgtgcctgagattaccacaggaatgttaa

SEQ ID NO: 843819 - DNA, 487 bp, Homo sapiens
tggccaaacataacataggtccactattcaaaaaatctgaaagtcaaaaatcaaattaactsttaagatccatggagtcaaatttaaaatttctgttcttattcttctttgccatctgactctcgtgatagaaatatggagactaaactcatgagaatctcaggtaaagatatcatgaatatgcatgtgctcatttccctcctcctttgaatagctgtctaagctgggacccaagtttaaaagggtcatccattaaaaatttatattttggggtgagaaggatttgacagagtaatagtgagaataggcagcattgtgctgccgttagccagcttgggaactagcttgtaaattgtggagtctcatctttgtcaccgatcattagaaaaaaatcttaacaataagagtacaatttaaagaataacaaaatgaacaactgtgtatgtagccaccatgtaggttaacaaagagactacaataagtaaaa

SEQ ID NO: 843820 - DNA, 623 bp, Homo sapiens
agtaaaaatacaaaggaataattttattcatgcagtgctttcataaaaggtgagtataawctcagtccatgagggtgtaaagtgaaatgagctggctggctggagacggacagggtgccagagactactagccagtcagggtcacagctgtattggtcgattgctgggttcctgttggcttggtctggatcatgttatttctggtgttggatttcctgtccatgctcctgaccacgtctctcacccacgtggcttgtggatcagcacagacttttaggccacgtttggtaataaaactgtaacgcaaggaaaagacagatgaagttagccacgttctcaaagcctcagggtcaggagttaagatcagggcagacatgaagagatcttgtgcagaaattactgcaagaaatagtctttcagagccatgagatcataaatgagcacccttcttctgccatctattttaacataaaggagaaatatctgcaagtagtatccagcccctttgttcaccataattcacaggctccttttctcatccatgtcaccaaatgttgtaacaaaaagacatttgaggccatctagttccattattatataacctcttccttttcaaatttgaa

SEQ ID NO: 843821 - DNA, 627 bp, Homo sapiens
tttatgctctcttagaactttgttctgttctcatggctgttctgcaacgaatctcattgtgttctcctactcaattacattcctgcgtctcccactagatggcagactctttgagagtaggagattcccttgttatctctggatccctggcacttgcagaaagcctgttacgtaataattgctcaacaattagtttttaaataaatgaattatttttaaaacgccaaaattacaatgattgtgcattaagtgaaagatgaccatctaaaaacataaagccatgcttcatgacattggtctaagcaaataaaggaaacaaaggcaaaaacagacaaatagaattacgtctaactaaaaagcctctgcacagcaaaggaaataatcaacagaggtagaagaccgcttatgaaacgggagaaaatatttacaaactatacatctgataaggaattaatatgcaaaatatatgaagaactcaaggaactcattagcaagaaaacaacacaatttaaaaatgggcaaaagagtgtaaaaacatgccaagttataaagaccaccratgctaggaagaaactgcatcaactatcaagcaaaataaccagctaacgtcataatgacagtatcaaa

SEQ ID NO: 843822 - DNA, 660 bp, Homo sapiens
caacacaatccaacagaggaatttgcttaggtcccctcacttctggtgtctctgtragttgctagagactggagtcccacttttggaaatgtctgttgttttggagtttgcatgtgtgcttgtgtgtgtgaatatgaggtgctcacagactctttggcccctgtagattgttaatttaccagtgccacctaaagtttctacctactagcactcattgagtactgtattagtccgttctcatgctgctaataaagacatacccgagaatgggtaatttataaaggaacgaggtttaattgactcacagttaagcacggctgggtaggcctcaggaaatttacaatcatggcagaaggggaagcaaacatgtccttcttcacatggctgcagcaaggagaagtgcctaacaaaagggggaaaagccctttataaaatcctcagatctcgtgagaactcactcattatcacaagaacagcatgagagtaaactcttccatgattaaattacctcccactgggtcttccctctgacatgtggagattatgggaactacaattcaagatgagatttgggtggggacacagccaaaccatatcaagtacctactctgaataagatgccgtactaagtattcttggggccaaaacagaatacttgat

SEQ ID NO: 843823 - DNA, 584 bp, Homo sapiens
gtaaaccattgcctaatccaaggtcataaaagttttacacttatttttttctaagtgtttcatagttttagattttacacttaggcctttgaccacttttgagttaattttttatatggtsgaatccaaattcattttttttacatgtgaatattaagcgccatatgttgaaaagactaatattctccattgaattatcttggcatccttttcaaaactcaattgactatagatgtttatttctgaactctgaattctgttccattgattgatgtgtctgtttttataagtctgtcttgattactgtagctttgtagtaagcattgaaattgggaaagttgagtccctcaactttgttcttatttattaaggttgttttggctatttgggatctctggtattttcatatggattgtaggaccagcttgtcaatttctgcaaaaaaggcagctgggattggaataggaattgttttgattctgtagatcagtttggaaagtattgccaatttaacaatattaagtatttcagtccatgaacatgagatgttttgccattgatttaggtctttaattcatttcaac

SEQ ID NO: 843824 - DNA, 584 bp, Homo sapiens
gtaaaccattgcctaatccaaggtcataaaagttttacacttatttttttctaagtgtttcatagttttagattttacacttaggcctttgaccacttttgagttaattttttatatggtgkaatccaaattcattttttttacatgtgaatattaagcgccatatgttgaaaagactaatattctccattgaattatcttggcatccttttcaaaactcaattgactatagatgtttatttctgaactctgaattctgttccattgattgatgtgtctgtttttataagtctgtcttgattactgtagctttgtagtaagcattgaaattgggaaagttgagtccctcaactttgttcttatttattaaggttgttttggctatttgggatctctggtattttcatatggattgtaggaccagcttgtcaatttctgcaaaaaaggcagctgggattggaataggaattgttttgattctgtagatcagtttggaaagtattgccaatttaacaatattaagtatttcagtccatgaacatgagatgttttgccattgatttaggtctttaattcatttcaac

SEQ ID NO: 843825 - DNA, 614 bp, Homo sapiens
atttaggtctttaattcatttcaacaatggttcatagctttcaatgtacaagtcttgcagttcttttgtttaatttatttctaagcattttattctttctggtgttattgcaagtggaattgtttttgtaatttcgtttgtgtctttgaatctaaaatgagtctcttgcagacagcgtagagttgaatcatttttagaaagtcatttgggcaatatctgccttttgattggagtgtttaacctgtctgtgcttaatgtaactaacgataagataggatttacatctcccgtcttgctatttgttttatatatgtcttacgtctttttgtttctctatttctccattaatgccttcttttgtattaagcaaatgttttctagcacaccgttttcattcctttcactttatttttagttattttctcattagttgctctggatgttacagttaccaccttaaattaaaacaatctagttcaggttaataccaacttaacttagacaatacagtcatgcactgcataacattttggtcaatgatggacctcatayatgatgtggtctcataagattataatagggctgaaaaatttctattgcctagtgatgtcata

SEQ ID NO: 843826 - DNA, 509 bp, Homo sapiens
atccatgtttcttggaattgaaatgggagagttccccgacacacctcgcaggatgtgtggcaggggtgtgtcttgtctgttcaagcacatgcgcaaaccccttatgggagggggagcacgyagacaggcaggtgcaggaaccagggcgagtgtttttgggctccggccccagggtagcatctaggggtggatgcctgttaatttcaaagccccagtgggtagtctacagtggtctgttagctctgccatccaaagatggcttaagtgttaaccagctcagtgccctcttgctacccgggttcttgtccagcatccaggaagaatcaggtcatgtgtggacttgaaggatggtgaatgtggggattttattgggtgatggaggtggctctcagcaggatggatggggacctggaaaggggaaggagtgggaagatattcccctggagtttggccattctatggtcgatttcctctctgactgtccccagtcaaacttctctcaatgttca

SEQ ID NO: 843827 - DNA, 595 bp, Homo sapiens
gtctggctcatggagtgggactgtccaagcagctggcagctcagcccattggctactatgtcctttgcctgtaccaagccagatrctctcagtggacggctggatggccacagctgtccaagtgcaaggattttctcgtgatgagtggtctgtgtaccaggcctggtaggagttgggcccttttcctcctgtacgaggaagggaatctctgtaggtttagtggcctctatcaaagactgcccttcagttgtcacatcgatgacagggccaagcaccaaatggaactctgcgctcaaaaggctattagtcaatgtgcttctctgttaaaggcagtgatgccatttagccataggctatgtctggccattcccagacttgggtttctggaagatatccttcagccaacctgctatggggcactgggtgcgtactagcacagggacctcctttaacatcctccactcattgtcaggcagagttgcatagagcatgcagcacagagttgttgctccagatgctatacctaatttcagctccctgccacagttgggaccagaatcctaaaggcacgtgtttatgtctttgcctttacccc

SEQ ID NO: 843828 - DNA, 595 bp, Homo sapiens
gtctggctcatggagtgggactgtccaagcagctggcagctcagcccattggctactatgtcctttgcctgtaccaagccagatgctctcagtggacrgctggatggccacagctgtccaagtgcaaggattttctcgtgatgagtggtctgtgtaccaggcctggtaggagttgggcccttttcctcctgtacgaggaagggaatctctgtaggtttagtggcctctatcaaagactgcccttcagttgtcacatcgatgacagggccaagcaccaaatggaactctgcgctcaaaaggctattagtcaatgtgcttctctgttaaaggcagtgatgccatttagccataggctatgtctggccattcccagacttgggtttctggaagatatccttcagccaacctgctatggggcactgggtgcgtactagcacagggacctcctttaacatcctccactcattgtcaggcagagttgcatagagcatgcagcacagagttgttgctccagatgctatacctaatttcagctccctgccacagttgggaccagaatcctaaaggcacgtgtttatgtctttgcctttacccc

SEQ ID NO: 843829 - DNA, 514 bp, Homo sapiens
agttaaaaatacagtagaatgcgcaagtaaaaagcaacaacctagacgtatgacctagaatgcattttaaaaacatgatgttaaaaaaaaaggtaagaacaaaaaatgtattgcattataacaattacatgttgtaaaacctgagacacacaaaatatgtatctcacacttttgcttccaccctaccaaaatggtgcttgtgtgcatcatcaataagcatcagtggctaaatacatcatctccaccttgtgatccactgacagcccttgacacaggtgaccactcactccagttgtactttttttcactcggctttaggacaccacactctcctaggtgttaatctccctctcattggctgcagtgtctcagtctctttacttgcttgtagttattttctcatggtctagatgtcacagtaccccagggttcagtccttggacaacatcccttctctaaattcyactcacaaccttgatgatctcatccagacacatgatttcaaatagtatat

SEQ ID NO: 843830 - DNA, 619 bp, Homo sapiens
aaaacaaaacaaaaaaagttctgagttctaattctgggcatgctacttactgactctacaatctaaacaacaggcacrctgtcctttaattttctctcatataaatgaatgagcagaaagttcaatcaattgaccctacactgatacccacccattccttctccaaaggcttagctggctggggtcataaggtcatctctctgcaagctcaaaatcaagataaagtcaagatgaagtaaaactttatcttttccagcgggggcatggcattttaggtagtgggatctgaaaggaatcttgctgtttaggtctggattgcactagtcagtgttagtcctgagaacacatgtgcacgtgagagtgttgatttattttcttcaatatacccttttctcccaatttgtatatttgagattcgccagtggtttatagtctggtactctgtatttcctatctgaaaatggattacttccaggacaaaaagtccatatgtctgggttctgaccactgtctatttctcacaggactctcttccaaggcattaaaatcgattcccattcttataccaccagcccagattagaggccttgttgtgggtagattaacatctttgaattaa

SEQ ID NO: 843831 - DNA, 644 bp, Homo sapiens
gcaactatgctttaaagatacattgcttgaaataatgaattttaggggtttctctaaaatacctataattcactaatgtctgcaactttgtttttctaataatggcattaaaaggtttcctcrggactatggtttctactggtatattttaattataataacacatttttaaatatattcattattcaaaattatttttttcaaaatgggcatgtctttgatattttttctaataatttttgttatgaaaaacttaaataacttaagagattgaaagcctctccaaactccacctcgcgagagaaatactgctaacatgtcaatgttcacttgctcaagtgattctgtgcatataaaaaccagtctatatgttttttaaacaactgtttcaatgtataacctgcttaattattgacagtaggtattttggtatcactccaggtcaacagacaacttaatatttttaagtattttaatatcagatttttgtgattttaaatattaacccacttcagaatgaagaacaacccaacaattaacgtcaggtagcaatgtaaaaatacaaatagtatcttcattaaaggaaaaaagtcatccctaatgaaatttccttgctagagaactaccttatttttaaaactgag

SEQ ID NO: 843832 - DNA, 644 bp, Homo sapiens
gcaactatgctttaaagatacattgcttgaaataatgaattttaggggtttctctaaaatacctataattcactaatgtctgcaactttgtttttctaataatggcattaaaaggtttcctcaggactatggtttctactggtatattttaattataataacacatttttaaatatattcattattcaaaattatttttttcaaaatgggcatgtctttgatattttttctaataatttttgttatgaaaaacttaaataacttaagagattgaaagcctctccaaactccacctcgcgagagaaatactgctaacatgtcaatgttcacttgctcaagtgattctgtgcatataaaaaccagtctatatgttttttaaacaactgtttcaatgtataacctgcttaattattgacagtaggtattttggtatcactccaggtcaacagacaacttaatatttttaagtattttaatatcagatttttgtgattttaaatattaacccacttcagaatgaagaayaacccaacaattaacgtcaggtagcaatgtaaaaatacaaatagtatcttcattaaaggaaaaaagtcatccctaatgaaatttccttgctagagaactaccttatttttaaaactgag

SEQ ID NO: 843833 - DNA, 538 bp, Homo sapiens
tgtatgacaagaaatgctgaaagaagttcttcaatctgaaggggaagtgataccacaaagcaatttggtaggagagtttataatgatgaaaggacaaattcatcagaaagayataacaatcaaaactgtatacacctaatacaagagcttcaaaacccattaaacaaaaactgattgatagggagagataaatacacaatcatagtttgaggttttaatattccctttcaatattaataactagatattaaaaaacaaacaaaaaacatagaagatatgaacagcactgttggtcatcctgacctgacatttataaaactccttttcaggtgctcatggaatgttcaccaagatagacgatatgctgggccataaagtaagtcacaggcaattccaaagaccgaaattccgaagattacaaaggaatcttcgttagcaatagaaacacaatatccagaaaagtatccaggtatttggaaattaatacacttctaaataacccaacattcaaagtagaaattaagagggaaacaaaata

SEQ ID NO: 843834 - DNA, 602 bp, Homo sapiens
actaatacatttttgttcatgataaagctatctctattcctacttgatgctcataaatttcaaagtccaacaggtatttgacctggttctgatcttatttttctatttcttagcgactaaaaatttcatttaaaaaggtaacaattgctcagtattttctcaaagcatcgtaaataaaataatcattaacaaatacataaactattgttgacttgtttatatttttgctcttttgcctttaagatgacaggaaaaatcgtagttaaaaggctccttaaaagaatcttttttggcactaccaccttttaaacgatatccagtaagttatatactcataaaaactgcacatgagttatccatatagatggtaacccacaacataaagaatttgtacactcaacaagatttaacacactactataggcaagtttaacataacaagtgtaaacaggccagaaatatacaaagcacacgcagtgaaggagcagggcaggraacagcagcctcaggacgtctgaggctacccagctgcgtgtcctggacactacgctcaacctccctgcaactctgtcgctttctaggtagaaaataaagcagttgga

SEQ ID NO: 843835 - DNA, 528 bp, Homo sapiens
aatggacacaacttctggttaatcctttctagtgagtgtttttcattagaaatgcctccaaatgattcatcacataattatattttgtacaacaccttcttttttcagaaccgcagatgataattgtgctggccagctttttttttttttttaacctatctcccagttaatttgtagcagcctacgacattacttttctctgtgtcctaattactcagttgctcatgagttgctgcagatgtccctaaccaggctcactgttgtgattctgctcctgcccacactccacaggctctgttttctttggcagccagaactgtgctgttcggacacttgtcccagctccctcattggtctcatggtgctgccacttgcacatactggccattttgctaggctctgaggtgcatagataaagttgcttatagctataagcccttgagaagcttatggtcaaatggggaagaaaaatgaaagcagmtgacttgtagcatccgatcccagggaatggtagagccatttttgcca

SEQ ID NO: 843836 - DNA, 528 bp, Homo sapiens
tgttagagtaagattataatgtgtatatgaactctaactttactttgaattgtatgyactcaatacaatcctcatagtgttataagtggtatttttaaaattaaataatatttattttttgtagagatgggggtcttgaactccaggcttcaagcaatcctcttgcctcggcctcccaaagtgctgggattataggcgtgagccactgcgtctggccctgaatggcacttttaaggactgtatgaaacagttatgagccatcagtttgtgatttttccccctgcatcagtatacacattaaaagctgaatgttgctcttttgaatgtttgggatcattccctttttactattgatacacactgtacttgcaaattaactgctctagttctagattttaaggctggaatattttaggacaaaatctataggtgcagttaaggagataagcagctaattgaatctcatgcgttactaataatataaatgtgtttagtctcagttgtttagacagttatcacacagaaggg

SEQ ID NO: 843837 - DNA, 576 bp, Homo sapiens
cccatgttctgtaattattaggacatgctttccagcactacgtgtgcttgaaataatataaaacctggaagcaatgatgaataatgtctaacttttcattagcacaattactcagttcattttgccctagaatargcagtatttggaaggaggctcctacattcaggacatgtcttcagcattcttctggtgaacatttatgctgttatttgagtagtttaataatttttgaatagtgactataaatgatgcacacaaatattcctcttctagattgtcttctgtggattaattaacagttcattagataattatctgtacttttaagaccataatgttagtccctgaactgaaaccagtaagaagattgctggaagtcctggcctcttttcccatttacggagtaggaaaggttactttggtgcttgaggtaaattccagttttcaggctacacatcgtgttcatttctttattctgctagggccacagctcatgacctaggtaggcccttgctgtgaattcctcactgtatcatttgttccctaattctgacctctgtttatcagaccataatc

SEQ ID NO: 843838 - DNA, 503 bp, Homo sapiens
tatatatccatttcacagttacatagttgcctgcaagtacttataattaaaataaaacaagtatgtaatctctgaataaccaatagcttcttcatattataaagataatagctaaaactcaagacaattcagaaatcccattttattatttctccatactcacccgactcgacctgccaacagtaaatattgatatgtaacattttggagtttgcaaggcaacggtgaaattttttttctttgtttttattttgtagttgcccccactaaaaattgtatatatataaaatggtatacttccgaagataaggtagtctgtaaatcaggccatggaaacaagggtcatgaaaggggcagagaaatttgttactcttcttttcccacacaggaaaacagaaaatgaaaccactgaatttgatgagtatctgacaataatgtaacccaactgatggaattttttaattcagacacayacacacacacacacacacgcccctagagta

SEQ ID NO: 843839 - DNA, 646 bp, Homo sapiens
tattgataattaattagggttagctcagtagagttgaaagtggcttgcaaaaacaaacccaaaaaatacttacaaattacaggttatttcgtatcattaagatgcatacaaaagacaataaaacatttgttctggttctgttgctttaagtcactaactatatttttatgtaaatgtaaacactgacaaacattaacttctctcctgtatgtctcaggccttttaacagctttgcaatcctaacgagccgctgcattgatcgatttaaattacatgtgacataaagtctctttgcattttaattagtttgcttttttgggtttttgtttgttttgagacagtctcgctctgtcgccgaaactggagtgcagtggcgcgatctcgactcactgcaacctccgcctccggggttcaacattttctcctgcctcaacctcttaaatagctgaaattacaggcgcgcgccaccacgcccgacaaatttttttatttttagtaaagacggggcttcacaccatgttggtcaggctgtcctggaactcctgaccctgtgatccgcccaccttggccttccaaagtcctgggattacaggcgtaagsaaccgcgccccgccaatttgcttatgtatttttatggcatctttaa

SEQ ID NO: 843840 - DNA, 631 bp, Homo sapiens
tctctgtttcacaggtgtcagtcatgttctctggataaatgataagattgaaagtccttgaaggcaggagacagccccagatatcgttttgttgtctgacacaataccaagcacaaatgatgtgcctaaatcctgggtctttaacccaaggccatctacatatgccctgggcctgccagctcatgaaaaccagcctctgtggcagttggggtgctaaggaattgctccagttgagcttcactggtttttactcttggctgtcatgcttggatctcttgattatgttccatcagttcaccccctgcctctgggctgaaagatttggtgttctttctaagttttcttgcatgatttgtggcttagaacgtctttcccgtacatctctagccctttccatctcaaatgttgactcagattattggctcagggcaaagccactggctccagctcttaaccctgtagaatctcacctatccctggcacccaacatagacatccaccccttcaactccaccaagctagggagtagagagtagttgtcttttccatccattctctccsttcccctccttgtctaatttctaagagttaagagtgggcacttttccaacatttccgtggttacgggtaa

SEQ ID NO: 843841 - DNA, 626 bp, Homo sapiens
tcatgattgatgaaatcattggccattggtgattgaattcagtctctagtccctctgtcttccctggagtgagacattgctccccacaaaagggcattagctgcgggggtctgccttcagaccctgacccaacgacagatgaataaaacgtacactgacacacagatattctgttttgccagtcctgctgagtgtccgaccgcctgcacaccaagagaggtttgtcactgcggccggccctgagcagcttgcactccaggcatttatttagtatagaattaacaacagaagctctgagtcaacactcttgtgaataattaacatggttaagagagtagttttatgaatgattaaagttcaggtaccgcagtctaaagtaaataccattagggggcaatatccctggtcgacctcccccaccccccaccccgagagggctatctggctcaaaggttagttaatggaggtagagtaaacaaaattaactggggaagactctgttatctctagtatttaccctatgacataatgctctaaggtaagaaccagctgccttcagcctgttcagttattacaagctatgtaacctttcggccttccaaaawggtttgtgactattccctata

SEQ ID NO: 843842 - DNA, 563 bp, Homo sapiens
tttttgttgattttctcagctttatgtttaagtattcttctgttccctgtagcatgtttgttttgtttgtcctttttgtttttgtttttcctgatgattttggtctttgtcttttattctattggcattcttaggtaatttctaactggttattcacattttgatattagggctaaacagccatatggaaacaactattggatgactggatgaagagccaagttttacctaattgattcataataaaccactccaggcttagtgttataagacaacactagtttttattatctcgcatgatgccaagggttgaatgaactaagctaagctggttcccattcagggtctctcatgtggttgctgtaggaatgtctgggactgggtcatctggaggcttctgacctcacagaagcttctggaagcttctggctcctgggccaggaagactcaaatagctggaagctggaagtggtrgggttcttcaggcatatctctgtctctctgtggtctctccagtctggcagctgtggaataggtagactttttacatggtagctcagggt

SEQ ID NO: 843843 - DNA, 327 bp, Homo sapiens
ctttttattaccgttatgggttttttatatgctttataaactagacccttattaaatacatgayttgcaaatattgtctcccattctgcaaactgtctttttgctttcttggcagtgccctttgatgtgcaaagctttttaatgttgataaagttcaattgatatatttttttctttgattgcttatgcttttggtgtcatatctaagaaactgttgcctaattgaaggtagagaaaatatacacctgttttcttccatgctggattaatttttatatatagtgtaagacagtcatccaaattcattctttagcatgtggatatcaa

SEQ ID NO: 843844 - DNA, 557 bp, Homo sapiens
aaagactataaataaattcatgtagccatacaaggtgtgtaactctaaatacctatttacattttggaagagttggaaatggcwgaattgttatgtgcctcctaggcttacctcacaggtattcttgccaaaatacaaaattgacattctatggaaaagggcaatctataaattgagttagtttgattttctttgtaaatcatgctgaaagagtagttactacaatctactacagaataaatgaaacctcaacctctatgtctgcagttcataaactacaatttatttacatgtataaaacttgaccttaatgacaacagttagtaacacctaaatttgtatctcttgctcatcaatgaaatataatattttttaatatcaacagccaaaataaagccttcttcacaaaaaggtacaaaatactctcttccttaaaatgttcataaggtttttaagagtgttgaaaattatatgcaagaagcctgaatgactactttagaaatgagtctgtggctcttctcaattatacccattactggaaaaaactaagaacatgg

SEQ ID NO: 843845 - DNA, 557 bp, Homo sapiens
aaagactataaataaattcatgtagccatacaaggtgtgtaactctaaatacctatttacattttggaagagttggaaatggcagaattgttmtgtgcctcctaggcttacctcacaggtattcttgccaaaatacaaaattgacattctatggaaaagggcaatctataaattgagttagtttgattttctttgtaaatcatgctgaaagagtagttactacaatctactacagaataaatgaaacctcaacctctatgtctgcagttcataaactacaatttatttacatgtataaaacttgaccttaatgacaacagttagtaacacctaaatttgtatctcttgctcatcaatgaaatataatattttttaatatcaacagccaaaataaagccttcttcacaaaaaggtacaaaatactctcttccttaaaatgttcataaggtttttaagagtgttgaaaattatatgcaagaagcctgaatgactactttagaaatgagtctgtggctcttctcaattatacccattactggaaaaaactaagaacatgg

SEQ ID NO: 843846 - DNA, 462 bp, Homo sapiens
gtctgcttcttgctcaagaattgtggggaccttggccctgggctcctcttctgaaatccagcccaccaagagcaggtgttgtctggcctctgcrttaccctgtgcacaccagggctcagggcatcagtgcaagtatgctaacactctgctactatttttgctgtaaataataaagcatggcttctgattcagaagtcctaggtcttctgccatcatccatgaaactgtggtggcaagctagcttatcttacaagataaaaatcttaggcgcttcacatttcttgacaacaatgtgcacaaaaacttgaaatggcctgggaagaaattctagaggagaatagtaagtcactcttttaaaaatgctgcatcatcgaacattcctggtagtatagattgctgtatgttgtgaaaaacatgactaaaaactgatactgaactctgcgaaaaagtcttaggcattca

SEQ ID NO: 843847 - DNA, 462 bp, Homo sapiens
gtctgcttcttgctcaagaattgtggggaccttggccctgggctcctcttctgaaatccagcccaccaagagcaggtgttgtctggcctctgcattaccctgtgcacaccagggctcagggcatcagtgcaagtatgctaacactctgctactatttttgctgtaaataataaagcatggcttctgattcagaagtcctaggtcttctgccatcatccatgaaactgtggtggcaagctagcttatcttacaagataaaaatcttaggcgcttcacatttcttgacaacaatgtgcacaaaaacttgaaatggcctgggaagaaattctagaggagaatagtaagtcactcttttaaaaatgctgcatcatcgaacattcctggtagtatagattgctgtatgttgtgaaaaacatgactaaaawctgatactgaactctgcgaaaaagtcttaggcattca

SEQ ID NO: 843848 - DNA, 622 bp, Homo sapiens
ctttccttttcttttctttttattccttttctttcatttgttctcctttctttcttttttctttttacttctcctagacaggcaaattcaaagagcatcagtagctaacaagttcccaaatactctacaagtagtcagtactaatgattacactaccaagattccagtgatttagtggttcattgctaatctcactcttacactctctacatggcttagttccatcccatgacttgagttactctttcatccaatgacagcaccactcactgcattatgttgccaattacagcagaattttatagctgagataaaagccaaaactttctagtttagatctcaaattttcctagtccacaattgtggttctgagagagtaaaaaaagtttgaaggtggaatgagaatacattttgatgatttcaatgtctgaagtgatgaagttttgaagctctgttgtgtctcctactatctgtgacactccggatgtgtttctaaagttctctaaacctcagtgactctatgcgaataaaagaaaatcatggaggggggataaagtayctgacacacgatggatcagcaaatgtgtggctattataatttttaatcgaaagggctatgttc

SEQ ID NO: 843849 - DNA, 293 bp, Homo sapiens
ggtgaactttccaaaaagcaaatttaattattctgattctcttctgtgttgccatcatcttcattcttcccccattgccacctgcctatgataaagtgcaaactccccaggatggartaacggctataaatgactgtggctagccttgcactgtaaaatatggtagccattagccacaagtacttcgagcacttgaaatgtggctagtccaacagagtgtgctttaagtgtaaaacatgtgccagattccaaagacttagcatgaaaaaagaatgtaaaatatctcttttttt

SEQ ID NO: 843850 - DNA, 293 bp, Homo sapiens
ggtgaactttccaaaaagcaaatttaattattctgattctcttctgtgttgccatcatcttcattcttcccccattgccacctgcctatgataaagtgcaaactccccaggatggaataacggctataaatgactgtggctagccttgcactgtaaaatatggtagccattagccacaagtacttcgagyacttgaaatgtggctagtccaacagagtgtgctttaagtgtaaaacatgtgccagattccaaagacttagcatgaaaaaagaatgtaaaatatctcttttttt

SEQ ID NO: 843851 - DNA, 643 bp, Homo sapiens
cagtttgcagatatggaaactgaagtggagccatgttaattgacctgcccaatattactcagtaagtgttggagtgggaacatggacaaactgctttccaaaaccctgtggtttattggatattcattgggaaaaaaaacaattttttttgaagaaaggaagtttgagtattcctaagcattaaaagagaaaaagctaaattgctggttaaataagaaaaggaagtatgaataattcaacaagatcttagtttcaagagctacatattttgtgacaactttaggattaaaagaacagaaaggaaaataaactttgcttttatcataattattagcatcctaatctttactattcttcattcatattattagattgttaattaattttatgcagatattaatggtttgaaaaaatctatgcaaaagaaagccatgttagtctttcttgataatatatatgttgctattaagaaattgctgaaagtctaagagccatgataaaaacacattatttatagaaaacatgtagtgtcttaaataatgaaccgagtcaaaatttaagttttcaagtcaagttgaataaccaaatgtttttcatatttatagaaagcacgygtctctggtatgtatggacttttaaaata

SEQ ID NO: 843852 - DNA, 547 bp, Homo sapiens
aacccttggtgcctgcctgggttttggcttagctggatctgagtggcccagtttccctaggacactcccattctttcccgtccccggacctctgaagaggccaacccttctgtagaatgctccttctgcccctctcatttactcattctcccgatctcagctcagtcactacttcgggaaagccgaggtgccgtgccacggtccgagtgcaactccatcacacccctgtcctctccgctctattgccagcccctacctgccctgcctccccgcctccccgccccccgccccggctctcacctgctctttaggatcatcccgggttggacacagcctcctaggcgggtgtccaaaggcagggtccacagagcttcgggactggggcgtggaggtgttgtctcctcctctggacacagggatctttgtccaatttacagaaagatgtgraagtcctgggacagatgaattaacacacgggtgcgtgagtgcagggctgtataaaccagggaaggcaggaagcgggtgcttgccctgcactaggccaggc

SEQ ID NO: 843853 - DNA, 553 bp, Homo sapiens
acagctggcacctgtacctgataatgtcacattccctgtcccgggccccgagcccctccctgtgccatttgctgtgctttccagaagaagcaagagagcccctctgccacacttgtttgctggggagataaaacaggcaaggcatgtagtggtttagcctaggcctggcacaaagtgtccactttttttttttttttttttttttttttttttgtgggggacggcgtctcactgtgttgcccaggctggagtgcagtggcacgattctcctgtctcagcctcccaagtagctgggattacaggcgcacatcaccatgcctggctaattttttatgcttttggtagagacggggtttttgccatgttggccaggctggtctggaactcctgacctcaagtgatccgcccacctcagtctcccaaaatgctgggattacgggcatgaaccaccatgcccatccyagagtgtccatttaaatcatggttcctgttactgttactgagaagaatgtaagtctccccacctacagggcagatgctgagcaggagaatc

SEQ ID NO: 843854 - DNA, 547 bp, Homo sapiens
gtggggcccagcaatgggggcccctgatgccaagagctctggaggttcttgaaagaggggacacgaaggaggagtgactgggaagcctcccatgccaaggaggtgggaggtgccctggaaatagctgcctcatgccacttaggccatgactggatttaatgtcagtggtgtgccacagtgcagaggctagacaactgaaaggggctaccaaggctgggaaaaaaatgcaattgttgctgtgagtgactttgaaagactctggtgccttgtggtgcccttctgaaattcaaacagtaatgcaaaagtgtctgcattagaatttacggtgtctaaaattcatgtttttaaaagagcttgcctacagatggtttccacacttgaaattgtgccctgcgagttgcatagctggaagttcaatgctcagtcctaccttggctcccattaaacatttggtgctctgtggattgagttgaacgtgttgaggctttgcaatttcacttgtgttaaaggmtctggcatttttccatttctatgcaaatttctttga

SEQ ID NO: 843855 - DNA, 514 bp, Homo sapiens
ttctgatcatacagaaaagacactgccaatatactgcactgtacaatataatagtcactgccatatctggctactaaaattaaaattaattaaaattaaataatgttatagatttggttgctcagttaccctacccatattttaagagctcagtagccacaagtggctgagtggctgctacataggatagctcaaatatggggtctagactaggatattataagatctctttaattatagcagctgaagtttgctgaggagaggatggaatggcagataaattttatctttggccttatagtccaaagggtacaagtacaaaaagtggttaagggcatgaacttgaaagccaggtaacctgggttaaaatcacacctctgacatttactarctacatgacttagggtaagttgcttttttgtgtgtgcctgtttctctataagtaaagtttgggtgataggagtgcttgacttataggtaaatctcattagaggattagatgagattgcatata

SEQ ID NO: 843856 - DNA, 602 bp, Homo sapiens
acaatcacaatttaaattgcttttgattcaagactatcctaaatgtcaaccattacggtgttgtctggatagggcagtgactgcctggggtagatggtgtggtcctagagttgaagtctttgggttcctcttgctccccacccacttagactacccaatcatactctgagtatctctttaacatgatgtgatgatttctttggaggcagaggtctgaactcgtgatggttattgtcatgtactctaaatgattgtctcctcccttctaaaatacacattgtggagctgttttgctatcattcttttcatgttcttctttcctgtctatttcactttgtgttgcttttttctcatctttaaacatttttcactttaactgttgctttatggatggtaccttgaacctctttttcagctagttatagaatcaactaatcccaactgtgacattagtgtttttgtgattcttgatgattttctaaacctatgaggcttctcgatgtttttttgktttgttttgttttttgtttttttccaattctagcttgaaaataacctgaaatttgagaaattctagaatgcaggtttccagaaaaagaatg

SEQ ID NO: 843857 - DNA, 602 bp, Homo sapiens
acaatcacaatttaaattgcttttgattcaagactatcctaaatgtcaaccattacggtgttgtctggatagggcagtgactgcctggggtagatggtgtggtcctagagttgaagtctttgggttcctcttgctccccacccacttagactacccaatcatactctgagtatctctttaacatgatgtgatgatttctttggaggcagaggtctgaactcgtgatggttattgtcatgtactctaaatgattgtctcctcccttctaaaatacacattgtggagctgttttgctatcattcttttcatgttcttctttcctgtctatttcactttgtgttgcttttttctcatctttaaacatttttcactttaactgttgctttatggatggtaccttgaacctctttttcagctagttatagaatcaactaatcccaactgtgacattagtgtttttgtgattcttgatgattttctaaacctatgaggcttctcgatgtttttttgttttgttttgktttttgtttttttccaattctagcttgaaaataacctgaaatttgagaaattctagaatgcaggtttccagaaaaagaatg

SEQ ID NO: 843858 - DNA, 496 bp, Homo sapiens
gattcctatttgaccttttcctttaaggagatactaagattatacacaaataattctctaacccaagaagcasgtaatgcctgtggttttccccagtgtaaaattttcttctagttctgtgtataatgttagtgctcttataatcaagccactgactggagggggtgtgacttcaggtcttgttgctaaggcagcaagtggaaaacaagtttactgccagaatgacaaaaagcttctagaaaagcatgttgcaaagaaagatttgttactcttagaaaaccttccctctggctggtctgtggagctatagattctcttgtactgacttcagcaaaggggccaagcagcatttgcttgtttgggagaggaaggattattgaaaggttaaacactacacacagggctaagcagaggctactgtctcagagagcagcctgatgctatctgaccatttgccctgcaaagggagctatcatgtcctggcacctccactatt

SEQ ID NO: 843859 - DNA, 496 bp, Homo sapiens
gattcctatttgaccttttcctttaaggagatactaagattatacacaaataattctctaacccaagaagcacgtaatgcctgtggktttccccagtgtaaaattttcttctagttctgtgtataatgttagtgctcttataatcaagccactgactggagggggtgtgacttcaggtcttgttgctaaggcagcaagtggaaaacaagtttactgccagaatgacaaaaagcttctagaaaagcatgttgcaaagaaagatttgttactcttagaaaaccttccctctggctggtctgtggagctatagattctcttgtactgacttcagcaaaggggccaagcagcatttgcttgtttgggagaggaaggattattgaaaggttaaacactacacacagggctaagcagaggctactgtctcagagagcagcctgatgctatctgaccatttgccctgcaaagggagctatcatgtcctggcacctccactatt

SEQ ID NO: 843860 - DNA, 646 bp, Homo sapiens
gaagaggagcatcacagacaggatcctctgaaatgcaggatgcacgaggtctgtgctggactggccaacccttctgccttcctgagatgaccagatgggtttagacagtgtcatctgctggctcctcttccctcatacctgactcaacctgctcatgatctgggagacagtgtcatatcctagtatcctgggccactccagggacagcagtacaggtggcaggtgacacccaaggttgagctgagcctcctgactcttcattcatctggcctccagggagagtctccgcctgtctgggtttcaatttcatcttctgtaagatggggacttcccactcaccccttagggcggtttgcaggtccacagaggtggtgaggcagaaggccttcctttgtaaactgagcgccagcacctgctacccacctatgctccctggggtgggcctgcttggcttggctgggaggcagcaaggggcaccttgaccaatcaaagtgatgtgctggcacagttgctaattctcacgccagtccycaggagctatctgcctgaggaggagaacaattctgcttccctgggtcaccttccatggaacaatgacttccaagtagaacaggtaaggccacaggtgggcagaatctagaattta

SEQ ID NO: 843861 - DNA, 641 bp, Homo sapiens
tcgctaccctgaccctagagttcttgcttggaaaaacccatcccttgagactatgacagttaaatcagtttgtttattaagktgctcaaattgaaaccaagttgttggttatgtctttttgcaactacagtcttgcttgatattgtacttgaacaactcttttggcacagtccagtcaaatgcctgctattctcccatgtgtgggttcctgtgttctgcctctttccgcatggtccacatcagaaggaagcagtgaacaagaagcagaaaatctcaaagacttcactagtctggaagattctacctaaaaatactcaccagtaagctggagctggccacaaagcagctggtggtctcattcttcgaaaagtagtggctgtcttggggcactgatgggcaggcaccaccagttggcactgtctggcagctgggaacaccccggctaggtgatagggaaggacaatgaggcccactgtggcagccatggggcttaggaggctgctgatcaggctgttccaggcctgcaggggatctggtcagggtctgctcctgagcagttcatgctcctggggcaccacgatcccaccaggccagcagcaggttctcacatccaggatcctcggcaggatgggacttcctct

SEQ ID NO: 843862 - DNA, 573 bp, Homo sapiens
agtgtatgcaaagctgctggtaattgctaatggctcaattaatggcggctgttaccattgtcaaacttacagaggaagagacaggcggcctagaagaaccatagactttgtctaggataggtgagatcaggggctgagtagtcagtgtcatcctggcccacccaatggctggaggaggggatgaggacaggaagaggaaggggaaggggaggcactgggagatgacagagataaatatatgtcatgatcttgccccatctgggtcactggctgcaccccaggggtgatgactcacctgctgagaagttccccacccagagactggtcccacaggctgtggctcggccccacgggcacagcaggcatgcatcggggaggcccatggagcaatgcccagggttacccatctgcttgagggctcaggtacccccctttgacctcttcacacccccgtccaagctgcaacctagaaccagccagctggctctcctgaggcagggcaggcccagagagatcaaagaatttgctggggccagacagcaaggccygtgaggtttcatcccattcaaaccc

SEQ ID NO: 843863 - DNA, 678 bp, Homo sapiens
tgatattttaggaccagaactcatattcctttttaaaaaagaagcactctggctgagcgcggtggctcacgcctgtaatcccaggcctttgagaggccaaggcgggtasatcaccagaggtctggagtttgagaccagcctggccaacaaggcgaaaccccgtctctactaaaatacaaaaattagtggggtgtggtagcacgcgcctatagtcccagctactcgggaagctgaggcacgagagttgcttgcacctaggagacggaggttgcagtgagccaaaatcacgccgctgcactccagcctggacgacagagcgagactctgtctcaaaaaaataaaataaaaagaagcactccgtggtgttgcatagagtgttggtatatattacatatatgaatgagttaactggcccttatcaggaagatggatgggaagtgggttctggaaaccttattctataccacatccttatatatagtcctcagttattgtccctctgtgttctagggcactgtgaggtgaatgctattgtacacgttttatagatgaggaaactaaggctcaggaaatgtaagtatctctcagaaggtcacacaggtaatcactgaaggagctgtgctcaaacctaagtcctacaactggcagagtgtggttgctcccacctgtaatcccagt

SEQ ID NO: 843864 - DNA, 621 bp, Homo sapiens
tggatcgcttgggtactccggaggctgaggcacgaggatcagctgagtccaggaggcagaggttgcagtgagccaagatcgagccacggcactccagcctgggagacagagccagaccctggctcaaaagaaaaacaaaaaaaagatggaccctggagaggcccggggtcccgcggggcgccttttctatttctttaccgcaatctgtttaaagagaaaagcaagcgcctgcccctcagctacacccccggggcctcaaggccacgcccacatgggagctgcccccccccccaacgaccaggacggttcccacgggggcggggcttcacacgtgacccgggacagccaatcgcgggcgcgcagcggaggggcgtgtcgcgcggaacaaaaggcctttcccgagcggggcggggcggggccgagatcacgctgatgcccacaggaccggcacggcgtggggtgcaacaaggggcagccacccacctaggaaagggtgcacagtgggggcacccacgggggcaggcaccggagggggtgcccacagaggatagaggacgccgagaagtgacctggggagccayaggatgaggaagagagaagagatgacagcaggggctgtag

SEQ ID NO: 843865 - DNA, 573 bp, Homo sapiens
ctacagcaacaataccccgaggcacctaggccagaggaggaatctcagytcaggggccccaggcctcaggatactccgcttctttccttctttctctctttcacccttccctccccatcctccccctacttctccttctcctcctactccttctcctccttctttttcctccctccccaccccctgctttggaggaagatgccagggaaggggaagagtccaggattggtgataaagatcatctgtgttgtaataaggagaagatgtaacttacatttttgttagcagcaaataacaacaatgagtttaaaaacaatgctaacaggccaggtgcagtggctcatgcctgtaatcctagcactttgggaggccgaggcaggcagatcacctgaggtcaggagttcaagaccagcctggccaacatagtggaaccccccatctctaccaaaaacacaaaaagtagctggtcgtggtggtgggcgcctgtaatcccagctactcgggaggctgaggcaggagaatcgctggaacccaggaggcagaggctgcagtgagctgagatcacaccattgc

SEQ ID NO: 843866 - DNA, 640 bp, Homo sapiens
catgaataaattcctagacacatacagcctaccaagattgaaccacaaagaaatccaaaacctgaatagacarataacaaataataagattgaagctgtaataaaagatctcccagcaaaaaaaagcccaggacttaaaggcttcagtgctgaattttaccaaacaattaaagaactaatacaaatcctattcaaactattccaaaaaatagagaaaggaatgcttccaaactcattcaatgaggctagtattatactataccaaaaccaggcaaagacacataaaaaagaaaactacagcccaacatccctgatgaacattgatgcaaaaaaacctcaacaaaatactagcaaaccaaatgcaacgacacattaaaaaattattcatcatgaccaagtcggatttatcccaagggtgcaaggatggttcaacatgcacaaatcaattgatgtggcacatcatatcaacagaatgaagaacaaaaaccaaatggtcatttcaattgacactgaaaaaatatttggtaaaattcaacattccttcataataaaaaccctcaatgactggatatagaaggaacatacctcaacacaataatagccatttatgacagacccatggctggtatcatactgaatg

SEQ ID NO: 843867 - DNA, 561 bp, Homo sapiens
tgaatcccagatgaaatgaaggttcctatccgaagtaaaacaggctcaccatttaagtaaaacaagctctactgcaggcagaagaagacatattccttccctatgctttttgttcatgctctttgtaaatcttgaaggaatctgggaaggtggggtataaaaatatttctttaaaatactgaaatcaaaataaacattgaatagactattaggtaaaacatatgtatgcatcagagttctgagatttactaacattttcagattaatgaaattataatattttatatttaccagaaatttatctataaaatacgtgccagcagatgtttgggaatagggctaagcaattggggagtgtgggtataataccaccagttacttttgattctaaactagcaggattagaggtctctttaaaaaacatctattctgtttattactttaaaattacatttatatcctcaataaggaaaacattcayatggtttaatattcaagacatatgaaagttacacagggaaaacgtttccttcataactcttttccccaggctccaagcac

SEQ ID NO: 843868 - DNA, 578 bp, Homo sapiens
aatattttatatttaccagaaatttatctataaaatacgtgccagcagatgtttgggaatagggctaagcaattggggagtgtgggtataataccaccagttacttttgattctaaactagcaggattagaggtctctttaaaaaacatctattctgtttattactttaaaattacatttatatcctcaataaggaaaacattcacatggtttaatattcaagacatatgaaagttacacagggaaaacgtttccttcataactcttttccccaggctccaagcacccttcacagagataactcatctggtcagtttcttgtctatctttgtagacatgttttatgtgaatacaagcaagtatgtgtgtgtttacgtgtgtgattttgctggatgttgccaaagaactctctatagagattgtaccaatttacaataccaccagcaaagtataraagtcttatttctctacatcgttgccaaatttactccttggctgatcagcatgcaattcggcctttgtccttccctcacaggcacaccactcaacccccacaaaacaaattttaccctgttctc

SEQ ID NO: 843869 - DNA, 657 bp, Homo sapiens
aacaaataaaagtcttagaaacatagtttgatcatttaaaagattttattgtgggcagtgtcttactcagctggtgcacgtccatgtggccwtgccagtagtttaaaaatattgttgtttatttttaaatttacatatacaaaaaatccaatctttttagagctgtcagttttgacagatacatagtcatgtaaccaagctcacaatcaagataaagatctgttcattattcgaaaaatctccctcactttgcccctttgttctgaaaccctctcctaacccttaatctctgacaacaactgacccactctcttgcagtacttggccttctgtgcctgccttattttacttaacataatgaccctcaggttcgtctatgttgtatagatcacaaatggtaggatttcattttaaggcagagtagtattccattgtatgtatgtaccacattttctttattcatccattgatgaacatttatattcatgcttccatgtctaagctattttgataacagtacaatgaacataggagtacagatatcttcctgaaatcctgatctcacttttttttggatttatgcccagaaataggattgctaggtcatttggtagttctgttttgaatgttttaagaaattttcatacagtttccctt

SEQ ID NO: 843870 - DNA, 690 bp, Homo sapiens
gactttgcatagaaacttgcaaaaaattatttatgcttctgaatgtggtttttaattactgattttaaagtctgcctatagcttgagctactagatgaatattcagtgacagtaaccatttcaaaactcactgctacatttcaactgaaaataatcctcccaccttcccacaggaacttcctatatcatcaccgtctgtcaagttttttctttccatatttctgacattctgatgcttcccagtcaaaactgtccaataaagcttaatgactgccttctggcatttcacaggaagtatttggttaattttaagatggtgatttgtacctaactgtaatttaccagccaactggcaccacaggctgagcagagccctgccaaataaacccaccatgcaaactaggctggtggcaactctggctcccctgagaaactctttcacattcagagggaggggttggatacaggaattaccaacatgggagagacacagcttaatcatcccaacggtatttttactcagctttgagatggatctgctggccagaatcagggcttgatggctcttgctttcactctgggagtaacctattcctggcagatcacctgtcttagtccaataccagttctgagattttagagcactgtatagattcccgttgayataagctggaaatgtccatagctgtc

SEQ ID NO: 843871 - DNA, 612 bp, Homo sapiens
gtagaggacttcagtgacatatccataccacccttaccctggggcacttgtttaaagtcactttggaccatggttcctgcctgtaatcccagayagtaatacgcccattggggaaactgtggctcagaagagttaagtggcctgtccaaagccatcctactagtcaatggctaagctgaggcttgaactttaggtcccttatgtaaggtttccccactctagaacattctattgcttgactttcatcaataagttgtctctgttgatttatcatctaggtaaagtttgaattcaagtctattgatcttctgctccttcatgcctcccagcctgggtcatcacatggggcatgtattcttagccttgcacttgggtgggttgggagaaccttatcacttgcctttgatgccttatagctaggctttctttatagagtcatagataccaaacatactttagctagaagaaattttgacctcatgtactctaaccctgccactttatggatagggaactgagagccaaagagtttcggtgattttccaaatgtgtccatcttgttagtgacaactgttcacagcctagactttttactgctagactctttatgct

SEQ ID NO: 843872 - DNA, 637 bp, Homo sapiens
attgatatttaatacagaattaggataatgtctattagaaaacaagtcggtagtagcagcagcagcagcagcatcrgtgaataagaacagctctgagacctcctgatgtcagttgtcacgaaatgctttccttatctcctggccctctccagaccccaatggccgtctctcactttgtggcccattcctggtatgctctgattttatagttgaactcccagattagattgtaaggcccagaacaaagctccagccctgtatttgcatatttgtaatgttaactaagcctcaacttcagtataacagctgtcaggatgactaccacattctcagtacagccttaatgaaaagtagtggaagaaaccagcattcatagagtgtctgccttgtgccaggcagtgcgctagaaggcttcaaatatgatataagtattattttaataatgaagaatctaaagctcagagagtgtaagtactttacctgagatcacacagcaagtaagtggcagaaccaggatttgcatctagatttctgtgatttcaaaaatgtaggcattttccttctaggatgtttctactttatcaattcagttaattatatatatatatatatatatatattttttttaatgaataag

SEQ ID NO: 843873 - DNA, 566 bp, Homo sapiens
agagctaggatgttaatggtttaaataataaaacctgttcttcattttctgcgaccaacaatacttgcaacattttgttttacagggtaaagaaggagactttgtgtacaaagaagtcatcaaatcacctactgcctctcgcatctctcttgggaaaaaggtgaaatcagtgaaagagacgatgagaaagagaatgtctaaaaaatacagcagctctgtctctgagcaggtatgcagctacctggtagaatgttcccttggttcttcctgacaagaaaagctgagaatggcccttctgagattttaaatggtgctaaatacacatactccttggcattaacctgctccaagtccgtgctttatttacgtagagaaacactgaattcaacacacgtttattaagcactttgggctgctcagcaccgtgcttggtgctgggaatacaaaatacagaacttgccttctgtgtacagacaagagagacagacatgtraagaaatggttattcttcagtgcactaagcgttgtaaatttgaatacaaaggaaggattttattttctaaact

SEQ ID NO: 843874 - DNA, 585 bp, Homo sapiens
atttgaggtttttctccccagtaagatttttgatcacctgattcatttttctttttaactataccatactatagcrgagcctcttttagtcaaagtatgaatatgaaatcatttcagcatggtccttctctattaataataaaatatacaaattttaacacatcaagaaaatatttcaatactagccatgacctaactagagaaataaagtattaatacttttgtttcttttttcttttttttttttttttttgagacggagtctctctttgtcgcccagggtggagtgcagtggcgtgatctctgctcactgcaacccctgcctcccagttcaagccattcccatgcctcagtgtcctgagtagctgggactacaggtgtgtgccttcacacctggcttatttttgtattttcagtagagacagggtttcagtatgttggccaggctggtcttgaactactgatctcgtgatccgcccgcctcagcttcccaaagtgctggtgagccaccatgcccggcctgttttaacatttcttaggtagctttttagcttaattgttggacttaattgttacacttaactt

SEQ ID NO: 843875 - DNA, 602 bp, Homo sapiens
cttttcaaaaggtatgtaaagaatgattttcacaaaccaagaaatcaawttttttcttcaggcactgccaggtgaggccaaatatacgcccaatggtagaaaaatggatggactggtttctatcataacactctctaaaaatgtgcaaactggacaattaatttactctcatatttggcagagaaaggagaggtggcattgctagcacccgttactttcccaaagctgccctcagaaatgtgttaactacttggttgccatgcaggtggccacttgtgctagtgtccaggttatcaacccaagcttccctctcctatttttccacccagaaaaacaatgggtagtcatggagaagacatgtaagaggctgtccctccatcaacattagtggaaagatctccatgtttcacccaaacgctgagcgctgcgatgtctcttggcctgatttccccagggagcagaatgctaagccacactggccttggccctgcttctagcacttgctaaaccatgcgggcagaggctgtgctgagtgctgtctcagaggtctgagcttctgtcacggtttccttcattcatcgccagatactaactcacccact

SEQ ID NO: 843876 - DNA, 487 bp, Homo sapiens
gcctagcaggctgcactcggctcatgctaccagcctggatcccatgcctccaaggaagtctttgagtcaggcatggagcggcaaggggtggatgagggagtgtgaggtctggccgctgcgccgtcagatatgccggctgctgccgcagggcagtcagctccaggtcccggcatgggtgccggctctctgaaaggctgtggctggaccaggtgcaccacaagcagcttccccagctggcactggggaatgcggtggcacctgaaagcttggagatgccaggaactgcagggccccaaagagggagtcacagccctggctccaggagctcccaggtctgggctccccaaagggctgcagctcttctctccttcttttcgcccacaacgtggtgagcaaggggcatgttgcagcactgtttgtgtratagctcttttagcctcaccatttggcagttcccaagttcttgtcctgcacgcaggaagaatga

SEQ ID NO: 843877 - DNA, 503 bp, Homo sapiens
taaattgcttgcttgttattgtatattgtcagtttggttttgactctgtttgcttttgtgaggaatgctgaaaattctcttgtataatttaggaaggtaagaaagaaaatgccaaacttaatttccaacctaactctccattttgatattgtggccaaccaaaattgagacttagcatccccacacactgactaccaccctattattcctctaccctctactctccacccaagaaaaaaacaggaactactaaaggaactagagtggatgtcctttaaatcaattaacatcaactgtagtattattcgaggcaaggaaagtccaagtataagaatatcaaaggttgctccttttcaaaaaataatgtcaaattkttgttaataggagcagccacataaatctctcaagcaactcaaagtctcgactcaaaaataaccaaaaatgttagatgtaatattttattccaatactttaagaggatcccagctatacccgaggggatg

SEQ ID NO: 843878 - DNA, 536 bp, Homo sapiens
acatatcaactgctcatcaagtakcagctgttaataagaaaagcaacagaaacatcagcctcggagttatgctcccagtttgtgtccatcacggggtggggggtggcggggagtgctggatgattctgagcccacaggaaaaagtataagcttcactttacctttatacttcacactttccataaatgtgtggcctgttccataaatctcaggctatgtaaatttggtgcataattgggaggcactgcaggtacctgcggctccagaataaaatccaggcagctccggagagagagcagggccccattagcaaggacagagtgagaagtgggcagagagcaagcttcacttcacagcagggccacggaagtgaagatgtgcagggctgcactctgccaaggatggctccttggagtcatgggactcacaacatcctcaggctcaggacccttttcccccacctaccccaataaggggcatgcagacagcacaggggatccctgcttctcccaaaacacacttcgccatgagtgtga

SEQ ID NO: 843879 - DNA, 615 bp, Homo sapiens
accacagtgctgtatgaactctgtgcctcttggcattgagacgtgaagccagctggacttcctgggtccagtggggacttggagaacttttctgtcttacaaagggattgtaaaatgcaccaatcagcactctgtaaaaacgcaccaatcagtgctctgtagctagcaagaggtttgtaaaatgcaccaatcagtgctctgtaaaatggaccaatcagcaggagtctaaaagtagccaatcacagggaagattgaaaaaagggcactctgataggacaaaaacagaagatgggcagagacaaataagggaataaaagctggccaccccagccgcagtggcaacactcaggttcctttccacctgtggaagctttgttttttcactcttcacaataaatcttgctactgctctctctttgggtccatgccttctttaagagctgtaacactcaccgtgaaggtctgctgcttcattcttgaagtcagcaagatgagaccacgaacccacgaaccaacactaggcacagcatgagcagtcctggactgcttggcctaactgtagaatactgtratgatcaatgacttcatgcagactgaacgaaagaaacaagaggg

SEQ ID NO: 843880 - DNA, 568 bp, Homo sapiens
tcaagggatcccaaataaatatatttatttctaaattcattctaaatgtttgcartgttaagtatgtgtggcaaaagaacagatacctttcattttttcaatcacctttcaaatattgttacaaaagcacatattactgtgaaatagtcgtaatttcagaaagaaattattcttcattcaacttctcttaagatttttaattaaactttttattttgaaaacattcagaacctacagcaaagttgcaagaatattacaagttaatgattatatgctcttcccctctattctcccaccattgatacttagccatgccaactctctccatctctatattctacacatttacagtgcaattatcaaatttagaaaacttaacattgacacaatgctattatctaatatgtggtgaatattcaaattttgttgatggttacaaaattgccttaaaagcaactttttcccctcaacacaaaatccaatctagggtgatgcgtcgcatttaggtgtcatgtccccttagacttccttaatcaggagcagtccttagcctttctttgttccatga

SEQ ID NO: 843881 - DNA, 568 bp, Homo sapiens
tcaagggatcccaaataaatatatttatttctaaattcattctaaatgtttgcaatgttaartatgtgtggcaaaagaacagatacctttcattttttcaatcacctttcaaatattgttacaaaagcacatattactgtgaaatagtcgtaatttcagaaagaaattattcttcattcaacttctcttaagatttttaattaaactttttattttgaaaacattcagaacctacagcaaagttgcaagaatattacaagttaatgattatatgctcttcccctctattctcccaccattgatacttagccatgccaactctctccatctctatattctacacatttacagtgcaattatcaaatttagaaaacttaacattgacacaatgctattatctaatatgtggtgaatattcaaattttgttgatggttacaaaattgccttaaaagcaactttttcccctcaacacaaaatccaatctagggtgatgcgtcgcatttaggtgtcatgtccccttagacttccttaatcaggagcagtccttagcctttctttgttccatga

SEQ ID NO: 843882 - DNA, 620 bp, Homo sapiens
tttttttttttttgagatggagttttgctctgttgcccaggctatgggcaatgtcrgctcactgcaacctccacctcccgggttcaagcagttctctgtctcagcctccagagtagctgggattacaggcacccaccaccacgcccagctaatttttgtatttttagtagagacagggtttcactatcttggtcaggctggtcttgaactcctgacctcgtgatccacccacctcagcttcccaaagtgctgggattacaggtgtgagccaccacgcacagccaccttacttttcatttggtacctttggataatggttgaagttttaattgtgtatttttttaatttttagaaaaattaatttgaattcaccaaccatccacttaaaacccaaacacagtatattccaaaatatctgaacctctaatttatgtatgttacatcaatcctttcctttacatctttcaaagtgtgatccaagaaccacctgcattaaaatcacctggaatatttgtttataatgtgtgtccatgggtcccaattccaaagattgtgtttcagagggcctgcaatagaagctaggactctatttgtttccttgattcttaggggcagtaaag

SEQ ID NO: 843883 - DNA, 610 bp, Homo sapiens
gtctttcctttaatcttttcttctctaggcaaaacatctcccgagaaaataacctgtctcacattaaaagaaaaactccagggcttatatatatttcagacaggaatgtgcttgatggaagcttgccaaacatcactgggtttcaatttcagtatccccagttttaagaaccatttctttctcagactctttaaaacatgagaacaacttagtttgctttaagccaaatattatatactgaaagaattgactggaggacatgagtcattgatactgaagtatgtgactgctggtataagggaatcccttacctcaaggatgttgcaaaatgagctgaagtcaaataaagtgaagaaaacatcaatatatgttgacatggattcctaaccctggaatgatcagtcacccttctggtacttcactcaacaagatgattagcatacagccttacacaaagcagtagctagagattagagcaagagaattcctgstttccagataactgttagctgtaaataaagtggcagattgatagtgtccaaccaaatagtcagggagcagagccaaggtttgctctcaagcagcctcctgccaagccctgtgacctcac

SEQ ID NO: 843884 - DNA, 568 bp, Homo sapiens
ttatttatttatttatttatgacagagtctcactctgtcacccaggctggagtgcaatggcatggtctcagctcactgcaacctctgcctcctgggttcaagtgattcccctgcctcagcctcctgagtagctggtactacaggcgcatgccacgacacccggctaatttttgtatttttagtagagacggagtttcactgtgttggccaggctggtcttgaactcctgacctcgtgatctgcccacctctcctcccaaaatgctgggattacaggtgtgagccaccatggctggcctcttgtggcactttaaagtttcattttctgactgcttttcaccattgttttcactgagaagtcagtctgagtatgtattatagttcccctgaatgtaatgcatcttttcctttggcttctcttaagatttttctcttcaactgtgtaaggyctttcttgtattgctataaagaaatacctgagactgggtaatttataaagaaaagaggtttaattggctcaaagttctgcaggctttaaaggaagcatggtgttggtatctgcttggctt

SEQ ID NO: 843885 - DNA, 426 bp, Homo sapiens
tgtggcctatcataaggtctattcttgagaatgatccatgggctgaagagaagartgcatattctgcagctattgcataaaatgttctgtaaatatctattaggttcatttggtctgtagcgcaggttaagtccaatgtttctttgtcaattttctgtctggatgatgtgtccaatgctgaaagtagggtgttgaagtgtcctggtatcattgtattggggtctatgtctctctttagctttaatatttgctttgtatatctgggtgctccagtgtgggtgcacacatatttacaacatatatttgcagctcattatataacgttaaaaggttcaagtcagcaagaggatataaacatagaccccaatacaatgataaggggacatttcatatttataagtgtatatcatatcttcatatttataa

SEQ ID NO: 843886 - DNA, 504 bp, Homo sapiens
agtacagacttcatctggtacaattacaccgtctcctgaatgtgatcaacaaaactttgccatctctaaaaccactggcttcctaaccctgcctccatgataaactctttaatggtgggaacatttgtacctctttatacgttctcgtgcctgtataattacctttttaaaattaaacttttaattttgaggtaattctaggtttatatacagttataagaaataatacagaatgatcccatgtactcttcacccaatttttttccagtggaaacagtttgaagaactgtagtacagtatcacaaccaagatattggcattgacaagatcgacccatcttattcagtttctcctgttttacttgtatgcatttgtgtgtgtgtgtgtgtatttagttctatacaattttatcaccattktaggttcatgtttccacttgacagtcaagacaccaaacagttctatctttcatgaggatcccttgaactggccttttataaccac

SEQ ID NO: 843887 - DNA, 648 bp, Homo sapiens
aaagcaaatatagttcaagaccagtgaactttcccattttggtttgggaatattatatttctaaattcttgggtatgctgctttaagracctctaatctgtatggttatataaacatgaaaaagcacaatttctttttccccaaaataaaaactgagattttgaaagtataattcatttttgagaacttgtcaaaaaagcaaagggatttgggcaaaggttagtcttgttttatttcaatgtgtttttgcttttttaaaaaaatagtttgcacgagagaggaaacagcattggttttaggttctcgcagacatttttctggagttccagcatgtgactgcttaaagacatctcagtaaaagcgaaccagctgcctatcacataggactcggagccatgtgtccaatcactgtacgtggtcccaccccagccctcagcagcagctcttacaggctcttcaaggtaacgagcacaaaataagctccctctcatctttccctcccagagaacagatttactcccttttactcacacgtacttccagattgcctagttctatgatcttacagcagtaacaacaacaataacaacaagagcaggcgtaaaccaaatacatcatttcactaccgaagtctagaaattaaccttg

SEQ ID NO: 843888 - DNA, 596 bp, Homo sapiens
gacaatcgtcagcaaaaagaacaaagctggaggcatcacactacctgacttcgaactatactgcaagaccactgtacccaaaacagcaatggggaaaggattccctatttaataaatrgtgctgggaaaactggctagccatatgcagaaaactgaaaatggaccccttccttatgccttatacaaaaattaactaaagatggattaaagacttaagtaagtcctaaaacaataaaaaccctagaagaaaacctaggcaataccattcaggacataggcatgcgcaaagacttcatgactaaaacaccaaaagcaatggaaacaaaagccataattgacaaatgggatctcattaaactaaagagctgttgcacagcaaaagaaactatcatcagagtaaacaggcaacctacagaatggttgaaaaattttgcaatctatccatctgacaaagggctaatatgcagaatctataaggaacttaaacaaatgtaaaagaaaacaacaaccccctccaaaagtgggcaaaggatatgaacagaattaccataaacaatatattccccaattatgtgaccatgtaaataatgtatgaa

SEQ ID NO: 843889 - DNA, 596 bp, Homo sapiens
gacaatcgtcagcaaaaagaacaaagctggaggcatcacactacctgacttcgaactatactgcaagaccactgtacccaaaacagcaatggggaaaggattccctatttaataaatagtgctgggaaaactggctagccatatgcagaaaactgaaaatggaccccttccttatgccttatacaaaaattaactaaagatggattaaagacttaagtaagtcctaaaacaataaaaaccctagaagaaaacctaggcaataccattcaggacataggcatgcgcaaagacttcatgactaaaacaccaaaagcaatggaaacaaaagccataattgacaaatgggatctcattaaactaaagagctgttgcacagcaaaagaaactatcatcagagtaaacaggcaacctacagaatggttgaaaaattttgcaatctatccatctgacaaagggctaatatgcagaatctataaggaacttaaacaaatgtaaaagaaaacaacaaccccmtccaaaagtgggcaaaggatatgaacagaattaccataaacaatatattccccaattatgtgaccatgtaaataatgtatgaa

SEQ ID NO: 843890 - DNA, 522 bp, Homo sapiens
agtgttttatagtttttgttatagagatctttcacttctctggttaagtttattcctataaacttaggaattgtaaatggggttactctcttgatttctttttcagattgtttgctgttggcatattgaaatgctactgatttttgtgtattgattttatatcctgcagctttactgaatttgtttattggttctaatagttttttggtggagtctttagattttttcaaatataagagatcatatcatctgcaaacaaggataatttgacttcttcctttccaatttggatactctttattctttctgttgtctaattgttctagctaggacttccggtactatgttgaataacagtggtgaaagtgggcatccttatcttgttccaaatattacaggaaaggctttcagttttcccgcattgagtatgataataggwacaggtctgttgtatatacattttgttatgttgagttatgttccttccatacagttttttgaaggtttttgtcatgagggatg

SEQ ID NO: 843891 - DNA, 631 bp, Homo sapiens
tgtctcaaaacaaaaacaaaaacaaaagaaaaaaaagaaaattcccaactaagccccaagatagctgaatgaatctctgagaatggagcctgggcatcaatatcttttaaaaactttccagtcattctcatgtgtgtacagccacagttgcaaagcaatgtccagtggttttcaaagtgtagtttccacatcagctggagtagcatcatggggaacttgttagaaatgaacattttttctttttcagtttttttgtaaaaacaaggtctcgctttgttgtccaggctggtctcaaactcctcccatcttggcccctaaagtatgggattacaggcatgagccaccatgcccagccagaaatgaaaattcttgaactccactccagacatactaaatcagatattttgagtaaaacctagcaatatttaacaggccctctaggtgattttgatctgaattaaagtttgataatcactgtcccagaattattctttcataaaaaccacctagaatgtatgtcaaatatacataacctagacaattcaasggggaaagcgtagtttttttttcaacaaatgacactgggataactggatagcaacatgtaaaaaataaagttggagccctattt

SEQ ID NO: 843892 - DNA, 631 bp, Homo sapiens
tgtctcaaaacaaaaacaaaaacaaaagaaaaaaaagaaaattcccaactaagccccaagatagctgaatgaatctctgagaatggagcctgggcatcaatatcttttaaaaactttccagtcattctcatgtgtgtacagccacagttgcaaagcaatgtccagtggttttcaaagtgtagtttccacatcagctggagtagcatcatggggaacttgttagaaatgaacattttttctttttcagtttttttgtaaaaacaaggtctcgctttgttgtccaggctggtctcaaactcctcccatcttggcccctaaagtatgggattacaggcatgagccaccatgcccagccagaaatgaaaattcttgaactccactccagacatactaaatcagatattttgagtaaaacctagcaatatttaacaggccctctaggtgattttgatctgaattaaagtttgataatcactgtcccagaattattctttcataaaaaccacctagaatgtatgtcaaatatacataacctagacaattcaagggggaaagcrtagtttttttttcaacaaatgacactgggataactggatagcaacatgtaaaaaataaagttggagccctattt

SEQ ID NO: 843893 - DNA, 623 bp, Homo sapiens
aacaaacttgcacatcctgtacatgtaccccagaacttaaaktaaatttaatttaaaaataaaaaataaaaaaagcatcattctgtatcagacaaattcaaaatagtataatcttaaaagtccaactcatacttttttaatataaactaaatatctatattgacatttttaaaaagctaatcttttggtatcaattcttactttgattatacaaaataggaaaaaatcaatttctacttacttaattgagtttctaaagtggtcttcagctgggttttttacagtgcaactgttcaggagccataaatctgcatcggatgcattttctattaaaaaaatgaacacaaaaaagaagtaagtagcacacttaatcattcaaaaatatccagtggcactgggattgctgcggtaggggagagaaaaacagtggagtaaaatgaacaggcaattacaacacagtagaaaattgctagaacatggaaatatttgtgaacaataaatataaaaatgtgtaatctatgctatatcttttcacttaaaatgtaatgataagcattctcttcctttactttcaatgcttgacagtactatctaataatttccacaaactaaagtgaaacttg

SEQ ID NO: 843894 - DNA, 623 bp, Homo sapiens
aacaaacttgcacatcctgtacatgtaccccagaacttaaagtaaatttaatttaaaaataaaaaataaaaaaagcatcattctgtatcagacaaattcaaaatagtataatcttaaaagtccaactcatacttttttaatataaactaaatatctatattgacatttttaaaaagctaatcttttggtatcaattcttactttgattatacaaaataggaaaaaatcaatttctacttacttaattgagtttctaaagtggtcttcagctgggttttttacagtgcaactgttcaggagccataaatctgcatcggatgcattttctattaaaaaaatgaacacaaaaaagaagtaagtagcacacttaatcattcaaaaatatccagtggcactgggattgctgcggtaggggagagaaaaacagtggagtaaaatgaacaggcaattacaacacagtagaaaattgctagaacatggaaatatttgtgaacaataaatataaaaatgtgtaatctatgctatatcttttcacttaaaatgtaatgataagcattctcttcctttaytttcaatgcttgacagtactatctaataatttccacaaactaaagtgaaacttg

SEQ ID NO: 843895 - DNA, 612 bp, Homo sapiens
atgcctggacactgaaaagtaaacgcatcacctcctattttataccctaccttctggttcccaattgggagagcacatagagggaaggagacaatatagaaactacggagtccgctggtagtgggctgcatggtgtgacagagcccttctctgtaaaatggaaatgacaccactagccatctcaatagttacaagaattaaaagagatacagtacctgaagtgcttagcgcatggtagcatttcataaatgtttagtgtcaatactaatgctctaataatgtaaattgttaataatttatttccctaatatcaggaaatcccagttgtctatgtggcccagtgcttaaaaacgccttcttgcatgaggggattgaactatacaatgtttgttaactttgtatttgtattttttcctataaaatcttaaaataaaattaggagatgtgttctgatgtaacagtaggattagcaattttcatttattccttccatatatatttactgaatggctactatatgcctggtattgttctttgmaagcagaaacagcaggaaaaaaagtccctccctcatagagtttacattctaaaagggaggaaatagataataaa

SEQ ID NO: 843896 - DNA, 644 bp, Homo sapiens
tatttccaggcagggctttcctatagagatatgtggatggcatatcccccgccaaaaataatagctgtagatatgcraactattcaaaaaagaaattgttatatgtgttatacaactagaaatcatgcagtttaggaatatttgaaatatgaactcattgaaaagaaggaaaataagaccttcaatttaaccattaggtcaggcaattgctggcacatctaaattactgacaataaatctcagagcaagtacaatacttctaagtatggttataagaattagaatcataaaaccatagaattgtgaaattacttacacatcatagaatccaatcccttctttttggagaaatggaaacataccccagaaggttaaatcatttgcccaaaataacatgattggttgttgaccctttctactaagccatccccagttccactccagaaaatataaattattcatgcagaaagacaaacttaattttggcaggtcagagatttcagaaagatgtgaattggctaagggttgtgatttatgaatctaggcagctattcagattgccttatctcagctgtccctctgtgaaacataccattctgagtacctaaattgacctctattcaaccccactttaccatcattgg

SEQ ID NO: 843897 - DNA, 689 bp, Homo sapiens
aattttagaacttcagccatcttttgtgaaaccgttattctagaactctcagtggatatatatccatccccctaraaacttcctatttattttaacctttttctctgtttcctttttcttattccagtatttttcccactttaccctttctacaaattgcctattcgaattcagtgtattagtttggcaaacagtccatcttgagagactgtttaactccattgatttggagtaatcaacttttcctcattttattttcctgctgattgaatcatttcagtccttttttgggggaacttttaacactttttgttagttttttagatgattaataaataatcttcaacttcagtatattccttaccattaatcaagaatgctaagttattcattgatatgacagttttgaaatgttctaacaaagtcaaaacagttgtttattggataattgtttattggatatgtaaaaatatcttaaaatgtgtaaactagaaaattacaaatgttaatttgtaatttcatgcacagtgatgaaattggattcatcctctaagttaaactaaattagaattatgttctactttatcaccaaattatttaattggctgagaaattgaaaggtagggagtttgctacttctacagatatttggtaagctttaatggagaagtaatgcgaagcattagaca

SEQ ID NO: 843898 - DNA, 610 bp, Homo sapiens
aatgaaataaataaataaataaaaagcatccaaattggaaaagaggaagtcaaattatctttgttcacaaataatataatcttacacttaraaaaccctaaaggctcctccaaaagactcctagatttgataagtgacttcagtaaaatttcagggtaaaaaaatcaatgtacaaaaattagtagcatttctatacaccaggaatgatcaagcagagaaccaaatcaagaactcattcccatttataatagctaaaaagaaagtgcctagaatacatttaaccaaggagctgaacgatctctacaaggagaactacaaaacactgatgaaagacatcataggtgacacaaaccagaaaaaaacttccatgctcatggattggaagaatcaatatttttaaaatgaccatactgcccaaagcaatctacagattcaatgcgatttctattaaattatcaacatcatttttcatatttcaattagaaaaaacaatcctgaaattcacatggaaccaaaaaagagtctgaatagccaaaatactcctaagcaaaaataacaaaactggagacatcacattatctaacttcaaattatactataatgatactac

SEQ ID NO: 843899 - DNA, 603 bp, Homo sapiens
tgaacaatttaatttcaatgttatactgaggcagcacagcgcagcacttcagagcaacgactttggggccagaccacctgagttcaccagctccccatctcctgcctgcataaacttgcacacattgtcttactaatctgtgtttcagttttgccatatggaaaatggggtggagggggaggatagcagtacccatccttcagtattgttatgaggattaaatgagttcacacatgtaaagggtttgaaagggcttgccacagagcaagcactcaacatgtcctcactcttattattcactattaatcatgagtccactcagttgaattatcaaaattcatctttcattgttctgccctccatagctcctcttttatcttattttcatgtcttttatcagtttcctgtgttctgggagaccatctgaagtttgttttctttactaaattgatcttctgtgttggacctggcattcgttgcttccatgcagttttaattcagcagccatgtctttaatctyctcctaatctcttcttatcccagattattccagttgtaggattgctggttctaagtgaattatgtaccatcttttgaatccta

SEQ ID NO: 843900 - DNA, 394 bp, Homo sapiens
ctttcagccccagttaaggcttcagatgattgtagcctgagccaacatcatgaatgcaacctcatgagagaccctgagccagaaccaccaarctaaccaccctgagaagctgtgtgagattaatgttttttgttttgtttttgtttgtttgtttgttttttgagacagagttgctctgtcacacaggctggggtgcagtggcacgatctcagctcgctgcaaactttgactcatgggttcagacgattctcctgcctcaccctccttagtagctggaattacaggcgcccaccaccacacctggctaattttggtatttttagtagagatgagatttcaccatgttggtcaggctgttctcaaactcctgacctcaggtgatccacctgcctcc

SEQ ID NO: 843901 - DNA, 388 bp, Homo sapiens
ggcaaaaggcacttcttacatggtggtgccaagagagaatgagagagaagcgaaagcagaaaccccttatcaaaccatcagaacttgtgagacttattcactaccatgagaacagtatggggaaaactacacctgtaattcaattatgtcccactgggtccctcccacaacatgagggggattatgggagtacaatcaaaatgagacttgggtggggacacggagccaaaccatatcatttccccccggcacctgccaaatctcacgtactcacatttcaaaaccaactatacctcccaacagtcccctaaagtcttaactcatttcagcattaactcaraagtccacagctcaagtctcatctgagagaaggcaagtcctttctgcc

SEQ ID NO: 843902 - DNA, 633 bp, Homo sapiens
acccaactccagccctctctttagcttctacattggagaagggaaatacccaattctagcccccccccagtgatcttgtcccacttaaggacaggaaaagagtggaatgaaaagcacttgttgaaagtcaccgttcataggcacaggctcactaaaaggccgagacctgctataggactatagaatgcttcacttcccctgaactcttatcgtcacattacaatgtattgagtttctttcactcagtacatcatgcctggctttcaacaaaaaattagaagtcacactaaaagacaaaaacatagcttgataagacagagcaagcatcagaatcaatgtcaaatatggtagagatgttgaaattacaatacctatgaaattaaaacaactgcaattactatgataagacaacacacaagaataggttggtaatgtaagtagacagatggcaattccaagaaataatcagagaaatgctagagatcaaaaacactggaacagaagtcaacaatgyctgtaagggcttattagtagactggacatggcagaggaaagaatccctgcgattgcagatatataaatagagacttctaaaactgagaatcaaagaaaaaaacacagaagaaaaccaaa

SEQ ID NO: 843903 - DNA, 510 bp, Homo sapiens
actttaaaaatgattttcaaacatttaatttcttttagtaatttaagagaaatattaaagggcagcatgtttcctattctttgttttatttccctgctcttttgattcctttttcctccaaatgcatctgctttttcatagaaggcagaaaagatggcaaggcaatttcagcagggaattttatgcagatgcagtatttacgatggttgtcctggggagagtctgtgattaatgatcacatataacctggttcaatatttatatttttaaagtaggcttcctcattggcagcaatgtactacaaagtggactagacatcgaaagatctcttaatccgaggacatagaccaatgggtcagttgggtactgtttataacytttatgatcaatggttttgaaggtcatgtgtggtacacatttatttagcctgccagtagtaagtctgcttcctggatatgttaacaaaattgctaacattaacaattttctttacccggcatttggatgcta

SEQ ID NO: 843904 - DNA, 483 bp, Homo sapiens
aggtacttcaatatttgtatttccatttcagatttttaaaattcattgctttaaagaactacatctgaagarcaatgtttagctctttatttattattgtattttatttatctaaagaccaatatgttgcttcctactgataacatcagatgaatattatcgtgaagttaaattagcttcttcaacagtgagctctgtggaatagatgcacctttccttctagtgtgaccatttgagatggaacagaccagaggattttccatcccattgctagaatatgtttctgtgacaaagttctagcaagttttagtccgtaatccatttcaagagaaattcccatttctgtttttttttcaattatgtcttttaacttatattttctggatcttattccatttgagtgaaatgtgaatagatgaagagatgtggtatcagagctcattaaacaaaacttttctggtaacatgtttcatcctatttagt

SEQ ID NO: 843905 - DNA, 483 bp, Homo sapiens
aggtacttcaatatttgtatttccatttcagatttttaaaattcattgctttaaagaactacatctgaagaacaatgtttagctctttatttattattgtattttatttatctaaagaccaatatgytgcttcctactgataacatcagatgaatattatcgtgaagttaaattagcttcttcaacagtgagctctgtggaatagatgcacctttccttctagtgtgaccatttgagatggaacagaccagaggattttccatcccattgctagaatatgtttctgtgacaaagttctagcaagttttagtccgtaatccatttcaagagaaattcccatttctgtttttttttcaattatgtcttttaacttatattttctggatcttattccatttgagtgaaatgtgaatagatgaagagatgtggtatcagagctcattaaacaaaacttttctggtaacatgtttcatcctatttagt

SEQ ID NO: 843906 - DNA, 589 bp, Homo sapiens
gtctcgctatgttgcccaagctggtctcgaagtcctgggctcaagcgatcctcccatctcagcctcccaaaatgctgtgattataggtgggagctgccatgcctggccttatttcccttacatttaagtggacagtcgctgcctagggttcgtgtgtgcagtttccctcagtaaatgtgcaatgagcgcctactattctctaagcactcagcataggctgccgagccactaaaggaggaacacatgcctggcgtctgtgggggtgaccactgcggccagagttgaggtcacgctcggaaccttggatgcctctgtgtttattttactcgagacatccggctccactttcctctggtttttaaacttctcagtcccgtggtctctgtggtcggggaggacctggctgtcactgtgttttccgaacccattctggcccctctgttaccctgggagctcagtcttgaccggacrggaatgctcctctctggcatccggcaagggccacctgccatgtgtccatgtttccttcctaaggaggatgtttgtggctggtggtggtgactcgggacctggggggccattcctatgg

SEQ ID NO: 843907 - DNA, 577 bp, Homo sapiens
aaaccaagagtggagacgttcttcaaaaaatgattagaagatgattttgcagagatcaagtttcattgctttattgtcatagaagcaaaatacaaaggcttaggaggcaaggagaggtgaggaagtagaagtgacaggttctgactgcttggtcatcgcatctgactgtgagagatgcaatcgtggctgtagcagttaccataaggattgggaatgatgctctacgacaaaacactgagactcagccatcgaaagaaacaagtattttctttggttttggtaaaggacccagctgtcctcatctgcacaatgaggtgaccatggcaatgtgagcactgaggatgtagctctcaagagtatcctgaggcctgagaagacttagcctgtgcaccctttcacagcagcatagcctaaaagaattggggcagacaggtcacccttggtcctcacatyttgaagtgtgctgctgcttgatgttgtgggagaggttgctaaacaaagacaaggagcattattcctcgagtcacttttctcaaaacattgttgtacacatttgtgctggataaagagttcttgg

SEQ ID NO: 843908 - DNA, 553 bp, Homo sapiens
gatcatgatgtcttacatcaaaagaaatcataaggcaaagaaaggagaacagaaactctcatttcctcttgatcactgtcggttggctaagttgtcattttcaagtggaagatgccaaaaagtccagtaatagagtaatttttcagacaggtagacaggaagcatactattacaatgagactacagtaagtctcaaggtggtggcagtgactcccacctagatagaattttaggaaatatgtttaattactacatgaaaagattcatggaaatcattaaagtcctaagtgccagaatatgcagtcctgcccacgtcaagaatttgccagcaataacaagcacagactttccagtcacaaacagctacctagaaagaaatgacaaagtactgattctttttccaagctgctgatccgataacsaacatgagatttagtatctataatggctgtctcacttcatctcctgtgcctgtcataattcctagcacattaaaggggctcaataaatatttgtggaatgcgttgctgagttcataatatttaccacgttg

SEQ ID NO: 843909 - DNA, 638 bp, Homo sapiens
tacagggtttggaattagaagggaaggatattcaaatacataacattatattaaagaaagtagaggaaaagatgaacagaaatcaacagaaagtagaggaaaagatgaatggaaatcaacagagaattggaatctatacaaaacaatcaagtcaacatgataaaactgaaaaactatctttaattaagaatcttaatttcttaatttcaggtgggtatcataaaaggctggaaacaaaagaagtcaagttagagacaaatagaaaatatatacactgaagcacagagaagaaaaagaaggcatgttgaggatataattttaaaacacaatatatacgtaaccaaagtcctagaagaggaagagcaagagaccagagaagaagcaatacatggggcagaagatataatggccaagaatattccaaaatttatgagaagacatcaacgcacagattttaaaatctcagaaacccaaagcaggataaatcaaaggaaacacgcctaccatcctatagtcaaactactgaaaaacctgagaaaagtgacartcacaggaagagaagacacattaccttcaaaggagcagcaataaaactgatggctgacttttcaacagaaactggaaaccaaaagacaata

SEQ ID NO: 843910 - DNA, 541 bp, Homo sapiens
ggagtgtcggttacaagagtgtgtgygtttgtcagaacagatcaaactgcagttcaacatttgtgcatttcacagtatatagattttatctcaacacaaaaacgtggccaggcatgatagctcatgcctgtaatcccagtgctttgagaggctgaggtaggaggactgcttgaggccagaagtttgagaccagcctgggcagtatggcaggaccctgtctctacaaaaaactttaaaaaattagctgggtgtggtggcacttgcctgtggtcccagctacttgggaggctgaggtgggaggactgcttgagcccaggagtttgaggctgcagtgagctatgattacaccactgtactccagcctaggtgacagaatgagacttcgcctctaaaggaagaaaaattcgtggacacaaccaacatggcggcattgctggagagacctggaatcacaacgtggctcaaccacttaactctttcttaataactctgagattcaggttttaaatctgtaaaacggggacagcaaggcttgcaaagt

SEQ ID NO: 843911 - DNA, 551 bp, Homo sapiens
tgttggccttacttgtctttgaatctccaaccttcctttgagacttgggtctgacctctgttcaacctgttgcttcttaggaggacttcatttcctgtctgtctctacttttgtccatttcagtgtttttcccatcattcccttctttatttcccctcactgccatctttatttctcctcacttccatgggtttttgttagccaaagagctctgtaactgtggctgcaaagaataattgaagagatggaataaaaaaaatgcccaaggaagctcatcagtataaaatccttagtttttttcttctttcaataacatactttagaccataattatcaggtatctattcagttttctcttgtattatttcacgttcttttctatttttaagccagcagacacaattttctattttttaagycagtagacaattttgccacacaaaattgtgtgtgactttattaatatcatgaaaatggaaatatataaaagggcatataaatattaatatacatggtctaatacatattgttttgagaaaacaagagtattt

SEQ ID NO: 843912 - DNA, 625 bp, Homo sapiens
ttaaattcccgaaagcaaaaaatcctggggtctcattctctgagtataagcaataatactggaaactttacattaaaatgaactcagtcattcctaattaggaaatgatgaaaataagcgagttaccaaagcttctgtgatatggccaaaatggtacattcttagcccttacatacatcaaagaaactaaacattccactgaagagttaaagtatatactcactcataagcatacatacacatgaaatttaaggaaatcggaatagagccaataaaaataacattaaaaattagagaaaagcagcagaattaatgagcaaatctaagaacctatgctttgcaaaaacaaaactgtaagaaatattcctggaaaatctaatcaagaagaaaatgaaaacaaatgaaaatagaaagataaatcctcataattctagatgtgaagatttaaataattataaagtaattgttttttaagagacagggtttcattctggcccccaggctggagtgcagtggtgcaatcatagcttactgcagccttgaattcctgggcttaagcagtyctcctacctcagcctcccaaactgctcccaggattataggtgtgagccactgtgccaggctg

SEQ ID NO: 843913 - DNA, 630 bp, Homo sapiens
ttataggcatgagccatcacacccagccagcatatttttaaatataaccaaactgctgtgaggaattgaagttgacttcstagagctgataaaaagccccttggaaagaccagccttgtctatgtggtttccttacatgatttctgacctgtggtaagtaaagaatgtcactttctgacagacccaggaacctcaagaaatatcgggaacctcaagaagagaggaattcactgactcattcaggtattacacagcccgatgaagaaattttgacttggctttctagcctcaagaggcttttgaaagtctaactggagattccttatgaaaatatttcagcaaagccaatttaaaaggagcctatgtggccaattactatttgtgctgcactttatgcaaataaacaggccaagtacaataatactaaaacttattttgcaaataaattggtcataatattcttggtataaaggtgggactggagagagacaaattatgattcagaagtgttaaagcaaactaaatatggcctgagaaggactctgtacttctatatttgagtccttgtggatgaactgcaacttaacttcataggtagacaagactgaaaacctgtcctaggagtctgtg

SEQ ID NO: 843914 - DNA, 635 bp, Homo sapiens
acatttggatacaggtgccaaagaacattattaaggaattatttagaaacaatgtgtctagtttaagaaagtggttttcagtattgtgacaatacaacgtttttacaaggttgttttctaccaccatattttaaagatatttttatgaccgtgtatactcacactttgcttgtattttaaaaggaggatatatttgcacttatgtatacttttacagtttgccaaaatattttgttgtaaaattttttttcaataaaatgtatataacaaatagttgttttaggggctgattttctcttcgggcaccctgagagcaatggatgccagtttctcctccccggcaggcagctgtgcaactctacccacaccccctccagtggtgtaactgacatggtgtggggtctgtgccttgagtaacacaggccaggttctgattgtgagtcttctcaggagaaaaacagtggaagaaacgttttctgttatttctttctttacttcaccccagctttttctggcaaaacaaaaaccagaaggtgaaaggaactagaargaaaaccaggcaagataccgaccagggtttgattttgaggaaaccaattttgtgccccttctgttttctttcctgtgcccgggga

SEQ ID NO: 843915 - DNA, 633 bp, Homo sapiens
cctcctccagggcttccttacaggccacaagtgcattccgagaaggtcatggtggatgcacaaggttcctggaggcccagactctgaccttgcacattgytgggtgctgcaatgcatcagtcaaagcaagttataggccagccaggatttgggaggcaggagaagagcagctgcagaacactgcaggccctgtccacctgcagcgggaggtggggtggtactggctgcaagctgaggagcgacctttctagaggtcttcaagaacaggccacaccctcccgagggtgatgtaactgaggccgtgggacctgaagtctagccatgtctctgtctagaggtcgatgattaccacgtgcctttttattgcaaattttgcccaggactcttttcttcagcttttagcagttccaagatgcaccccctggctggggctccttgaagaaccactgtttttctaaactcactcttttcttttgaggttttgacatctagtatttgactattttcccctgagcacagtgtcctgagttgagcctcggaagtgactctgaacgtttaggttggaagtctggaggaatcctcgctgctaaggctgacatcagggcggtgtgatttctgcaacgcccggagacg

SEQ ID NO: 843916 - DNA, 598 bp, Homo sapiens
attatatattagcagcagtagtagttgttgtttttaagactacgtttttctccaaacgcttgtagatacaagatcagctttgctttttttggccggaacactagttctactacaattgaagcaaaatagtcttttattatagaaatcagatcactcccctgtgtttccagtagctaactccactttgtagagaatgctatccgaagtatccatccctctttcaattgtttaatttttctctcttttaaatgcttacaaaataagtcacatttaccaacggctgcacaccgtctaccacatctgttagagatcatgaggaagtggcaagagtcctttcttccaccactctcggtgtgagagactggccgtcgctcctcacgagcagcttatccaaaaacggattcactactcaaggaacaggaaggggacaggcttcaggcagcccaggccctacctactggttaccaccccttcccaggagctgagcytggaccatccatgggaagagctgtgcccacggccaccagagttgagaccagggcttcccagccacaattcctcctttcagaacccaagagacagctcctcacaactctgc

SEQ ID NO: 843917 - DNA, 606 bp, Homo sapiens
tgtactaagactgaaaaatcctagttagcttatacagtagctacctatgcattcaacagtttcctcacgaaaagctcacaatgactatccttgataccctttgctgatctgaatctgtgaaagtatttgacagttgcacaaagcagcaggaagagaaaataagttgcccacatgcaagaacctaagagggcttcctgctgaaccaccagttgtggagaaagcagccaaccaggggaagaaccattcaaggcagaatgttcctcatttttccagctgatttagatggactaaagaattaaaattcaacccattccaaagcaccaaataataactttatgctgtggaactagacactatactttcactctctttcctaatgtctttgtttttggctaagagtaaaaatagctgtcaaggttccctctctcaagctctgttaacacacctagtccaaaggcgcatgtgtgtcatgtctstaatatattttattgctgccttttaaaattccccttgagacgctggcccaatattgttgcattcaaccacatttctaccacaaggattaaaaagaacttaagtataattttattctattctgcatcaatg

SEQ ID NO: 843918 - DNA, 629 bp, Homo sapiens
tttatgcaactcaagtattggatgcccaagtagkggatccagtgctggatacccactttggaggttttgtatatgactcaaacttggacaactccctggggaatttcacaagaagattgcttggaaggtagttttttggatttcaaaatagtaataggagaatggtcttaacagcatttccactgagagtggctccctttgatactgttcccatcatcctgaaaggggtcctggccaggagcactttatattggacattcaagttagaataacccagccttttaactaagcaagtcaatcaggcagctttgagaaaaagacagggtagagagaaatcatccagctgttgtgactgactcctccatttttaccttctggaattaaatatactaagcccttaatctgggagtattgtaaatgccatgaaatcaacaactacatagcaattgctttcacttctacaattttcctcagtactttataatgaaaagctttaagcatacagcaaagttggaagaatttttgagtgactatcacctaggttctgccattaacatttcagtatacttgctttctcatatatctatccattgattcaaccctctattcacctatcaacccatcttatt

SEQ ID NO: 843919 - DNA, 599 bp, Homo sapiens
tctgtagtcctagctacttaggagactgaggtgagagcatcacctgagcccggggggccggggctgtggtaagccgtggttgtrccactgcactcaagcctgggtgatagtgagaccctgtcccccccgccaaaaaaaaagcattaaaattataatctatatttaaatccagctaaatataatagaaatatcttatataaaatattgtaaagagtgtttgaagagtatgaagtcagacttaagtggtgagatatattctttcctgaatgggaagcctcaataccacaaatatatcacatttcccacgattaatctatacatttaacataatccagttaaaatatcggcaaagtattggtagattttaacaagtggtagtattataaatacttattatgatgttataaaaatctaaatatggtattggtgcaaggataacaaatacaggggcaggggagtcactcgcagacataaaatctttcttaatatagaggtggcggctgggcgcggtggctcacacctgtaatcccagcactttaagaggccgaggcgggtggatcacaaggtcaggagattgagactgtcctggctaacagggt

SEQ ID NO: 843920 - DNA, 599 bp, Homo sapiens
tctgtagtcctagctacttaggagactgaggtgagagcatcacctgagcccggggggccggggctgtggtaagccgtggttgtaccactgcactcaagcctgggtgatagtgagaccctgtcccccccgccaaaaaaaaagcattaaaattataatctatatttaaatccagctaaatataatagaaatatcttatataaaatattgtaaagagtgtttgaagagtatgaagtcagacttaagtggtgagatatattctttcctgaatgggaagcctcaataccacaaatatatcacatttcccacgattaatctatacatttaacataatccagttaaaatatcggcaaagtattggtagattttaacaagtggtagtattataaatacttattatgatgttataaaaatctaaatatggtattggtgcaaggataacaaatacaggggcaggggagtcactcgcagacataaaatctttcttaatatagaggtggcggctgggcgcggtggctcacacctgtaatcccagcactttaagaggccgaggcgggtggatcacaaggtcaggagatygagactgtcctggctaacagggt

SEQ ID NO: 843921 - DNA, 573 bp, Homo sapiens
tctgccccatagaacggtaaaatgaacagcgggagaaatttatgctctaggtctgttggtctagaatgagtgacctgataaragggaaaaaagtggaattttcaaacacacacacacacacacacacacaaaatggctatttaccttgaagaaatttattagtaaaaacaactagtcaatcctctttgacaaatacatgataaagttcttgagtatctttccatttctaaaacaagtataaataaaaatgttcatttatattgccaagtttaagaaagactttaaaatgctctgaagtacttcagagcatatgattttagaaaaaaatatatatatagtctacacatctaggaaaaatactggaaagtcaaatggcagtgtgttaacaattcctatctctgattggtgtgactataggcatttttattatttttcctttattagtgaatatcagcattgagcatgtattacttccatacattaatatattattaatataacccactaaacaagtaacaccctaagcatttcgtagactgtgatgggaggttcataaacatcattcagatgatg

SEQ ID NO: 843922 - DNA, 594 bp, Homo sapiens
aatcttcaagagactttgagaaagcagaaagtgtgagaacaaattatggattcttgtggatgagggcaaaggtgagatgaggctatctcgaatcagcttccttaaggaaatcgaatgctgctgtagcagttctacccttgactgtgtgtgaacagtgcaccaggcaatatggagtgaatcctaagacttaaaactagatcatcacaatcgtagaatcttcaaaaacacaggtgggatgttcttgctgtggttgggactgaactatgattattttatttgggtgacaaacataacatgaaaggctgacagatttattagctttctattggtttcatttagaatacacaagctgaccccagacagatgcgaccaagtttgcatgctcctccagtggagcatgtttgagatccatcttttattctccatcagtgtggtgtagccagcaacttggcagcagttcattaggaaatgagtatccaaaaataagcaaatcacaaaatccatcaggtttctcccatatgagtttatagattrtaaatgtaccttatttgtacataccctgaacaccataaatcagattttttttttttgctg

SEQ ID NO: 843923 - DNA, 602 bp, Homo sapiens
taaacatggcagagcttgcctgttacttgttgagtttcttagggggccattcagggatatggccgtattgctgtagttcagcaggtgaaaggaacagaattggatgtstgccttactcgactttgtttcagaaaagggtgtgagctcttgtttcccggatatttttgaaggacacttgagggtttcttcccccacatttattaagctttcattgaaagcagtaggtgagacatctaaatgtgtttttgtgtggttatctagaaggaatataacatctaggtacaaaagtgaaatctaaagttaaagacttgtatgcaaagttttcatgattatttcaaggttcagcaacacaaaacacacatccctagcagtgtcagtgaaaatcttagtacatttaagagattgacacggttccctggtatgcccgtcagttacagaattacactgtggtcctggcagagacttccacgtttcacaccttaagctacataatccttacacacccccaactgttaactatctggagggaaggtacagagatttgcaaataaatatatttgaaagagctaaggaattatccacaggacttacactagtgtcag

SEQ ID NO: 843924 - DNA, 491 bp, Homo sapiens
gaagtaggtgacatttctcctggggtaacatcagggataatgtctagagatccatatgtggttgtgcaagttgctcactgcacaacagtgcctggccaaagggtgggggtgaaatcttgacccagttctatttgccaagccgcaaaccttggaatggaccatttccacccagaggaggttctattttcttaattgcacaaaggcaatatgactaacagcagcccctataacatccccaatagttattaccctttttgaggttaggcctacttttattctttagaataagcaatgagataaatatcaagacaccaggaggcagagatcagtccaaatccccgttattctctctaccaatgacaacttgtcaaaaacacagattctgggcactatccccaggattctgatccagwagtccaggctggggcacaggaacctgcatttttaagaggcacagtagttgaatatgttgtacatactttgctacacct

SEQ ID NO: 843925 - DNA, 541 bp, Homo sapiens
agaggtagtgaaatgagaaagattcctttgtccccctcgcagggcatgtgatggsggtgtggctcgcttcttcagtgccctgctgctcagacctctaggggaggatacagatgggcaggctgtgggactcccaccccacagcaatgtctaggggtgaacgtttacagctcctgaagccccagtgggcatgtgttaccgggtgctctttcagtttgcctttctttttctataggcggcttgtgttagtcagctcaattagaccctctaccctgtctaaaggatagagggttttctgtatcctggagtttcttgctttggtgtaccggaagaatcggatcacatgtgggcttggagaatgaatgcaaggttttatgagtggaagtagctctcagcagatgggggaggcagaagggagacggttttccagtggagtcgggccacctggcagccaggctttcctccaactgccccagccaaactccatgtggttctgccggtcagtggcctgttggcatgccggtgctggtgctttcctttccac

SEQ ID NO: 843926 - DNA, 611 bp, Homo sapiens
agatccctgttatcatgttgaggaaattcccttctatttctagtttgttgagattttttaattcatatatrggtattggatatttttcacatgtttttcttcatcagttgagatagtcatgtgatttttgctacttactattctattaatatggtatattacattaattgatttttttaggtgttgaaccaaccttgcattcctgaaatacatcacacttgttcatgatgtataacctttttaatacacttgaattctgttcttgaattcatttttctaatattttgtgaattttttttgtgtgtatgtacatgatactggctatcatcttttcttgtgattgcgctatctggctttgctctcagggtaatattggtctcctggcatgagtttaaaggtgttccctcccctctattttctaatagtttggtgaaaattggtattactttaagtatttaataaaattcaccaataaagccacttggacctgagcattttttttgtggtaatacagtatttctaattgctaattagatttctactagaaattactggcacaatttctctttttgttttaggtatattcagattttctatttcttcctcaatta

SEQ ID NO: 843927 - DNA, 604 bp, Homo sapiens
aaatttcttgtttattttttctccattttttaatccaaaatattacaacacataataggacacagatactgaaataatacatttagtgccagctttgagtcaggtttcattgctgtcaagagaaaggtaaaggtgatgttcaatccatctcccttgtagacagtaaattttaattagttttaattagaaatgagaagtcctacacctcatctctacaagtctcctgaaacataccaagatattgtctttctgtagactcagagcacgtataatcagataactggtccacttactgtttatattgtatattttatccaagaatgatttatacctataaatccagccaggaggatctcagaataatatttatgagatagactgaaatttaatagcaacacttcttaagtagatggactatcaagaaactcttaaaataacagaatgaaaaataaggtagtggctctgtatataagccccgtcagccagtacacgggaggtactcratcaatgccaaatgaaggagtgacttcgtaagagggactaagaagcaattcaagttgctattctggaatctcttgtgtaagatgggaatcaagtctaacag

SEQ ID NO: 843928 - DNA, 554 bp, Homo sapiens
cacacccttattagggagggacatattagccaaagctggagccattaactatatgaatatggggaacaagttacccatttgttgtcccctacttgaggagggaatcaaccctgaagtctgggcattggaaggacaattcggaaaggcaaaaaatgcccacccagtccaaatcaggctataagaccccaccacttttccttatcaaaggcaatatctcttaaggcctgaagctcataaaggattacaggatattgttatacatttaaaagttcgaggcttagtaagaaaatgcagtagcccctgcaacaccccaattctaggagtacaaaaactgaatcgtcagtggagactagtgcaagatcctagactcatcagtgaggaagtaattcctctatatccggttgtacccaacccctataccctgctctctcaaataccaraggaagcagaatggtttcactgttctggacctcaaggatgctgccttctgcgttcctctgcacttggactcccagtttctctttgcctttgaggatcccacagaccacaaaacc

SEQ ID NO: 843929 - DNA, 384 bp, Homo sapiens
taagataggggccttaaaattggctgtcctgtaagcatgggtagaacgtgttgagtggttgccttcggaaaatgataaagcagcagaaagatgatttttcytttgggaaaatgtcaatgtctgaaggtgttttctcttgagaatttacagtccctccaagggtgaattttccatccccctgcgtaggaagaacatcccgatttctggtgttccaggcagagagcaagggaagcaggctgatgcaaggaagcatcattcttcccaacgttcccttataactcccattttgagcccaaatatcatccttgccttccactgagccctgtgtccctgactctgaaggctcttaaatcaggattttgaagaaaatggttcttcccctga

SEQ ID NO: 843930 - DNA, 574 bp, Homo sapiens
tttttttttttttgcagttgcaagatttaatagagtgaaaacagagctcccatacaaggggaggggacccaaagtgggttgccgttgctggctcgaatgcctgggtttatatactgatcaatgtccctccccctgtgctctcaggcaacagatgattggctatttcttcacctcctgtttttgcctaattagcattttagtgaactctccttaccatctgatttgtcgggtgtgagctaagttgcaagccgcttgctgatttgtttgagttcgttgtagattctggatattagccctttctttgtcagatgtatagattgtgaagattttctcccactctatgggttgtctgtttactctgctgactgttctttttgctgtgcagaagctctttagtttaattaagtcccagatatttatctttgtttttactgcatttgctttttggtgcctcttcatgaaatccttgcctaagccaaagtctaatacggtttttycaatgtcatcttctagaatttttatagtttcaggtcttagatttaagtctttaattcatcttcagttgattttttat

SEQ ID NO: 843931 - DNA, 657 bp, Homo sapiens
gggtgatcaattggaatgtctgcaatgcggcggtgtcgacccagtaggtacgcactctgtcgatgtatgtacatgactggaagcacctcatcatttttaaatgggtagagacgccaccgttttttggggatacgtgcttctgggggctcactatatttaatgactacaccccggaaagtgttggtgtcctcaagaagtgccccagaaagttcaaagcttggtttttctttagcgggcacctctttttctttgttgttgccaccaggccgaggaaccaactcctgagactcactgccgccaccaccaacgtcattcctctggcgatgctcccgtcgcctggcattataaaactcccgctcttcttcctgagcctgcaggttctgagtgtctcgatcccgtccctgaccctgcccactcccaggcctctcgttagacgttctcctttggtgggaatggccccggtgtctgtcccggtcactgttcctagctctcctgtgttcctgttctgatggttccctgtgctgccgatcctcccgtcctctccggggatgatcctcacgctcctraaattcaaacagattctgtaatttaaacgcagtgcacaatctaaaggcagcccaaatcttgttctttttgaacgaagtgcatgcaaaaagt

SEQ ID NO: 843932 - DNA, 620 bp, Homo sapiens
attcatataccattcaattaatccattgaaagtttacaattcaatgtgttttagtgttttcacagagatgtgcaaccatcaccacaattaattcaagaacattttcatcaccctcaaaagaaaccctgtacccattagtagtcagtccacattctcccttccttcccctagccctaggcaaccactaagctactttcagcctctatggacttgcctattctggatatttcgcataaattgaatcatacaatatgtagttttctgtatctggcttctttcacttagcacgatgtttaaacggttcatccatgttataacatggatcagtacttcattcttttttatggatgataatattatactgtacagctagaccacattttacttatccacttacctgatgatagacatttgggttgtttctactttgggctactactatgagtagtgtttctatgaacattcctgttcaagattttgtacgaatctctgttttcaatcctcttgsgcatatatctaggagtggaattgtaggatcatatagctactctatgttagtttttcataacaacttcactgttttacattcccaccaacaatgtatgagggccccaatttct

SEQ ID NO: 843933 - DNA, 543 bp, Homo sapiens
attaaattcatatacatctataggttgaggatcatccttagagctgtcagttcttccaactggcatgtctacactacagaaaaggagaaagtagttctagaacactgcccacccaggtttgctcatctctgcctttgtcagtgcacttccagccactccaggctgctgctcagatagttctggcagaagcctgttgaagccccagccctcaggtcagggtggctaaaggctgatgactgtggcagccttcagagtggcaggtggtggcaagcagcaggaggcaggagtttccaggctcagccaccaagacagcatccctggctgtcaggtcagtgctgtcaggtcagtgctgtcaggactaagctgcttgcctccccctacttccactccatccccctatcctagtgaatgcatccttatttgtaagaaagcaacagaggcccaacacaaagacacagggccttgagaatgatatcagtagtgattactgctccccaagtgctctcctcagtgagtacartggaacctttcactaatgctgtg

SEQ ID NO: 843934 - DNA, 648 bp, Homo sapiens
acttttatacactaacaataaatatgtagaaaccaaaattcaaaacacaataccattaataatcgctccaaagaaaatgaaatacttaggtataaccttaagaaaacaygcatcagtatgccaaaatttacaaaaagttgacgaaggaaatcaaataacacctaaacaaatggagagataaatcatccctattcttgggttaaaagactcaagataataaagatttcaattcttatgtaattgatacacagatttagcataattcctatcaaaataccagcaaggtttacttgtagatctatacaagcttattttacaatttacatggaatggcacaggtttaaattagctaaaacaatcttgtcaaaaaagaataaagttgaaggtatcactctacccaatattaaggttgagtttatagctccagtaattaagacaactcaggattagtggagggacagatacatagaccagtggaacagaatgaagaactgagaaatagaaagaaccataatagaaccaccctttgatttttgacaaaattgcaaaagcaattcaacagaggaaggtttgtctttcagcaagtgatgctgaagcaattcaatatccataagccaaaaaaaaaaaaaaacccacgttgacctaaat

SEQ ID NO: 843935 - DNA, 575 bp, Homo sapiens
tcagtcaagtgtagaacatccattttgcacccatgtgtgrgcagacaggctttccttttgaggcagagcaaatgtggtaaaaagaaatgcagccaatggagggggagcgcttgtaactgtggcgtaatataatctaccctgtatcaacgtgtgctttgctcagcattgttaggacagcaaaggggcatattagaatctgaactcgaagtctggaagtagctggagaatggagattgtaaattaagaattagaaggtagtgtgtgtctcgttttcgagttgctgtcagagagtcaggcagccagccctgtggagggcttggctgggtgggctcctctggcaatggtgggaggttgtttgggtttggctcttaatgagatctcagtgttaatatctgcctctggaagttccagcaccagcctcggaattttaagtgggacagtagttttggtgcagttgccaacgtcacatggtttgcgtgtctaattctgaaagactggcatgctttatgctaggcttcgggaggagggcacagcgtttctaagctgcttgtctgtcaaggattaatttaacctct

SEQ ID NO: 843936 - DNA, 602 bp, Homo sapiens
tttaaattttgaatttgaatgcctctgggtagggcatggacttttcaccatctctatcccttataactagcagattcacaatcatgagacctgctgggccccttaatgcaactgagtttgtgatcgatccccacagagataatcaggaattctgtctggtatggaaaatgtggtactctctaaaagaactaactctgatgctcccattaggaagaatatccacagagacaatgtccttaatccaaaacacacaatattcagtattttggcaggatatgtacatcgtaagttttttttatcttcttctttactctgtaaggcaacaagtaaataccttccactgccctgcttatttgtcttcagctgggaaacgccacaaaatactcagttcaagaatttcctttcttggcccagtatggaggctcacacctgtaatcccagcactttgggaggccgaggtgaggggatcactcaaggccaggagtttgagaccagcctggccaacatggygaaaccccatctctactaaaaatacaaaaattagctgggcgtggtggcacatgcctgtaatcccagctactcaggaggctgaggcacaagaa

SEQ ID NO: 843937 - DNA, 602 bp, Homo sapiens
tttaaattttgaatttgaatgcctctgggtagggcatggacttttcaccatctctatcccttataactagcagattcacaatcatgagacctgctgggccccttaatgcaactgagtttgtgatcgatccccacagagataatcaggaattctgtctggtatggaaaatgtggtactctctaaaagaactaactctgatgctcccattaggaagaatatccacagagacaatgtccttaatccaaaacacacaatattcagtattttggcaggatatgtacatcgtaagttttttttatcttcttctttactctgtaaggcaacaagtaaataccttccactgccctgcttatttgtcttcagctgggaaacgccacaaaatactcagttcaagaatttcctttcttggcccagtatggaggctcacacctgtaatcccagcactttgggaggccgaggtgaggggatcactcaaggccaggagtttgagaccagcctggccaacatggcgaaaccccatctctactaaaaatacaaaaattagcygggcgtggtggcacatgcctgtaatcccagctactcaggaggctgaggcacaagaa

SEQ ID NO: 843938 - DNA, 643 bp, Homo sapiens
gttttctcagcatcatttgttcaagagactgttcttttcccactgtgtgtttctggcctctttgttgaaactcaattgaccttaagagcatggatttatttctgggctctctattctgttccttttttttttaatgccagtaccaccctatttagattactattattttgtaatagatttcagtccaggcaatgagatgcctagggctttgttctttatggtcaaaattacttcagatatttggagtcttttctggatatatatgaattttagatttttttttcaatttctgtgaacaatgtcgtgtggactttgatggggattgcattgaatatgtaggttgctttggatggtatggacattttaacaatattaaactttttatttaataaataagtgagatctttccatgtatttgtgtattttttatagcaaaacagggggcctatagtcaataataaaaagtatatttcaatttcttttatcaatgctttataattttaaatgtatagrtttttcaacttcttggttaaatttattcctaagtattgtttttatttttatttttttgctattttgaatgggttttttcattgtttttcagatcgtttatttttagtgtatagaaacactagcaaatttt

SEQ ID NO: 843939 - DNA, 592 bp, Homo sapiens
tgaggatcctgggcctgtcaggaaataacatttttttacttaccacaggtcaggaaccctgtacagggactgtgtagacaaggtatgcggccagttttcccaaggggcttttattagcactctataaatcaagtttgattccttaaaggaaagcatgctattccagtcaaacacttggtaaagtaaccaggttctccaattgtgtcttgttacaaaagaaacagattcttattgcacttatgcaaatttctattgccataagtttagaatactcacaaatagtcttcaaattctggagaaatcaggtaagagaaacaaatatggtccaaattttgttcacataagtatgctttactcaattgttaaaatctgtcaatagctcaaaagaaaagtttccttgactatgaaaaagaaaacaaagaatgagaaacattttaagcaaaaagtcaaaaagattactgcagtcttctactagtccagtccatgcagttaacacttgtycttcttggtattcatgaacattccagctttttacaagagccctgaaagttgtttcattccaccagttttcacagagaaaaaggaacgggaa

SEQ ID NO: 843940 - DNA, 566 bp, Homo sapiens
aaccagctaacatcataatgacaggatcaaatacacacataatattaaccttaaatataaatgggctgaatgccccaattaaaagacacagactggcaaactggataaagagtcaagacccatccgtgtgctgtattcaggagacccatctcacgtgcagagacacacataggctcaaaataaagggatggaggaagatctaccaagaaaaccgaaagcaaaaaaaaaaaaaaaaaaaagcaggagttgcaatcctagtctctgataaaatagactttaaaccaacaaagatcaaaagagacaaagaaggtcattacataatggtaaagagatcaattcaacaagaacagctaactatcccaaatatatatgcaccaaaacaggagcacccagattcataaagcaagtccttagagatgtacaaagagacttagactcccacacaataatagtgggagacttcaacaccccactgtcratattagacagatcagtgagacagatgtttaacaaagatatacatgacttgagcttagctctgcaccaagcagacctaatagacatct

SEQ ID NO: 843941 - DNA, 566 bp, Homo sapiens
aaccagctaacatcataatgacaggatcaaatacacacataatattaaccttaaatataaatgggctgaatgccccaattaaaagacacagactggcaaactggataaagagtcaagacccatccgtgtgctgtattcaggagacccatctcacgtgcagagacacacataggctcaaaataaagggatggaggaagatctaccaagaaaaccgaaagcaaaaaaaaaaaaaaaaaaaagcaggagttgcaatcctagtctctgataaaatagactttaaaccaacaaagatcaaaagagacaaagaaggtcattacataatggtaaagagatcaattcaacaagaacagctaactatcccaaatatatatgcaccaaaacaggagcacccagattcataaagcaagtccttagagatgtacaaagagacttagactcccacacaataatagtgggagacttcaacaccccactgtcaatattagacagatcagtgagacagatgtttaacaargatatacatgacttgagcttagctctgcaccaagcagacctaatagacatct

SEQ ID NO: 843942 - DNA, 580 bp, Homo sapiens
agaatcttggattccacaaccacctccttaccttaagtcaagttgactttaactcttcaggcagagattaactccttcaaccaatttgctaatcaggaaaacctttgaatgtacctatgacytagaagatcccctgctttgagatgtcccacctttgtgggcagaaccaatgtataccttgcctatattgatttatgtctttgcctatgacttctgtctccccaaaatgtataaaatcaccttataatcctaccatcttgggcacatattctcaggaccccctgaagctgtgtcatgggccatgatccttaatcttggcaaaataaacctctaaattgattgagacctgtctcagatactttttgatttacagaagatacaacctaaagaacggggaaaatatttgcaaaccatacatcttataaggggttaataaccaaaattgtagggaactctaacaaatcaatagcgaaaatacaagaaatctgatttttaaaatgagcaaaagacctaatgtattagtccattctcacactgccatgaagaaatacccaagactgggtaatttataaagaaaaga

SEQ ID NO: 843943 - DNA, 602 bp, Homo sapiens
taaacgcaccaatcagcactctgtcaaaacggaccaatcagcactctgtaaaatggacaaatcagctctctgtaaaatgggccaatcagcaggatgtgggtggggccaaataagggaataaaagcaggccaccagagccagcagcagcaacctgctctgggtcccattctgtactgtggaagctttgttctttggctcttcacaataaatcttgctactgctcactgtttgggtctgcgctccctttatgagctgtaacgctcaccgtgaaggtctgcagcttcactcctgaagccacagaaaccatgaacccaccaggaggaatgaacaactccggacgcatcacctttaagagctataacactcaccgcaaatgtctgcagcttcactcctgacgtcagcgagaccacaaacccaccagaaggaagaaactccggacacatccgaacatcagaaggagcaaactccggacacaccatctttaagaactgtaacactcwccaagagggtccatggcttcattcttgaagtcagcgagaccaaggacctaccaattctggacacaaaaggaatcagcagaataagatttagagataacacag

SEQ ID NO: 843944 - DNA, 485 bp, Homo sapiens
tagaagcttgaaatccaggaaagacgccatctttttgtttggaaacctacagattattccatctgggagttttgagtracagttttagtgaaatgcccaaggattcttggtagactcagaagtggtcacctatttctgccattgtacctgagaaatcccatattcttccctcacagggcctacttaacctgattactcttttcttccctcctgtaatcacacctgaaaaaacagcatgcctactcagggtgagaaatacagccctagagagtcacaaacccttcaatcttcagtgattaggagaccaaaggaccagatctctacttccatttggcccttcgaaagtaaaagcctgaaacatcctgttttgccacatttgtttctttaccatacagctggagctgctccagtgggcagaaggatgagttcaaaaatacccatcttaaactttacatgtggcttgtcatcaacttacaaggagaact

SEQ ID NO: 843945 - DNA, 482 bp, Homo sapiens
actagtttacattcccaccagcagtgtagaagtgttcccttttcactgcatccrcaccaatatctattatgttttgatttattgactatggccattcttgcaggagtaaggtggtattgcactgtgattttgatttgcatttcctgtatatcttcttttgataagtgtctactaatgtcacttgcccacatttttgatggtattgtttttgccttgctgatttgtttgagttctttgtagaatctggatattagtcctttgttagatgcagagtttgcaaacattttctgccattctgtgagttggctgtttactctgaagattattacttttgctgtgcagaaggttttttttggtttaattaggccccatttatttatttatttttattacatttgctttttcggtcttaatcacaagctctttgtttaggtcaatgtttataagagatttttctatgttttcttctagaatttttatta

SEQ ID NO: 843946 - DNA, 635 bp, Homo sapiens
aagatagtacatatgaaaatctttgggacacagctaagtcagtgttagtattgaagtttatagcattatatgcctacataaaatagtttgraagatctcaaattaacaacctaatctcacaactagagaaactggagaagcatgagcaaaccaaccccaaacatgtcagaagacaaaaataatcaaaatctgagctgaactgaaataaaataaattgtacatgttttttggcctatcatatgggctgatatggtttggctctgtttccccatccaaatcgcatattgaattgtattcccataattcccatatgttttgggagggacccagtgggagataattgaatcatgggagtggtttctcccatactgttctcatggtggcgaataagtctcacgagatctgatggttttataaggataagccccttcacttggttctcattctctctcttgccaccgccatgtaagaagagcctttcgccttccaccatgattgtgaggtctctttaaccatgtggaagtgtaagtccagtaaatctctttcttttgtaaattgcccagccttgggtatgtctttactagcagtgtgaaaatggactaatccatggtctatcttagaaaatgtgccatgtg

SEQ ID NO: 843947 - DNA, 469 bp, Homo sapiens
gagctaagagatatatgtgtatatacaaactcatgtatgcactcatctttacaactacttctgtatctatccatctgtatctatatcaagctaaatatgagtttaccttgatgtctctgactctaatccagtaccacatgggtcagtccattctaatctccccttgcttatctggaaccttcctcaccaacagtgagaagactggctcaaccactcatttatttatttgctcatcctagtatacatgtacagccatgttagaattattaacccgtacccctatgacaagcaaccttatcaactagactatagtgttcatatatcatcccttttgtttttggtcttacggtgtatggtgaaacaccatttttcaaagtgacttagrtcgggatattttgtctccattctcttccatgaaattatggcttacgtttgtaacaccattagattcttctgtcatagtctacat

SEQ ID NO: 843948 - DNA, 635 bp, Homo sapiens
aaagagatttaagccatattgaaaagtgaatttggtagaattcactgttgaattctaccaaagatttcaaaaactaacacctatcctacccaaactattctaaaaaatagagaataacagaataattccaaactcattttacaaggctggtattatcctgataccaaagccagacaaagatacatcaaaaaatgaaaactataggccactattgctgatgaatattgatgcaaaaatcctcaacaaaatattagcaaaccaaattcaacaatatattaaaaagatcattcatcatgaccaactgggatttatctcaggcatgcaaggatggttgaacatacaaaatcaattattgtgatacatcatatcaacagaatgaaagacaaaaatcatatgatcatttcaattgatgcagaaaaaggatttgataaaattcatcatctcttcatgacaaaaaccctcaaaaaactggacatagaaggaacatatctcaacataataaaaaccatatatgaccaacacatagctaatattgtaatgaatggggaaaaaactgatagcttttctttcacratcaggtacatgataagggtgtccactttcaccagttattcaacatagtagtggaagtccta

SEQ ID NO: 843949 - DNA, 629 bp, Homo sapiens
tgttatatattattttatccttttagagtgagtctttctctgcacctcttatgatttggcagtgttaattttctacttgaatagccatgttttacatttgctactgaagatactaaataaaatatctttaagcaatttagcaagtagcatctttgaaaattatctcatcagtatataaaagtgatacatgtttattataaaagttagaaattaccaagcatgaaagaaaacaggacatgatggagaaaaaaattgccaagcaagaaagatcaaatgctttgtgtgattaacatcatttaaaactgagatcctacttacttttgacctctggggatattttatcttctgtccctgatgtgtttcatttaataaactttttatggacatctgttttgtatttgtcatgtggcccagggctaaactcaggagaggtggttgaggacaaatcatgtctattttgggcacgagtgcacaggtatttactctttcccagaatgcgtttatcccttttccctagtctccccctgctactaataagatttttggtcaccattaaaattctgaattttaaacagattattggactggtggtttatttctgtcagcttawtcaatattagtgcctttta

SEQ ID NO: 843950 - DNA, 564 bp, Homo sapiens
ctttaaaaaaattattaaaaacaaaaaaaaaataaatttttttgcaatcctttcctcagacctggctccaggctaactggaaggcagcrctcccttttttatatagtagaaaaatgaagtttattataagtttttatattttctacttgttcatttggtgcaaactcaagatttcttttaataggtgcagtctttgagataatttgtttttacctgtattgccctttatcttttttaggtaattctttgtactcctgctgtctacctctcctcacaccccagcaccccccattttttcaaaccttggtatctgttgggtgaacagtataatcttttcatctgcttttagaatgtgggatatttccagtacctactttttttttttttttttgctgaatccaaagatatataaataaaatatatatattttataaagatcagaatgatataaaggagatacatgtttcttcctttaaaaaataaacggaagttacattgttaatgttcatattatgatgccacttttctaaactgcatctggattgaaaggtgtaaatatcaata

SEQ ID NO: 843951 - DNA, 579 bp, Homo sapiens
ccatccccctccacagctgcagctctcacccactcccaccacccccctccacagctgcaactctcacccacccccaccgtccccatccctgctccagtcatcacaccatttccctgtcccccacctcttgccccttcaggcctggggtataacagctcccatggctgctggtcctggatgccttaacataccttgttaatttttctgcccacatctctgcaaacagcaccttctttaaactctccccaattaaacccttgcaatagaccctttcctgccaggacccacactaatacgatccttctggatattctgaatgtgcataaattataatcactccaaaataaatatttttaaaatctcacatctattggtactagaccttttagaagtatggtttcatttattccttacaacaatcctagcaggcaggtattattatgtccactgaatagggaaactaggcctcctttgggggcagccacacagcarggaagctctgggttgtgatggaacggcagtctacctgattccaaaggttgtgctaagccgcatcaccagcacctttgctcactggct

SEQ ID NO: 843952 - DNA, 287 bp, Homo sapiens
gcattagtagcatgggttgtgctatattggtgcgattagctcattccatctgtttgtcccgctggacttggtggccccttctgcgtggcaaggtctgtgcctgcattctttgtgtctcaggtcctgtggctcattgaccgccaccgtttaggtcctgaggctgtgacagttcacaggccactgtttctgccctcaaagaaccaaccgagaatacaccatgtggcctgtgggagttamccaaaagcacttgctggagaaatgcctaagctgcccattaagagacttac

SEQ ID NO: 843953 - DNA, 564 bp, Homo sapiens
accaacatgaagaaaccctgtctctactaaaaatacaaaattagccggaatggtggtgcatgcctgtaatcccagctactcgggaggttgaggcaggagagtcgcttgaacccaggaggcggaggttgcagtgagccaagatctcactgttgcactccagcctgggcaagaagagtgtaactccatttcaaaaaaaaaaaaaaaagaaaaaaaaaaccactttaataatataatcaatccttggtatctacaggggattggttccaggaccttctacagataccaaaatccacagatgctcaagtctcctatacaaaatggcatagaatttgcaaataacctatgcatatcttcctgtgtacttgaaatcatctctagattactgataacatctaatccaatataactgctatgtaaatagttgttatacygttttggctttatttgtattaatttttactgttgtacttttaaaaaatatatgtttgatctgtggtaggttgaatccatcatgcagaacccacggatatggaagactgaccacatatccctgccttaaaaagt

SEQ ID NO: 843954 - DNA, 564 bp, Homo sapiens
accaacatgaagaaaccctgtctctactaaaaatacaaaattagccggaatggtggtgcatgcctgtaatcccagctactcgggaggttgaggcaggagagtcgcttgaacccaggaggcggaggttgcagtgagccaagatctcactgttgcactccagcctgggcaagaagagtgtaactccatttcaaaaaaaaaaaaaaaagaaaaaaaaaaccactttaataatataatcaatccttggtatctacaggggattggttccaggaccttctacagataccaaaatccacagatgctcaagtctcctatacaaaatggcatagaatttgcaaataacctatgcatatcttcctgtgtacttgaaatcatctctagattactgataacatctaatccaatataactgctatgtaaatagttgttatactgttttggctttatttrtattaatttttactgttgtacttttaaaaaatatatgtttgatctgtggtaggttgaatccatcatgcagaacccacggatatggaagactgaccacatatccctgccttaaaaagt

SEQ ID NO: 843955 - DNA, 422 bp, Homo sapiens
atagttggttggtgcaaaagtaatttctgcaattacttagtataacttcaacttggttataacttggtataacttcatttgggagcagtttggcartattcgccaaactttaaacatacactttcacccagcaactcagtttataggagttcttcctatggatcaattccctcttcatatgccaatcagaattcatatttttgttttgaattccaaaccacgtgcatgtattattgttttagttttgtgttatcaggatatacatatttaggattatgtcacttggtgaattgactccattatcattttgaaatgtcccattttttccctggaaatatttctcaaattgaaatctattttatctgaaattaatgcagccaatccactttattaggctttgtgtttgcatggagtatcttttt

SEQ ID NO: 843956 - DNA, 633 bp, Homo sapiens
ttttttttttttttttttttgagacagaccactcttgtcacccaggctggaatgcagtggcacgatctctgctcattgcaacctctgcctgggttcaagcgattctcctgcctcagcctcctgagtacctgggactataagcacatgccaccacactcggctaatttttgtatttttagtagagatggggtttcaccatgttcaccagttgtctccaactcctgacctcaagtgaggcccacctcagcctcccaaagtgctgggattacagacgtgagccaccgtgtccggcttatttctacttcatttatggaaaaacagaagctcattgctcccatcagctcctagcgagtactaacgaatgcatgccaaattatggattcagtaactttgcacaggtctcagtggaaggcagatctttccctgaaaaccccacctctgctcttttctacaaggaatcgtcttcctttccactgcttgcctctcttcacctggcccactcctaaaaagcctataatctcttcaaatttcccttcctkaaaccagccttccctcttccaaactaggtctcatttattagttctctcaggcttcaagaaaccatatctttctttttatagcgcacttcaaaat

SEQ ID NO: 843957 - DNA, 654 bp, Homo sapiens
ctgggatccatctgtgtttccctggaatgggacaggcagctctagtcagtgagaaatcgcagatgtgagagagctgacacatgtccagctaatgaaaggaggaggaaggctggtctccgattgagctttgaagattaggaggagaaaaagaggagctttggaatatctatttcaaataaatttggtgtatttaagaatctggattgtttataatttgggcatttggggtaagtacattttaatatagttttgggggttaaagtgcacaattctctgcctttcaaagctttttacttctttcaaattacgatgatatgaatgtttcttggtatttgatacaagagttcagcctttctactcagttttattttaatgcttcattttatttatgtttctatttttctgttgccaaccttatatttgaatgtcatgcttttttgaatgcaaggtttacttaataattagatgtagtatatgaattctacagctagaaaagtagtcccacaaatatttctgtaaggttttccacgttggattgttctgtgatgtttagagggaatttttttcccctttagtatgcataatacaaataggccatattaaaaagatggctcataaaacrctcttttctattgtcagattttatttcagtat

SEQ ID NO: 843958 - DNA, 612 bp, Homo sapiens
gctcacacctgtaatcccagcactttgggaggctgaggcaggaggatcctttgagcccaggagttagaggccggcctgggcaacacagmgagacctcgtctctagaaaaataaaaaaacaaaaaattagctgggtgtggtggcatgcacctgtagtcccagctacacaggaggctgaggcaggaggatcacttgaatctaagaggtcgaggctgcagtgagctatgattgtgccactgcattccaccctgggtgacacagtgagactctgcctcttaaataaataataattaatttaaaaataaaagcattagcagtagtagtagtagtagtagtagtagtagtagtagtagaagtatggattaatccaagggggaaaaaaggagggagtgggactgaggtaaagcaagctgctacttggagaaaaaggtaaagaagatgaccagatagatgcgtgtgtagatgttcacaccatctccagagacccaagagactggcggcagtggtggagggagtggggacctgagggaggggaaaggacaccgactttccaccctttgtccccttccacgctgtttgggttgttcctttttttctgtgcacttgtgtggat

SEQ ID NO: 843959 - DNA, 579 bp, Homo sapiens
atgagggccatttttgcccctctgctgggaaggggaagggaggatcaagcgttgcctagacacatttatggttgctgcaatggagacgggrgtactgctggcttctagtgagtagaggccagggatgctgctaaacagcctacaacgcacatacctagcactctcatgacaaagaaaagaaccagccctacatgccacgtctgagaaactctgctctatataacttgactattgttagtacttctgtggtcaaagtagaaatattccatgtctaacgctgtggacagctagacatttgccagaattgtgcaaggagcagttggctcagaagctttgtttttaggtttggaggatttgcttttctttaaataaacaaacaaacaaaaaaggtgggggcactattcaaacagcacacacatatgactaaaacattcaaagagtacagaagggtatatggtaaaaagtaagtttcctttccactccagccctagccagccagctcccttctgaagaagacaaccactgtcagcagcttctttcccattcctccagaggtattctaagcacacagaagcagtg

SEQ ID NO: 843960 - DNA, 570 bp, Homo sapiens
gtgtctttggaaagttggcaaatttcctcctgaggccagaagtcaaggacctccagagcttggtcaggctcccaagagactctggyggttaacagtatgttccttgtctccaccaatacattctcctcatcaaagagccagatcagggtgttgttggggtcaagtgcagacatgccattatagagaatcctcccaccaaagccataaatcacactttttttgaggggcagggtctgactctgccacccaggctggaggcagtggcatgatcatgatcatagtttactgtagcctcaaactcctgggctcaaacaatcctcctgcctcagtcacctgagtagctggagtacaggcctgtaccatcacaactggctaatttgttgttgttgttgttgttcgaggcagagtctcgctctgtcacccaggctggagtgcagtggtgcgatctcgggtcactgcaacctctgcctcctaggttcaaggaattctttgcctcagtctcctgagtagctgggattacaggcgcccgccaccacgcaggcaaatttttgtattgttagtagagatggg

SEQ ID NO: 843961 - DNA, 621 bp, Homo sapiens
ctggatgttgccccttgatgggcccttcccatttcctgcctccctctccctgcccactcacttctttttcttgcccacttcattaataaatgactcctgaacaaaacaggcaggtccctacatgtgtccatcccagggtgcacatccaggaggggctgaatggctgctgttcagttgcactttccctgcccacaaagtgtggttttctctcctttattagtaggagaggagaaaatggctttacagccttctgctttctctcaaatcctaataatttatggagggttgagtaggggccaggactgtgctaagtggctttgcatggtttgtctcattgactctttgaccattttctgggaagactggcacaagtgtcatccacaccatacaaaggggaaaacagggatgtcagaataatatactgctgaatggtgcggcccaggtttgaccaaaaggtagcttgaacccagtctcatacctccagccatgactgtgggagcctcatcctattcaccatggacacacacactgggatacaatgttgactagggawaccactcaagactacttctggggagaaaaggacaaatggtaactgttggacgctgtgattcgagggtt

SEQ ID NO: 843962 - DNA, 636 bp, Homo sapiens
cattttccacagaagaaaaaaattttttaaaccaagcaaaaatacaaagacgaaaatttggtgccatgttcctacaaagttttgaaagtaaaggaacgtttctcaagatgagggaggcctgatccccagacctgggatggctgcccagcagcatcccatgctccactgaatgtgggtctggggtcaccaacaggacagctgtcacagagtgctaagggggcagcaggctggtggaggggcaaggaagatgtggcagtggagacaagcacagcagtggaatgggaacatctgtatgggatgtggggtgccaacctggaggcaatcagccttatttcctgggaggccactctgcatcccagaaagccacagccaaaggcttcttcccccgggtatgcacttgtctcaccatgcgcttgactctgggcatgatttacagtgcctcaggcagtcacaagttgaggactggagagggaggatgcagaggtcaaaagcagcttgctgtctataytgcctaccctgtggggatgccaggtgcagaggccaacgagcagcttactatctacactacctaccctgtgagggtgccaggggcagagaccaatgagtggcttagtgtctatactacctgccatgtca

SEQ ID NO: 843963 - DNA, 521 bp, Homo sapiens
tccttctctccctcagtctcttggatcctggaatgaataacattgcaaatggcaggaggccattctactctccctgctgtcctacacccagccaatggtgacttcactcgactttagccaattctgtgagcacttgtccttgggatgactaatacaaaagtggccagtgatccttttgaataaaacatttatagtgctgtagaaattattaataatgacctagtttatgggtctttacatctgcagaacacctcattttcagtgtatgggcttttgagttccctttcttggctacttcatggaaacaaaccttcaggaaatagcaggaaagagcaatttaaggcagggcttcgattacctgctgaaagccacttaagctcctccctgaagactgggcagcatattgttgctgtaatagcactccttttgttaaaagttatatctctttttcaaggggcatgtggttsaaactgctacttttgctttctgtaaaactgtaagaggtaagtcagaaatcagaa

SEQ ID NO: 843964 - DNA, 623 bp, Homo sapiens
tgagcctcctgaatagctgggattacaggcgtgtgccaccacactgactaattttttatatttttggtagagatggggtttcaccatgttggccaagctggtctcgaactcctaacctcaggtgatccaccactttggtctcccaaagtgctgggattacgggcatgagccactgtgcccggcctctttgatttttttttttttttttttagacagagtctcgctctgtagcccaggctggagctcggctcactgcaacctctgcctcccgggtcccggttcaagcaattctcctgcctcagcctcccaagtagctgaaattacaggcacatgccaccgtgtatttttagtagagacggggtttcaccatgttgcccaggctggtcttgaacccctgacctcatgatccaccagcatcggcctcccaaagtgctgggattacagccaccacgcccagcgtctttgaatgtttttgatccatgactggttgaatctacggatgggtggaacccatgggtatggagagccagctgtacacacacagacacacacacacacacacacacgcacgtgcacacacgcacrtgtagcatgcctctctatacttctggtgtttctctaca

SEQ ID NO: 843965 - DNA, 587 bp, Homo sapiens
ttcctttggaagcgcagggttcatgccgtgggcctggagagaaaaggtctttgctggtgagaaaaatgagctggcaagatgggaagtagaaagagaagagggaacattggaaagggcaggctgagagagggtaagcctcagccttgagtcactctcttcaatgccagtgaatcctctgaaaagggaagataatgatgttaaggtaaaagtcagtcatgttggagaggatttctgttgcctgataaggaaatcaaacaaaagtaatccactcaaacctaaaccagattaaactaacctttatggagctcctagaatgttgctggcatttttacagatttctcacaataacctagcaaattactttttatccctattctacatatagggaaactgaggcacagagctgctaggtaaggcactcgagattactcagctagtgtgtggcattcatgaactgtgctctgccacacctgggtggggcaacaatgatctcataagtgtggtttggaagcaagcacttgattggaagaagagagactggggtctgagtccasacttactatttgggtttggaaagtctctgctca

SEQ ID NO: 843966 - DNA, 589 bp, Homo sapiens
atgctctgagatgccaggcaggctccagggtgctggggagatattttcttaagtctgggtgggctggcacagaggtagaagggtggcgggtaggaggtatycctgagtaccctggtcagctcctcacatcagctgacttggttcatgagacaaagtacaaacccatttttatttccatgactccaattgcacctctgctggggttaggaaacccattccccggatggcactgagccagaaaattagcaatgatcaatgaaaggggaaggatgatgaaataaaagtggagtctcaattatgctctaaatgagcaaggcgatgttaagtcttcaacagaggaggggccggggactggaggaaggaaaaaatgattacgtggaagaattcagtgccccagtctggacttagccattgatttcctattccagttccatggatggaccataaaggccttgcagagtgcatggactcccctgccatatttctccacaatctgcctaaagtgagttcctccactctgcttatctgtccagcaacatcggatcctgggtggatctaagggaacaaatgtctgtgggtattatgttaa

SEQ ID NO: 843967 - DNA, 608 bp, Homo sapiens
cttcacaaagttatcaaatgagatactggattatttgaatatggtgacagagggaaacattttgatcggctgatcagctgaaaacaaactcattacactcccacctcaccaactagtttaaagtcaggaaaaaaaaaaggttattagcaactggaaactttttcacaaaaatatatgcctattgtcttggtgcggtggctcattcctgcaatcccagcactttgggaggctaaggcaggagggttgctggagcctaggagtttgagacaagcctgggcaacatagtaagacctggtccctacaaaaaaattgaaaaatttgccaggtgtggtggtgtgtgcctgtagtcccagctactcaggaggctgagcctgcaaggaggctgagcctgcaagatggaggctgcagtgagtcataattgtgccagtgaactccagcctgggtgacagagctgtcatatacatatatacatataatattatataattttataatatawtaatatagatccataataatatagatctatattaaaacatcaatattaaaacaataatgtatattgactcagttgttatcaaattcaacttacatagtaccttataaat

SEQ ID NO: 843968 - DNA, 542 bp, Homo sapiens
tagacattgctgtgggaaaaggagttcaaaacttggaacagggctttcaattatcacctaaagtttgagttgaattaacacaggaaaagttaaacatactgtattttattcattctaacttcaaattatttcataacaaaatagtcaatgacctctgaaattggtattttaatcagccatcttaaatttactgtcattctggtgtcattcccaatacaactgttatgcctaagcatgtaccaacttcataatagctatttctttggtcgcaattttaatagttttgtgcatttggggcatgtatcttgagtgtaatcgccacaaaatgccctcaaaaagattgttgtatgattcaacaatgaataaagttaccatatacccagaaaaatgtggaaacagtctagtgtaatgtaaggtaaatgtctatgtctaataattacaaaataactttttcaataagtataaaataaaatttytaagtgataagaaagcattgtattactgtttaattggcaatgtattttccttcttagtcatacaaa

SEQ ID NO: 843969 - DNA, 495 bp, Homo sapiens
gagagattgtcaaatgtagttctggttttcaaatactttgakacctgatatcacaacccaatgtctggcaaaagcccataattaagcaggttggtgtgacacctagaaggggaacacaataattacccacaaccaacttgggtttactaatcagtgaggcaaaccaatgccattttcagcttttaaaaaagttttgtaggctgctcatggtaagaaacatgtgaagatcacattagatttaattaaagcatttagcacataacagtgttattgaaccacagaatgattccttaaaatttctaattttataagttattaaactgaaattcacagacatgagatttgttgaaagttatctgactcgataaagctaatatattttaatattatttagataattattatctttttaagttctgggttatatgtgcaggatgtgcaggtttgttacataggtaaacatgtgccacggtggtttgctgcacctatcaaccc

SEQ ID NO: 843970 - DNA, 612 bp, Homo sapiens
ccagaaggtgagagtgagtactcaggatcctttgcactccatctctgcagggcaaaggtttttccccctttctggagggaagggggaaacagctgtctcttcctcctgtatggaagaagagaattcatttttctcactgagaaactatttagctactcatatacaagatttttccacctggctttcatcatatcaccccagaggtaaggactaaagtaagggagaatcacatgcttatttattgtaaggtaataaataaataaataaataaataaataaataaataaatctctgatccagaaaacttcaggtgcacattcagaataaaactaataaagatgaataaaacaatcccaacaatgtctgggaccagatgctagaaattctcacactgcttctccctaaaagcactatacgtcacctctctagtagccagatgcttatgtcagattactggggaaaccggctctgaggtagagatttctgtgcaaggagtttatcagaaaacactctcaggaacaacacctgtaagagagtgaaggmagtaacattgggtagagagagaaaactgtaccagaggccatagttaagcccttagggagctttgaacat

SEQ ID NO: 843971 - DNA, 606 bp, Homo sapiens
tggatttaaagatatgtccacaaattctctgaaactcattgtgaggcaggctgaatcctcctcctcttaaatggggctgaaatttgtaacttgcttctaacaaatggaagaaagcacagatgacagtgtttgactttgcagatcaggtcataaaaaggcactgttgcttccatcgtggtctctctcttgttcattctcttggattaattgcacctggaggggttagcaaccatgttgtgagaagaggcctatacagtgaggaactgggcatctgtccagtggccactgagtagccaaggtttcctgccaacaaccatgtgaatgagcttagaaattgttgccatggccccagtcaagtcttcagatgaccacagtctctgccagcctcaggtctgtggtttcatgagagactcatacagctaaatcgcttccaaacttttgaatgaaaaaaaaagtatgaagataaatacttattgctttaggctacaaattttttgatgatttgttatatggaaatatataattaataaagtactttaaaacatttctctcatactcatagtayacttacataacatttacaattaatcaataacatctctttat

SEQ ID NO: 843972 - DNA, 598 bp, Homo sapiens
aaaacaacaatgacattcttcacaggaatagaaaatacaattctaaaattcatatggaacaacaaaagacccagaatagctaaataaatccttagaaaaaagaacaaagctaaagacatcacaatatctggttttaaattatactacaaagctatagtagccaaaacagaatggtactggtagaaaaaacaaatacatagaacagtggaataaaacataacccagaaacaaatccaaaaatttactgccaactcatttagacaaaggtgccaagaatgtacattgggaaaaggaaagtcttttttttttttaattatactttaagttctaggatacatgtgcacaacgtgcaggtttgttacatacgtatacatgtgccatgttggtgcactgcacccattagctcgtcatttacattaggtatatcttctaatgctatccctcccccctccccccaccccacaacaggccccggtgagtgatgtcccccttcctgtgtcyaagtgttctcactgttcaattcccatctctgagtgagaatatgcgatgtttggttttttgtccttgggatagttaaatggtgctaggaactggatat

SEQ ID NO: 843973 - DNA, 599 bp, Homo sapiens
gaaagaggagtaacaaaggcagaccaaggagaccgcctgacaccattcagacagggcacaggagagaagatgccatgggctggcctccgaagagtcttgstcttgtggataaggctctcactgctagagcccttgaacttcagaaccttgccctggactcctgggggtcttgctctctgctcacccggtcacttgctgggtctgattggattttcactgttgcctgccttcccagggagattcctccagccattgcacatctctcacctgttttgcttttcattataaatgaatatactggcattctgattttatgcctcagtcctaggaacttgcctctttacccctgagaaattcatcttttcttcctggtgctgattctcagatttaggacacagtgactttaatcaggtacctaagggaggggggcagccaggctctttcaggtcagtgtgcctcttcgtttcttttagatgcacctgccttcttcctggtgtctattctggtgtttctccatcttctacgtgcacttgaatatcctgggaatcttgctaaaatacagatttttctgtcaccaaactgatgataaggatccactt

SEQ ID NO: 843974 - DNA, 590 bp, Homo sapiens
tttgctttatttttctgaatagcatttatcactatctggcatttatcacctgtagtttttactttttgtctctctctctctaatttgtatgtaagcttcataaggaaggaatgactctggactggactccatgcctcagcacattcacccacccattcaacaaacattcttaagggtctaggctgggcatggtggctcatgcctgtaatcccagcactatgggaggccgaggtgggaggatcacttgaagccaggagtttgagaccagcctgggcaaggaaacaagaccctgcctctaaaaaatacaatttaaaaaagtatccaggcacagtggcgtgagcctatagtcccagctactcgggaggctgagctgggaagatctcttgtgcccaggagttcaaggctgcagtgagccatggtcatgccactacactccagcctgggtgacagagttagaccctgcctgtaaaaaaaaaaaggtggggggcagggtggggaaggtttgccttgaccargccgcgtgctaggtgccgggcatacaaaagtgaaaaacgtgatttgtcctcagtgagctcacaggtctgaggaga

SEQ ID NO: 843975 - DNA, 606 bp, Homo sapiens
aattttttcaaaattaatgatggacaccaaaccacagatccagaaagttcagaaaacactaagcaagaccaaaaaagaaaaagaaaacaaacagacaaacaaacaaaccctacaaccctagacacaatcatattcaaactaccgaaaaccaaagataaagagaaaatcttgaaggcagccaaagaaaaaaggcatattacattcagaagggaaaagataagaattatagccaacttcccatcagaaactatgcagagcaaaagagagtggggtgactgctttacagtgctgaaagcaaacaactgtcaacctaaaattctatacccagtggaaatatctctcaaaagtgaggaagaagtgtgagatttcttcagtcaaacaaaatcagggcattaattaccagtagacctgcactataagatgtgttaaaggatgttctccaggcagaaggaatatgatgccagaaagaaacttgtatytatgcaaagaaataagaaatgctagaaatggcataaaagaagataaatataaattttgcttttttcatatttttagttattctaaaatatatttgaccatctaaagcaaaacagtagcaaagtactg

SEQ ID NO: 843976 - DNA, 513 bp, Homo sapiens
attgctccagcactattttttgaaaagactatcctttctttattgaattattcttgcactttcataaaaaagtcagtttactatacttatctgggtctatatggggrcttgctattattttccattgatctatgtatctaatttgccaacaccatgctttcttgattattgtagctttatagtaagtcttaaatcatatgagttctctaactttattcttccattttagttttgtattagctaatctcagttctttgcattaccatataaattttgcaacaattatgccaacatataaaaaaagtttgctgggattgtgactgggattacattgaatccgtggttcaatgtgaaaaaaattaatatctttacaatgttaaatctttccatccatgaacatgaaatatcacccaatctcattagactttcttcaacttattttatcagagttttctggtattccacatacagctccttgatatattttgtcaaatttacccctaagtatttcat

SEQ ID NO: 843977 - DNA, 533 bp, Homo sapiens
tttttaggccccagtgcctttgcacatgtttcctggaataccgttttccttgttatccactgaaagcaactcccatgtattcttatttatttaaattttttgcatccagactttgaattcctcaaaaacagtaactggtgtcataatcaccttgttatccccagcacatagttcaggatttgtcaacatgttggaatgaatgcctatgagccaatcagactacttgccacagtcaggaggaagaggaaggctggagtagctgtgaatagtacaagatgaacctccttatgagtgtgaaagagggggagcatcaacagagttaccatgaattgacacagtggccatgtttccacctggtggaggaatccatttttaactcaaaccatcctcgagaagttacttttcctaccaragaggtggcaggctaagaataatccccttcattaatccctcccaacaacttgaataatggatggaccacagggagtttagaagcccaggttaagtttatgagttgtaaatgtagctctggg

SEQ ID NO: 843978 - DNA, 610 bp, Homo sapiens
tattaagattggatttctcaaacttttaaaatcactttctcctttagataaacatataaatcttggctcctcccgacaacctgattctgatatttccactggagagtacccattcccagcataagaatcactgctatctctacacagtcccaccagccaaggttcagcagtattttcggaagtttgtattataaaaaaacagatttttttaaatcttaaaaatgtctaaatataaaatgcagttatgatgctgactttgcttttcaaactatacaactaccgctatctttcagatttaggccaagtgcaatggctcacacctgtaatcctagtactttgggaggccaaggctggaggatcactttaaagaggccagaaacttgagaccagcctgggcaacatagtgagaccccatgtctacaaaataaaaattagaatattagctgggcgtgagctatgactgcaccactgcactccagcctaggtgacagagggagaccctatcaacatccacaactaaagtttagccacacttttgagggggcagacacccctctgcctratccctgatggaccccactgctctaggactatgcacaaaagggaaggc

SEQ ID NO: 843979 - DNA, 578 bp, Homo sapiens
catcactatatgtaaatctagcttattcatttcaattgctatgcagtatttcattacggaaatgcaatgtaatttattcatctgtktctttgtagacaatcagaattatatttgtttatttagattattttcagcttttttcttttaaaattaatatcccctgtttccataaactagagttgtttagtagtatatactgaaaaattagaacactaggttttagtcttacaattctagctgtgcacatcgctattctgcgttcagtagcatcatatcccattgggggcttgaaaacagccacaatgagaatagttgcccccgaaaatcagtaaatgttacaagtcaggacttttttttattttcttggaaaggaaggttttaaacatctaccagcatatcactgattatatcagcaggattaaaattccagtttccttatatcatagctgacattgattgtcacacacacacacacacacacacacacacacacacacatttatttgtttattttccaatctaaggagtgtgaaatgctagctaatgtctaatttctcttttacttcctcttttcttca

SEQ ID NO: 843980 - DNA, 595 bp, Homo sapiens
gaagagcataaaagtcggagtstgcttggcattttaggagaactgagagtccctggctggcaggtttggaactagaagcaaacctcagtacatctgacttttcccactgagtttctctgcctttcatcatgatcctgggttcagggcaatcacttttttaaaaaaatgacgcatgatccccaacaggcaaggagccaatgacctttgtctgagcctttggttcctcttctagagaaactggggctatacttagaaaacaggataaaagattgcaaaaatttgtctactctcaaattgcacaaccctagcgtggctggtcaatggctcaactttgggagctggcggggctcagcctctcaacagacttgtcctcctggctctgcttcaatgacaacaggccaagccctcatggtagaaggtgccgttcccaccaacctgggccttctgcccccgcaggccctctctgggcaaggtcagctggtgcggcagccggtcgcatggatctgggccacagacctgtctccagaatgaggccgggtgagagtttaatggcaagaaggctgcagcctgactaaggctgtcggcttgattctgc

SEQ ID NO: 843981 - DNA, 446 bp, Homo sapiens
cccacgctgtagccagagcagggtctccccgttaaagcatgcagtaggctcccccaccagagcatgcctaatagtgatcccagccgccatttatcagatccctactgctctaagctcttcaattcatcacctcatttattccttcagggaagcgggcacttctggtctggtgaattgcccatgttctacctcgaatagtgaagctggggtgcaaggcctgctctgtttgaccccctacacttaatgactacaatttctagagcaacttcaattcagtggcagctgcaccctccgtgagatccaaggggctttatatacaargcccttgacctgtgtattgtacttagcctacccacaaactgtgagaggtgggtatcactagccccactttatagacaagaaaactggtgctcagagaggcttagtaaatctcctgaggtcacata

SEQ ID NO: 843982 - DNA, 594 bp, Homo sapiens
accatttttatgaatttaaaaatagtcttataattttaattgtttgtgggtatttttctactggtataaatagcttctaattaataaatcgatcaaaggttgttactcagtatacatgaaattttttgcaggaaaagaaaccagaaatacagaataattcatagaaatcatggttctcaagtatttgttcaattagctttggggaagaaatgccaaatccactttgaggatgagtcttacgacacagatccacccacatgttgctcttatctggaatttgggacaaagcaatgcacaggccctcattcctgatgtggcgccctccagacatggctgcccaggaaggacggccactttagaagtgggacgtatcaccagtaagcttgaatgattaggatcgcaggtggctactgcattctgccgttcgtgaccgtgttctagcctgtagaccacccagctaccttcattcaccagtttttatccttcaccttttccagtatcktgttaaccactagttcttgagttttttggctatgatgtgtacgtttatgtatgtcattcatggactttcaactagaaaaggtaatgataagg

SEQ ID NO: 843983 - DNA, 594 bp, Homo sapiens
accatttttatgaatttaaaaatagtcttataattttaattgtttgtgggtatttttctactggtataaatagcttctaattaataaatcgatcaaaggttgttactcagtatacatgaaattttttgcaggaaaagaaaccagaaatacagaataattcatagaaatcatggttctcaagtatttgttcaattagctttggggaagaaatgccaaatccactttgaggatgagtcttacgacacagatccacccacatgttgctcttatctggaatttgggacaaagcaatgcacaggccctcattcctgatgtggcgccctccagacatggctgcccaggaaggacggccactttagaagtgggacgtatcaccagtaagcttgaatgattaggatcgcaggtggctactgcattctgccgttcgtgaccgtgttctagcctgtagaccacccagctaccttcattcaccagtttttatccttcaccttttccagtatcttgttarccactagttcttgagttttttggctatgatgtgtacgtttatgtatgtcattcatggactttcaactagaaaaggtaatgataagg

SEQ ID NO: 843984 - DNA, 618 bp, Homo sapiens
agtataacttcagtggctggtgcttcctctgtgccccttacctaggattgcaggctacgagtccagctcctcccttaattacggagaagcctggatgaaatttctgagggtttaggtaaggctgactctgagggaggggaggttgggtggaaatgtcccagacacagaagtgtgcagtctaaggaagactcagcagggctttcgggaagccccgtgtctctcagaagtgagcctgcctcagtatctccaccatgttcggtcactggcaggtgcagcctgtggcacagcctctgtgcatatgtggtgtccttacactccctgaatttggaagcctcatggctcctgcagaatggtggggtaaacaggacatagaatttgaacttcatcactggtaggctgggaaactcctaggaggatttaagcagagggatgacatgacatggctggattgaccatattgaatggtcactctggttgcagaggggagaatggacgtggtggggcctgagagggggcagggaggccagaggggaggctaagtcattgtccaggggacaggtgaaggtagtgggcctgtacsactcgtgttctcaggatcccggaaggaatgctttcgga

SEQ ID NO: 843985 - DNA, 507 bp, Homo sapiens
ggtttaattgagcttttgtattgttttttaatctaaattttagtttttctctgatgtttattatttctttccttctactaattttgggttagattttttttattttctagttctttgaggtgcattgataggtttttgaagtctttctatttatttgatgtaggcatttattgctattaagatccctcttagtgctgcttttgctatatcccatatattttggtatattgtatttccattttcatttgtttaaagaaattttttaatttccttattaatttcttaattaatacagtggttgttcaagagaatgttgtttaatctctacatgttcatgaagtttctaaggttcctcttgtaattgattgcaacttttgttccattgtggtcagaaaagataattgatatgatttctatcttttaaattttgttgagaattatwatgtgacctaagatatgatctattctggagaatgttccatgtgctgatgaaaagaatgtgcattc

SEQ ID NO: 843986 - DNA, 623 bp, Homo sapiens
catctgccatccccactgcacagagtggccgaggccagcccagactcacgcaccaggaggaatgagcccctctccacgggagacgtgtcagggacctgtggcatcttccatccaccaatccgctgtcaatcyataccccttcccaaggtcagagcagcccctccaaggatggaattgcccctaacccccacccctcctctgtccaaggagacaggtggcacctctcaggcacctgccatatatgttctaggctccccctaggcacagttctccaactcatgcctctccaccaggctctggcaggagcaagtagaggccatgattctcacttaatagatgtggaaatcacatccaaatcacaaagcctcgacaggtcaatgacagtcaccaagaggccaggctgggtgtgcagctctatctggtcctgaaagcccagctgggcagcttctctaagacccgtgtttgtttctctagaccccaacatgctgccacacagccacactctctccaggctgtccctggcatccttcctctgttgagactggggagaagcaaggggcttcatttcatgtaagggtcaagcaaatcaggctgggaagctgcccatggtggagcccctggca

SEQ ID NO: 843987 - DNA, 614 bp, Homo sapiens
ttcacaaagaagctatacagaagaaaagtacgtacaaatgtgctcagcaccactgtcattagggaaatgcaamttaacaactaaaagatcctcctgcatacatactaaaatagccaaaatttaaaagactgaggcaggcatggtggttcacgcctgtaatcccagcactttgggaggccgaggcgggcaaatcacttgaacccaggagttccaaaccagcctgggcaacatggtgaaaccccatctctacaaaaaatacaaaaattagccaggcatggtggcgtgcacctgtagtcccagctactcaggaggcagaagtgggaggctcacctgggcctgggtggttgaggctgcagtgagctgtgatcacaccactgcactccagcctggacaacagagtgagaccctgtctcaaaaaaaaaaaaaaaaaaaaagaataaccttaccaaatgctgaggatgatgtggaaaaactggaactgatggaaactagaactagaaactcttggaaacagttttgttggttttttaaatggtaaactcacaccttccgtactgtcactgaatgacaaaggatcctgtcattccactccgaggtacttatttgccaaaaaa

SEQ ID NO: 843988 - DNA, 503 bp, Homo sapiens
tagctttatttcataatactcggtcctacttcaatcaagctggggttttttaaatcatttttaagagatgaggtctcactgtgctgcccaggctggtcttgaactcaggcaagctgttatttttgcagaaagacacaaaagtcagcttgagggatctcccaccagccagatttgggacaatatgagcatcaaagtaaattgtgatagtggtttattagagtcctttgaataacacctcaaaccctgagcccatactgatataaataaataaataaatagcagagaattttatttatataaatagcagataaatttatataaatagataaatttatataaataaatagcagagaaacttatttatataaataaataaatagctgagaaatttattccttatagaaagmtgtcaaataataaatataaaagaaatgataaaattagaaaatcactatcgggccaggcatggtgtagctcacgcctgcaattccagcactttggga

SEQ ID NO: 843989 - DNA, 585 bp, Homo sapiens
gaaaacttcaggatcttgaaccttgcgttcataatctcgcaaatgaaaagggtccctccacactcttggaactgtacacccattggaacctttaaggtaaagctaaccaaggaagtctccccagaagaagatggcatccttgatgtgaacagcttttcctaagatcgtggatcaagacttctaccatcatgagactttcatgaatattttttccttgttaatgtctctatggttttttttttttgttttttttttgtttttaggcggagtctcgctctgttgcccaggctagagtgcaatggcgcaatcttggctcactgcaatctccacctccctggttcaagtgattctcctgcctcagcctccctagtagctgagactacaggcacatgccaccatgcccagctaatttttttgtatttttagtagagacggggtttcactatgttggccaggctggtctcgaactcctgacctcaggatatccatctgcctcagcctcccaaagtgctgggattacaggcrtgagccatctcaccaggcctagttttagacttttgaaccatgtggatatacacccatgaa

SEQ ID NO: 843990 - DNA, 570 bp, Homo sapiens
aaaagaataaaatacctaggaatacagctaaccagagagatgaaaggtctctacagtgagaattacaaaatactcctcaaagaaatcagagacaacacaaacaaatggaaaaacattccatgctcatggataggaagaagcaacgttgttaaaacaaccacacttcccaaagcaagctaccaactcaatgctattcctatcaaactaccaatgatattcttcacagaatcagaaaaaaactattttataatttatatgaaaccaaaaaaggggcccaaatagaggcaatcttaagcaaaaagaacaaagctggagccatcacattacttgatgtaaaagtatactacaaagatacagtaaccaaaacagcatggtactggaaccaaaatagaaacatagaccaatggaacagaatagaaaacctagaaataaagctgcctatctacagccatctgtttttgttaagttaaaaacaagcaatggggaaaggactccytattcaacaaattatgctgggataactggctagccacatgcagaagattgaaactgaactccttccttatagca

SEQ ID NO: 843991 - DNA, 437 bp, Homo sapiens
tatatttgcaaaagacacatctgataaaggactatyatccaaaatatacacagaactcttgaaactcaataataataaaattagccattcaattaaaaaatggaccaaaaatcttgatacctcaccaacaaagaatggcaaatagacatatgagaaaaatgtactacatcatgtggcatcaggtaaatatgaaataaaatcctgaaataccattacacacctattaggaaggccaaaatccaaaacaactgccaaatgctggtaaggatgtggagcaacagaaagtctcattcattgctggtgagaatgcaaactggtacagtaccttgaaagacagttgggcagtttcttacaaaactaaatatactcttactgtgtaatccagcagttactctccctagtatttatcccaaagggctgaaaacctatgtcctcca

SEQ ID NO: 843992 - DNA, 603 bp, Homo sapiens
taaagtgggctcatttgcagagagaacaggaatagcagtttttatagcttaaggcctggaagaaactgctttttttctgacaatcataatccactcatgctttaaaaacatgtttcaaaatcaaaaggactccaagagtctgggatatgctagaaggatatattaagacatagctcgtttgtcaatttatctctaatctagataaatttacctcctatttctcctctcttgcagcttcctcagccacagacccgatgagttgcctggatgtcaaagaattaagcctgccttgaattagcagaagcaacaggaatccagagggaattgacttttttttctttttttccctggtctccactgtgattctctgattcaaatttgcggtggcagaatgaaaggaaggggggtgctcctggagggaagcactgccccagcagaggccctgaggggagcaggtcacgtggccgatgtcccgaaggcctgactgaagcagagcagaagcaaggctggctggrtgtggggggtgctgagcagaggggctttgagtggtgtctggggaaatcctgagccatttaaatgaaccatttaaatctgacagacaaa

SEQ ID NO: 843993 - DNA, 644 bp, Homo sapiens
tctcattcttagacctataaatggggctttcctcaggctccccagccatctcagtctcccatccctgctttattttttctctaaagcacacctcccatctaacacggtatagattttacttcaaaaccaaaatatctccccattagaaataagctcccctagaagcaagtcctttcaaagtagcgcagagactgtagaatgtagtagtaatagccaccattttttgagtacctgctaggtgtcaacaactttccaaacattaattctaattcttggaatattctggtgacaggtaagtattcttcctgcacttttacaggtgaagaaaacaaaagctcagaagggtggtaggagcacttcacggtcacagagctcagatggcggcagagatgggatgtggtccaagtcagcccgagtccaaagccgttcccctcatcttgcttggcttttagagagacaattgaggagggacaattgggtcactttggcatccaactggatatttcctgcctagtgtctaagtgatggggtggggatgaggagtaagtcckgggttccaggacttctaggaagtgcttctaatcccgacaggctgctcagacatcattttgtcccaactggcaaatcctttagtttcctttttt

SEQ ID NO: 843994 - DNA, 552 bp, Homo sapiens
acttctcttttcttatctgtataacaggatgaacgatgtttactttatgcagttgctatacaggtgaggtgtacatccagcatttggcacagtacrttcattaagtggatggcagacctattcttagcatttcatctttcctctaaatgtccagcgtagcctagtgccagaaattttctgagcttctccttcctcagtattaatccaattcaacaaacattgcccgagcacctatccctgccaggaattgtgtgggagctgcagattaggtgacaaagacaaggtccctgtttctgaaaagcactgacaattacttgtgacttcatacagaattcgtggaatagaaccaaggaactaaagtttacatcaacagaataacaggaagataatctgcttcaaaatgagccccattgttctgtctcattgcttgagtttggtgacttaaaagacaagatcctctgctaccacttagctataggtgggtcattgttgaagccttagtttcctcatccgtgaagttgggattgtataacttgccttgcctgtacctct

SEQ ID NO: 843995 - DNA, 623 bp, Homo sapiens
aactgatctaaactgaaagatagagtattaatattagaaggtgaggagcaggatgcggtgtatttaagatgaaaataattaatgcaatgaagatttactagatgaaatgagagggtggggctagaaaacggaccacgcaagttatctcacttaagcctgtcaataatccagagatcaatattattaatcccatttaatgggcgatactacaaactcagaaaacttaagtaactttgcagagatgtcagtgttgtggcacaggtttacttgttacatgtaacacgtaaggacaggcaaagagatttcctccaacttgcaattattgtttttaactcaatgaataactttagagccagaatatttttaaagagagaaaagcttctctatggctggataattttaagacctctctctggagaggtccttgttaacatgtttacatcttcctggctgctagctcccatgacatccatacgtacctctcctgaactgctctctctaccctgccccacaccactcakgaagcagggccaagggcatcttcttgtgccccatataacaaaatattgtaattgcctgtttatgtcactgtttttctttttttttttttttttttttttttt

SEQ ID NO: 843996 - DNA, 628 bp, Homo sapiens
ccttgcatgaaggctaagatgtctcctattaaccacatcaactggatgccctgtcaggagttggatgtatatgtatctttacatgtctagtaaactcgtagaaaggtctaacacaaatttttttgcagggccctgagaatcctcttatgaaacgactcattctagaaacagcatgaattgctggacccaggaataaagcctgagttaggaaggagaagcggtgattctgtgctgtgcaaccattgggtgcaagtttaattccaagggagagacagtgctataaaataaaagatggaagacttcttctcctatattctgtaacacactggagcccaggcaacactgctatgacatgccatcataacagatagcaacataaaagggagagagccattcttccacactctgcccatgatggcaccagttgggcctggggtgcacatggtgcccagtggcactgaccagaaacaatgggaggttccctgggacccagaaaaacaaagtagcagcagtcctggccartttagataccactttaatatctttccttgctgggattctcataaatatctgggaggagacttggtagaggtttggacttccgtgtctgatgaagaagtgaaatttg

SEQ ID NO: 843997 - DNA, 628 bp, Homo sapiens
tgtgagaatctttgaagaggtctccctttctacctccaaattgytaaccttataagtgatacagcttctgggaaagccagatagtcttgctcctacggagtgcgcctcagatgagggtgttccaaaagtgggttagaattctttccgcaacccagatccccccgaggtgatgagcacagacgaaaacatcttaaggcaatggttgaaacaatgctcgtatcacaaagccagctaacggcttgtgcagtcacacgcgtgtaaattaaaaatctttcgttcgcaaaatgtagaaggaagcaggtggaaataatttcagcccttttctccctaagtcagtgacattttcaggattaattgagaaaatcagacagagccaaacaacaaaataaggctgtgaggaaggaagttaaatggaagtttcgtaattaaaccattagaatcccttttgtgccaatctactttgagaaatatctattcacactgatttattttccccttgagtcaagatttcaaaactctccatcatgtaacctaggaacatttctaaggttctttagagtcagaatcggctgctctgtagccctttggccacctaaaggcttgggttcttgctcaagggtaagaacct

SEQ ID NO: 843998 - DNA, 674 bp, Homo sapiens
gtgcttgaagtacaatagcaaaaagacagaygtggtctctgttctcatgatgctcatggactggtatgggatagagacaaataaacagaaaattgctctctgtgttaatcagagttataatggcagaaagcaaagtgtgctgagaggacagactggtcctgcaggtagtagaaatcatccatgtgtagtctagactagggaaacaagcctggggactctggccttcactctcttactggggtttttggacctggaaacataaaccttcatctgcagtactcctggaaatggccattgctgcagttatctcaggctgccacttagggacttctgtattcttttcagtttaccaagccctaaggtgattttgtctctttggtatatgtgtgtacacatatcacataagctttgctgcaccatttaaaagtaagttgtagagctcattatacttcgatatccatcttctaagaataagatttctacacaaatcataacttcatcatttctaaaataattatcaataactgaatgaagttatctattgtccagtctattattaaaatttccccagttattctaagaatgtttttatggctatttttttttctggagtgaatattccattaaagtttctgcactaaaattagtttttatacctttctagtcccctcccc

SEQ ID NO: 843999 - DNA, 674 bp, Homo sapiens
gtgcttgaagtacaatagcaaaaagacagatrtggtctctgttctcatgatgctcatggactggtatgggatagagacaaataaacagaaaattgctctctgtgttaatcagagttataatggcagaaagcaaagtgtgctgagaggacagactggtcctgcaggtagtagaaatcatccatgtgtagtctagactagggaaacaagcctggggactctggccttcactctcttactggggtttttggacctggaaacataaaccttcatctgcagtactcctggaaatggccattgctgcagttatctcaggctgccacttagggacttctgtattcttttcagtttaccaagccctaaggtgattttgtctctttggtatatgtgtgtacacatatcacataagctttgctgcaccatttaaaagtaagttgtagagctcattatacttcgatatccatcttctaagaataagatttctacacaaatcataacttcatcatttctaaaataattatcaataactgaatgaagttatctattgtccagtctattattaaaatttccccagttattctaagaatgtttttatggctatttttttttctggagtgaatattccattaaagtttctgcactaaaattagtttttatacctttctagtcccctcccc

SEQ ID NO: 844000 - DNA, 515 bp, Homo sapiens
tttatgtctccaccaacacagtaaagataccccatttaccataatattgttattatacgttgcatgcctgtgtcaaagtatcttatgtgccctagacatayatatatctactatgtactcacaaaaatttaaaacttaaaaaaatcactggacaagtctgtcacccaaaggattcctcgtgttgtccttttataaccacactcacttcaccgcctacacccaatccctgtcaaccactttacatttccctaattttatttcaaaaatattatataaatggaagcaaggcactgtggctcctgtctggaatttcagctacttaggaggctgagatgggaggatcacttgaggtcaggaatttgagatcagcctgaacaacatagaatgagacctcgtctctaaaaattttctttttaatttagctaggtgtggtagggcacacctgtagtcccagctacttgagaggctgaggcaggaggattgcttgagcccaggtgttggagactgctttgagc

SEQ ID NO: 844001 - DNA, 522 bp, Homo sapiens
tgaggcaagaggattgcttgaacccgggaggcagaggctgcagtgagccaagatggtgccactgcactccagagcctgggtgacagagtgagactctgtctgaaaaaaaaaaaaaaagacaaagatgcaagaacaattcagcagagaaaacatcatcttttcaacaaataatgctgaaacagttgaacatccacagttttaaaaaaagaacattgacctaaatattataccttatataaaagtgaattcaaaatagatattagatctaaatgcaaaacctaaaactataaaacttttagaagaagatgtaagggaaaatctttgtgaccttgggttaggcaaagaacttttggatataccaccaaaagcttgatccataaaaaagaaaaattggtaaattggactttatwaaaaggtaaaacttttgctctgtgagagatactgttaagagaataaaaagacaagctacaaattgggagaaaatatttgcaaatcacatatctgacaaagaacttgtatcta

SEQ ID NO: 844002 - DNA, 618 bp, Homo sapiens
ctctggggtcacactgccagggttcacagcccaactcttgtttgccagctatgcacccttgtgcagtttacttasctttctgtgccagtttttcatctctataatgagaatgacaatagtacttaactcatagatctgttgtgaggattaaatgagattgtaatgagcctggcacctagttagggttcagtaatattagctattatttggaatgaaaagtctttctttccctcttgcacacccctgcttctctagtttcagatacttgttcctcctctccccaacgaacttctcccatccttctccagacgttgcaagcctttcagtgctaaatgttcttaaaagaagagatttccggctgggcacgttggctcacgtctttaatcccagcattttgggaggcagaggcgggtggatcatgcggtcaggagatggagaccatcctggctaacatggtgaaaccccgtctttactaaaaatccaaaaaaattagccgagtgtggtggcgggcgcctgtagtcccagcttctcgtgaggctgaggcaggagaatggcgtgaacccgggaggcggagcttgcagtgagccgattgcgccactgcactccagcctgggcgac

SEQ ID NO: 844003 - DNA, 618 bp, Homo sapiens
ctctggggtcacactgccagggttcacagcccaactcttgtttgccagctatgcacccttgtgcagtttacttacctttctgtgccagtttttcatctctataatgagaatgacaatagtacttaactcatagatctgttgtgaggattaaatgagattgtaatgagcctggcacctagttagggttcagtaatattagctattatttggaatgaaaagtctttctttccctcttgcacacccctgcttctctagtttcagatacttgttcctcctctccccaacgaacttctcccatccttctccagacgttgcaagcctttcagtgctaaatgttcttaaaagaagagatttccggctgggcacgttggctcacgtctttaatcccagcattttgggaggcagaggcgggtggatcatgcggtcaggagatggagaccatcctggctaacatggtgaaaccccgtctttactaaaaatccaaaaaaattagccgagtgtggtggcgggygcctgtagtcccagcttctcgtgaggctgaggcaggagaatggcgtgaacccgggaggcggagcttgcagtgagccgattgcgccactgcactccagcctgggcgac

SEQ ID NO: 844004 - DNA, 628 bp, Homo sapiens
ctgatccccatgattccaaagctcatcctgtgtgacccaggatcctgctctgtattggaggtgactgagtcaacactgaagaagcagctccttctctgattgaccctcaactgttagagaacctgtgtccccagccccacgtagtcacctctgccctgagcctctcctcagtgtctcagagcctcaaaccctgactcagtctcttgtcttatttatttatttatttatttatttatttatttatttatttatttttgagacagagttttgctcttgttgcccaagctggagtgcaatggtgcaatatcagctcactgcaacctctgcctcccaggttcaagcgattctcctgcctcagcctcccgagtagctgggattacgggcatgtgccaccaagcctggctaatttttgtatttgtagtagaaacaggggtttgccatgttggtcaggctggtctcgaactcctgacctcaggtgatcctcccgcctcggcctcccaaagtgctgggattacaggcgtgagccactgcgyccggcttggtctctcgtcttaaatcaaggaggttttcatagctcatggcccatccacacacagcctctgccactcccacatcagactgagtgggc

SEQ ID NO: 844005 - DNA, 643 bp, Homo sapiens
aatcttattgaggatcctttgtatgtgatgaatcacttttctctggatgctytcaaggttctctctttgtctttgggttttcaccatttaattatggtgtgtctaggcatggctatttgagtttatcctacttggagttcactgagcttcttggatgtgtagatgaattttttttgtaacattttggaagtttttgcccattatttcttcaaatattcttatcgccttctcttctctacttctgagactcccatggtgtgtgtgttggtacacttaatggtgtcttacacgtccctaaggctctgttcatttttcttaattcttttgaaaaatttttctcagactggaaaacctcaatggattaatcttaaaggctgccttattttttatctttcctgctcaaatctgctgttaaaattctctagtgaagttgtcattccacttcttatacttttcaattccagaatttccattttatcgatattttctatttggtgagacattattcttatactttcctttagttctttagacatgatttcttttgttttttgaatatatttaaaagagctaatttaaaggctttgtctattaagtgcaatgtctgtgcttcctcaggcacagtttctgttgaccacttctt

SEQ ID NO: 844006 - DNA, 598 bp, Homo sapiens
aattaaggtatatgcctcataggttcgttgtaaggtttaaatgaatgaacgtaaaaagtgcttagagtgttctgagcaaatggtaagagctaaaaaatgttacctatttttaaaaatcattatcactgttattctcataattagtcaaggaaggcttcccagaagaaatgacttggagctgagctgtagcagtagcaaggcaacaatggaggcataagcattccaggcagaaggaacagcatgtacgaaagtcgtatggtgggaacagaccgtggtacatttggggagccgaacagggctagtggggctggagcagagtgatcaaggaggagtgggaggagacctgaggctggagagatcagctgggggcctgaggaggtagggcctgggggcttttttttagggctgttagtctttatgctggaagcaataaatgccaacaaggggtttgtaagcagtggggaggcaaggtctccctgttgatttgcaaagctccctctagtggttttggggagggctgaggatggyggatgagggcttttggtggggtggggctgggagggatggagagatgattgcagagaggagtctaagatgc

SEQ ID NO: 844007 - DNA, 647 bp, Homo sapiens
tgatgatcttaatttgttccactataataatatttttactatatatgtgtctgatcacgtatcttaartttatacaataaaatttattttttaaataaaacaaggctgctagtcacaaaataaaaacagtttaacaaattcatagcatgatgcaaagtgatttcctcaccttcagaagtatccctaattcttcagatgtagaggttatactctataaactcttatgtatgccaagtgttttattttaatatacaagtttaaaatattagttaagttaaaattctagactggaaaacattagttaacattgggtaataaagaagcagcaaaagtctgccaattttcatttcagtgaaaaaagaaaaaatgtcacccatatcaggtgaatggctcaggctagtgaacaagaatagacaataatacagtttggacaacattggaagacccagtctctacaaataataaaaaatttagccaggcatggtgggtgcgcacctgtagtgtcagctacttgggaggctgaagtgggaggatcacttgagcctgggaaatcaaggctgcagtgaactatgattgtaccactacactccagtctgggtgacagagtgagattctgtctcaaaaaaaaaaaaaaaaaaaaaaaaaaa

SEQ ID NO: 844008 - DNA, 606 bp, Homo sapiens
tgttgggatcctactgccactccatcttgagtgcttagagctggaargggaatatgaggttcaagggaaaagaaggcaagaaaatcccactcattcttctaggataacgtccccatggtggccattccctcatcatccctctgactctgcacgccataactcacacacattgtcagttgcattaaaaaacagtatagttaggaaacaagcatgagaagacacaaaaagaaaaaaattaaatacaaaatagtgtagcgtggagcttaaaagcatgcactaggccgggcgcaggggcttacgcctgtaatcccagcactttgggaggccgaggcaggcagatcacgaggtcaggagattgagaccatcctggctaacacggtgaaaccctgtctctaccaaaaaccacaaaaaattagctgggcgtggtggcgagctcctgtagtcccagcaactggggaggctgaggcaggagaatggcgtgaacccgggaggcggaggttgcagtgagccgagatcacgccactgcactccagcctgggtgacagagcgagactccgtctcaggaaaaaaaaaaaaaaaaaaagtgtgcactgaaattcaacagcc

SEQ ID NO: 844009 - DNA, 620 bp, Homo sapiens
cctctcccctgtccttcttaaactccgcctgggaagacagagaaacatggagagcaagagatgaaattactgctctgccctaaactgcacccagagtctctgattacagtcatactcttaccccgtccrcaagaaggatccttgtttctaaaattccaacagaaaaaaaaaaaaactgctaactgtatatgtgcaacaacacaataagaaaaaaacctaaataatctcccaggaccaaaatccatatcttctagtatctaagatgttagagaacaaacttaaaaaaattgtctcgttgaagcattgcccatgtacacatatgcaaattaaactcaaaagaaatggccaaaaacagaaaatattaataatgcaataataactaagagaaaatattctgtttcaagattacagcagtccccaatgatggaagaaaagccaagggaggtgaggaggagagaacaaatctataatatacactcagtggaaacctcagtggcctcctccctctttctacccaaaggagtctcataaagtgcattgctcaaactgaaatggcatttttgtctcatcttccatctctgttttccattaaaagcatggaacccagttttaatgaagtt

SEQ ID NO: 844010 - DNA, 632 bp, Homo sapiens
gccaaaacccactagccgtcctcagcccctctcctctgacactccatttccaatacatcagcaaatgttaccagctttacctgaatactacaaccactggtccccatctccacagccaccaccccccsagtccaagccatcatcatctcctgcctggactaacacagccatttccctcctggtccccttcaccctcccaaaagtctgttctctacacacacagccagggagatccctttaaatatgtacaggagatcagtcaatccatgcctttaaaatctccatggcttcccactgcacttaaaatccaaatctttccatggtccccatgatcttgtccttgttaatctctctgatctcatcttccagtacttcatcctcccacacacctcaatataaataatcttcagccacactctcattctagattctatccacctgccaaatacactcctgcctcaggacctttgcatatgctgttcctgcttgcaagatgttctcccccattctgccctgagcagcctcctcatccatccggccttagttcaaatgtcacctccgccaagaggccctcctcttcttaatgcaaactcctatcttcccatcttgcgttaggagctcatttgacagat

SEQ ID NO: 844011 - DNA, 457 bp, Homo sapiens
tgaatcccaaccttccctctaacatagtctaaccaaataggaaggaaccagaaaagaattctggtaatatgacaaaacaagattctttaawacccccaaaagatcatgccagctcaccagcaatggatccaaaccaagataaactattggaatttacaggaaaagaattcagaaggctgattattaagctaatcaaggaagcagcagagaaaagtgaagtccaacttaaagaaattgaaatcacgatactggatatgaaaggaaaattcttcagtgaaaaagatagaataaacaaaaaacaatcacaacttctggaaatcaagggcacacatagagaaaagcaaaatgtactggagaatctcagcaacagaatcaaataagcaaaagaaacagtttcagagcttgaagacaaggcttttgaattaacccaatccatcaaagacaaaaaaaaaaaaaa

SEQ ID NO: 844012 - DNA, 643 bp, Homo sapiens
tttcagttaatcaggcttgatgctatcaaatcctcatttcctagtataattaccttaatttacttaattttrtagtataattacacttaattttaagacacatacttttcatattttaatagctatgaaatcataacatattacaatcaatagcatagtttaattggaagcatttttaaaattttcttaatggaacaaatagtactggtgtgccttttagtggatgttgtcttatattaggtgaaataagtaacttataagtggctataaaatggacaagtctacttgctagagcctgggtcacatgactgcaccttcactgaaagttgagtaaaagatgttttcatcttttattgtggagagtgagtagtgccttaaggtgataaattcctcagccatggaaaatgggttcaaaataatgatctgttttatctttaggaactgatttcaaaatatttgaaaatattggggaagccaaagtaacagtatatgaaggttatattcagcctatgtgacattggcttatgatttctagtttatactttccataaaaatctctgataaaaatgttcatgagaaaagaaccaaggacattctgggtaatgtattctgggtaacaatattctgggtaaaatatttcagt

SEQ ID NO: 844013 - DNA, 584 bp, Homo sapiens
ttctttagatttaatgacgtacctttgtcatgtacttaatcttcagcaaatatttacccttccaaaactggcagatttgcattttayaacttgtcatgtcaaatgaaatattttctcttttctttgcccctagaaggatttctgctcaaaattataatcttttaaaaaatagctgacacattctcctttgtggggaatattcaacatttctatcctgtgatttgaaactgacccttctcacttctctccagctttagcctatacatattgatatatttattttggatacagtttaatgtttttattcttatatctgggtcatagagagatgaatgggtaaatgaagagatggatgaatggataaattagatagaaagatagatagatagatagatagatagatagatagatagatgatagatagacagatagacagaaaagcagaccaaagtataccacagatgtgtggaagtacatgttcagataacagaaaatacactgcaagctttagtctcaagctccctagaccataaaagcttatagaatggtcagctttccaaagcagaggctaaataactgtcatt

SEQ ID NO: 844014 - DNA, 551 bp, Homo sapiens
ccgtcctcagagcacgtgagtgccgcctacagctggagggcctgcctcagaagccagtcagtgccttggggctcttgggctggcgttccccgtgccagcctcacgtctcagtggcatcgccaacctcacagtgctcctgcagactgggtgttgtgtctcccacagatgcggagaagggaggcagcctggtggtgggggacttcgagatcgcagccaagtacggtgagtgatgctgcaggggccatctcagcaggggcaggcgccccgtgatgctcgtgacgcaggcgctggccctgactctcctgggtgtagcccctcctaaacaatggccacaggcaggggcctcggccccagctgagaaaggaccaccgtccttgtcccaccctcatggggtcgtgaggaactgggtccctcgattccacttcctcagatgccattttactgctactagggtaacccsaagagtgatttcccctgggatgtcccagtaagttcatgattgtcacacaacccttaagaagccaaggccctacagaatggagcctgggatg

SEQ ID NO: 844015 - DNA, 579 bp, Homo sapiens
tttaagattccatgagctaggatgtcagtgactctttgccctayggccttcggaccctagttttccagcaccaacttcaatcagctccaaccaccagcatctcatctctgtgccagaacctgcaaatgcagcaggtcagacatgcagagggattcacactcaacaatgactgacaggaccccgtgtataaataccccagctccctcctgcctcaggctccacatccaaaccaaggcagtgtgaatccagaagtgtttatgtgaagcagaggaaatgtgactgagcagaaagcaggagcagagttgtgtgaagccaggaagaggagggcacagccaagggcagcccctgtctgggcaaactgtggggtcagcagtgcaggaagagcaggggactccagtcggaggctcaagggtcagctcttattacatgacattccgaaatacagatcatccctttttgttcatgatctaaggtgtggcaaagctcaaaattgggggcacatcatgacctttcaaaagttacaaggaactttgacacaaaatgggacctcggagctgtagtaacctcaagccaacccag

SEQ ID NO: 844016 - DNA, 601 bp, Homo sapiens
actaaaagaataaaatacttagaaatacagctaaccagggagatgaaaggtctctacaaggagaactacaaaacactgctcaaagaaatcagagatgatgcaaacaaatagataaacattacatgctcatgaataggaagaattgatatcattaaaatggccaaagcaatttatatattcagtgctgttcctatcaatctactgaggacattcttcacagaactagacaaaaaatctattttaaaattcctatggaaccaaaaaagagcccacaaagccaaggcaatcctaagcaaaaagagcaaagctggaggcatcacactatccaacttcaaactatactatagggctgcagtagccaaaacagcatgacactggtgcaaaaacagacacatagaccaatggaacagaatagagagctagaaataaggctgcacacctacaactacctaatctttgacaaacctgacaaaaacaagcaatggggaaggattctctattcaataaatggtgctgagataactggctagccatatgcagaggattgaaactggaccccttctttayaccacataaaaaattaaggcaaaatggattaaag

SEQ ID NO: 844017 - DNA, 674 bp, Homo sapiens
tttataaatgtatgtgtctatggctataaattcctcacttagccttgcttttgctgcatcccattactgtggtatgttaagttttgtttgcatttgtcccaagatattctctgatttcttgtgtgattcatcttttgacccatttattttgagtgtatcatttaatttccacatatttgtgaattttctagttattcttctattattgacgtcgtttcattttatcatagttagaaaatattctttgtgtagtttcagttcttttaaaatttattgagacttattttgtagcctaacatatgggctatcttagctaatgttccatgtacacttgaaaagaatatgtattctgctgttgttgggtggagtgttctgtctgtgtctgttaggtctagtgttcaagtcttctatttcctattgagcttcagttattttgttgtatgtattataaaaggtttagtattgaaatatctattattgcataactatgttttgtccctttaattctgtcaatgtgtgcatactccacttctctgttctttcttgtgtgttatgtttatatgttcttgatraattgacccttttatcaatatacaaagtccttatttgtatcttgcaattgttttcaagtcaaagtctgttttgtccaatactattactgtataaccacccca

SEQ ID NO: 844018 - DNA, 580 bp, Homo sapiens
gcatgttttacatggcggcagacaagggagaaaatgagaaccaagcaaaagaatttccccttataaaaccatcagatctcrtgagacttattcactacccatgggaacagtatgggggaaaccacccccatgattcaattaactccactaggtccttcccacaatacatagaaattatgagagctacaattcaagatgaaatttgactggggacacagccaaaccatatcaatccctaaccatccacatcatctattcctggcatccaaccatggacattatcatggcttgatgatctaggatcacccaaggtagaagatcctccttctgatgtattgtcagaaggtctgtattagcctagtgatacgtcacaatgcctacatcattcacctcacatgattctcatcacataggcattgtatcatctcatatcatcacaagaagaaaggtgagtacagtacaataagatattttgagagagaccacatttatgtaactgctattacagtatactgttataagtgttatatttaattattagttattgttgttaatctcttggtgtgcataattcataaat

SEQ ID NO: 844019 - DNA, 598 bp, Homo sapiens
aggctgccccccagctgtgcatggcagtgtgtcggaaagaacaaggcctgtgggtgcccctgagccgggtctggagtcctgtcctgccacttctcagccgtgtgactggagccyctttgctcctctctgaaaatgggtctggtggtttgttcccaggttcttaaccactgtgtggagtcacacctgcagaaggtcagctcataacagatatggcaaccaatgtgacctttgcatccttccttcctggggtcaggagcaggtctaagaggtggtcaggctaaacccctgtagggctgtgggtactgctggtttcctaagccccgggaccttctgggggccgggcggaccttaagttctgtccacctgcctctcctccatcctcactacccaccttgtccttccggctccttccctccctgctccgcctctcatcggccctctgtcctctccgtccggagaggggaacgtgaaggaggtgaggagggagtagtgcaggaggatttgggtctctccttctttcccttttccattctccgagggcttaaccagctggtgaaggttcttaaccagcaaaggaggaagcagccggggccggtga

SEQ ID NO: 844020 - DNA, 629 bp, Homo sapiens
tggaattccaacactttgggaggccaaggcaggcagatcacttgagctcaggagtttgagactagcctgggcaacatggtgaaaccctgtctctacaaaaaaatattaaaaaaatagctgggtgtggtggtgtacgcctgtggtcccagctactcaggggagcctgaggtgggaggattgcttgaggctggggggcagaagttgcagtgagccgagatcgtgccactgtataccagcctgggcaagagtgagaccctatctcaaaaaaataaaaataaataaaatggttaaaatttgtatcttcatgtcactttctgtattgctcttgaagtattttgactgtcactcttgattaaatgaataactattctgtttttatcaaatattttgaggctttttacatctttgacaaatgtcctcaaaatcaaataaacattgctaattctttcaacatgtaaagcttttacataagtcaattttgtaaccttgccttttggtttttggtttttggctcttttgttacttaaaagggttttargggttaagtgtctactcacttccattcccatctggcttagaatgattaattagctataagtttttttactctaagtcccttggccataggg

SEQ ID NO: 844021 - DNA, 565 bp, Homo sapiens
ctagaaactggcacatgatagggcytttggtggacagaacctaaagtgattctcaaggcttgctcacttctggtatttactcctttgtagaatcttctcctgatgagttaataaaacccatgacttctttctaaccaatagaaggtgatgagatgtcactcttgtgaagatgttatattatataaggcctcattttatagcaggcacactctagaggtctctttgctggcttgacagagtgagggccatgaggaggaagctgatgtggcaaggaactacaggtaggttctaggaacagcaggcagcttctggagctatggttgccttattgtctcctgcccataaagggtttcagtcttacagatgcatcagaatgaattctgctaataattcaagagagacttcacagtggagttttctatagtaaagcctccagatgaaaacaccttgactccaaccctggccaacaccttgattccaaccctgtcaaagcttaagtagaggactctgctaagctgtgcctggactctgactgatagaaactgtgggatgtgtgttgtttgaa

SEQ ID NO: 844022 - DNA, 504 bp, Homo sapiens
gagcaatgagattaatggacttggattaatgtgataatgcatctctgaatttgagcacatacccrcccacttacctgtgtgaattcaagaatgaaatgaaaactcactttactgtgtgggcatgaggatggactcaaggactgtgacaggagatgttaagattgcagccatgaagctctgtaagtaaagtcacctccacatccttaaaggcacatcgatgactatcattagcctcttgaagagatgcaactttattaaacttgctgttgccgtgacattttagccttgacatttcaacatcaattgtttgctgttttagtttatctcagtatagtcagcaagtgagaaatgaaagactcctactgttccaggttgattatatatctacatgcaggtattttcagattcaacaaatcagtaaaggggttaagaattttattttaaacatttgcttaaagccctttaaggacacttttgaacagaactttaattctactatttaag

SEQ ID NO: 844023 - DNA, 586 bp, Homo sapiens
ataaagtaatttcctttttccctctttaaagggcgtgctgaattagaaagagcactggtttaagagtcaggaacccaatttactrgttttgctctgttttaattaatcgtgtgactttgggtaaataatttagcctaattgaacctcagtttcctaaaaagatgatttctaaagcttagctttaagttcagttattccaatgagttagagagtctctcaaccaaaaagcaagtagtcatgtacatttatcattttaataaagatatattctattaatttggaaaagctgaagacagtattaattttcctcccacagtcttaatgaagaaataaagaaactaattttccattaccattcaaggggcaatccactccttcacagattgtgaaattaatgtaacagatccaaccaactgaacaatctatgcatctttcttcccctctccaattccaagccttggaactgtattttacattaaaaagtttaaaagttaactaaaaattaatgcagttttaagactgcagcttacatataatataatgaagttagagcaaaatatctgcagtgtccagtatctttgagtaa

SEQ ID NO: 844024 - DNA, 556 bp, Homo sapiens
atatcaatgaagctagtaggagcaagtattgttctcattatttaaaggagaagattaaaagtcaaggattaggtcatgatcacacagtaatttttttgtcatgaacattaagacgagaaccaragaaatgtatatattcctcccccatccaccttccttcctatttaggggcaattctctgttgtgtttaactcttgtgggatgcagggtctgccttccactactgaaaccaaagagcggggatgtttcttttccctggcttgttgcagcaagggtaagggcacattatctaggctccaggatctggaaactccaactcagggattgacacagatgcagaaagaatttaggaattacttgtaatgctcaagacagcaagtctacagtccagtcctgtgtgtgacccctctccgccccctagcgtcctaaccagactcttcctctattattgtctaggttgtgtctcttgctacttaggctcctttagcttctgccattttctggatctactcctccatgcttcttattttgtgagctcacaatatccttccaataa

SEQ ID NO: 844025 - DNA, 607 bp, Homo sapiens
ttgctagtgttagtgtatttaatgtgtggccaaagacaattattcttcttccaatgtgacccagggaagccaaaagattggacacccctgttctataatcaagagtggggttgcttgagagtactgccaaaatctatacataaactccatctaagtgtaaatactggcatgtaacagatagcaagtaataatagtaataataataatagagtaatttgggggtactttcaacagttgtactgattctcttaaggcttaactgttagctaccctgttctccccccaggaatattctagatcatcccaatctagaacagaccacaatccaataatgaatgccttggaatctgtaggacattgattcaggggctggcatgcattttgactggttgttccccatgccatacttgctgaacatttttatgtcaccctcgccatacagaaaagtttaaaatacaatttcctgaaaggccattatcactgctaagcagaaaagctaaagtttctaaagagagaagctataattaggmcttaccttggaaagttttcgtggtaggaagagtatattgaggaaataaatatgcacaaggccctcttgtgtgaagga

SEQ ID NO: 844026 - DNA, 617 bp, Homo sapiens
tttttatttgagatggaattttgctcctgttgcccaggctggagttcaatggtgtgatctcrgctcactgcaacctccgtctcccaggttcaagctattctcctgcctcagcctcccaagtagctgggattaaaggcatgtgccaccagaccggggtaattttgtatttttattagagacggggtttcgccatgttggtcagtctggctggtcttgaactcctgacctcaggtgatccacccgcctcggcctcccaaagtgctgggattacaggtatgagccattgcgcctggccaaggtcctgtttttcaaaactagtagggaatgagacaattaagcaataacttttggtgtggtgagtaatgtgatggagggtgctctaagcatgtgggtaacttagtctgcttaaccacttatggcagtttagatagaagtcaaaagaaatccttggagaagtaagtaaggtttacactgataaaagaatattttgaattagtcaaaggagatgaaattaggtttgggagagggggtattgggagggtttctcgggcagaaaaataacactgtcttatttttatgaagtcaaacaaaagacagcatgatgtagagatatagtt

SEQ ID NO: 844027 - DNA, 579 bp, Homo sapiens
atagtgaataagtctcatgagatctgatggttttataaagagaagttcccctgcacatgctctcttgcctgctgccatgtaagacatgcctttgctcttccttagccttctgccatgattgtgaggtctctccagccatgtggaagtgtgagtccattaaacctctttttctttataaattacccagtattgaacatgtctttattagcagcttgagaacaaactaatacacatgaaaaatataattatgttaattttcaagtttttaaaaaaaattcttaaattctgtttctcactttctattctgtctcttcgtaatttgtaagaaaacatatttattggtggagccaagatggctgaatatgagcagctccagtctacagctcccagtgtgagtgacgcagaatatgggtgatttctgcatttccaactgaggtaccgggttcatctcactggggagtgccggacagtgsgtgcagcgtactgtgtgagccaaagcagggcgaggcatcgcctcacctgggaagcgcaaggggtcagggaattccctttcctagtcaaagaaaggggtgacagaca

SEQ ID NO: 844028 - DNA, 592 bp, Homo sapiens
tctacaaaatgtttgtatataataattatatttatggatctccatgacctaggaattacttgcatttgtaaaaattaaagaaaattaraaaacatatttaattgccttattcactctagtctttatctatgacttgcaattcctctttatttttgtagatttgtggtgaaatctcatcagtttcttcagggcatccttcatgtccttatttcttaaggtgtaaatgagcgggttgagacttggagtgatgacggtgtaaaagagggtgaggaacttgccctggtctttggaagccctgttacctggttgcaggtacatgtagataatagttccatagaacatagacactacagtaagatgagatccacaggtattcattgcttttcgctggcttgcttttgacttcgttctcagcacagctttggcaatgtagccataggatataagaataaggatgagaggtgtgaggacaattataatgcctaaagcgaaaacagacatttcaactgttgtggtgtctacacaagctatcttgaccagagctggcaactcacacaagaaatgatccagaatgttgtttccacatgtgggc

SEQ ID NO: 844029 - DNA, 498 bp, Homo sapiens
gctagaaaaaaaatgcagaacaaggggaactcttatttattactgatgagaatgcaaaatgttaaaatcactttgaggaaccacttggcagtttcttataaagcttaaaataaactcaacatatgacccaaccccatcattcttcatagaactagaaaaaacaatcctaaaattcatgtggaaccaaaaaagagcccccatagccaaagcaagactaagcaaaaagaacaaatctggaggcatcacattacctgatttgaaactatactataaggccatagtcaccaaaacagcatggtatgggtataaaagtaggcacatagacccatggaacagaatagagaaccaagaaataaaaccaaatacttataaccaactgatctttgacaaagcaaacagaaacataaagtggggagaggacaygctattcaacagatgttgctgggataattggcaagccatatgtaggataatgaaccaggatcctcatctctcacc

SEQ ID NO: 844030 - DNA, 520 bp, Homo sapiens
gtttatttttcccatggggaaaataaaagtgcttttccctatgcactcacttctcccagtgagtgcttagtcctcactgagtctgrgacccatgagagcaggggttttttctctcttatagctcccctaccctggttcccaccctgccttctgtgcctgcacagaactgctctgtggagacgcagtggcaatgcctaggacacagtgatgttcaatgaatgtctcttggtggattacgtaagaggagcagaacccccttcttcctccctggatctatgtcaggctgttttgtttatctgtgttctcctgctatcacacccacttcagagacaatggaacccagacctaggggaaggaagggttcaccccaggtcaactatagcccatcagcagcaaagtgaaggccagaacccagctggggacatgctctgctggagctgtggccctgctgaacatgggcaggctcctctgcttacctcttgagggctgtcctccagctatgaaggagctgggactgtcc

SEQ ID NO: 844031 - DNA, 620 bp, Homo sapiens
gcctcaagaagaaatagaaaatctgaacagacctctaacaagtgaagagattgaattagaagtcaaaaagcttcccagaaagaaaagccyaagaccagatggcttcgctggtgaattctaccaaatgtctaaagaataacaaacaccaatccttccaagcttttccaaaacccagaagaggagagaatacttcccaattcatgctatgagggctatattaccctgataccaaaatcagacaaaaacatcacaaggagggaaaactatagaccaatatcccttataaatatagatgcagattttttcaacaaagtactaacaaatttaatccagcaatatataaaaaggattatacactgtgaccaagtgagatttatcctgggaatgcaaggttggtttgacatatgaaattcaatcaatcaatataatacaccatattgatagaataaaggacaaatctaggatttgccacttactagctgtgtatcttgggcacatagcttggtacctttgaagaagtttctccatctataaaggagggatagtgctactgatctcttgacattgccaggaggatgaaattagatagttcacacaggaagtattcaataaatggtcat

SEQ ID NO: 844032 - DNA, 346 bp, Homo sapiens
gtgaactaaaaaaagacacaatcgactttcttcacagccagcatggcattatggcattcagaagtggcctcactgtctatagagaagccctggtgaaacttccatgctggaaaacgatttcacagggctcagtgggcacatcttgggtgtttttcccctctgccacgtcaatctgtaaacaccaagcaggtcccagctaagggccggaaacggggytgacctcctgaggaatgcaccagagagatctggccaaggtgagatgtcacctgcccggcacagctcacctccaagcacagtgagcctgctgctctttcctccttctccctgtgctggagggaaagaaaag

SEQ ID NO: 844033 - DNA, 600 bp, Homo sapiens
atgtagctccaaaagctgaattctcattttttaaacacttcatgataatgtgaaaaaacaactttttatggcccgatcatggctgccctgttggatgtagatgctttgctgatccctcagtcacaagccccatgaaatacttatgaaatgtgtgaaaggcttctgtggtagcccacaggaccagggacagcgtgggtgtgaagagcatcaggaggagagcctatcagtcactcaccactgtggctgctgggggctgatggcaggacccttggtgggcagcgaggtggcaggggccctgccaccaacctgcaccacccctgaccccagggccaggctcacccttgggaggccctgggctaaaacagtggtggtacctcccaccccaacgtgtccctatttacgacatcataaagtaaatagaaaagtccagcagagtgctgcttttaccaacaataactgctttatacttttaaaaaatcacatgggcgccccctcattttggtgccacygtcttgcaaaggcctagacttgtgctttttcccatgaccagccacccttctcccaacctcggaggacatcctcctccttcagtccctcctg

SEQ ID NO: 844034 - DNA, 600 bp, Homo sapiens
atgtagctccaaaagctgaattctcattttttaaacacttcatgataatgtgaaaaaacaactttttatggcccgatcatggctgccctgttggatgtagatgctttgctgatccctcagtcacaagccccatgaaatacttatgaaatgtgtgaaaggcttctgtggtagcccacaggaccagggacagcgtgggtgtgaagagcatcaggaggagagcctatcagtcactcaccactgtggctgctgggggctgatggcaggacccttggtgggcagcgaggtggcaggggccctgccaccaacctgcaccacccctgaccccagggccaggctcacccttgggaggccctgggctaaaacagtggtggtacctcccaccccaacgtgtccctatttacgacatcataaagtaaatagaaaagtccagcagagtgctgcttttaccaacaataactgctttatacttttaaaaaatcacatgggcgccccctcattttggtgccaccgtcttgcaaaggcctagacttgtgctttttcccaygaccagccacccttctcccaacctcggaggacatcctcctccttcagtccctcctg

SEQ ID NO: 844035 - DNA, 476 bp, Homo sapiens
taaataatcttttagctttggggatccagtactttccttctatggcccttcttgcctgtcctctttcttgctcccaactgcctaaggtacttatttccagaatttaatatgcaggacaatccatttagatagaacatggggcctcaattttgcaaatgaagaacctgaagctcagagaggtgaattatttgctcaaggtcacactgccagttggcgagagacccagagcttgaacagctcaactcggagtggtcctggtatactgatgatcacataagctgaggcttgctgacgctgtgccaaaagcttgcctgcttgatcttacgacagtccgattgggcaggcgccatggctatgtccattttacagatgaggagactgaggctcacagaggaagagtgacacattctcaaggtcatgcagccaagaagagagcrgggatttgactccagaagggatgctcttattatgtactg

SEQ ID NO: 844036 - DNA, 599 bp, Homo sapiens
tttttgaaattgggtagtagaggtccagagcttggggtccaggaatcctacctctgtgactttatcctaatagttcaagagaggaaataaagcgagatgcacacaaaygtttcccacagcctgattcggaagagtgaagagctgccggatctcccaggaaataatgtttaagtgaactatagacaaacgggagggtataatgtggccactcagtgagtgctcctggctggggcagggctcgcgctaagagtggagaaggtggacggtgcctgcgtgtctgcaggggctgaaggcagccgagcgagcgagtggggaggaacccctgctccacaccacacggaccctgcctctgaccccatgaccctgctctggtggggaggatctgtgtgtgggaagcagggaaagcaagttccaggggtgggatggggaatcccgcaggaggctccggccacccgggcttgtagcacaggctctggagcccctgcagccagcaggggccaggctgctggggctgtgcgctggcctcgcccccatgtggtttccctttacctggcaccctggtgactgtggctcaggagcgaggccaagggcgagcgccc

SEQ ID NO: 844037 - DNA, 637 bp, Homo sapiens
ttttagaaaaggacttagcaaagagtgacctgaacatttagaacaagttgaacctgacattacaagaaatatccagaagatttatcaagcaaaataatagacaatgcattaaagacacattgaatttcaagtagctacaagcaaacagccttcaaaatatatcagaagactgaagaacaacttcagacagcactgaggagatgcttcagatgaaaattcctatattatgagaagtataaaactgtcttcacaagaaactaaggaggtttggagtgctctgactctaacagcagcataggcggccctctgcctatgcttggcgttgatgtacattgtttccataaaaagaactgactgcgttagaatgaaaggaagctatctgtgcagacctgtctttagaacctttgaagataataaaataatatttgattctatggtgatattctctagatgaagctatggtgaaaaatgttttggaaaggaaaaaaaaaaaaaaacagacaccgtagtagcagttcccaaagtggtgaaatcagtactaagagcaagtctgtagattctagccttgggggcctttcatagtccagccctgyggccagcctcaatacagattccaccaagagctcagaataaagca

SEQ ID NO: 844038 - DNA, 632 bp, Homo sapiens
atgcagtcagagagggagagacaaaagctccagtggcaactttaagtccttcctacagtgcactgagaaaagaaatgttttcaccaaatatctaaygtggagataattcactctgtaaagatagtgaagaagcctactaaaaaagattaaaagattaacacgtaaagagctgtacatttccaaaacatttttgaggaagaacataaatatttgggaaagtaacttcattcagaaaaataactcaaaatggatcaccagcctaaatgtaaaatgcaaaactataaattcctagaagagaatcgccaaggagaaaatctagatgaccttggatatgaaaatgaatatcacatcaagatccagtccatgaaagaaagaattgataaactggacttcattaaaattttttttaaaaaatctctgttctgcaaaagacaacatcagtgtagtggaaagaaaagccacagattgggagaagatacttgcaaagggggtatctgattctaaaaaacctgtaatccaaaatatacaaagaattcttaaaactcaacaataagaaaacaaacaatccaactaaaaataccagacatctcacccaagataatacatatggcaaataagcatgtgaaaagata

SEQ ID NO: 844039 - DNA, 629 bp, Homo sapiens
gtgtgtgcccagagctggagcaagctgctcatccatcttctatgtccaacccccactcttttatgtctcatgtcttcattgcaaagcatgaytcgccaaaaacacaacacagagaaaatggtttcatcaaaattcccttgcaacaacaacaacaacaaaataatattaccctgctttcattattcacaatcttttattgaggcaaaaggcaaatatcattgagccaaacctggatagacaaatatatacaaccactggtaatttaatattttgtgctaatggtatacactgtagatacaacccaagaggagtaaattacaatcctatcaataatatatcgcatccgggctccagtttcccagtacacgagaaaatgtgtattggcaaaggctctccaaatattaaaagccatgcatataatgaggcagtgggtacagaagctagaaactcccacaggactgtgctgtggtctttgttatcaaggcccttcgggaggaaatagcccacatcaaagctccaaaacctgatgctaaatgcagacatcccattcacattctcagccgatctctaggtgaaacttcaatcacagaataacctataatcagggcaccagtttgcagaccgcttgg

SEQ ID NO: 844040 - DNA, 645 bp, Homo sapiens
caaattcctacttagccagcctacccactccccataactcatgagtccacatatattctagccttggaacacttgtttttacacacaaactggatgattaggtgggcttccttagctcttcccactatgaagattttctcccatttcaatctcaccctgagtggagctatagttcagctaccaaacatacccacaactaagccaacccatccatgaatcacaatcaggtttttttcttctttcatcaacagatcatagggaataccatgtgtagccacatatgtgagctgaggaaaaggttctggtgtaactgtggcagaggtcatgagacctgggccacctgatagcgcagcttgcttgtgccttttggtcctgtctgtgtacaattctagatatatcacttccatcataagaaagccaggccctcagaaagccaggccctcctgaccttatgacttggtggctctgaacaaacttagcttatgatggccaatcccaaatgcatgctaacttaatgtctgatgatcaagcattccagccctmtggggagcattaacactttatgagctgtttttcaaatggtatgtaattctctgttacagataatacagccttgcccaagaattccaggtatctatgttgtga

SEQ ID NO: 844041 - DNA, 675 bp, Homo sapiens
tccagagacatgtgtgtgctgctagtaacaattgtaagcaggatagctcacaggactctaggccagaactttagaatttgcagtacagggattcttaattggatccataatctagcctctccaaaagtgstttatgggcaacttcgggcaggatctgggtggctgctttctgcaggaagtcaggaaccccgaatggagggaccggctgaagccatggcagaagaacatggattgtgaagatttcatggacatttattagttccccaaattaatacttttataatttcttatgcctgtctctactgcaatctctgaacataaattgtgaagatttcatggacacttatcacttccccaatcaatacccttgtgatttcctatgcctgcctttacttcaatctcttaatcccatcatcttcgtaagatgagggggatgtatgtcgcctcaggaccctgtgatgattgtgttaactgcacaaattgtttgtagagcatgcgtgtttgaacaatatgaaatctgggcaacttgaaaaagaacaggataacagcaacgttcagaaaacaagagaggtaaccttaaactctgaccgctggtgagccgggcggaacagagccatatttctcttctttcaaaagcaaatgggagaaatatcgttgaattctttttctcagcaa

SEQ ID NO: 844042 - DNA, 635 bp, Homo sapiens
gtaactggtagaatccatgggccaaaagctgatgatgaagcatcttagaatttaaatgaaaaaaattattgccaatgagaataatttcaataatgtgaaaatgaaaaaatggagaaaattggaaactgtttaactgcacagaatggaaaatggattaagaaattaaattggggccaggtgtggtggctcatgcctataatcccagcactttgggaggcccaggcaggcagatcacttgaggtcaggagttcgagacctgcctggccaacatggtgaaatcccgtctctactaaaaatacaaaaattagccagatgtggtagcacacgcctgtaatcccagctactagggaggctgaggcaggagaattgcttgaatccaggggacggaggttgcagtgagccgagatcatgccattgcactccagcctgggtgacagagtaagactccgtctcaaaaaaaataaaaaataataaataaataaataagataaataaaatttttaaaaaataaaaataagtaaaaattttttaaaaataaagtaatgaaattgggccaggcacagtggcttatgcctrtaatcccagcactttgggagctgaggctggaggatcccttgagcccgggagttggaggc

SEQ ID NO: 844043 - DNA, 629 bp, Homo sapiens
agtggggactggatatgcacattttgtagagatattggaaagccagaagttgaatatgattgtgataatttgcaacatagtaagaaggggaaaactgcgcaggggttaagcccygtggaccaaagggtaagtgtcaaataagttgatttgtcactgggattcagtagttgtctgcctatatatacacctttttttttcctgtgtagcatacacaaaacctgataacatttaatttttaatcctgtcatctgatggtatattgatgatttctgaagtctttttttcctctaaccctgaactacagacccttctatccagattcctcaaacttaacatgtcccaactaaaatcttaatttctaatcctctccctccaagcacaaaaccaagcaaataacgacataaaaaactgtattcctcccccagtattccccttaattgaatgataccaccattcatttctgttgctcaggttagaaacctattagaaatgaaataataataactataatatgattttcttaccttacatcataatttctcatctggactattgtagtgatctcttaactgctctccccgcttctgctcttgacctttatagtttgttttctgtattaaacagtgttc

SEQ ID NO: 844044 - DNA, 659 bp, Homo sapiens
ttatgctggacataaagcctgcatttgctgctgagctgccctccttctgcgtgtgtgtgtgtgtctttctttaaccctcacctcctctttaagacctaacattatgtatctggtctytgataaggggcaaaacaccaaagttgttaggaatcttaaataaatgattaattaaagttagatcatataaatgataatcatacaacacactgaaatatcaatataaaaaaaaaatcaccagtataggaacaagtcttgaagagataaaaacctcaagatcatttatatatttatataagaatatcatacagtatacagatctcatggtgttgactaaaatacaaacacaaacattttattctcatcatctgtagaaatgttaatgatacttcaattagcatacataaattttatatatacaaatattctatatatgtaatgtataaatatacataatttcaaaattacttagaacattactaggtatcatgcaccttaaaggaaaagatataaactaatcttgatagtaaaaaaattaaaaaaaaatcctaagtatttttttttaaagtttcttcatattaaggggtattttcagaattagaaaccagaatacgtatcttttccattatgcaacttgtgaacatttaaatagatttcagtgt

SEQ ID NO: 844045 - DNA, 634 bp, Homo sapiens
agctctgggatcctgtgctatctctttttgccttgtggtttccctatatcccacccaaatctttctaagtagtccttttactaagcccttctcaaattacctaatttgaatgtgccatctgtttcttgctgggaccttgatggatacactgggtcatttgtcatgtagaattctcctacattttgggtttggctaattgtctctttgtcatatcattcaatacatttctttatcctctagatttcctgtcaactggtaggtagacctagagacttgaagagatccagattcaaggtgtttttggcaggtggggtgggaacaacaatatttcataggcggcttctttatacctctatagcatctcattagaacccacataaaatctgattgtctaatttttttttttttctggcagaaagcttgttgtcagctttcttttttaatttttttttttttattttatttttatttcaatagtttttggggaacaggtggttttttgttacatggataagtgctttartggtaatttctgagattttggtgcacctatcatccaagcagtgtacactgtacccaatgtgtagtcttatccctcatgctcctcctcccgagtccccaaagtccccatcat

SEQ ID NO: 844046 - DNA, 643 bp, Homo sapiens
taaaccatcaacagtagagtttcatagttcaggttcccagacagactctgatactctggtgagayttgcaagagttttttgggaagtactcttggcaacaacacttgtctggggtgagggaggcaggattgtttggacacaggaaaagctgaacagaggccatcgccaatcccatgagcatctctggagctggcatgtctctactgagttgtcctattgaggcaaggactccaggtatttgtactcctatagttaccagtcattggataactaatcattggataccagcttctttctgtagaggtacaagactcagctgccttggcagctggagagactggccccctgaccctgaaggacaatctggccatgcacctcagtatccaccacagagagaaaatcaggcaacgcatcaagaagatacattactaagagggttaagatattaatagagggtttccaggtaggctagagtggaaatgctcttgacagaagatagagcacgtacaacacaccagtctatggaaaagcatgtaggtgacctgctgccattgaatgtttcaatcttgttgtctttaaggggttctttatgtattatggattttaattgtttaatttttttttaccatgaagggaaaaatat

SEQ ID NO: 844047 - DNA, 492 bp, Homo sapiens
tcccatagattatccttctgatcaatatttcccacttagcattcttagtcgagcatagtctcagattgcataaaccaccctctaattgaaagttatacccttatgagagctacatttcttatagacctgacagcttagtattttgtgttaagattttttgttttcacttagtaatagaggctcgagtgtttttcatcagcttccaaagtacttacttttcaactggggactttcttatgagaagggacaaggactatctacttctttcgagttttttggagggtttgagtcacctgtgaactccagaaccaaaaataattttcaaaaatggaaaatattcagtttgttgtcacatcctttatttataggaataagttgccatcctaaaactgcaggtctgcraggtctctttaacctttccacttcaacgaaaacatatcctgagtagcagtttctgaaaacagtatctgtgcaatgactactgtagaaaaa

SEQ ID NO: 844048 - DNA, 636 bp, Homo sapiens
gaaacaaatttctattctcaatgttgagctttattaactgaatttgaaatagcattcacaacagttagatgctttctctctcacaaaatggatttccaaaagctttactctgattccaagagttggatggaagacagtttatatatacaagctggaagccaccacacccagtctatttcttaaaatttggacaatttattaaagtgatatgtgcccatggttaaaagctgtcactttccaagtctcattcctcagaggcaacttctagaaattcttgcagctttctttttctctagcagttactgctgcactatgtctaaagtatacacttggctgggggtggtggttcacacctataatcccaacactttgggagacaaaggtgaatcgcttgagcccaggagtttgagaccagcctgggcaggtcagtgagactgtctctacaaaaaaattttaaaaactagccaggcatggtgtcataggcctgtagttccagccttaggaggccaagataggaggattgcttgagcttaggagtttggcctggatattaaagcaagaccrccatctcttattaaaaaaaaagctacacactttatcgctattccttaatatatcaaatttagatgtcgtgtg

SEQ ID NO: 844049 - DNA, 485 bp, Homo sapiens
ttatattttttattttttatttttttatttttttttgagacatagtctcattctgttgcccaggctggagtgatgcaatctcagctcactgcaacctctgccaaccaggtttaagtgattctcttgcctcagcctcctgagtagctgggattacaggcacccactaccacacctggctaattttgtatttttagtagagacagggtttcactatgttggtcaggctagtctcagactcctgacctcaggtgatccacctgcctcagcctcccaaagtgttgggattacaggcgtgagccactgtgcccggccaggaacctttctttatccttgagccttgggagtttgattatttaatgtcttgaggtagtcttatttacgttaaatctkcttggtgttttataaccttcttctacttggatattgatatttctctaggtttgggaagttctctgttattatccctttgaataaactttctaccc

SEQ ID NO: 844050 - DNA, 602 bp, Homo sapiens
gcatgggccttacctgcaccccctgcttccagctyaggacctggcccagggggaatgttccctaaagcagtggtccccaacctttttggcaccaaggaccggtttcatggacaataagtttttcatggactgggggaagggggatggtgttgggataattcaagcacgttacatttattttatttatttgttttgagacaagagtctcgctgggtcacccaggctggagtgcagtggcacgatactggctcactgcaacctccacctctggggatcaagcaattctcgtgcctcagcctccggagtagcttacaggcatgcgacaccacatctggctaatttttgtatttttagtagagacaggatttcaccatgtcaaccaggctggtctcaaattcctgagctcgaactcctgagctcaagccatcctctccttggcctcccaaagtgctgggattacaggtgtgaatcaccatgccccacctgcattacatttattgtggactttatttctattattattacattgtaatatgaatacaactcaccatagagtagaatcagtgggacccctgagcttgtttttctgcaactaggcagtc

SEQ ID NO: 844051 - DNA, 654 bp, Homo sapiens
acataatattgaaaagactgcccttggccactcttagcagaagcagtgcactctcctaaacatctatgacatcatctcattttcttttcctcataacccttgatagcacatcatcatctgaaattatatttttaattgtttattgtctgcctgcttctctgtggtcctcacctctgctctcctccctcctgaatctaagctccatgaaagtggagtcgttggctttcctttctttgaagtatccctagcttttagcaggacatttgttaaatgtaaggtgaaagtgcaagtttattgaatgcctattttacgcaaggtactggtatacagatcttgcctcccttgatcctcactaacagtctctgaggaaggtcttattatttaaatttacaatgaggaaataaaggctcagagaggttaagtacttgcttaagctagtaaagggctaagccaggatttgaaacttgctttagctcatgaataagaccaggcccattccttaagaagctcacagtcaacaggcagatctccagctttagttcatgacaatttatyttcttctgatgactttggggccctgtaaagccctaaaagcctgctttcttcactgtcaaagacaaattcaattatggtcattatattgtgcttacaaag

SEQ ID NO: 844052 - DNA, 593 bp, Homo sapiens
gtagttcaatattagtctgttcctatcttctaaacttgcaaatgaacttgcatggcaataaatctctgcacactcaaagccatgatttcctcagcaggtggatgcagaatgctcggagacctataataatcagcctttggcaacaagcactttttcttctgactcattattgccgcgttttaagaggagaagggagcaactgctctcacggggctacagagacacggaaacacgctggggaggctgctctgtcaccaggaaagacaatggaatccatttaaaatgtcttattttcccttgctctgccaagcaaaagcatcagaaccctttggggaattcactttacaaggaaacaaaatgaggccccgcatctgcagcctggccctccccgccacctgcaccccttcctctgaggtccccggctctgcaggggccgagcgggcggcacccgctcctggtggtggcattgttgggacccgctcacaaaacacagttgttctctgcaatggctcatttccctttctgagactttttgtttrtttgtttgttttgagacagagtcttgctctattgcccaggctggagtgcaatgg

SEQ ID NO: 844053 - DNA, 529 bp, Homo sapiens
gagaaaacgcagttgacaaaaattcagtactcatttatgagaaaagttctcagcaaactatgaatagaactttctcaacttgatacagagcatctactaaaaacctacagctaacattatacttatacattgtacattattcttgaatgcttttcctctgaggtggagaacaaggcaaggatgcctgttctcaccacttacgttcaacatggtagaggaggggcctacacagagaaataagacaaaaggaaacatagtacataaagattagaaacaaagaagtaaaactgtatgtatttgcagatgacatgatcatgtaagtagaaaaccctcaggaatctttttaaaaatccactagaactattgaggtgagtttagcaagattgcaggaaaaacgccagggtgttgggcaaaattttaaggtaacccccagcgacgtttgcctgtgtacartgtcctctccttgcgtgtgggtggaacttgtgactatgataggataactgtgattatgttacattatttggcaaag

SEQ ID NO: 844054 - DNA, 586 bp, Homo sapiens
agggaccttgatactaagaaagtagtctgtgaatatggccagatgtytgtcactagtttgggagaaatctcttggtctggacattttctgtgaatgtcagagtagatataattatccggggggacttgccatggactctggtcatctggtaaagacatgtatatttctgtgctaataaagtagttttaattttaaaattcacctcaagtatgagattcttccctctgtacacatgagctttgtttagggctttagcacaaacttagctctgctgcatgcctcaaaagaggtgcagctcagggtaccagtttgctaaaggggagccacatagtcctgttaaccttgcagtgaaacttaagagttgattagggtggcaggaagccagaagcacactgcatggtaatgaagccccaaacaactcgtttttctttctactgatgagaaaaaggaattaagcataaattgcagtaggagacatttggtctggaatctaggaataacttgctgatgggacattttagagattaggatccccagacaagtagtgatgttgctgtgatggggaaggatactgctttctggccct

SEQ ID NO: 844055 - DNA, 459 bp, Homo sapiens
tctgtttacatttttttttctgcatatgtaaacaattcctgctcattgtgggaaatttgtgaaatagagtaaaatacaaaaaggaaaaaatataattcagaaaagcacttttagtgtattatcttccttkgtgtgtatatgtgtgtatccttttttcacctaatattatataattatggtttgggagcagtggctcacacctgtaatgccaacaatttgggaggccgaggtgggaggctcacttgagcctgggagtttgagaccagcatgggtgacatagtgagaccctgtctctacaaaaaataaaaaagtagccaggcgtgctggtgcacacctctagtcccacctacctgggaggctgaagtgggaggatcacttgagcccgggaggtgaaggctgcagtgagccttgatcatgccactgcactccagcctgggtgacagagacagactctgtctc

SEQ ID NO: 844056 - DNA, 553 bp, Homo sapiens
attataggtgtgagtcaccatgcctggtccatcttaaccatttttaagtaagtgtacacttcagtagtgttgggtaggttcatattgtgyaacaccatcactaccaccatcttcagaacttttaaatcttttttctttctttttttttttttagagatggtgtctcgctctgttgcctaggcctgagtacacaggtgcaatcatagctcactccatccttgaactcctgaacttcagcagtccacctgcctcagcctcctgagtagctggggctacaggtgcataccgtggtacctgactaatttttttttttgtaaaaatggggttcttcttttgttgcccaggctggtcttgaactcttggcttcaagtaatcctcctgccctggcctcccaaagtaacgggattacaggtgtgagcctgaattttttaattttttaaaatttacttttccacggcagagtattgttctgttgcctagactgaagtgcagtggcacgatcactgcagccccaacctcccaggctcaaatggtcctcccatctcatcctccc

SEQ ID NO: 844057 - DNA, 553 bp, Homo sapiens
attataggtgtgagtcaccatgcctggtccatcttaaccatttttaagtaagtgtacacttcagtagtgttgggtaggttcatattgtgtaacaccatcactaccaccatcttcagaacttttaaatcttttttctttctttttttttttttagagatggtgtctcgctctgttgcctaggcctgagtacacaggtgcaatcatagctcactccatccttgaactcctgaacttcagcagtccacctgcctcagcctcctgagtagctggggctacaggtgcataccgtggtacctgactaatttttttttttgtaaaaatggggttcttcttttgttgcccaggctggtcttgaactcttggcttcaagtaatcctcctgccctggcctcccaaagtaacgggattacaggtgtgagcctgaattttttaattttttaaaatttacttttccacggcagagtattgttctgttgcctagactgaagtgcagtggcacgatcactgcagccccaacctcccagkctcaaatggtcctcccatctcatcctccc

SEQ ID NO: 844058 - DNA, 588 bp, Homo sapiens
caccctgctctccagtcccatgcggcagttgtgcagtcatttaacaaattaggcctatatcctaggtgctgtgctgggtaccaggtacctacaaggaagtcagaagacatcaattaaaaaaaaaaaagagtcctgctgagttgggtgctctagtagttcaaatgtctttgcttcccattcaaggctgcctcttctgtctgttttgtggttgttaaaagtggaagcttggggctgggcacggtggcacacacctgtaatcccagtgctttgggaggccgaggcaggcggatcacttgagtccaagagtttgagaccagcctggccaacatggtgaaaccctgtctgtactaaaaatacaaaaattagctggatgtggtggcatacacctgtaatcccagctactcaggaggctgaggcaggagaatcacttgaacccaggaggtggaggttgcagtgagccaagatcgtaccactgcactacagcctgggtgacagagtgaaagtctctctcaaaaagaaaaaaaaaaaaaacggaagcttgggagtcagcttcccaagtttggatcckagctctgccactttagaagc

SEQ ID NO: 844059 - DNA, 599 bp, Homo sapiens
gattgtatccaattcatgggatcctgggaagttcattaactgccaggaggattcctagttctcagctctaggcagcagcatcttggaaggcttctctgaaggtggactccgaaggrtctaaggctcagatgttcccctttcagcttctgccctccattccctgcactcctaggtcttagatggtcatgcttgtctctgtatccaaaacctacttttggcacatttttatttcctcccaagctgtaagaacagcttgttcacttgggaaggtcatacttcaaagtggaactctgccatttcagaggggctttgaagatacacagtatacctgggggagtgaaggagttgggtgtcactccccaggataaggcaaacaaaaacaagaacagacacatatcactatgacttaggtatggattaaagattaactgcaccttgcacagaggtggctctcaatacgttttctgcattccatcttgagcatcattttttggctctattgtattctacacttccttcccagaagtttacagtgtttcctaattcactgataagcagttaaaaaattgccccacatttggtattacaaaagtttatgc

SEQ ID NO: 844060 - DNA, 599 bp, Homo sapiens
gattgtatccaattcatgggatcctgggaagttcattaactgccaggaggattcctagttctcagctctaggcagcagcatcttggaaggcttctctgaaggtggactccgaaggatctaaggctcagatgttcccctttcagcttctgccctccattccctgcactcctaggtcttagatggtcatgcttgtctctgtatccaaaacctacttttggcacatttttatttcctcccaagctgtaagaacagcttgttcacttgggaaggtcatacttcaaagtggaactctgccatttcagaggggctttgaagatacacagtatacctgggggagtgaaggagttgggtgtcactccccaggataaggcaaacaaaaacaagaacagacacatatcactatgacttaggtatggattaaagattaactgcaccttgcacagaggtggctctcaatacgttttctgcattccatcttgagcatcattttttggctctattgtattctacacttccttcccagaagttyacagtgtttcctaattcactgataagcagttaaaaaattgccccacatttggtattacaaaagtttatgc

SEQ ID NO: 844061 - DNA, 621 bp, Homo sapiens
ttgtggtttgatttacatttctctgatgattagtgatattgtgcatctttttatgtttgttggctgcttgtatgtcttcttttgagaagtgtccgttcatgtcttttgcctactttttaatggagttatttggtttttgcttgttgaattaaattccttatagatgctggataccagattttcatcagatgcatagtttgtgaatattttctcccattctataggttgtttctttactctgttggtagtttcttttgttggaagaagatttttagtttaatcaggtcccgcttgtcaattttttgttttgttgcaattgcttttgatgacttagtcataaattatttcccaaggccaatgcccagaatggcgtttcctaggttttcttttaggattcttaaaatttgaggtcttacatttaaatctttaatctgtcttgagttaatttttgtatatggtgaaaggtaggggcccagttttattcttctgcatatagctagtcagctgtcccagtaycatttattgaatagggagtcctttccccatgcttatttttgttgacttagaacaggtatttatgaagagaatttaattgaagagctccttgtacctcttactcta

SEQ ID NO: 844062 - DNA, 587 bp, Homo sapiens
atactagaagagaacatagtgcaaatgctctgtgacattgggaggggcaaggagtgtttaaataagacctcaaaagcacaggcaacaaaaacaaaaagaaacaaaatgaactacatcaaactgaaargtttttttatagcaaaggaaacaattaacaaaatgaaaagataatgttcaaattgtgagaaaatatttccaagctatacagctgacaaggggttaatacctagaatatataaagaatttaaacaactcaccataaaccaaataacctgattaaaaatggtcaaaatactttaatagtcatgtcacaaaaatggacatataaatggccaactggtatataaaaatgtttaatatcactaattatcaaggaaacactaatcaaaaccacgttgagatactatctcacgccagctggaataactgttaacaaaaaaaagaagaaaaaaaagaaaaaaagaaaagtcttggtgagtttgttgagaaaagtgaacacactgttggcatgattataaattagtacagctactatggaaaacagcatgtagatttctcaaaaaaatacaaatagtactaccatatga

SEQ ID NO: 844063 - DNA, 635 bp, Homo sapiens
ttttttagtcctcattacttccaatgccttggtgccagggcagggtatatattcactacaacaacaggtcaaaattcttcgagaarattttgtttactatgtggcacataggctttcagtgtagggtcatctgttgtgtctcttgcaatatgaatacttgtattaagatggcctaatcttttgtctcagttgtgtctcagttttctctcaactggaacttcagttaacatgtgtttttatttaattctagcaggatagggttttacttttcctatcataagtgaggaaagtggaaaatggttttaaagtcttggaattcacagaaagaagtcctgtgaacacatgtgaaattaagccatttcttgttgaaggtagggagaatcataacagggagggagaggagacaatattccttttaaatcctatatggcaaactttcattttccatgactactatgagtcagaaaactgtagtttaagaagaaatctttccatcccattcccctgcaagcccttttattaggactttaatagctaggaaagatgattaaaataacttctccaagggagagaagtaaatgaacagagacatagttgaagactaatagggattggtctatactatatctaagatt

SEQ ID NO: 844064 - DNA, 569 bp, Homo sapiens
gtgcattttgtagcactcataatatatacattkgttagctcatcaataaagtgaaacctacaaaacagtcttccagaagcagacttaaaaggcaatctatctatgtgtatgattttataaaagtggataagtacaagccacagcataaaagctactttaatccctgatatttcccttctgagttcatctaaaattgatgtatttccaataatacaattgcagtgtattattgatatgtaattgttgagttagacatggttttggaagcagaggcctagaaacttctagtgctgatcatttcagatctgagtagcggtacagcattcatagacctttgtggaacctcctaacatttcttagcacatgacaactagaattagggttcagcaaaactttctgtaaaagtgtattttaggcattcccattttctttttttttcagtgagttattttccctttttgcccctaaaatagcagtcattttgcaattcatcagcactccaaatctttacttttaatattttatattggatactcaaaaaggtcttttgtcaacacgtaacctaatgg

SEQ ID NO: 844065 - DNA, 424 bp, Homo sapiens
ttcctggttctggaatggagaagaggctggtaatrgtttcagcactaagaatgataaacctgaaattggtgcccaggtctgtgctgaggagttggaacctgcggctggggccgattgcaaacctaggtcaggggctgaggaggaggaggaagagaatgttattgggaactggttttgggaaggagatgatactagttttgaccctaatcctaaacctgtgagcaggatagttaagcctcagcctgtgtatgaaattaatgaaaaaaataggcccaaggactggtctgaggtaactatctggcccaatgcccctgctgtaactccagctgtgttaggatttagatcccaggcaccatctgaggcaagccctccttcatatattgttctggcctccgctgaagaaaatgcctgttctttgcctgtg

SEQ ID NO: 844066 - DNA, 493 bp, Homo sapiens
tatttaagttttaagttcagggatacatgtgcagtttgttatataggtaaacttgtgtcatgcaggtttgttgtacagattatttcatcacccaggtattaagcctagaaccccttagttatttttcctgwctgtctacgtcctctcaccctccacccttcaataagccccagtgcctgttgtttccttctgtgtccatgtgttctcatcatttatctcccatttgtaagtgagaacatgtggtatttggttctctcttcctgcattagtttgctaaggataacgccctccagctccatccatgttcctgcaaaggacatgatcttgttcctttttatggctgcatggtattacatggtgtatatgtacattttatttatccagtctatcgttgacgggcatttaggttgattccatgtcattgttactgtgaatagtgctgcaataaacacacgtgtgtttctttatgatagaacaatttttattactttgg

SEQ ID NO: 844067 - DNA, 602 bp, Homo sapiens
gaccagaatcccaagtaaagaacactgaggtgagtgtaccagaaacactggaatcccaagtaaagaagagtgagtcaggtgtactaaaaggacaggaagcccaagaaaagaaggagagttttgaggataaaggaaataatgataaagaaaaggagagagatgcagagaaagatccaaataaaaaagaaaaaggtgacaaaaacacaaaaggtgacaaaggaaaggacaaagttaaaggaaagagagaatcagaaatcaatggtgaaaaatcaaaaggctcgaaaagggcgaaggcaaatacaggaaggaagtacaacaaaaaagtggaagagtaaggataaattttttaaaggcccataagacaagtgattattatgattcccatactccagatacaaaccatatcccagccattgcctaaacagattacaattataaaatccctttcatcttcatatcacagtttctgctcttcagaagtttcaccctttttaatctctcagccacaaacctcagtttccaaatatttgtttyataagttaagacgtatatgattccgtcaagaaagactggatactttctgaagtaaaacattttaatta

SEQ ID NO: 844068 - DNA, 495 bp, Homo sapiens
acttttagatattgtagtttgttgaccatttaaaaaggacacagatatttcccctctttgactatttaaaaatacctgtgcacatagctcctctctagcctccccttgtcactcattttctgctgtttcttctaaatctcaggctattcagtcaaaccattagatactttctctgaatagcatagagccgtaactctaaccatctctactttcaggcaaaatggactatcaagttcatggcatatttctgtcgattatgttactttcctataaccactgtcttttacgattaattctcataagaaccgttgtgtttttctattcacatctgaatggagactgcaggttgtgcagaaccatatataaatcaggcccagtgttccagatcctcagtcaacaggtcacaaagaactctccttgaggttttaggcgttggttgcaagaaaggaggcaacgtaactgragtaaggtgtatgagaatatgagtcacctgct

SEQ ID NO: 844069 - DNA, 552 bp, Homo sapiens
ttgcatttgacctaagcctcaactttaaaaatagatttaacagaaattatacagaaattcaaaaattgttttgctaggaagcaaacaagttatgcaatacaatttaaaaaaagaatgttccctctgyaagaaagagatcacattagtgatgaaatactatatgtcagtctgagcttaagcccaaattcaagaacatactgtacacaaaacttctgaaatctatttatctgatgtgtgactgatagctattgatgcagcttggagaccttagggcgatactgactccccatcatttgtcattataaagtattctttgaatggaaagttgtttgcctttcatggtcaggggaaaatagtcctggtggctgggtgctagttagaggataagaacgtgggctaagaaggcaaggagctggtttcaaatcctagtttggctgcttagttgattacatatatctacaaattataactgcattagtttactcatctgtaaaacgtgacatgactaataatgatacgtgctccacaggaccaagctaaggtgtgactcat

SEQ ID NO: 844070 - DNA, 476 bp, Homo sapiens
ccccattaaggatcatgtacaatgccaggggctcactaaacctctcamcagtcctgtgaggtgagtcccatgataatgcgaatttccaggaggatgctggtgatctgagaggttaagcaatttgaccaaggaaatgggatccaagcctaagcctgtctgatgccagagtgtatgctgcgagcccatggctcttaatcctggtgtgcattagaagcaccagtgaaactttaaaagaaaacaactgatccttgggctttaccaccatcaattcctgtttattctgttggaaaaggtccctagtgcttccagcccctctggacagcaagaaagaacagccaggagggagagacacctgggctctgttcccttcaatgaccagcctcaaaaaaccaaggatcatggaatatcagcaataaaagggctaaagagaaatggagagagacagaaatggagaagaaagcattgggcatgatctc

SEQ ID NO: 844071 - DNA, 557 bp, Homo sapiens
attccctgagtgctgctggaaacagccacatgttatcatgtcatccatttttcttagcactttccacaggtgccrttgaataattatcatgaccatttgttcaccagaagcctcccctgcttgtctttgccttccaagagggaggaagctttgtctaccttattcttgctaagatgctaagctcctggcatctagcacagttcccaggcccaaggaaatcctcggtaagcatccgatgaattttcaagtcttttcctgaatgacactcttatgtcctttgagaggcaggaaacccatcttttttccctcatgactcggcatgcagtaggtgctcagtagtggacagcactggctgccaagggtgttcaggtccagattcagcagttcaagccctgggagttattggtgtacatgtaaaatgctggtgaaggccataaccatggcaaaaatacggtcctgtccccccgataggactcccgaaattaataaaacctaaatatagccttctccttgcagttgctcttctggtgagtatagaataacagggatttaagtct

SEQ ID NO: 844072 - DNA, 616 bp, Homo sapiens
taaagacttattttaaatgggagagtctcctccaacacacacctccttccttttgtgcatacctccagctgcctgtgtttctgcagaacaatccagaactacatctcagatgrtggtgcagagctgggggtggcttggctcagctctttgtctcaaggctatgtctgtgctattcaactccccatatctgcaattgccaggagctatagtaagaggcagctgtagttggatgggtggttcttcctttctccttttatgagtttgagaacccactctcagcctatggcttcaagcagttggctcctccaaagaaatatctcatggagcatggacctttccaggacctgctgtttgcattgagacctgaagatagcaaggctggagcttccagcttcctcactgtgtgtgcgcgcacgtgtgtgtgattccgttcctttttcctggacatgtttattctatatttaatcccaactttgtcttttcaatttgtcacttttaatatataacctttgttactatttgttaaagaggagtggaaagtgatgaagctttcactcaccacaccacactgacctggaaatcttcattcctgcttttgaaagatcttcctggctgc

SEQ ID NO: 844073 - DNA, 568 bp, Homo sapiens
aaaggaccagctgtgtaaggcayagggcatctgagacagggtctggactgacagggaaaaagtctcccatccacagatccagaaagaagaaacggaagaggccaaaaaacctggaaaggctcctgagagctctgcaggcagcactgtcacctgagctgcccaagtgaccttgcacagcctcagttgttcctcctccaaagccaagataccagactcaagcctggtacctcctcccctcccaactcctgagaaagtaacactgtgtccccatatttgcagagcattgtcaacgctaaagctgttcgaaagcatgtcttcaaagttgtcaccattctcaactaattagtcaaaggcttccatctgcctagtggctcaccacactttttacattaatttttgtatgtaaatacagtgattctggggagaaatgatgtcaaggagagtgataggtacctcactcaagccagaataggatgcatctttaacatgcaacctgcaaagtccccagaaagatcatgttgaaataagcttttgtatttgggtttctccaaagcttaaaaataacttt

SEQ ID NO: 844074 - DNA, 393 bp, Homo sapiens
ttcctgcaattcttttatctaatctacagacttcattcagatttttctgacagtcccaggaatgtcctttatggcagaggtaattccaggccattcattgcattcaggtgctctgtttcttcagcctttttaaatctggaacaattctccgatccgtctttatcttccatgacaattacagttttgaatagtacaggtcagttattttgtagaatgtctccatttggatttgtacaatgttttctcatgatttgattcaagttatatatgattaaatatttttgaattagcagctattgtaaaaattatgamagtctatgtaaaaattggaatttctagcttttctaaacaaatcagaaggcccagcctattgggcccaaaaggcagcccaca

SEQ ID NO: 844075 - DNA, 608 bp, Homo sapiens
acagagtgagactccatcctcccaggttcaagtgattctcatgcctcagcctcccgaatagctgggattacaggtgcccaccaccgtgcctggctaatttttgtattttcagtagagacaggttttgcctcttggccaggctggtcacagactcctggcctcaggtgatccacccaccttggcctcccaaagttctgggattacagccatgagctgctgtgcctggcctgcaaatttcatttttctttttttttttgttttgagacagagtctcactcttgtcgcccaggctggagtgcagtggcgccgtcttggctcactgcaatctccacctcgcaggtttaagcgattctcctgcctcagcctcctgagtagctgggattacaggcatgcaccaccacacccagataatttttgtatttttagtaaagaaagggtttcaccatgttggcgaggctggtctggaactcttgacctcaggtgatccaccygcctcggcctcccaaagtgctgggattacaggcgtgagccactgcgccctgctgcacatttctttagtgtctgtttcaatagaagacaggctggatgctcatatctgcttctgcatt

SEQ ID NO: 844076 - DNA, 693 bp, Homo sapiens
aagttatgttccacgtcctggagggaggagtatctctaacatcaattatttacaatttttctgtatgggagatgtgtcacttctactgtatttattattcaatcatttatttgtcattatagactcaaggatatttattttctactttgatttgtttatttatttatttttgtagagacaaagtcttgttatgttgcccaggctggttttgaacttctgggctcaagcgatcctcccgccttgacctctcaaagtgttgagattacaggtgtgagccactgtactcggcctattttctactttgggttataatccaatactatcttatttattttattattcaaattgtcacagcttcagccattgggagctcttccagttggtgtccctttgacatgttatcattattttatcttttgagcacttccttactttctacctatacaagaggttccaagttcacctcaaatattccctaccccaggccaagaatcatccatatttccaaaaagtcctggtttccatttctggggaaatggtatgagaaactaacatctgggtcatgggtgcaacraagtgtttttaacatgaaaactttactccggcgacttctgtttctggcaatatggaggattagacatgctgagtgacccttcccatcaaaacaactcacatgctggataaaatattgca

SEQ ID NO: 844077 - DNA, 628 bp, Homo sapiens
aatggatgattactaagaaaagatagcaagggtggagtgaaattgcagtggttaatgtgtagcagttgaaacctaaagttaaaatctgagtgcagttaagtcaaagaacttagaacacccttgctctgactatcaagaaaaggtggtaattggttttaatgttcaaagaaacactattcaccttctatgtgttatgcttattgctctggaaatgtttctgaaatgtcagatgcaaagagggtttatttcattttatttttatttatatattttttgagataaggtcttgttccgtgacccagactggagtgcagtggcatgatcatggtacactgcagcctcgacttcccaggctcaagtgatcctcccacctcagccttccgggcagctgggactataggtgcatgccaccatgcccagctaacttttttgtgttttttgtagagacagggttttaccgtgttgtccaggctggtctcatactccagggctcaagccatcttccctgcttggcctcctaaagtgtgggaattacaggtgtgagccactgtgcctagcccraagaggttctattttaaaggaaggatatctactcatacttggaagattgtaagccaatagaaaaata

SEQ ID NO: 844078 - DNA, 603 bp, Homo sapiens
ggagtggttagagaacgtgggatgaggcctaatgataattgcaatcacctgacactggcgaggaccctggcacctgcatctcagccccggtgagcagcagtgtggttctgaaaacrcctgtaaaatgtgcatgtgtgcatatgcgtgcacacacacaggcagcaataagacctagtgaggctgttgatttcctttctgaacctcttttcctgcaactcattttaattctatgaagcaaaaactaaaagggaaatcagaaacttcccaagaacaaaggaacagcctacaaaggagcagggcttaatcttcctttgatgcagaaaacacctattgctcctgggtttatacagatgtcactttctaggcagaaccagttcagattggcgacactgtcgtagcagtcgcttcctgtgacctcccttgagactttgcatccatttttgtgaagtgctgatctcccaaggttttaccttttaaaatcacactaagggcaggatgccggcataaacctcgcaaattcccagaagaggcagaaaacacagcagcccaagaagcaggagcccagagttctagttctggctattgctaactctgtataacttc

SEQ ID NO: 844079 - DNA, 616 bp, Homo sapiens
tggcaggatgataagttgggaacggaaaaacatgccaactttggacaaaatatgattgtgtattttcagttgcratccaaagtcacaatttggactatgaagctggttctatatctttgccaagttgggcaaggaatcttggcggaaagatgctttttaaagacatggagtgttggactagatgtcaagacatttgtatttgggcttctttggtgccactgtttgagaaagcaaaggcaccctggctttgctatttctttccattttaatgtagaatgatgcctgagtcctcttacagaatgttgtatggctaaatcagaccttcctttagaaatatttagaatccactctaagttggctatctaaaataattattaattaataataccacttctactattattattgctgctgtgttattaccgttttagctgtgattattgtaccaccatctctgtttattataaaatgagatgctcttctcactcgctgactggtatgttttccagacagaccaaaacagtcccagagaagttaaaagtgaaaataatttatgtcacactgctgaggaaactgaatacccagtggtcaagaaataaccatgtcaaaacttcta

SEQ ID NO: 844080 - DNA, 619 bp, Homo sapiens
aggccatcactgaacttgaacttgacatcactgaaccagcccaggcatctgagtctaggtgtgagagtaacctcattcctctatcttccctctcttcttgctctgggtyctgaagatcctcaatgaataatggcaagttatactagtcagaggagagaaaattttcaaatggggcaggttgagaataaatctggctgagcgaagaaaattaattagtaatagtaaatataatttggcagattctgaagtagcttactgtattagtccattttcatactgctatgaagaaataactgagatggggtaatttataaagaaaaagaggtttaatggactcagttccacatgtctggggaggcctcacaatcatggcaaaaggtgaaggaggagcaaaggcacatcttacatgggggcagcaagaaaacatgtgcaggggaactgccctttataaaaccatcagatctcatgagacttattcactatcacgagaacagcacaggaaaacccgcccccatgactcagttacctcccactgggtccctcccacgaaacatgcaaaacatggggattatgggagttacaattcaagatgagatttgggtgagaacacagccaaacc

SEQ ID NO: 844081 - DNA, 619 bp, Homo sapiens
aggccatcactgaacttgaacttgacatcactgaaccagcccaggcatctgagtctaggtgtgagagtaacctcattcctctatcttccctctcttcttgctctgggttctgaagatcctcaatgaataatggcaagttatactagtcagaggagagaaaattttcaaatggggcaggttgagaataaatctggctgagcgaagaaaattaattagtaatagtaaatataatttggcagattctgaagtagcttactgtattagtccattttcatactgctatgaagaaataactgagatggggtaatttataaagaaaaagaggtttaatggactcagttccacatgtctggggaggcctcacaatcatggcaaaaggtgaaggaggagcaaaggcacatcttacatgggggcagcaagaaaacatgtgcaggggaactgccctttataaaaccatcagatctcatgagacttattcactatcacgagaacagcacaggaaaacccgcccccatgactcagttacctcccactgggtccctcccacgaaacatgcaaaacatggggattatgggagttacaattcragatgagatttgggtgagaacacagccaaacc

SEQ ID NO: 844082 - DNA, 516 bp, Homo sapiens
atgtttgcagaggctgctgggatggggagggaacttagaggctcctcgatagtagcacacgtccttgctgcaaccctaaataattgcttttctcccgaggctactgctygctctgcctggggtaggagccaggcttgggacttgtcttggtggcccagggctatttcattcaagttggtggactctgattttaattgactcttgtgtgccttgagaccattttccaaggaaaatggatcattaagcctgagtttgtcctcagagaagttccaaatggtctatggctcctgggtacaagcaaggatcatggaaagtcgttttgtgaagtctcagtgagatgtgcttgttctggacactgagttctggtcccagggattccagttctctccagctcatggtggcaaagagcctgtctgatggcactggtgttgaataatctccaccaaacacgaggggcaaatttcaaggatggcttttactcagcaggtttcttggacaggctggcattgctccttc

SEQ ID NO: 844083 - DNA, 623 bp, Homo sapiens
tggatggatagagaagttgagtcacaaagaggttacatgaacttgctgaggccacgcagcgggtacatggccagcctgaattttaaccctgtggctctggaaacagcacgcgaaacctccacactctactayctctgacttcttacaaataaatgctcagttggaagttgtagcccagatgagggtcaatgtgacttcctaaaaccataccctagagttggacagaattaaacacttggtgaagttggtcctggtctggggttggcccccagcctccctgtcgtgtgctggccctggagtggcccccgtgaggacgagggacgctgcacacaggagtaggggactcgtggcttcctgtgggcaggctgacccaccgcagggtaaaagcaatgtgtgagccaaccacacccactttggttttctaaaacttgcagccagatattcctctccctggggtgggatggaaagcatcggacagagggcaggagtctcatcctctctgagtccccttcatctggaaggaaatatcagaaatggggaagaacggtttctcccgaaagctttgaaaagaacaaatgaaaaatataaagaaaatgttttgtgcctttgaaagtagacgccca

SEQ ID NO: 844084 - DNA, 703 bp, Homo sapiens
cactgtgccattttccctttcttgggatcctaacagacaagtagacatgagcatggagaaatacaaagggtcaaagatttgcccaaaatatttatcagggggaaaatgaggagagcaaggatcacctggtggccatcaagcagaccatcaggaggcaaagcaccttatctgaagaactcagaatggtactttcctattatctaaagccacatctggtaccaggcttctttccctagaatttctatacatctccggaatgcacgcatgttggaacccattgtgcaacctttgctgtcatcaaggtgccaaaatgtctacaaatgtaatcatttactatgacctacaaaactaatgtggtcaaaattacccttcagttccctgcaagtgagctcaggcctctcttgccgaagcatcccgctgcgctctgctgtggagttctttccatctaataaaacttttcaaacctatactgttgttgataaattcttttaccacccgggagccaaccattcgtggctgcggctcccggggctctgacacccagcctggcacacaacatttcacttagcccctcgaggcccttagcctgcagcagacatctactttgyaccatgcactatgccaggagttttacacgtggccgctcaatcaaacttcattttacaaactgataaactgaggctcagagcggctaatgacttgg

SEQ ID NO: 844085 - DNA, 541 bp, Homo sapiens
actggttttttttttttcatgaaaatagacagttgattacaagattygtatgaaaatgcaaagggccaaaaatggcccataccatcctaaggaaaaacaaggtgggaagacctttttcagcagacatcaagacttaatggccagacacagtggctcacacctgtaattccagcactttaggaggccgaggcaggctgattgtttgagcacaggagttcaagaccagcctgggcaacatgatgaaaccctgtctttgcaaaaaatacaaaaaattagccaggcacagtgacacatgctggtagttccagctatgctggaggctgaggtgagaggatcacttgagcctgggaggcagaggttgcagtgagctaagattgggccactgcactccagcctgggtaacagattgagatcctgtctcagaaaacaaaaaacaaaaaaacaaaaaaaaaaacaaaaaaagaagacttattaaaaattaagaagatatggtgatagagaaagtgtggtgctgcttccaggaacaaatagttcagtgata

SEQ ID NO: 844086 - DNA, 547 bp, Homo sapiens
cttgaggtcaggagtttgcgaccagcctgaccaacatggggaaaccccatctttactgaaaatacaaaattagccaggggaggtggcgcacacctgtaatcccagctatttgggaggctgaggcaggagaatcgtttgatcctgggaggcggaggttgcagtgagccgatatcaagccattgcgctccagcctgggtgacaagagtgaagctccatctcaaaacaaacaaacaaaaaaacaaacaaaaaaaccctgcatgcagaccccctgttggtaagtgctatggagaaaaacaaagtcatataaaggagtgctgggtcagagtagctacctcttttacatgggcagtcaggaaaggtttagctaatcctaaggtggcattcacatgagcagagatatgaaggtggtgagggagagagcttggggaaaaaaaaaagaagaagagcatggcaggcagtgggaacagcaagtgaagagaccctcagcaaagttcggggyggcaccctctgcctctagggaagagtcaggaggccaatgggctggggc

SEQ ID NO: 844087 - DNA, 624 bp, Homo sapiens
catttgtttattagggagaattttataatttagagtttttttcaaataatatcaacagtaaagtctaaattacttattgcctttaattctaggaatgtcgcattaagtgactaatgaaacggaaataactactgcccatgtaacttcataaatgcccttcatagacatttatgtcagagcaaagatggcaaaatacttgataatgacattatctccccctcacaacctttattttaatgctgtcaatcaaaactgagccagttaacatttctagagaataatattttatcaaatagataagttatttgtaatcatgataattcttggttggggcctctgtgataggctgaataatgtccccccacaaagatgtctacatctaatccccagatgctgtaaagatgttaatttccttggaaaaagagaatttgcagttgtgattaagttaaggatcttgagatggaaaagttattctgcattttccaggtagatcgagtgtaatcacaagagtgctgatasatgtgaggtagcagaatcaaaggcagagaagggatgtgatgacagaagcaaaagtgggaatggcctgctttgaagaagactggggccatgagccaaggaattcag

SEQ ID NO: 844088 - DNA, 551 bp, Homo sapiens
caaggtatgtttcctggtattctttggtactagttctgcttgctagagcaattcagaatcaggtgtatcccatcgcaagcatcatgtcaatatttgaagacagctgtaatgttytgaagagggaaaccttctctcctcccagttactcactgctagaaccttccaccaaagaacatgccttctgtacccttctccacgttgggcaacaatttttactttgttggtttgttttctaaatatagaaccattcccaggctgagtagaacattgaacccaacattatgttctactgaacattttaactgaacatgagactgacatatttttttctttcttttcttttttctttcttttttttttttttttttttttttgagtctcactctgtcacccaggctggattgcagtgatgtgatctcggctcactgcaacctccacctcttgggttcaagcaattctcctgcctcagcctcccatgtagctagctgtgattacatgtgtgctccaccatgcccggttaattttttctgtttttagtagagacggagttt

SEQ ID NO: 844089 - DNA, 604 bp, Homo sapiens
gaatagctcagttggttaaatttatcatcagttagttaatactgtagagaatttaatgaactgggagataagaaaacatttattacgtatttaaatcccatttggttttcctaacttaatttttttcccagggtgtctcacttcagagatgactttcctaactttaatatctttttacaataactttgttatgcctttaagaaaggactaaaatatttgtaaaattagttcaataggaatatttccaggtcaaatggatccaatttcctcttactcctgaaaaaataaagacaaataaaattatttttattttacaatggataaatcttcttacacaatagattgttcctttttttattttacaatagataaatgttcctacacaatagattctgatctggtatttagtgatgtcaaatgtataatcaataagagaagtaatatcatcatcatgttttggtaatatcatccaccaccttatcagctgaatacaaagtagtgatttttcttctccctcagataccrtcggaacagttctcggactcacaggcttgttacctctttactccaataagaagggggaaaaaagcaaacctcacttttc

SEQ ID NO: 844090 - DNA, 735 bp, Homo sapiens
agtaattgtggttttggaccatgaattttaaatcattataactaggctcaaatacatctttattaatcaaaatcagaaccattataatcaacacatttttgccaatgataaataagtttgtttattctggtagtataaaaatctgtagtggaaagcattttctgcatcctgctggttgtggaagtgttttccctgcataaagttgttgagatgtttgaagaacaggtagtcggttggcaagaggtcaggtgaatatgtcggatgaggcaaaacttcgtagcccaattcattcaacttttgaagcactggttgtttgatgtgcggttgggcattatcatgagaatttggccttttctgttgaccaatgtcggctgcaggcattgcagttttcggtgcatctaattgatttactgagcatacttcttagatgtgatggttttgctgggattccgaaagctgtagtggatcagactggcagcaggccaccaaacagtgcccatgatcttcttttggtgcaagaagctttggagtttctttttggtccaatcactgagctggttttctccagttgtcatatacaatccactttttatcgcatgtcacaatccgatcaagaaatagttcattgttgttgcatagaataagagaagatgatacctcaaaacgatgattttttttattttcactcagctcatgaggcacccacttatygagctttttcacctttccaatttg

SEQ ID NO: 844091 - DNA, 635 bp, Homo sapiens
tgcaacctactctggagcaggttctcttataattaattactgggtctcatgctcagccttttgtactctgtagctgatggaaatgagagcctctatgtgatgtcaaggaaactcttgggctttaccattttaccttatgttggtgattaatcaccttcatctttccactgtctttttccaatatgtcatgtgtctcatcagtaactatctgatcctatcattcttataattattattttccccaagtatctaaaaatcttaatatattacacctgccagtgaattacatttcataagtatctcatccccattcatcactggtataagttttactcatactgcaaacatgtgccaggggctgtgagtgcttcatctacctccaatgatggtgtccttattaccatacgacccacagcgaatctagctctaaaatcacatttatggggtttgcttcctatggacattcccagaaccaactctcttatgttggattccccagaaaacagactccaggactctgggatttaggtgcagatttatttacagkgcatttactagagaccaacacaagtaagggatgagggaggcaagattgggcagaagataaaattgaactgcaatgaattgcaccagag

SEQ ID NO: 844092 - DNA, 539 bp, Homo sapiens
agggatgaagccatgcagagatctggggcagccagagagcagagctggagtggaggcctggaggcgggagcgggcccagtgtgttgagacagcccaggcagtatggcagggagtgaatgagggaagggtgggaggtgagaccagggaggtggcggagggccagagtctcagcagacgagatgggctgtttccctgcccctttcccttcccctcacacacaggctgtgatggatgtggggtcctcgtcccctgccgcccagaggcccccacagtccttcagcctggcctctcccctcctgcctgttccagcggagatcctgcaggccaatgacaacctcacccaggtgatcaacctgtataagcagctggtgcggggtgaggaggtcaacggtgatgccacagccggctccatccctggtgaggaggtggcaggagagctgggagggcacccatcakgctggaggggcacagagagtgcagggtggtgtgctggtctcagagcggctggaatgactgccagggtgaccctggccccttaa

SEQ ID NO: 844093 - DNA, 536 bp, Homo sapiens
ttaagcaatctatgaaaacactattagaagtaatacatgagttcagcaagtttgcagaccacaaaatcaatagtttataaaaatcgcatttttatacattggcaatgaacaatctgaaaggaaattaagaaaamaatctcatttacaaaagcattgaaaaggattaaatacttaagaataaatttaaccaaagagatgcaagacttatacagtacactgaaaactacttaacactcatgaaggaaattaaagaagacctaaataaatggaaagacattacatattcatgttgggacacttaatgatgtaaagatggcaggactccccagagtgatctccagattcaatgcaataccaatcaaaatcccaacagactttttttacggaaatggaaaagccagtcctaaaacccatattgaattacagggaaaccttagtagccaaacaatcttgaaaaagaacaaaattataggactcacacttcccaacttcaaagctacggtattcaaaactgtgtggtaagggataaggataga

SEQ ID NO: 844094 - DNA, 608 bp, Homo sapiens
tatatatgatattcttcttagaattataccttgaagaaattgctgatcgcataatagaagttgatatggaatgccaaacagatgcatttttggacagaccaccaacaccactctttattcctgccaaaactggcaaagatgtggccacccaaatactagaaggagaggtacagtacatcctttgggcttccctctataatctttataaatgaggtaaagttaggtgtagataatgcttaatatgagcaagaaccacttcacaatcagattctacttcttggatttctttccagatattatctataatggttttatcatatagtactcagaaatgttttaacataccatgttccgatttctttgctgattaaaaacaaaatcatttgaaatatttttagaatatttccacatttgatttttgtttgtttatatgcttgcttaatgtatatatgtataagatagatttgtactaaatagggaaaaataatatccctggtataaaaaattccacagttagttgcttttggattatttaacttttgtaaagatattctctcatttaaaaaaaaawttttaataattacatttttctatcagtgtggaatgca

SEQ ID NO: 844095 - DNA, 538 bp, Homo sapiens
ccatgtgttaagggagggaggtgattggatcatgggggcagctccccccsacccatgccgttctcataatagtgagtgagttctcatgagatctaatggcttcataagtgttcagaatctcctccttcgtttttctctctcctgtcaccttgtgaagaaggtgcctacttccccttccaccatgactgtaagtttcctgaggcctccccaaacatgcagcactatgagtcaatcaaacctctttcctttataaattacccagtttcagggatgttctttacagcaatgtgaaaacaaactaatacaccaaccttgggcaaattatgtaattgtgcctggtcccctcattggatgaaataaggccattaagacagaagtgaggattcaaagaaagaagatacacagaacacttggagtgatgcctggcagatgagatgtttaatgaatgtccatcttttttttttttatcagaataatctcaatccaatcctgctttcttcattatgtaactcaaactttatgaaaagacatttaaagt

SEQ ID NO: 844096 - DNA, 538 bp, Homo sapiens
taaactggctatctagataatacgtttgcattccaattaattactgccaggagaatgaaagtcctgtttaaactaactytggcttattggatgggatgttttctgctatgattaacagacaagaaaaaaatacatatatataacaacacactcatccatggtgtttctaaagaaaatatcatttcttaacacgaaaaatggtatttatagcaacttagttttttgttttactgtaccagttgtgtgagaattttcttaaaaacttcctaagcctgagtctcatagccttgtcactaattaactgttccactcatttaaacatttgcttgcctttgaacctgggccctatggacccctggttgctgaagactgggcctgtctgtccagcctgcttctctttgcggctatgttgaattctctgtcccagtgggagctgaaccggactccattctgtatctccaaagcccacagggtttctgatccagtaaatgtttgtaaattttaaatgacaacctccttgttattttctgatcagtaa

SEQ ID NO: 844097 - DNA, 608 bp, Homo sapiens
ttcaaaactgaattgtaaagttgatcccgcactttttttttttttttttttgagatggagtttcacttttgttgcccatgctaaagtcctgtggcacgattttggctcactgcaacttccgcctccygggttcaagtgattctcctgcctcagcctcccaccacgtcagactcacttttgtgtttttagtagagatggggttttggtcaggttggcctccggctcctgacctcagatgatccacctgacttggcctccgaaagtgctgggattacaggcgtgagccaccgcgcccagcggtcctgcacttcttaatgcacattctctagaatgctcaccaacaggcgtacagaaagaaggcactctgtatttttgtgaagagataaacaataaaagaaggataaaaagaaacacacagtagaaataatggaaactttctcaaattagtatgatatttggagtatactaaagcatttttctgctgaaattaacctagtggctggtgaattaaaggaattgatttctgatgctaatttttaagttcattttaaaatttgtttacaagtcatatgcttttttatataattaaagtgcctaatttttaagtg

SEQ ID NO: 844098 - DNA, 598 bp, Homo sapiens
tatcgcattttgttatagcagcctgaaccagccaagataacagccctctgactaggcttamggttagaaaaagaaccttatcacctcctctatactcttttctcagtggagagtaggttaaggctaacggcacttcctgaaaatgtggctcaaaactcatccttttctatccatactctcaaacacttcacatcatagatatgaacaagggaaccatttatcagtcaacagctttaaatctccacatggaccagcaaatcttttgagataaaacaaattttggactttgatagtttagctaagagttttgagtttagcttttttttataggtgctacatattagacattatcatggagatgcaattctgaacacaaataattatggtgtctgtgctcatggagcttagtgtctattaattgaagggaaattagacattatttaaataataataaagtgtataagtatgggaggtgcttggaaagggaagcgaatgttgttgtgagacgtattctaaagatggttggacgagtagaaggataagtggagccttctctaggtaaggaaacatttctttgagatttgaatgttgataacaa

SEQ ID NO: 844099 - DNA, 633 bp, Homo sapiens
tcagagatataaaattaaataaggtctcttaggaatgaaacttaaatttttaaaagaatgatccatttcttttgcaagtaagtcctccaggacaaagtgaaaatatggatttatatttattagggattttaggaatgttaaaagtttttgtcattgacttaattgtttaccagcttcctataaataaaattgattctatagaagccaacatgtggaaataaagtaatttcatatagttaagatcatgggttcaagagttatagtcttgaggcctaattctgtcttcgtcacttaccagctgtgtgactttaggtactttaacttccttgtgttccattgtttttcttctgtaaaatgatctatttcttagagatagatttgatgattaaatgagataatacaggtacctggagtatgacaaacctcaactctatgatatctgttattattacatcaaaagctaactgaaattgttaatattttcattaggtgagataccaaatttttagctttgccaacataagcataatatattcatgtggatagcaatttrtttaatttttatttaaccttcataataactctaagtcataataaatgttatccattagactcctaacatcctagtgcatc

SEQ ID NO: 844100 - DNA, 590 bp, Homo sapiens
tgaaaaatcttctgcacagcagaagaaatactcaccagagtaaacagataacccacagaatacgagaaaatatttgcaatctatgcatctgacaaagaactagtatccagaatctgtaagraactcaaacaccaagaaaaaaatcaaataattcctttgaaaagtgagcataggaaatgaatagacatttcttgaaagaagatacacaaattaccaacaaacatatgaaaaaaaagctcaacatcactaatcattagggaaatgcaaattaaaactacagtgagataccaccttattcctgcaagtaaggcgattattaaacagtcaaaaagcaatggatgttgccatggatgtgggaaaaagcgaatacttacaaactgctggtgggagtgtaaattagtacaacctttatggaaaacagcatggagattccttaaagagttataagtagatctaccattcaatccagcaatcccactactgagtatctactcaaaggaaaagaagtcattatatgaaaaagacatttgcaaatgcagcacaattcacaattacaaagatgtggaaccaagttaagtgcccattgacta

SEQ ID NO: 844101 - DNA, 689 bp, Homo sapiens
aatgataataaaacatctcccaggaaagacaagcctgagatataatgacttcattgctgaattttacctaacatttaaagaataccaatcctactcaaactatttagaataacagaagaagagggaatattttcaaactcattttatgagcccagaattactttgataccaaaaccagacagacccatttaaaaaaaaaaacaaaactacaggccaatatccctgatgaatcttgattcacaaatgcttcacaaaacactagcaaactgaactcaataacacatcaaaaagatgatttatcatggccaagtgggatttatctcagaggtgcaaggatggtccaatatatgcaaatcaaccaatttgatatatcaacagaataagacataaacaatatgataatttcaactaatgctggagaagcatttgatataattcaacatcccttcataataaaaaccctaaaaaaacagtatagaaaggacatatctcaacataataaaagccatatatgacagatccacagctagtatcatactgaatggggaaaaactgaaaaccttttctctaagattgagaacatgacaaggatgcccagtttcactgctgttattcagcatagtactggaagttstagctagagcaatcagacaagataaagaaataatgagcgtccaaattggaaagga

SEQ ID NO: 844102 - DNA, 520 bp, Homo sapiens
cctcagccttcctgtcttacctaagcagggagagaaaaagctaagcaacacttgtgaaggtcacagcccaggaacagcagcacacgaagtaactcagattcaatcataagattataaaatccttatcttccccatactataccaccacaccaatagggcttcaggaaaataggagatttcacccggaagagcaggaagacacaggctgtctttgaggaggaatacttaggagagccccaagtgaacagggataatgaaaacaaggacactagaggaatttgaagtctctggcactacagctacagaaaacattaaatacagcccaactcctggacagaataacataaaacctcacacttaaggcctctatacctcaattcttattacccaatacytgatgtctggttttcaataaaaaattaccacacatgctgaaatgcaagaaaaaacataatctgaagagacaaaacaagcatcagaaccagacttagcaatgacacagattttggaattatcaggc

SEQ ID NO: 844103 - DNA, 554 bp, Homo sapiens
gtatcaatcagggggccaatgtcttagttcacatcaaaagcaccacttttctggggagacagacyccaaatctgccacccaagttgccccactccttgcagctactgttagagacagtcatgacaggttagagacagccatgctggggtggaaaggtagagctggtatagaagacttgtcccagttccgctaatgaccttggagaagcctcaaccttcctgagcctcagtttcctcatgtgtaaaatggtgatccagtactcctatgacaggacttgttggaaagctaaaaggagaacacatatgtaaactgctgggtccaggagtaagcactgaatcatttaattgggacaggcagatgcagagtacagactggagccagtgtgtggattcctgatccaatcgcatggcctgaaataaactcctgtatatttctaagatttgggatctacaaactaaattgggatcagaatgttatctacttcataggctcgtcgctgttgttgtatcaaataagatactctatagaaagcacatagcatgatgatcatggta

SEQ ID NO: 844104 - DNA, 597 bp, Homo sapiens
accaacccttctggtcacctggaacctttctgaatccytgatctattgtagcttgatcaaattttactttttactttgtggcctcagtcatgtaactttgagttagcagttttctgcaatttagcttggtgaacgcaaaactagctcgattacaaagttattgtcttgccgtgtctttccgtgttgtgaataacaccactggttgtggagtctgaatttcaaagcctctgatgaacatttctctttttttttcctgctaaaggtgtccctctagtctatgaagctctcagctggcaacatggagtctttgtgggggcggccatgagatcagaggccacagcggctgcagaacataaaggtaaatcaaagtcctgatctgaaaccacagagaagtgggattagagcactcttcgtcactcttatgtctctctccttttctgtgtctgtgtgtggggagagagagagagagaaagagagagaggagaacaaagcatgctaatgtcaacaatcaatggcgtcagtcttgcctaggagagcctcatttactaatgaactccctctctgtttaacaggcaaaatcatcatgcatgacccctt

SEQ ID NO: 844105 - DNA, 741 bp, Homo sapiens
aggccccgctcccgggaccactgggcagattccaggaagagtggccggcaccggatcgatgcgggactgattgttacagaactgtttccacgcaccatattctctctacaatctgggccctctcttagctccacgatagagctcagaggtttctctgatgctgcagagccgggatttagggatgccacagaggagcggcggacgtcatttggtccacagtagcaccgtagtgggaccaggaacacatatgccttgttgacacctgcttgcgtctttgcactggacacttattcctgggggtgctgggcctacacagcctgggccgcctcagagctgtttcgtctgtgagccccttggtaaagggatatgtaaatgtgaatgttcaccagtctgaatggcaaaactcctctccaggcgaggcaatttgcagcaaaatatgctgtaaatatttgttcagcctgggaaaattactctaattgcataattaaactcgttgttgatgctacttccggacagaatgcctgcagaggagggcccagcctgcagctgcccttcagagctttttcaatagagagactgtttgcagagacttttctctggcccctgtctcttcacagggagaacgaagaaaggaacttggggagaggttgtctgtgggagagaggagggtgtkgaaaggtcccagaatcagaggaccactggtgtggggcctcgcggatcctccctgaggattagggctat

SEQ ID NO: 844106 - DNA, 416 bp, Homo sapiens
ggggaacaccagggaagctggctgggcagggccgaggggtccatgtgaaaatgagggggtggcatgcattcaaggggggytgcccccttgacaattctgctttgcccccctccccaaccctgcattttcccgaggcaagtctctttctgggaacctgactccctctgagaacaggcctggctgagcagcctggggaggagtggttggggcagtagccagggccactgggtggtgtgggggaggggtggtgcacacgctgcaaagtccagtcctgtggcctgtgaagcgagcaacaactgtggtactcggggaacctctgttcctggaaggaatgatcaggcagaggctagctcaccccacaccctggctgtgatgtcctgactccgaaacatctaaagctcagcggggcaaaaaaa

SEQ ID NO: 844107 - DNA, 583 bp, Homo sapiens
ccactttgttcatgtattatatttgatakatcagtctcctatcattggacatctatgttatttccaatcatatgttgcagtgtataatcttgtgtacacgtcattctatatatgtgcaagtctatttgtaggacaaacttccagacatggaaatgttaggtcaagagatatcgttattgtaattcagatagatactgccaaattgccctccccagaggttataaaaaatttcatcaccacttgcaatgtaaaagtgtttagattttacactacattgaatatgaataatgccaatgacttattttgtagatgcttccctgaaaatattctacttttacagcctggttatgtaaaaaatgacatcctaaagacactttccataacatggaagtctgcataattctgccattgttatagaaagttttcagactatttgaagcccaagcaagatggcaactgggagaaaggaaaagctaagattacagcaattcttgtcattgttagctggcacacaggcaacatgaagtgttttcccctacttcagcataaaatacttaaaactttcctcttactacaccaacag

SEQ ID NO: 844108 - DNA, 522 bp, Homo sapiens
agcagaacaaagaattagtgagcttgaagacatgttatttaataatacacagtcagagggacaaaaggaaaaaaaaataagaaacaatgaagcacaaayagaggatctagaaaatagactcaaaagggcaaatctaagagttattggccttaaagacagggtagataaagacatagagatataaaggttattcaaagggataatatcagaatacttcctgaacctagagaatgatatcaatatccaagtacaaaaggtttataaatcatcaactagatataacccaaagaagactacctcaaggcatttactaatcaaactcccaaacatagatgataaagaaaatatcctaagagcagcaagagaaaagaaacaaaaaacaacaatgaagctccaatacatctggcagcagacttttcagtggaaaccttacaggccaggagatagtggcatgacacatttaaagtgctgaagaaaaaaatcacttttgacctagcatagcatatccagcgaaaattccct

SEQ ID NO: 844109 - DNA, 589 bp, Homo sapiens
attcccttttgatggtgaaattgattaatatgtgaaatctcatactatgtcttcagatgatcataacctagatgaattttataaaatccagtaatttataagtaaacaatatatttcygtagacttcaatagaaataagggccttatcatgcaatattttgcaacaagaacctaaactattccattttgtgaaaaagataagtgacagtgttccttcattatttatatttacataagttgtatttgatacatttcataagtggacaaatgttgaagtcagatgtgtattcaaggaaatagatgatttagaaatttaaaatttcttggaattgatcattcaaatctaaaagtaaagtcttcaatatttatgaagcaaaacagatgacagtcttctcttaaaaaaatgatgactgtccgagttttcaacagctttgagtcttgacaatgcaagtgcaagaaaagtcagaattaatgataagccacagatccattggagatgatttaaaatatgaaatccatatttacagcatggatatgctccaggttcacacatgacagccgatgaggagttagtctcattcagtgctgg

SEQ ID NO: 844110 - DNA, 564 bp, Homo sapiens
ccatttttgacctagaaaaatggcaatatcatacggatcaacccatactaatgtagattatatgagatcacgtcactttggatttatatcagaaaataacattaaaaggcaataaaaataaattcacctaaaataatctacattatttgacacttgcctttgaaaatccttcctaggcctctgaaatccatttgatctgagcaattgaacacgaccacatattttcccaaacaccttcccatgtcttttgtggtttctgttttgccagtgccagcaggtcctgcgggagcacctcccatgttcatgcccaaggcctgagctaacgtgatatagcatctgcaaatgttcatccaataaagcattgtgagtatgggatgacacgttacaggatggcgcaagcaaaaatccaatgtgattggaatgggcctatttattttagagtctgagtagcccacataaaagaagtgaacaaacaaggttagggtacttgatattcattaaaagtactacagtgagyccaaagatttcttgagactaatttcaaaactcctcaaccctgactta

SEQ ID NO: 844111 - DNA, 656 bp, Homo sapiens
aaaaaacgaaaactgggtttcctacctatctgttaatggagtgataacaagacgatcagtacatcccagaaattcattttggtaaataaaatcaacatctgtaatagacaccacagtttgatccaaatcttccttaaaataaaatctactctgttttagccattcaaagtcagtaggtgatttgatatgcatttttaccttaaaaacataaaatacaaaaaaattatatactgaattgcaatagcataaaacataagcatgtgggcagtttttaaaattcactctttgatgaactgattcttattaacaaatatttattgagtttcttcctatgcttgacactgtgctaggcaaacaaagacagagatggttccaggcttccagagcttacagaaaagggcaaaaggcaaacagtgaaacaaatcattgcaataaagtacaaagggcaccaccaccgaaattcagggctcatgaatatatggagcaggaggacctaactactccaggatatctgagaggggcactcagaggaagaaaacatctcaactaaaacccagataaatagtargaattagccagggccaccaggagcggggaacaaaagggatcatgagggtgtgggaagagtaagtgctataggcaaatgtctagaagat

SEQ ID NO: 844112 - DNA, 656 bp, Homo sapiens
aaaaaacgaaaactgggtttcctacctatctgttaatggagtgataacaagacgatcagtacatcccagaaattcattttggtaaataaaatcaacatctgtaatagacaccacagtttgatccaaatcttccttaaaataaaatctactctgttttagccattcaaagtcagtaggtgatttgatatgcatttttaccttaaaaacataaaatacaaaaaaattatatactgaattgcaatagcataaaacataagcatgtgggcagtttttaaaattcactctttgatgaactgattcttattaacaaatatttattgagtttcttcctatgcttgacactgtgctaggcaaacaaagacagagatggttccaggcttccagagcttacagaaaagggcaaaaggcaaacagtgaaacaaatcattgcaataaagtacaaagggcaccaccaccgaaattcagggctcatgaatatatggagcaggaggacctaactactccaggatatctgagaggggcactcagaggaagaaaacatctcaactaaaacccagataaatagtaggaattagccagggccaccrggagcggggaacaaaagggatcatgagggtgtgggaagagtaagtgctataggcaaatgtctagaagat

SEQ ID NO: 844113 - DNA, 520 bp, Homo sapiens
ttcgtgactttccagtgaaactggtgaaacaccagtcctgcccattcagaggaatcaacacaggaagtggcaagtggtccccttcactgctcttaaatccagtaggcccacttccaggtcattcaactgacactaaaaaatggactcgtggctactatacaatgttcagatctccatctgaccaggcctccatattccttgctatttacagtcctgctttttgctattgttgtttgttgtttggttatgatcttgcttcctcctctagttaaggactggcttcccacctaaagcacagtttgtattcatcatcttgagttactttcaggtaacacagtctggccccacccacagggaatgctctgtaacacaggactcaaggccatggggatgctctcrgccagctactttcaaccatctgttaagatggtaaggaggaggtggagaagaaaagaagaatagttaatatatttattgagttcttgctgtatatcaggttgttctaataattgtacatgga

SEQ ID NO: 844114 - DNA, 653 bp, Homo sapiens
ccagtatgatggactttggccacatgtggctactgagcacttgaaatgtcactacttagaagcaagatgtctrtaaatgtaaaatacatgccagatttcaaagacttagtacaaaaaagagaatgcaatatatctcattaaagatttcatattaatgacattaaaatatttaacatattgggttgaatagagtctttattaaaattaatttcacctgcttctttttacttttattcaatggctactagaaaaattaaagtgacatgtggtttgcctttgcaggtcattaccaattggatatttctgatctagagaatttacaaaaggagtgaaggtcccttacaagcatttttctttgggatatatagaacttcaggtagagtagtgtagtgacgctatagacaccagggccagcagatgtcattttctgacattgctgctctcagaaacctctttgccactgctaaggacgtacaagaagtagaaaatgttctttcaagagtcccaccattggcccagagtggtggctcatgcctgtaatctcagccttttgtggggggagatgggaggatagcttgaggacagcagttcaagaccagcttgggcaacatagcaagaacccgtctctataaaaataaaaataaataaatatt

SEQ ID NO: 844115 - DNA, 582 bp, Homo sapiens
aattaaacctctattctcccagcytcagatatttcttcatagcaatgcaagaacaagctaatacaaagtacatcactttttatcttttatatcatatttttactgtaccttttctatgttagatatgcttacactcacaaacaccattatgttacagttgcctacagtattcagcaaagtaacatgttgtacagatttgtagcctcagagcaataggctataccacatagcctcggtgtgtagtaggctaggcatctaactttgtgtaagtacgcttggtgatgttcacacaatgacaaaatcacctgacacagttctcagaatgtatccccatctttaagtgacatctaactataaatagaggggtacaccatcttcaggaattagaagactcaaatttgtatttatatcaattatctccaatttactctctagatctgaagcaatccaaatcaacaccctgacagactttttctatgtagaaagttgtgaatttatatgtaaatgcaaagggccaatgtggtcaaaacaatcttaaagaaaaagatggaaaatttacatgatcacatatcaatagtatcc

SEQ ID NO: 844116 - DNA, 609 bp, Homo sapiens
aatgctttataccttgacaggggtgtgtattacccaggtgtatkcatgtgtcaaaatcctttgaattgttcactcaagatttgtgcatttcagtgtatgtaaatctcccttaagcaaagagccataaagaaatattgagctctagttacttgtgtgcatgctgaagtgtactagtttttgcaacttacttgaggctagtctgaatgtatgtgtgccccgaacattcatgcactgcaacgtgatccccaatattatgatgttggagagtggggcctttgggaggtaattaggtcatcatggggtctctgctctctgctcttatgaacaagattggtgcgcttgtataggagaccccagaaagacagctaacccttctaccatgtgaggacacagcaagaaggtatcatttatggaccagaaagtgggtccttaccagaccctgaatctgttggcattttgatcttggacttctcagcctctagaactgtaagaaataaatttctctggtttgtaagtgacccagtctgtggtattttgttacagcagcccaaacagactaaaacctttgaaatctgttaaacagaagatggaatgatcaatggatacagt

SEQ ID NO: 844117 - DNA, 540 bp, Homo sapiens
atttgtcaaaattcaccataggggtgaagagcactgatgtctgccacttatttgaaaagcatcaaaaaataagatggattgatggatgtatacaagcgtaggtagacatatacataaaacaaatacagcagaatattaattgcagaatctatgtggcgagtatatagttcagcccaggtctgagtcatagacagatggatgtcatagatagatagtcatagatagataccgaaatactgattggggaagagatagtaaagaagtcatgggaaaaggatacaaaaaaagagagaaaagtggccgggcacagtggctcatgcctgtaatcccagcactttggaaggccaaggtgggcggatcaggaggtcaggagaacgagaccatcctggctaacacggtgaaaccccrtctctactaaaaaaaaagaaaaaatacaaaaaattagctgggcacggtggcgggcacctgtggtcccagctacttgggaggctgaggcaggagaatggcgtgaacctgggaggcggagcttgcagtgagctg

SEQ ID NO: 844118 - DNA, 559 bp, Homo sapiens
tattatcttttcatattgtaacaggataaaaaaaattttgagattatactttgtcaggaaaaaattgtccaagatgtggaaatgggcaaaagagatccctgakaattctttcagtagagtattgggcattgcctaggggaccttctgggatgatctgagtctagagaggcctgtgcctttggattgactttccattattagtctattttacatgcctgtaggggcagcagttaaagtgaagacaactggtagcaatgtaaattgttcctgtccttaacaatgcaaatgagttttgtcccaaagagaatataactctttgtaactcaaattctgatttgaatctcttctaacaactgacttgccccttcaataattaatgagctaaataaaatctttgacacctgttcactttatatttgtataaaagtcatttccaacttctaggaaattatactctagcagcgtttcccctaatcagtgtaaggaatttgactgcccttgcagttgaggaccagggagggattttagaattatctatagcagtggtaccaagaattaa

SEQ ID NO: 844119 - DNA, 608 bp, Homo sapiens
ccactcttgctaacactctctctcctgccgccatttgaaaaggtccaagctcrtttcccccttgccttccagcataattgtaagtttcctgaggcctccccagccatgtggaactgtgagtcaattacacctctttcctttataaattacccagtctcaggtagtaactttatagcagtgtgaaaatcaactaataacgtactatatatttccaaattactaaaacagtaggttttaaatattcttacaaaaaataagtagattaggtgatggacagagtaattagcttgatttaattatttcataagtatacacatatcaaaacctcacactgtaccgcataaatatatacaattattacttgtcagttaaattttttaaaatagagtccgccaaggtgtaatgggccttcattccaatgagatttctcttcttggtctaaaaatagagtgacctaccagactaagagaactttcaggatatagaattttgacttttaaaaccagaagcatcccaggcaaacaaggaccagttggttccacaggccatttgctttggccagctggatcaagcgagaaaagatgactctgctgagatgaaatagctcc

SEQ ID NO: 844120 - DNA, 327 bp, Homo sapiens
cttctttctttccttctttctttctttctttttttctttctytctttttcttttgagatgaaatcctgctttgtcgcccaggctggattgcagtggtgtgatcatagatcactagagccttaaactcctgggctcaagtgattatcctgccttataaagggttatagcctgtgaggtggccatcctgacaggttgggaagcagcctcccacaaagacctttagcaggcactttgaaggaggaaagggtaagataggaatttttactgagcgggttggccaagtataaatattcaacaggttataggatgctccatgaatattcatga

SEQ ID NO: 844121 - DNA, 606 bp, Homo sapiens
aacatgtatccagcatatactaagctggccactctggcagactcttggggccccaagaagaatacaacctgaatctcacatcaaagcttcaaagaccctggctttctgccccagctgayccctaagctgtagcactcacccaggtgctcctcaatcactgtattgtctgtcagagggatggtcttattcttgaccttggcttgtccacgtttcaaaatgagttctcggacagacttcagatttggaaatctatgtaggaaaataaagcacggttttcaccagcacctggcacactacataccagtcctgcagcctggctgagaggttggagaggttctcccacacactcacttctcccaacgagcaagtgttctgcaatcacattccagctgaaatgcttggaaatactcctgataaagaactgaagtgaccccacttacataattagaaatttaaatttatggatgtaaatgttcaccagggaaaatattgccaacaaaaacaaaacagaaaccatgtcctagcttaccttaggggctacgactctggccttaggtgaccctctactcaagatggtgcaagagttggaaataaaatccaagtttt

SEQ ID NO: 844122 - DNA, 603 bp, Homo sapiens
ctttttaagaaattgttggtcgggcacggtggctcacgcctataatcccagcactttgggaggccaaggcaggtggatcatgaggtcaagagatcgagaccatcctggccaacatggggaaaacccgttccctaaaaatacaaaaaaaaaattagctgggcatggtggcacgagcctgtagtcccagctacttgggaggctgaggcaggagaatcacttgaacctgggaggcggaggttgcagtgagccgagattgcgccattgcactccagcctggcgacggggtgagactccgtctcaaaaaaaaaaaaaaaagaaattgccaaaatgttttcaaagtgatcatatcattttacattcccactaacaatatatgagaattccaattcttccacagcctcaataatatttggtgtggtcagtttttaattttggccattctaatagatatatagtgatatctcatggtgggtttaattttaatttccctaataactaatgatgtcgaacatcttttcrtatgtttatttgccatctgtattttttcttcggggaagtgtccaaatcttttgccagttttgttgggttgcttgttttctttat

SEQ ID NO: 844123 - DNA, 649 bp, Homo sapiens
ataattaggaataaatctcagcgcagtctctattcatcagcgtccctagaactggccaatcttccgagccattagccaggtcctaattaatgctgagctgcccagctctgcggaggctccatgcctgggagggayccgggctaaggggcaccactgcccccacagcccacagcgggcgaccttgggaggggccgggggctgtgtgccttcagcctgctgcttcacctttccgtctccaagggccttagtttgtccgcaccctcctgtctgcctccttgtctctgtctccttttgttcatcttactccatctccccgactaccttcaatcccgtgtttctctcttatcagatggccgcagtctatgttgttagctatggaagatctgagttagaaggaattgtgggaccacctgtaaaaactctccaccatctgtcctttctgccgccctgtcagtacctgggcagggacctaatctacactggctcccccagaacagtccttggaacagggatgaccccagccctgccccctgctgtggctgtccatctttcctggggcagttcttgctagcagagtattctctcattcctggagctgggaatgctctttctgttatgtctgcttctcggtcttacccctacctgctgg

SEQ ID NO: 844124 - DNA, 627 bp, Homo sapiens
tttccttatccctactacctttgccatcccacaggaacacatatacacgtatacactaaaaacaacattcatcatttgctaggctttctctaggtcaacaaasagtttctatgtaaattaattttattttttaccattaaatacctgccagggttattttccatttaacgatatttttctttaaataaataccattgatcatttaagattgccaaattatcatttttatttcatcaattcagaattcaaaaggttttaaactttcgatatatatcactagattagaaacagtcttaatgaaaaagtatgctgagaaaaatgattgcacatgtagaggaaaaactaagatagaaaaataaaagaatgctctctaagaggtgatttggaatacaggaagtgttaagcaaattgaaattatgttgaatacaaaatgtaggttcattttcagtaagggacgttttcatcatctatagtggtcagttataggaatttcagagtctgaaattttcctgtactcttatctgtctgtatcccccaacccataattctctaacatcttatcctactttagtttttctcacagtttttatcaccatccgaaattattttatatgtgtttttgtctgt

SEQ ID NO: 844125 - DNA, 715 bp, Homo sapiens
ccccatattgttgaatgcacaaaccaagtgtgttggtccatttgtgttgctgtaaagaaatatctaaggctgggtaaattataaagaaaagargtttatttctcttatagttagttaggctatacataaagcacactgccagcatgtgcttctggtgaggactttaggaagcttacaattatggtggaaggcagaagagagcctgcatgtcacatgaagagagagcaagaaaacacaaaagtatgtgtataagactattttttgttaaacaaaacctgtatgcatatacattgtagatgtttctgtgtcagcaaattgttacatgaacacaaaagaaaaaatgaaaaataaaactagggattctgatttgcatggaaggaaacacaaaaattattaaaaagagtaagtaaaatctttagcagtggaataaaaatgtcaagaaatacaaaatttacaactgtaattcattattttgggggatcaagtttctttatcacagaaattctttcaacttttaaagctgtaaaagctcccgttttgacttattgatgctcaagccactgagagctatcataagatcatcttgacttgagattctcaatgaacacagtgaaaaaattagatatgtaaagtaaatgaagaaagtgaggaatgtgaagtcaaaataacatgatataaccaaaaagatagaggactgatatcttcatgtgagtaa

SEQ ID NO: 844126 - DNA, 631 bp, Homo sapiens
aaaaatcttatgaaatcacatagctaattcaatgctaattcgatatttaagtttttcacaaataagcagaaacaaaaaggctcatatattaatgctgatttgttatttttctgggtgtgcatcagtgatgagtcagtatgaagtaaatggaaaaaagaataaagtctgtgatttatctacctgccataaatgcatctttaaacaggcaaaaatgtaactcattttttcaaccaatttaccaagaagagaaatcactagatgagtccacaaaatatgaattattttatgtcctctcttatttcttctgtcttatttattatttcaccaaaacctattgactgctgtatcatttaaaacccatgtattccatggggggaaatatctctcttttatttttgtacctgatagccataataaaaatagagaataaaaacactttataagctgtacaaggaaagagatggcaagtgattccactgggattttattttaactggatttgatcctaaagccaatgctctttaaaactgtgtaacttcctctccaatagttggctattaccaataattcmcaaaaaacttcctcaaaaaagtttatattgagtaattgactaaacaagccacaagacacc

SEQ ID NO: 844127 - DNA, 406 bp, Homo sapiens
aaagcagatggctgagtgtaacagacctggcagattgtagaaaaccatatcgtaagttagcagtagggaaagcagagaagcaactggatttacatctcatctcagaacttcccaaagctgagggactggtggtatcagttgcccctagagtggagcttttagtgggcatacataacagaacatagagccactgtcatgtccacaggtgattcatatgttgagaaaattaaataaatgaatgttttaaagggagaactgggatacaggcctaggaatatgactcaccatgctgtgttttattcattatgtgtttagatatagtgtgtgtgcatatatgartgtaggtgaaagagagaggctcttaacgtattatgtgctaataaaaaagaatcatgacatatctcaa

SEQ ID NO: 844128 - DNA, 623 bp, Homo sapiens
ataggaaaaaaataccttatctttagagaatcaaaagtaagaattacatccaattttctccaggaatgcatgcaagcatgaagagagtagagtaaattatttatggtgtgtattagttcatttcatgctgctgataaagacacacccaagactgggtaatttataaagaaaaataggtttaattgactcacattctatgtggctagggaggcctcacagtgatggtgggaggcaaaagtcatgtcttacatgcagcagagaagagaaaatgagagccaagtgaaagggtttccccttataaaaccatcagatcttgtgagacttactcactaccatgagaacagtatggggaaaactgtgtccatgattcagttacctcctatagggtccctcccatgacacatggggaattatgacagctacaattgaagatatgagatttgggtggggacacagccaaatcatataattctgcccctggctcatcccaaatctcatgttctyacatttcaaaaccaatcatgcctcctcaatggtcccctaaagtcttaactcatttcagcattaactcaaaagtctcatctgacacaaggcaagtcccttctgcctatgagcctgtaaaa

SEQ ID NO: 844129 - DNA, 632 bp, Homo sapiens
cttgctcatgatattttgttttattgtgtactcagttgtcttagaaggatatgcccattttacaaaaagaatatttacaggactctttaaggrctagatgaggttgccctcctcaagatgatttggctttgcttctaggtacactaagagtctgagaattcttcaattcaagttcatagtttgaggacactgaaaacactaatctcaggatgtgaatgcaaaacttcagggactgttttctacctttctttgtctcctaagctcatatatgccctaagcgtgtaactctttaatgacccagcttaatgatgggagggtctttactacatttcccaccttgatgggttcaagaccttgattcttcaaggccacaaatatgaagcccaaatctacttagatcgttcaatgcctttgggacaaaagtgggtttatttctacgtgcctgctcacatatctggacacctgcttcccctacaattttgtcccagttgctcctcattggctaatctaatcttcaatacttttagagacatttaaaaaaaatacatgttctgtactattaatggcttttacaaaaggatgtgctcaataactagccaatattaaagtaacttgttaaaacatggtgtctt

SEQ ID NO: 844130 - DNA, 631 bp, Homo sapiens
gatgcactaggatgttaggagtctaatggataacatttattatgacttagagttattatgaaggttaaataaaaattaaayaaattgctatccacatgaatatattatgcttatgttggcaaagctaaaaatttggtatctcacctaatgaaaatattaacaatttcagttagcttttgatgtaataataacagatatcatagagttgaggtttgtcatactccaggtacctgtattatctcatttaatcatcaaatctatctctaagaaatagatcattttacagaagaaaaacaatggaacacaaggaagttaaagtacctaaagtcacacagctggtaagtgacgaagacagaattaggcctcaagactataactcttgaacccatgatcttaactatatgaaattactttatttccacatgttggcttctatagaatcaattttatttataggaagctggtaaacaattaagtcaatgacaaaaacttttaacattcctaaaatccctaataaatataaatccatattttcactttgtcctggaggacttacttgcaaaagaaatggatcattcttttaaaaatttaagtttcattcctaagagaccttatttaattttatatctct

SEQ ID NO: 844131 - DNA, 578 bp, Homo sapiens
gaagggggatgaagaggagttggttaatgggtacaaatatacagttagatagaaggaatatgtttaatatktggtagtactggagggaaagtatagttcacagtaatttactgtgtatttaaaagtagccagaagagaaaatttgtaatgttttcaacaccaagataatcgttcgagatgatggatagcccagttaccctgatatgatcatcacacatgtacaggtatcaaaatagcacatgtagccccaaatatgtacaactattatatatctattaaagatttaaaataaaagtgatcactatgtctacgaacattttttggtgctcacaatcggggagagggtgtgattctggcatctagtggtagagcccctgggtgctgctaaacagatcctcataataaagaattatttgacctaaacctgttacaggaaaaaccttagacaaactaaatttaacagagtttaaccaagcaaagaactattcatgagtcaggcagcctgcgaactagaatagattcagagaggcttccggtgcaaccaagtggtagaagaagattcatgaacagaaaaagcc

SEQ ID NO: 844132 - DNA, 490 bp, Homo sapiens
tacccacagtgcgcagagcacaggggcacgcggtacattatttgaatgaataaytttcttatcctggcctttctctaactctctcacttctacttgggtcacccgccccctccccaggagtcttataaaacaaccaggggaagaggaaacagaagtggctcatatgggtaaaagccctcgtcctgcaaatcagtgacacaagggagttagtccatccaatgtacagttttaaaaagattgctacgtagaaaaataataggatagggtaagaggagaacccagctaggagcttcagtgggatccagggtgttgatatgatggtggtctggatttaagtgatggcagtagggataaaaagaagtaaaaattccagcctgggcaacataatgagaccctgtctctacaaaaaaaaaaaaaaaaagttttttttttttttttaattatccgtgtgattgtcactcctgtagtcccagctactggggcggggttt

SEQ ID NO: 844133 - DNA, 559 bp, Homo sapiens
aaaccccgtctctactgaaaatacaagaattagctgggcgtgcaggcscatgcctgtaatcccagctactcgggaggctgaggcgggagaatcacttgaactcgggaggcggaggttgtggtgagtcaagatcacgccattgcactccagcctgggcaacaagagcgaaactccatctcaaaaaaaaaaaaaaaaaaaattcctagactcaggagttccatcaaaaaagcccaaaattttctgcccttagcacaaacacgtcaaaagcctgaattcaatttttccccttcccaccttccggtctttttttttttttttttttttttttttaggtgtagagagctctgagaactgcctaccctgtactccactcaggatgccccccacagggtgggtgtttccatgttagtgcctttccccttttcaaataggggaatgagacaagactcactgctggactttccatttttcctaacactgccccccttaaccttgctaagacccaggtcaaaggtttaaagttatttctttcaatggcacttcacctctatgatcttcc

SEQ ID NO: 844134 - DNA, 373 bp, Homo sapiens
gtacctcaccttgagggacctgatgggacttgagcctaggtataggcctagaagcaaagggggtgggtcctgagaagaatcagtattgtcttccttccaggacaattgtcattacagtttcctcaggaaatgcagagttaactcctgagagagcgggatgcacctttcactgaaaatggaaaggcctctccactggcaaagaagacccattagaatttaggggctcaatgtctccagtttcatcagaatmttcccacatgtccccattctaacttataggatctcattttttcccagtcaatgccctcactttaacagtcaacctcagcaaggctgagagttcaacttacattcagccaatggaaagatgaga

SEQ ID NO: 844135 - DNA, 373 bp, Homo sapiens
gtacctcaccttgagggacctgatgggacttgagcctaggtataggcctagaagcaaagggggtgggtcctgagaagaatcagtattgtcttccttccaggacaattgtcattacagtttcctcaggaaatgcagagttaactcctgagagagcgggatgcacctttcactgaaaatggaaaggcctctccactggcaaagaagacccattagaatttaggggctcaatgtctccagtttcatcagaatcttcccacatgtccccattctaacttataggatctcattttttcccagtcaatgccctcactttaacagtcaacctcagcaaggctgrgagttcaacttacattcagccaatggaaagatgaga

SEQ ID NO: 844136 - DNA, 559 bp, Homo sapiens
ggtgctggaacaaatttgtttgcatccacatgcaaacaaataaatctagacacaaaccttatacccttcacaaaaatggaattcaaaatggatcatagacctaaatrtaaaatacaaaacaaattcctagaacataggagaaaatctaggtatgatgatgaatttttagatataacacctagggtatgatgatgaatttttagatataaaaccaaggtgagatacatgaagaaataattaataagtgaaacttcattaaaattaaaaactcttgctctacagaagatactgtcaaaagaatgagaagccacagactggagaaaatattggcaaacaacatgtctgataaagaactattatccaaaatacacaaacaactcttaaaactcaacaataagaaaatgaacaacccaattacaaaaatgggcaaaaggcctgaacagacacatcaccaagaagatatacagatggcaggtaggcatatgaagatattccacatcaaatatcatcagagaaatgcaaattaaaacaacgagacaccactatacacctattaaaa

SEQ ID NO: 844137 - DNA, 587 bp, Homo sapiens
taatgaagattaagctacagaaattgggcacagaaacaacggcacagaaaatgtctggaacgttgttccccagacwggtaactgctgccagctctggggaggagcttacaggtgggaagaggtgctggtgctttctaccagatccggtctggcattgcgtgaattcacacatacaaagccgggcagcttcatgactgaagtcctgctgaagcccgtattggctctgagggtctagggcaagcacaacctctcctgctgcagggcaggccgctcacctgaccccagggtccgcagggaggagcgatcatacttcttcacccaggcatcaccgtatttcagcaacagccggacagccgttggggcgccatagaactgattgatcttcaacctctctactgtctcccagtaccgacctacagaaaggccgaaattcactgtcagcaggagagctgacatggtttactttaaactcagagatcagccaagacttcctgagtgctgggcatgtgcagacgcgcatatgtccatatgaaagggatccccccaaccccccacccccgccagtgaaagatggaaagaagccccat

SEQ ID NO: 844138 - DNA, 630 bp, Homo sapiens
ttgtgtcaatttatggccccaccattagtgccagagttaagaataaaaggagccatttgtttgttttctctacttctctccccaaactttgccttagatagctycttgtttggttgcagtttatagaaaccaagaggaataaaattaccgacgactgtgtcctaagcacatacatgtatcttaaaaataaatttcccaataagctatcaaagttcttaataggtgctgtttattaagctataataatcttccattaatttatcttaaggtaatttttttcaaaattgtaaaaatcattgaactgcatatgtatgctccatatttacatatatttatgacattcaaatgttcataacacttttgttagtgcatttttttgaatttcaacgatgttttctaattatttaacaatatatctaacattccaagttacataatgaagtttcaatagagatagaagtaataatagcagtctgtgctagatgaaatatgatttttgatttttgcgtgtctcatagcattcaaggagacaaggaagtctgacaaccaggttacaagctcgaaaggccattttgttctctgagttgatttccaagaccatattctcactctcagagaaattgtacttca

SEQ ID NO: 844139 - DNA, 602 bp, Homo sapiens
tacattatgtgactttggatatcaaagatataatttttggcattcaaagtcacatactatttgccagtcatgtattgcctgggactcttctcatcttcaccaggctgacaaagcagctaccattagaatacagcttgctgatctgccaaggaaaagagagctaagacaggtcttgcactggcagttaaatgcttcaaccccaatttggtgatcatcagacatgaacaattcattgtcctgaactggtcatatggcccagaaccagcatggccctatccacaaggaaactagtacatgcaatttcactatgtgccttgaaggaaagaactggatatatttgttaaaccaaatatttggcccactttgctaacagaaataaaatagtgattacacagtgcacaaagatcagctccagatggaagaaaacatgagaaaatgtttttaagactgcagaaggattttccaaacgagactaaaaagyccagatcctcagtagcactgttgatatctttcactataataaacatttaaatttctatacaacaacaggtccataattaaaaccataattaaaatgtttagaaatatgtggactagcttta

SEQ ID NO: 844140 - DNA, 554 bp, Homo sapiens
ctggactgacctgattttttatgcacaatgcagaacagaaccctgtccagagttgggtactgcccctgtgaccagggctggtgtgggcaaccgagcttgactctgtacctctggcctggaggctgcagtgcctgaaacccacttctatcaccacctcttactgctgtatgatttgggacaagccctttgagcaacgtgagcctcagtttcctcatctgtcaggtagaaatgattatttcccccatacctcagtcattgatccttggtggctgtgcctcaaccacatcactaagccctctgaggttcagcttgctcatctgtaaaacagggacaataacagcaaatgagatcacgtggagaaaagcacttcaaaatttaaaaattatctggtgcttgagagaaatcacctgtgagatggaaagactcggccagattttcaattcttggctccatctgcaaccctggctggcatttyttagaggatgcaggcctctgggtgttgcttcagtggccaaggaggctcagacagagagctccaggaccccaaggacagg

SEQ ID NO: 844141 - DNA, 644 bp, Homo sapiens
ccaaaagtttgctaaacgatgttctcattcttttcgtctaactatcccatgtctgctggtttaagttctttctaactcaaaggttttgttttcctttccattaattaaatattttccctctaacyttttcttattgtttcctatttttattatatggtggttagagaatttaacatataacttttatttggggaaactgttgattttttttctttttggctatcatgtaaacaatttgtattaatatatcaagagttcttgaaaagaagcttcttctctagaatatagtctccactctgggttgtgcatcacagagggaacacaggattatccaatagagtataaggaaaacattaaaacttgcattcaatatttattttcatcatgtcccttctctatttttgtatatgtttcatgtatcttatattagtattatagaagattaatattattaataatatgcactattgggagcatatacttgaaaaggttttaaacagagaagtgcatagtgaaagtgatagagactatcagtctaaaaagcacagaagtcaatattttaattcagtggtatgtctaaataattaacaaatatatttatatttaaactctatgctcaaaatgttctacatattgggattcac

SEQ ID NO: 844142 - DNA, 529 bp, Homo sapiens
aaagacatgaagagacatttcaatgaagaagatatacagatggcaaataagcatatgaaaacatgttcagcattactcttcagggaaatgcgagttaaaaccacaatgagattccacacacacaacattgtggcaatagcaaatcctggcaaggagagggagaatctggatcacttgtacattgctgagggaaatataaaatggcatagccactctagaaaacagcttggccactaaaaaagcaaaacaaaacaaaacaaacaaaaaaaacttgcagccaggcatggtggctcacacctgtaatcccagcactttggggggccgaggagagaggatcacttgagcccaagagtttgagagcagcctagccaacacagcgagacttcatctctacaaataacaaasttaaccaggtgtggtggtgcatgcctgtggtcccagctacttgggaggctgaggccagagtttcacttgaacctaagaagttaaggtcgcagtgagctgtgacggtgccactgcactccagcct

SEQ ID NO: 844143 - DNA, 620 bp, Homo sapiens
agagagaagttgaaagaattatgaacacctgtattttcagcaactagttccacaattagcaccttgtcacatttctctaattattcattttctattttcaccttgtcacatatttctctaattattcatctcattgtttattgatctacattattttttatgtaattaaaaacataagatgtagacatcattatactctatactctacctgggaacacttttggttactctccactgccttcaagtagttgtttattatacttggaaagaaagtttagagttgttacatgttagtttgatccaaaaggaacattcctgttagtagtagaaatggaatcctcaagttattttttagtttttgaattttcgtaggccttttctaaattaaaaaaaaaaagccaccagaataggcctaggtattagaatctttttattaaataacttgacagttggaaggagccttttgatgttcggcaatggtcagccatctggttagaagagattgttttagtcttccgrtagctgttaatttagctccaacgtctttctctgttccatactgtatttgagcttcttcaacctgtttctcaagtttctgtctttgtttctctttgtctctg

SEQ ID NO: 844144 - DNA, 584 bp, Homo sapiens
ttttattactgaattatataatttagcataatgacctcaagtttcaaacgtattgtagcatatgtcagartttccatttttaaaatggctgaataatatttcattgtgggtatatacctccttttgtgtatccattcatccacaggtggacagttatattgcttccacattttagctattgtgaaatacgctactacaaacatgggtgtccaatatctcttcaagaccctgctttcaattattttcggtagatagccagaattgcattttctggatcatatagtaactctgttttttgtttttgagacggagtctcgctctgtcgcccaggatggagtgcagtggcgcgatctcggctcactgcaagctccgcctcccgggttcacgccattctcctgcctcagcctcccgagtagctgggactacaggcgcccgccaccacgcccggctaattttttttgtattttcagtggagacggggtttcaccgtgttagccaggatgctttcgatctcccgacctcgtgatccggccgcctcggcctcccaaagtgcttggattacaggcgtgagccaccacgcccgg

SEQ ID NO: 844145 - DNA, 636 bp, Homo sapiens
tgaattaatgtggtaataacggaggcttgccatttccagcttctcgcctctaagtcaattctcaacctactgttatttgacttcctctgctgaacacattctggacagaacttattatttccctcycaaatctgctccttctcttatattccatatctcactcatgacaccaccaatgtcagccgaaccaaataatttcaagtcaatcctggctcctttctctgctgaacccttcttcatccaaatgacctctagtcttccttatctaaccatatacacatttcttaaatcagcccctcgtgacaaaccatgctatctctatttagctcatcctaccattgtacaatcacattatcctagtgtgatcacagtgatcagatctctctcatccagccatggtaaaatagcgtagtggttcaacatttgaatttcaacccaaacttcctgggttcaaagccatatactcacacctttagctctatggccacggacagatttagctctttttgcttccatttctttatctgtaagatggtaaatcagagtaggctgttaggagttacatgagctaatatttgcctagcacttagaatgacatctggcatgtcataggtgctatataatgttttctatttt

SEQ ID NO: 844146 - DNA, 391 bp, Homo sapiens
tctaaccatatacacatttcttaaatcagcccctcgtgacaaaccatgctatctctatttagctcatcctaccattgtacaatcacattatcctagtgtgatcacagtgatcagatctctctcatccagccatggtaaaatagcgtagtggttcaacatttgaatttcaacccaaacttcctgggttcaaagccatatactcacacctttagctctatggccacggacagatttagctctttttgcttccatttctttatctgtamgatggtaaatcagagtaggctgttaggagttacatgagctaatatttgcctagcacttagaatgacatctggcatgtcataggtgctatataatgttttctattttaattaaaatagaaaataat

SEQ ID NO: 844147 - DNA, 544 bp, Homo sapiens
gtcacgtctcagccaggagtcgcagaaggagcgggactcagctcaggccaggctcaaatccaggcacagccccccttgcgctggagtctttgggcaggacctctaccctgtccaggactcggatcaggtgcagggtagctatgatgacccagccttgtgggttgatgtggaagctagaggtggggagtgggggctccaggtgctgataacaggggccctatacctttcaatgctctgagaggtagctggggtgggagggaggaaggggcctctattagtgtgagctgtcaggacctaggagaactgtctgcacacagctacaaggccagggcttgactctcccacaggacgggccttggggtggggcagccacgtgcttgtgggcctcagccatgcacacaacatgtccagacctgggaacctagagcctagggcctttgccacagctgggacaccccagtggttgtgttccttgctgtgtacaggcgggaccctcgggagggrctcatgaaagtaggggagtctgcaaacttcttcccagtca

SEQ ID NO: 844148 - DNA, 544 bp, Homo sapiens
gtcacgtctcagccaggagtcgcagaaggagcgggactcagctcaggccaggctcaaatccaggcacagccccccttgcgctggagtctttgggcaggacctctaccctgtccaggactcggatcaggtgcagggtagctatgatgacccagccttgtgggttgatgtggaagctagaggtggggagtgggggctccaggtgctgataacaggggccctatacctttcaatgctctgagaggtagctggggtgggagggaggaaggggcctctattagtgtgagctgtcaggacctaggagaactgtctgcacacagctacaaggccagggcttgactctcccacaggacgggccttggggtggggcagccacgtgcttgtgggcctcagccatgcacacaacatgtccagacctgggaacctagagcctagggcctttgccacagctgggacaccccagtggttgtgttccttgctgtgtacaggcgggaccctcgggagggactcatgaaagtrggggagtctgcaaacttcttcccagtca

SEQ ID NO: 844149 - DNA, 633 bp, Homo sapiens
gtgcagttccatcagctgtaatcaatatttgacaggactgtgggggtcctcagtggccaaggttgtagatgtatttgaaggcagcagtagtgatgaaagttttagagggccttagtgtcaaagattgctgtrgtcctcctgctattctttttcctggggccgcctatgacactgtggggagtcctagccaaagggatcctcttggtgctgagtctgtcacaagggcatgctggtaaccacagtagcactggttccagggcacaggcatttttgtggcagtggtggtcccagtattcagcacataggtgatcagagcaacatcagagccagagtcctgggctcaggagtgtatagaacatctatggcacctggagaacagggccataattctatagcagtgggtgtcatcagtgtctgagacaggcatttgacagtcttaactgatataaccaaagtaaatgaagctaagccctttaaaaaagcacaggttatttagaaagcaattaacttacatgattaggaagtgctaatacaagatttcatggagttcaataattcttgaaagaaaactcttgcttttaagggaattacattactgaggatacttttggttgcaaggaacagaaaacacac

SEQ ID NO: 844150 - DNA, 619 bp, Homo sapiens
aatatgcatgaatctaatgctgaagcacccagattcataaaaaaaaattcttagaggcttatattgatacttacataccacacaataatagtgggagactttaacaacacactgacagtgtcagacaagtcatcaaagcagaaaatctaacaaatatattcagaacctaaattcaacacttgaccaaatggaccaaacagacatctacagaatactctacccaacaacagaatatacattatcctcatatgcacatggcacatactctaagattgaccacatgctgggtcataaaagcaatactcaacaaattcaaaaaaccaaaaccataccaaccacactctcagaccacagtgcaataaaaatagaaattaataccaagaacatctctcaaaaccataaaattagatagaaattaattgctctgctcctgaatgactttaaagaatgaaattaaggcagaaataaaaacaaatacttggaaatgaatgaaaacaaatatacaatataccagaatctctgagacacagctaaatcagtggtaagaggaaagtttacagmaccaaatgcctacaacaagaagttagaaagatctcaaattaacaatctaatatcacct

SEQ ID NO: 844151 - DNA, 584 bp, Homo sapiens
tggtccagggtgacagccttcatcatgcttcctactcccacctggctcctctacaacccctttgtaaataagaccaagtcagtaccgtctcaggacccacgaatggcttcaataccatttagaattaaatccaacattctcactttggcaaataaagccgtatctatccctctagtcccatctcacactgaatcctagaggctatgtgacctttgtaaattatccaacctctctatgcctcagtttgcttacatataaaatggaaatacagaaagtacgtgcccacaaggttgctgtcaggattaaaagtgttaatacgtgtaaagcgcttaccactataattggcatgtggcaaaatctcaggttacctattattattattattattattattattattattatttagagacagggtttcaccatgttggccaggctagtctccaactcctgacctcaggtgatccgcccatctcagcctcccaaagtgttgggattacaggcgtgagccaccatgcccrtcctcaggttacttattattattatttcctctgccttttccaactgtttgaaaggctggatcc

SEQ ID NO: 844152 - DNA, 486 bp, Homo sapiens
gtgttccaagatgcattctaccatgggctgagtgtcctgggtttctcaagacgtatatttcaatgttagggcatatgtacacaggcagttttggtagggcccaaccttcttgtatatgtcagtgcataagcatggtgtgatacagagatgcttaacccgtgggccccaaaacagggcattaggagatctgtgagtccctcgatattagatgcaaaattgccttggtgcccttgtacctctttggaaccaggaaatccatagcttttattggattctcaaagggctctatggttaaagattcatgatcatgggaacagctacctggaaccagccctccacagcctctttcaggtatggtgggtttgcaagggggcttggagagatcttgaggtgrtattccagtctgggggcaggaagggatgggtggagaggcaaagcgatgagatcagtgacagtcagataagcccaagggccctgggtgtcctg

SEQ ID NO: 844153 - DNA, 546 bp, Homo sapiens
ccgtggatatggagggtcaactgtactttcttagaaccacactgcagtctaagacacttgttcccaaccacccttccctccttccatcttgtctcacctctgagttctaatggccctcakcctcctctgcctttctccctgcctttctcccaaatctctttcccctctaaatctgcgtgtctccctcttagagagtccaaattagcacagggtaggggaagaaaactagtcatttatcatcttgctgagttcttacaggggcctacaggatctacaatctggcccctggctcctaggggggaattagtgttagaataatcctaatcactagattaaagctttctgtaccttttcccaggagacggtttgactctccaaggtcaatggtgttgctgacccggtaccctttgtcctggatggcaatatgaaagtcttcttagctttaccctttgtaatctcttttaactttcactaagggcattttccttttgacacatctttactttagatgtatcatcactttggagccatataaacctggaataa

SEQ ID NO: 844154 - DNA, 590 bp, Homo sapiens
agaatgggtgtgttaagtggctacaccgggaatcaagtatagtgctagtgagtggagaggcggggaaaatggaggatgggagggtcccagatacaagctcctcaacctcatcaatgtcatgattgtgcctggaccagccctgttcattacaatcagaatccctcctgtgcgtcttggacataagccttagctagctggccaacctcagaacagaccctgcccatgtttgtcccaaggcagcctaactccattttttatttagatatgcaattctggccattcaagcttctttcaccaggaactatttaattatatgcattccatgttcgtcctgaggtaaattagcctaagtgattattgtatcaaaccctccaactaaattgtgctcaaggacatctaacctcttaaatgttatataaatgaacataactggacttacataatttttaaataatgcatgatatttgtacctatttgggggggtacatgtgacttttttatataygtatacaatgtgtaacgatcaaatcacagtatttaagatttccatcacctcaaacattatcatttatttgtgttggtaacaattt

SEQ ID NO: 844155 - DNA, 566 bp, Homo sapiens
tagaatgacaatctcataactccaatttgaaacatgtaaataagyaactgagatagacttctgtttttttttaacttctattttaggttcaggggtacatgtgaaggtttgttacataggtaaattcatgtcacgggggtttgttgtacagattatttcatcaccatactgggcttaggtattaagcccagttcctaatagttatcttttatgctcctcccgctcctcccaccctccaccctcaagtagatcccagtgtctgttgttaccttctttgtgtccatgagttctcatcatttagttcccacttacaagtcagaacgtgcagtatttggttttttgcgcctgcattagtttgctaaggataatggcctccagctccatccatgttcctgcaaaagacatgatctcattttttttatggctgcatcgtattccatggtatgtatgtaccacattttctttatccaatctgtcattgatgggcatttaggttgactccatgactttgctattgtgaacattgctgaaatgaatgttcatgtgcaagtgtctttatagtagaa

SEQ ID NO: 844156 - DNA, 639 bp, Homo sapiens
catgccctagatccgtttggatccatttgcctcrtgtccctattggggtgcggtaccaacccaggatggggtgcagttcatgatatgatctgtctgcctgctccccccaccccccaggttctcctggatggatacctgatgatctgtgtggacggggggccctccacagatggcttggactggttctgctaccatgcctcttcccacgccatcttcccggccaccttctgtcagaagaatgacattgagctcacaccgccaaaaggtaagactagagaggccaccacctgctgtccttgccatcagaaggggcagggtgtccaggcgcggtggctcccgcctgtaatcctagcactttgggaggccgaggcaggtggatgacctgaggtcaggagtttgagaccagcctggccaacatgacaaaacctcgtctctactaaaaatacaaaaattagccaggcatggtgacaggtgcctataatcccagccactcgggagtctgaggcaggagaattgcttgaacccaggaggtggaggttacagtgagccgagatcatgccattgcactccagcctgggcgacagagcaagactctgtcttcaaaacaaaacagaaggggcagggtgtggccacaagccc

SEQ ID NO: 844157 - DNA, 604 bp, Homo sapiens
gaaagggcagggcacaaagggatgcccaatacaaacatggaaagtgcaggggagcttgctcctgggcaaatgatctctgagcctcattgttagaataggcccaatgatacctcacagagctgctgggacaaataatggagacaatgtagcagaaagagcctgacaaccagtaagagttcagtacactccctctcctcccctggacacaccagtgcacaacttccagaaactcaccatcttctgcagtgttgagtttgaggctcttgcctttgaaactcagctgtcccccggccacctgagtcttggcaagtgtctctgccagcttggcaatgtcttccgaggccatgttgactaggctggtgggctcccctggagatctgcagactgaggaggccaaagttgcagtaagaaaaaggagtctcctggggcccctggttgggggcagggtaggacatcagccatctcaggagtctgaccctacctcccctgctatggagaccctagagataaaycactggaagaaaggaaaacagcatcagagaaggaacagttctagaaggtgcaggaggtagtaaaagaacagaaaaatcatgtcttagcctat

SEQ ID NO: 844158 - DNA, 375 bp, Homo sapiens
ggaaacgaaaaagacaactgaatgcaagacatggtcctggatcggatcctgggtggggattgctataaaggacaatactgaaacagcaaaacttgactatattagataataktattgtatcaatgttaaatttattaattttgattatggtacagggttatgtaagagactgcccttgttcttggaaaaaaatgctgaaataattagggacaaaaaggacatgatgtctgcaacctttatggttaaaagaaatatacctatacatatacatagagaaagcagagacacaaatgtggcaaaatgttaatcagttaatctggttgaagaatatgggagttctttgaacatttttgcaacttttctgtaggtgtgaat

SEQ ID NO: 844159 - DNA, 480 bp, Homo sapiens
ttgattagcacctactatgtgctaggctgtgtgctaaatgaatattaaaatagaaatcacagctgggcgtggtggctcaggcctgtaatcccagcactttgggaggccaaggcaggtggatcatctgaggtcaggagtttgagaccagcctggccaacatggtgaaaccccgtctctactaaaaataaaaaaattagccaggtggcctcctgtagtcccagctactcaggaggttgaggaacgagaatcacttgaacctgggagacagaggctgcagtgagccaagattgcaccactgcactccagcctgggtgacagagtgagaatccgtctcaaaaaactatatatrtagaaatcacatcatgtcaacctcctacttggaacccatggcttcccatcctaattagaataaaatccgaatcccccagcttgggctcagacctcacctccgacccctcaccccacctataacactccaca

SEQ ID NO: 844160 - DNA, 610 bp, Homo sapiens
acagttcttcccatccagatttgaagatggagatgagtccttrtgtgtgccacatgcctgggccctgctgcccccatctaaaaggtgaccttgaggcctgcgggttgcagattccatacatttctccacccctatccaaaagcaatacgtgtcagcgcgtgggttcgtgtgtttttgcaagcggtcatgccagagccagtctgcaagcctcattgcttgtggatcacctcagtcctgtgtcctgggcgcctggccttgcggcagcctgcctggaaggcaccactgagtccttctttcagccccgtctggggaaggcagacagctgtcttagctggggcaaggtcagcaaagacatcgccttcaggatgactttttccagtggttccatggacgagacaggatggcaaatgtcctccctttcctttttggcatttctggacctgatttatccagatggaatttctcgactttcaggcctgtgtctgtatgtgtcacctccgaacgaagggtgtgacaacctgactctggtcattaatacacatgattcattgattgagaatctacttactgttaggtggtgtatgtgtgtgactgggtggggcgtgggcag

SEQ ID NO: 844161 - DNA, 539 bp, Homo sapiens
catgtctgtatttcaagaccctgtctactcactttcatggaaggtgagggcatcacattggccttccctgcttctgcagtgcaattgctggccatgtttaacttgtaactttcaattcaatcagctgtgtgattttttttttttttttttgagacggattctcgctctgctgcccaggctggagtgcggtggtacgatcttggctcacttcaacctccgcctcccaggtacaagcaattctcttgcctcacctcccaagtagctgggactacaggcatctaccaccacgcccggctaattttgaatttttagtagagacagggtttcaccatgttggccaggctggtctcgagctcctgacctcaagtgatctgcccgccttggcctcccacagtgctgggattacaggcgtgaactactgcacccggcctagctgtgcgattttaagcaaatcattgctgcacctcagcctcctcaaaggtaaagagggactagggccattgacytcacaggtccttgctaaagatgaggtagtaatg

SEQ ID NO: 844162 - DNA, 554 bp, Homo sapiens
cctccccagaccctcagaactgactctggaatgcccttgtggcctctgagggtcgctggctctgtggccatccccagggtgacttacaagggcccagtscccatacacttttagggcccacaaagacattttaattttaatttcttttaaaaccagaagaaaaaaactgatgctataataataataataataataataataataataataataatattagtggatcacaaatccagcctggattttacttgtctttatacagtgcagtcacaagctagagggagggtccctgaaagcaaacatccctggagcccaggaaagccatcattcgactgagccagccccatctcttgcaggaacaagatgtggctgtggcaagcggccagccatccccggtgccgagggacctgggagaagctagggcagctccggcattgttcctgccctgtggtccacagcctcgtcttcatctagcgtctgcaccccctaaccgtctttccaaagcctcggggatggcagggaaactgcagggcttgggatcccgcagaaccaaa

SEQ ID NO: 844163 - DNA, 578 bp, Homo sapiens
tttcaggacccagaccttgagaaactggtatctttcacttcctgctcrttggtatgatcactcttggaaccagatgcctcctgtgaggaaactcaagccacctcatggaggggaactgtcagacagcaacatctttccagccctgcgagcaagtgagccccagttgagccgccccggtggaggctgtgtgcagagcagaaatgaaccaggcctgtccatcctggcccacactgcagattcacgagcaaataaatgttttgttttaagccactaagttttggagggtggtgtgttatgtggctgtagagaaatagaacatcttcccaactgggaaggaatttcctgggccctgcaggaacccaatccagatgtaggattttaataataacagagaggcctggggttattttaaggaagaccaataaatcaggtcaggaaacatcatctgctgacttccctctggcactccctagccttgtcaatgagaatagctgagaacagtctaggagtcttccctatttgagatagaatcctctgctaatcaaacacacctcgggatcctctatggccagggtgga

SEQ ID NO: 844164 - DNA, 466 bp, Homo sapiens
atccccaacttcaagctggtcggtcagaagttccagaggcctggacttgcaactagtgggaagggcaggccagtcttggggactgagtcttcaacctgcgggatctgatgctatcatcaggtagatagtataagaattgaaatggaggacaaccagctggtgtctgctgcaaaactgattgtttgcttggtgtgtgggggaaaacctccatacatttggtcacagaagtgttctgtgttgattgctgttgttgaatgggaaaacaaaaaaagcacagtttgtgtttttccactgacaatgggctattgtatatattccccgtttccctaatttagggtgtaaattagttgaaagtactgatcatgtcttatttytaccatgaaaatatccccagtctcttcatattgtttactttgttcctaaccaagaaaaattctcaccttggatgtgatagaagtctggatcc

SEQ ID NO: 844165 - DNA, 642 bp, Homo sapiens
gctaagaaacacatttaaagatgctcatcctcattagtaatcagagaaatgcaaattaaagccacagtgagataacattacacacgcttgagactggcaaaaactaagwctaacaatattgggtgttggacaagatactctgataggcatataaacggtgcaatcactttgcaaaactttgtgaggttatttaccttacaaagccaaacattcacatacccccaaagcacaaaactgcaagcaaccttatcactgacaggagagtagataaatagtggtagagaagtatgttcacatgagaaatagcaaacacacacacgtacacaagtgaaacgtatctacattaatgacatgaatcttagaaacagtcttgaagggaaaggaaatgagtatgtttctaacaaggaaagctatataatgtaatgacactttatatatattaacccatttaattctctattcgaggtaggtagtattgctctcattttatagataaggaaactgaggcagagagagctcaggtaacttgtgctaataagtgaaggtgccaagacctacctaacatttctttcatgcttacacagtactaggtactgtactgctttgcctagattatctgtttcatgaaatatgctttttata

SEQ ID NO: 844166 - DNA, 601 bp, Homo sapiens
atgtaacttcacgacctgagtcaagagaatacagtatttcttaaacaaaayacaaaaaggttctcaccataaaggaaaaataatgtttaactgccacaaaaatgaaaacttctgcttatcagacagtattattaaatgagtaaaaagctataatacaagtagaagaaaggctcatatgcagaatattttttaaaaactcttatgaaacaataaaaaatgatggacaatccaatagaaaaatgagccaaagactttaaaagacacatcacataagaagaaatccaaatgatctatacacatgggaagaggttctcatcattaggagtcagaaaaataaaaattataagcagtaagtgatgattacacaattctgtggatatgataaaaactaacatgctaaagagttgtacattttaaatgcgtgaattgtatggcatggaaacagtatcttattaaagctattatttttaaaaaacacaagcaaaagtagtgtacacctacctactcaaatgaataaaatttaaagattgcgtcagttagaatgtggagcaattaaaactcttaaccactcctgatgggagtgtaaattggcacaaccact

SEQ ID NO: 844167 - DNA, 617 bp, Homo sapiens
aaggaacacagattttgattccaggaagcaggatgctgtggtaacaaatgcctacagatgtggaaggtattctggaattgcataatggggagaggctggaggaattttgaaactgcctaaaagagattgttggtgggaacctggaggttaaggtgcttctggtgaggcctcagacaggaatgtggaagataatactggaaactgaaggaaacgtggccctcgttataaggtggcagggaacttggctagaacttggaaatcatctggtccagcccccttacttgacaaatgagggaatgaaaatcagagaaagggaaagggagactgatttactgagagtctacatggggtccagcaccacacctaaatgatcacatttaaatcttcacaactaccttttttaaaattttatttatttatttatttgagacagagtctcgctctgtcacccaggctggagtgcagtggcgggatctcagttcacygcaacctccgcctcctgtattcaagcaatcttcccacctcagcctcccaagtagctgggacattacagcctgccaccaccccaggctaagttttgtatttttagtagagacgggtttcaccatattggccag

SEQ ID NO: 844168 - DNA, 513 bp, Homo sapiens
agcctctggttgtgggaacaataaaatatgacaattattggaaaacaagccaatgcaatatacacatttcaatttggtgacatatgcccaacaaaagattgactacaaatactggcaggaactcataaagggatttgaactttctgctggccacaatcaaagagatgccagaatcaaaggaacaaggaagggacacatggagtgggagagaactcaaagtgaggtatcaatccaaaggatcacaggaggccaggaactgcaggattctctgccagagatgcccactgccccctcataaagcctggaatgttagagatgggtgggcttcagagtcatctgaaccattctcctccttttataggacaggcctctagtatggtgcagaagtttcctttcagcaagggacacctctgtttactgcaattgggttgtttctagtgagtgaaagagkaagacggaaagcacaaaaagggaaggagatataacactgagcacagatataaaataggcagc

SEQ ID NO: 844169 - DNA, 522 bp, Homo sapiens
ggtctctgcatgtgaagtagtccactgtgaagcagtccgcagggactgatcaaaccacacctgcctgttcaaagagctctgccaycaaaaaaatgattaccctgaaaccacctttgcaaaaattataacagtgagaaaattatgacagtgtgagatctcacctaactgattccatcttgcttctaaactctaagctgcccctgttcattcctgatcatagcctgaactaactttgggagaaacttagtttatagtttaactttgaaacaaagacaataacagccctttcccaaaacaaacccacttcttgcctgggtaccagaatgcctttgtaagactaacaagttaggcacaagattcaaaattatggtttaggagtcatgcagccagaggccacaagattctctacctccccattactcctagggataacatcactgttgtaaaatctgttatttgtgctcaagacatttttcagaccctgcattctgatgcaccagctggtgccactcagacagataa

SEQ ID NO: 844170 - DNA, 521 bp, Homo sapiens
atatacccaaatgtcctgggtatctccaactgagcctcatcaggtggcagagcagtctcagtgggccaaaacagcaatccaaccttccccgctggtccacacttcctccaatatgcctaatagccttccaacacaaaaaactggacactttaccataatcttgtatgtcccctgccctagtgcctagaatcagccatttctccaaggagccctggttcctttcagtaaataattatatttagaagccaagatctgggtgtaaaatgtgctcattgcatggaggctgtcgctgctcccagcccctctcagtggcagggctaaggaatatatgtacatagataacatttatgtatagtcatacatacacacacctatggctgtatttctatgtctttttatatctttataaaayatatacatataatcataaattgacaccaatatctccagttttgacccaccaccagtgaattcatttgagttttctccctctccatatttgtaactcccttctctgagaa

SEQ ID NO: 844171 - DNA, 658 bp, Homo sapiens
tggtggtggtggtttgctgctcctagatttttggagctggccgctatttttgaagtgtgacagagtacagtagtcacagacctgattgttttttctctagaacttaacagggaataattaggtttcagtttttacttatggccagatttcagtaatgaatgcccatttgtattgaagaggtttacatttcacaaaaactgctggatcagttcagaccgagagtattcccactagaataatagtattgaacaccatgtactgtaatattaattcattttgttatcctgtcttttgttcactggatgatagttccataaattgctcatgcaatttgtggaggtaaatcataaaatttagtggcacacaaataacaacacttcagcataatcagccctaacatcaaaagtcttgtttagttcctgccagttaaccaaaatatttcaatgtacattttgtcttcatttaaagacttaatacattatctttatattattactcctcttcattttgtatcttcgttaaattatagcatattatagatatataacttttgttttatgcctgtcrgcattttattttagggctgctttcttcctgtggcatcttttctttgacactgcagatatttccatgtagaaatttttcttttcctttagat

SEQ ID NO: 844172 - DNA, 619 bp, Homo sapiens
caggctgtacagggagtatgcctgggaggctgcaggaaacttgcaatcatggtggaagggcgaaggagaagcaagcacatcttcacatggcatcagaagaaacagtgaagggagaagtgccacacacttttaaaccatcagatctcatgataactcattatcacgagaacagaaagggggacatccgcccccatgatccaattatctcccaccaggtccctccctcagtgctgggaattacaattcaacatgagatttggatggggacacagagccaaaccatgttagtcactaagtgccgtgaaagggatgaactacatgtggtgtgatagggcagagggtgggtgtagaccctccaggtgccgtgcccagagatgcgggttcaggaggagacaccactgcccatggcccacctctgtctgtctcttaccccaccttgggagtaagcagacctttcctgggagcccctagctgatttcctttcccaccttgggagtaagcagacctttcctggaagcccctagctgatttcctttcctgtctcattggtctgaaatgaaccccatactcatgtcttagcccrtccattctcgaggcactcctggggctgcgttacacc

SEQ ID NO: 844173 - DNA, 613 bp, Homo sapiens
atgcaggtgactctaaagaatgctgaacagcaagaccatgaaactacaaagaattcatatggcctgcacattcaaaactcccagggattttggagactttgcaaaacttyccattcctaaaattgtataagccactttacagtttataaaataccttgcttcagaaaacagtcaaaggtaaatactcccgtacattcagcctcgaaatggcctctgtttagaagcacactctaataggttcctcaaggtcagaccattgccttattacaggaaatggatgaagtcattcctggctctcagtttttctgaaaaactacctgctttctcagtttcacacaccacacccctctatagctcttgttttgtctcctcggtcgtggcacctgttctgagaactgaagctttcatcttggttctagtagcacatgagaaaacacatttgcaaaagcacaaacaagcaaaggggtccaagcgagaacttcaatgtttgggtgaaacaacagctaaatttgttcacagtaataataaacatgcatgagctcactctttcagagagcagtaatttgagcagcaattctgaggtcaggatccaaggttctaggccagctccagc

SEQ ID NO: 844174 - DNA, 607 bp, Homo sapiens
cacctgtaatcccagcactttgtgaggccgaggcaggcagatcacctgaggttgggagttcaagaccagcctgaccaacatggagaaaaccccatctctactaaaaatacaaaattagccgggcgtggaggcaggtgcctgtaatcccagctactccggaggctgaggcaagagaatcgcttgaacctgggaggcggaggttgcagtgagccaagatctcaccattgcactccagcctgggcaacaagagtgaaactccatctcaaaaaaaaaaaaaaaaaaaaattcaccagaaggaaagtgcttacctatttgaacaactctgtacgggtctatacagtattccaaggctcttcaataagcacatggtgatgacccaggtcagtcgtggcaaggttggggaattagaacaaacctctgtggcaaacacagattatagcttgaagtgagcatcacggatttctacaacaaacactctgacaaatatttcctrtgataaacatccacgttctcgaggtgggacaattaacccaaactttccaaattacataaaaacttttgctctatctaattaagctgataaattcattattttaaatgacaacat

SEQ ID NO: 844175 - DNA, 538 bp, Homo sapiens
atcaatcaaatatctgcagcttgacaactttagctctaaaagggggcacttttttatcttgtaccttttcttataaattttgggatataatttatttttggtaaaaaaaaaacttcagaaagtggtttagttgaaagcaccttaggctttcttattaagaattaagctgcccatgctattcatacttgtagtttaattcctcacttattgttgtaattgcaattggattttgcaacaacagcaacaaaagcctccctggcaagttcctggtgattctggggaagagggcttgagcctgagctgctctaacctctccttcagtcctcagctccctgcggtctctctatagagatatgagacaccccattcccagtacaagccacttttccagcttcacacacacgccctcttggatatgctccctgtgacgggcaaccgttctactggaagtaattctgaaaaaagccwctgaacccatgaggcccacgtggggcttacctggcattcaactgtgttctcctacatgtcaccatgtcct

SEQ ID NO: 844176 - DNA, 466 bp, Homo sapiens
aacttagatcccttgcatgcacagttcacagtagggtttgtgctcctatgagactctgatgcygatgctgatctgacaggaactaaggcagtaaaatgtgagtgatggggagtggctgtaaatacatatgaagcttcacccactcacccaccgctcacctcctgctgtgcagcctggttcctaacaggccatagaccgctagctaccatccatgccctgggggttggggatgcctggtctacagtgaagtaaatatcctagttcccttgagaaggagtctccattaatgtggagtcatagagctttttggaggagctgtggacctgccccctcagttccagctacacagctgctcagggcctgtttggcacttgccatactcctgtcccaggacaggatcccacagtggtaacaaaggctgccgatcactgagcaactacgacgtgtgctgggcaggagctctgtt

SEQ ID NO: 844177 - DNA, 616 bp, Homo sapiens
tttttgcaggagagggtgttgaccgtattgagcgtggataagggaaatagtttttgttatatcaaaagaagccagtccagacatgattttcttcttccaatatggaaratgctatttttaaagaggccactgatcttttgtttgctatagaaaatgaagtaatctcttagggtaatggactcaaactataacaaaggacaggttatcttaaaatttgataagacatttctaacaggtaaacaatgacatcgtttactaggaagaaaaataaatgttctttgtggagatttttaaaaatagacaaaacaatcacctgaagagattggcctatgaggcttaaatcacggcactgcaggagcagttcaatttgtcagattggaaatatgatgtaagtttaaaaaatagaggaaaataaacacaatctagattgctgctacatatatagttcagatgatttaaacttttgcaacaaaatgatgcttggtatttatcagttttcccttccaatagaatataaaccgcacgaggcctaagactgtgatgtcaactggaaacaaatcccttcatttctagactcctggggaattggcaataaggataaagaaaataagtatta

SEQ ID NO: 844178 - DNA, 554 bp, Homo sapiens
tgctaccaagtgctgtggcctctctctgcctgaggggtggagtgaggaacatctgcccatgggtagtagcaccttgtaaaatctaaaaggtggggaggcaaagaggacacgcactgcatcttcttcccttgcacttccttttactactagaatgagagtttcctctttccgtgatgctctaatattcctagtcaggccaagctattgctaatcagaacattctccggctctccagtcttctttattagactggcctctacagggctggagtctcttttctgacagtgccactgaatcagctgtctgaagaacccttgcgggagactgatggaccttcacagacaccgtttctctaggtcagctcagtttaccccaaggccacaggcattactgcctcctttaacacagcactgcttttaaacatttctttccccccacttagtccccagagacttagagttaacttgaataaattcccctaatctgagattgaaaagayagaaaagatagaaatcttttcttccttcaaaatacttaacatatatttgtgggac

SEQ ID NO: 844179 - DNA, 625 bp, Homo sapiens
ttttattctcttgctgtttttaggatcctctctttgtccttgacctctgggaagtattatgtgctttggggtagtcttatttggattgaatctatttggtgctcttcraccttcctgtgcctggatatttatatctttctctaggtctgaaaagttttcagtaagtacttcttttaataagctttctactccttgctctttctcctctcaaaggtcaattactcttgaatttgttcttctgaggttattttctagattttctaggtgttcttcattcccttttattctttccttttttcttttctgaatatgtatttttgaaaagcctgtctttgagcccatcaattttttcttctgcttgatcaattctgctgttgagactcttcaatgcatttttcagttccgctaacatgtttctcagtttcaggattcctatttggttttttcaattatttcgacttctttgttaagtttctatgataatatcttatttgatttttagtgttattttggagttcactgtttctcgaagactgctattttgtattcttgaggtgagagctcacacattgacatctttttgggttctcttactggcttcttgatttgtggatttgaggaggtt

SEQ ID NO: 844180 - DNA, 642 bp, Homo sapiens
acacttatggcagcttagaagcaaaagtcaacatagctattggcatgtacatactatcaaaacaacagactttaacacattttacaaattgtagctcatgatattgtttcagcattcagttcttgagttctcaactaaaatacagttctttcgtttatgagggcagtatgcaaagaaatgaaattggcttagtggaattggttttgcattagcagtgtttttttcataaaaattcaagtttaattccatattgctttttgaaataatactgtggcaatgagtcaacaggcctttcccctggcattcttagctctctaatggggcaaactgtcttatgataatgcctattaattttatgtgatagtatggtttattacttaattttaaaaattagaatttaagatgattttattgcattgttttaaagttcattttattgtgaaaatacttcaaatttgacattccatattttctttttggttagtggctaattaagttttaagtttttttcttacttttatttagattcaggggtacatgtacaggtttgttatataggtaaactgtgkgttatggggttagatatacatattattttgtcacccaggtaataagcatagtacccgataggtattttttctg

SEQ ID NO: 844181 - DNA, 623 bp, Homo sapiens
agccagcattgcagcaaagccttctttgtatgtgagaagctgtattaatgtaatctgaaataaaacacaaaaattcctggaaatgaaaatggaaattactcacatcaagcactcacaacagcacaacagkttctatagctctaatgaatctaaaatggaaagatatcagaggtgtagattagtgtcattgatcaacaggatgagtgtgagccagcagcccacagttaattctcacttggatatcactcagaaagatactctgaataactttctggtatgtctagcaactgggggctaataactctttatcagtcaaaagtcaacacagcaaagagatgaataatgtgctctgggtgtaccattctctcttctcattctaagtgcattttgtttacctggcaaaggagagctttctttactttcccagaataccttttcttttaggggacaactatttgtagaaattgcaagaatctggatgtggagaagccattagctaccctgtgggtgacagaatgcatttgcacattaagaacaagcagaaaacccaatcaactgacattccttgtctagattgaaaaacaaacaaacaaacaaaaaaactaggccagatacagccaata

SEQ ID NO: 844182 - DNA, 572 bp, Homo sapiens
cctagccacttgggtggctgaggtgtgaggatcgcttgagcccaggacatagaggctgtagggagccaagatcgcgccactgcactccagcctgggtgacaaagtgagaccccgtcccccccccccaaaaaaggaaatattactttttaaaaaacttattctaatacatttgaatgtacctgatatgaaatattgagaaggatagtggaattcagtatcatataatttatgagttaatgtataagattcaaaagagaagaaaaagcaaaagacaggttctagagacaaaaaggtttggaaaattgatgaactgtttgaggggatggtccctaagatgatgcagagggccttgggaggtggggaatgaaaaattagctcagctatcactctgatggtctatcattcatagtttttgagttgattttccagtagtggaggtaagtttctgtgaacacatctatcatatttaaaaattttttcacttaggaccaaaagtacatatttacaagatggctgcccayatccatgtagcagaatgatggcccaccgtatatagctcatctccaaatggc

SEQ ID NO: 844183 - DNA, 609 bp, Homo sapiens
agagttttagtttgtttttgtttttgtttgtttgtttgttttttcctggcaatatcctgcttgatatttccatgcattgcagctctgacctagtgactgaagactgaaacaaggtaaaaggtcaaaggcggatgatgaatggctggagccaaactgggatgagttaactaactgatacatatcatagtgacctagttctgcctggcatctttgcagaactaaaactgggacctaaatagcattgtttccaggagaagaaaactggttggcaatttgtcaaaatagtagaagcgaggtctcagccccgttttttttttttatggccttatgaattttaagtaacctcaggaaggcattggaagttttccttgagatagaaatctctccctctgtccttttcaaagcctccatggacaaaatactatcaaaatgatcgttattctgccagtcatgttaacaaggaagtgtgcattttaataatttttcattccttttccccagagagatagacacagggaatgccagctcaaaggccaatgtatccacacatcyacccttaattaaataggtgggcaagagtatacattttgcaatttaaaaaactatttt

SEQ ID NO: 844184 - DNA, 629 bp, Homo sapiens
tttgttccctgtgttgtcctttacatgaatttttcctcagttaaacctcaagaccatctcataaagttgattcttattagtatttcttcatttttaagatgaggaagcctagatgagcaaaagttaaataaatagcttaaagcttcaatgtcaggtagtctgagtccagagcctacagttttcaacactgcactgcaccccacatttggacaagaagaaagggtagagtggccatagctacagccagcctgtacattgtcatcgtgcctcagggtttataaaattctgtcacccatgttgtagtatttgaactcatttaacaccacaggaagctagctaatgtcaagagtgaagtaccctacaccagagagcttggcagaaataaaacaaagagtgaaatctccgggaggctgaaaagagtgcttaggcattgctgttcactcctgtccttgtatgagccttagccctgctgtgtctgttaccagcacagtgatttccaccatagcacacagtctcagtctcggtttgtgtggaacattgtttctgttcctggaacagtgggcagatcttgccaggagtggcgtgctcaggtaagttgagttgrgatccttgctggctctccttgccat

SEQ ID NO: 844185 - DNA, 590 bp, Homo sapiens
tcacagggctaggatcacagcagctactcaccttagtattaaatagtttggaattgactgatcctcacttargcagtccagggctctctctctcaattctgtcatgatcatgctgccttgactattgatgcccatgcttcctcctataaaccacccttcaaggttttcaaatccctactcatgagtctgtctaccttttatttcaatactgagcagccatcctcaaccaaggtcattttaataccaaggtccatgtccatcacaggggtgcccatctctggatggcaactccagtcttgtttgcttgtctctctcacaccatttctgtttactgactgttgaaggaagaggctgcgagagctccctatccccacatggcctgataatagaaatgagttattccactggctgtcaaaatactaaatcttcccttcatggatccaaaactgggcttagacactcctctactgtgctctccactgttcagattctaccattgaggacctcctggagaatctggaatccccaactctgacatgaagtccacagactacttgtcagtaacccccagggcatggtttctatggacc

SEQ ID NO: 844186 - DNA, 621 bp, Homo sapiens
caactttgtccccagaatgtctctctcgtgttcccctctgggtcttactgagattaatgagcagtccagttctgctatttactagttgagtgatcttcagtgagttaatctctctgggattttctttcctgagctggcataggaaaagactcatttgtatttcacagggttatgataagaactaagtgacataaggagtatgtgttgctttgcacagtgtctgctatttggttgccactaattaataagcattgttattataattctagtaatattgttatgtactcctttcatactataataccttcaccacccatacagaccatttttctggctttaaaattgtttctctgccacccatctcttttctactcttcctactcctacatacagttgtttagtggagttgatttgttatcatttttttcaatgaaattatactacacactctggcaagttttgaaatgcccctccaacattttcccttgtcttgcacaccatccccttcactattcactttgtgattaacaaaatattacaaaaaaagtatagtatatgacaatratgtcacctctcaaaatgaccagaaagtatacattcattcacactaacatgtctatt

SEQ ID NO: 844187 - DNA, 616 bp, Homo sapiens
acgttaatgccaagctttcagaggctccagagatgatgattatttttccagtttaataaattgtactttatagtttctttaacccacagaaataattggtggaaattctaccatattggtttattgccagttcttgttgaaaatattgctataaaaaagggggaataagaaataaatgctattgagaaaaaagcccccatcagtctgtatgtgccccaatagtcacatgaagttgattaacaaacatgcaaagcctacatggacatggatgctccagtaacttatgaagaaatccaatagctattgaaatgagttttattaccacatccctcttaaacttccttttagctatcaacaactattttcactaataccctaggcttaaagctatctctgattttttgttctttctttaaatcaattcactgatgacaaaaacagcttttccctaataaatctccctgcctttgctctctatcttctttggtctctaagaaaataggacatgtgagtgaggtaaaatgattcacttyagatggacaggatgcctcttccattgtaacaggagagaaggagcaaaggtaggggagctgacagatttgagggctggaggtga

SEQ ID NO: 844188 - DNA, 590 bp, Homo sapiens
gaacgtttaggcataaatggtgaggggggtcaggtggtaagaggctgaaggtgtgacagcctgaggtacacctgtgatgagacgtggccctacttctttcagtccctcccccagggcctggggtacagagagggacagcttggcatctgccagtggggagatggacactggttcagtcaactttcactctcaccagctttgggtcaggcactaagctgggtaccaggaatcctgagggtgccaggtggctcggaggcctcagggacttcacagtccagggagaaagagtcagacactgagagccatgagacaaggtttgacactagccacagaagggtcagcaaaggtcccaggagggcaccaataggggcccacagtcctggcatgagtgagggaaagccttcattcagtgacacttaagctgagtcttgaaagatgctaggagttcaccaaacgcgcaggtgggaacacagttgttctaggcatcaggaatckcaggtgcaaaggccctagggcagggatgtgtgggctgcattcaggaaacagacaaggcaagtgtggcagaagcagaagcgggagcatcaggggag

SEQ ID NO: 844189 - DNA, 557 bp, Homo sapiens
gccagaccccttatctgactccctgatgcctgttgaccaactcctatataaacccctaactttagttggttggggagagagatttgagacttgtctctcatctcctggctgacatcwcccacaataaagcctttcttccttggcaatactcgttgtctcagtgattggctttctgtgggtgagaactggacctaggtcaaacccctggcattcagcaacaaaattctggtgtcctgacttggattgcattgcttgtgacttggcagccacaggctgggagagttttgaaaacccttctagcagatgcccagccatatttggccagaggtttcagtctctctctctttggccccaactgcagtcctgattgcctaggaagaatattctttgaaatttgacatctgcatctggacaggtgagtgtcctttgtgggtactagacagtaggagctgctcctgtcaaattgggaaattctgaagaatttccatttgttgcaggttaaacaagcccaacccactaatgtgagagtggaaagcactctatttcagttcagacac

SEQ ID NO: 844190 - DNA, 671 bp, Homo sapiens
tacacacacacacacgcttctttgtttatttatttatttcaaagtccttcaagttgatctggaaaaagaatwgacctccctacccaaactctcaaccgtatgtctaagatacactctttggtacaacagacatcatatttaccccctctttatgtgacaattcttaaaacatctaaagactacattcttctctaaattaaaactctcattattttcaaccataatgtataaaacaggagtctttgtgttctagctgtatttctatatatacatattttaatcatcttaacccagcacacttacaatagccatctttcatttctggacctctttgtgtctaaaacatgagaggtgacattgtataaaggaacaagtgcaggttctaaagtcacattggcatagatttaaacccctcttccataccttagacaagccatttaacagctcagatcttcgatacacacatctgtaaagtgggcacaatattattatttactttattgtcatcaaagccaagtgagataaattatatcaagcatggaaaacacaaactcaatgagtctcagtttctctaaaccttggcctctccatcccttgttacctctgaaatattaatgtctcattagtttccaacagtgagatggctctttggagattattctttgtcatca

SEQ ID NO: 844191 - DNA, 597 bp, Homo sapiens
aagaaactgcattaagaatatctggggctgggcacagtggctcatgcctgtaatcccagccaaggcaggtggattacctgaggtcaggagtttgagaccagcctgaccaataaggtgaaactccatctctactaaaaatacaaaaattagccgggcatggtgacatgcacctgtagttccagctactcaggagagtgggacacgagaattgcttgtaccaggaggcagaggttgcagtgagctgagatcatgccactgcgctccagcctgggcaacagagcaagagtctgtctcaaaaaaaaaaaaaaaaaaaaaatctgagacatctatttgacaagagttttaatttcataattaggctaaatataattaagcaagctagaattatgttggaattctcaacaaatcagacaaaataaaccaaccaaaagcttgtcaaagctcaacatgtcaaaagacaagtttgtctttgtygctaagcagaaatatttaaatttcaattaatattattaaatgtgcacaatgttttggggaattgacagtaaaacaaactaaaacagaacatatgtgaaagtgctaagaaaaggaaataactga

SEQ ID NO: 844192 - DNA, 517 bp, Homo sapiens
tctcactctgttgcccagactgcagtgcagtggtgcaatctttgttcactctaacctctgcstcccgggttcaagcgattctcctgcctcagcctcccaagtagctaggattccaggtacctgccactacacccagctaatttttgtatttttagtagatatagggtttcaccatgttggccaggctggtctcgaactccttatctcaaatgatccacctgcctcggcctcccaaactgctgggattacaggcatgagcactgtgcccgaaccaccatgacagatttttttaaatgtattttatcttaattagtctttgtaatcgtttgtcagcactgtaatatgttgttattttcatttagcatatcaggaaactaagattaagagaggcaactggcttctccagggacacagtttgaagaagtccacctgatttcaatgccttacgtttctcactgcagccaaggaaattgtaacagtaacaaggaaacaaagaagactttattaagcctttact

SEQ ID NO: 844193 - DNA, 616 bp, Homo sapiens
atggttgcagatgtgtgcattaattagcatctcaacaatctctgagcgcacagctactcagagcacaatcaattattccrgttcctaaatccccctgggggagaagcttaccccactccatgccattcagaggcatgattgcttaactgatattgccaaattgggtcacaaataatgagaaaagttccatttccctcagctgtgaaggttttgaggcacacaaaatgacactaaagcctagccacttggactacgcatttaggattgtggcacctgtcagtatgaatgtgttgcctaattaagtattctttggataacagtgtcacaggccaggagaaccagtctgccaggtagatctccccttaacctcactggaatttcctattctttgtctttacactgtgagcagaaacaaattgccaattttgttgatgcaagcacgttctcaaacaacttgaaactactcccaaacaccaacagccatgtgagaaagagatgaaacgcagtttgtggaaagtaaattcttgattatgttggaattaaagggtacatactttgctgcactttcaagaactacaggtaagagacacaacagtgttttactcctatgtcaaac

SEQ ID NO: 844194 - DNA, 628 bp, Homo sapiens
caatcatttttgttctcgttcagacagtggttcttaatytggggccacaacactctggggagccaaggagttatgtgagaaacctgcaaatcagcttgtgaacgaggcttttattttgattaaatatatcttacacacgtttgctactatttctcaatcatacatgggtactgttgtgattaataaaggaaaaaaatcttctgcatatgtaacttttttattatatagtaacctttttcattatatattttctcaatcagcagacactaggagtgcaactactgtcatgggataatcagatagttttgattgataaaataagttatatggacccaaaatgtttaggaaccactaaattaaacaaagacctttcttcatagggtacaaatgtttcatttagtagggcatcaacgtattagcagtcattaacacattagcctgaattaatcagcttgcttcagggtagggcattgaacactttcatcctaaaagcagagtggggatcagcaatggctccaagcaggtctagtgggttagaattagtcttttgggtgccatgtgtgcttcaggaattcgacagtttttatacttataatagtagtcaaactttgatagatgaattattgct

SEQ ID NO: 844195 - DNA, 388 bp, Homo sapiens
aatctgcctagcctctgcatatttatgtattccctgaactgcttgctctcccaaatggagaaagaatctcaccagatggactcttcacttggcaaatatttactgaatgtctggacgtgctggacattgggtccctaacttctcagagccttccaatctaatcatggagaccatgactgagcaaacatttcatgtttttacatataatggcatgtaaaaggtgaatgccttcaatgttctcaagtctaaaatagggtcaataatgatacttcccacacagggctatggtgaggattaaatgaaaaaacatgaatgtsaattgattactatagtggttggcacaggaaaaatactttggtgattatttcctggaagcatggggtaggga

SEQ ID NO: 844196 - DNA, 473 bp, Homo sapiens
ccagccttaattggtttaagcagaagaagggaatttattggcttatgtaactgaaaagtccaggggatgtttggcttcaggtacagtttgatccagcaactgcaatgctgttgtcagtatrtctccatctctagctcttctttcctctgtgttgacctcatgcttaggcaagctcttccactaaggtgacagacaatggtttcagcatcaacaaacctacacccttcaagtttaccaacttcagtagaaagtcctctttctcaatatttccagctgaagtcccaggcaggattctcattggtccagcttggaacacatgcctgtttctgagccaattactgtgacaaggcaagatactgggttatacatcgaacccctgcagctggacagtggggtcagcatcccccaaaccacaaagtccaagaatgggagtgaggtggttcctgagaatagtgaaggggtgttgttaccaa

SEQ ID NO: 844197 - DNA, 285 bp, Homo sapiens
caaacaatgaaaacagtcccccaaggttaaaactgaggccaaaagttaacgctgaccccacaatcatcagattccccagcccaagttgtttttttctttctcctcttccaacttatccaggagatctctttgtttaaatacaaaggtttatrtaactatagaaatcaaggttgatgcgaaggaggttataaagtaggaaaaaaagcagaacaacttattcacatctggcattaaaacaaattacttggtttacattggttgctttgtgttaataagctcgtgcaa

SEQ ID NO: 844198 - DNA, 582 bp, Homo sapiens
cagtgtcttttagtaaaaggccaggaaaaatgaaagcagggaagaagagaccaatctcccttatggaagaattccaaataatttatgtagatcctcccgcttctgggaggtggagcttaattctactccatcccttgagtgtgggcagtgctaagtgacttgcttccaaagaacagagtatggaaagaagggaatctttaattttacagggcagaaacctggcatacatggcctgggtcagggggttgggagaacaatttcagtgatgagtcatgcagacagcagtaccctctggtgtgatgtgccttcacctctgaggtcaccttcccgccacataaaaccaactggaaggcagcggtaattccctgccaccagaagtatagacaaggcctgccaagggaccgtgtcagtcgcgcttgcatcttggcttgaccttgctacgcctttggtttcttcatctatagaagtgagggcaataaatggagcctcccaaggcattcggaggattaaaagggattcttatacatyaaagtgctttgtaaaccacacagggccgcccacgaggagtgattaccagtgctc

SEQ ID NO: 844199 - DNA, 491 bp, Homo sapiens
gaagacctgttgaaaggggtcccaagaagaacttcttgacagagatggcagtatctctccagggaacattcaggggccataaaggggtcttggtgcttgcccaggaggtaaaatattgaggatctttttgctggctgagattttaacttttagggcacacagcatggtactgttagctcaaagaaggaggctgctttcttccccagtacagagtcacttcagacagtgcctggagtccggaagcaagcattgggctgatgcagtgcagactcccccgaaaagcatttgctgtggactcgctggtcacctctaaggaggtgacacttgaactcagaccagtacaacaagaaaggccagggacagcattccagggagaggtgcaggaaatacacggttccaggcaggacaaaggaaggaaaggaagccggtgtggctggaggccaaggccaaggtcagagggkgcgagcatgatagggcgcaagggcaaggcc

SEQ ID NO: 844200 - DNA, 617 bp, Homo sapiens
gtctttttgggggttttttgagacaggatctcactttattgcccaggctggagtggtgcaatcatggctcactgcagcctccacctccctcagcttcctgagtagctgggactacaggtatgagctactacgccrggctaattttgtattttttgtagagacgggttcaccatgttgcccaggctggtctcaaacgcctgagctcaagcgatccacccaaagtgctggaattagaagcaggagccaccatgcccggctttaacgcacatcttaaaaaatcacaaaactattgtagatttatcattcatgcatagtttttgctagaggtggtttttggagtaatcataaatatagtacagtaagtacaagtttacccggagacatggttcgctatcacattgatgtgtttttggcaaaagagaaagcagtatggttttttaccttcttgttaaagaagggcttttgctttgcaaggaggctctcaggctgcccctgctttcttctgggcacccgacccagaggagcaggtgtgtgcagggccccctgaggctcgagctggtgcctgtcctgggctcctggaggcagctgagggatgtgggctcactgcggtctaaagg

SEQ ID NO: 844201 - DNA, 575 bp, Homo sapiens
acctacataagaaacctggacatgtacacttgaacctaaaaaaaaaaatttaaaaayaaaaacataaaacaacaacaacaaaatactttggcagccataaaaaaaaaaaggtatttgagtagtccttggagctttgaaatagcagatggataacctatggatatttcaggttaatattttcaaagtgtttccttgaatgttatccccaaaagatgtaactgtgtgtggaagttggtggagaagaaattggtagttaaatgtgttggtcagatacatctctgaaagacctaaggagcataataacacattaaaggcttagagacatttgtcaagaaagaaatctttaacatcatgtttccaatacctttgataatgaatcactttttaaaaatataacctttaataacatcctcaatatctaccttaagtagaaccacaacagttaggctgatgattgtgatggtggtatggagggtggtatggcggcatcactcatattccttttagtaaacacatatatttttgttccttgaacagtttcctgtgcttgtatccatcttatcatttaccagttg

SEQ ID NO: 844202 - DNA, 575 bp, Homo sapiens
acctacataagaaacctggacatgtacacttgaacctaaaaaaaaaaatttaaaaacaaaaacataaaacaacaacaacaaaatactttggcagccataaaaaaaaaaaggtatttgagtagtccttggagctttgaaatagcagatggataacctatggatatttcaggttaatattttcaaagtgtttccttgaatgttatccccaaaagatgtaactgtgtgtggaagttggtggagaagaaattggtagttaaatgtgttggtcagatacatctctgaaagacctaaggagcataataacacattaaaggcttagagacatttgtcaagaaagaaatctttaacatcatgtttccaatacctttgataatgaatcactttttaaaaatataacctttaataacatcctcaatatctaccttaagtagaaccacaacagttaggctgatgattgtgatggtggtatggagggtggtrtggcggcatcactcatattccttttagtaaacacatatatttttgttccttgaacagtttcctgtgcttgtatccatcttatcatttaccagttg

SEQ ID NO: 844203 - DNA, 623 bp, Homo sapiens
cagcacttttaaaatatttctgttttatcccttcttatgttytctcttctcttgccttaaagttatttttttttctctttatggaaaaataggcaaaggttgctttgttgtatgtgagtggccacaggcatgtggtgtggattcagttcagtttgataaatattggttcaatattcttttattcagcacatatttatggagttcctctcatgtgccaggctttgtgctttgtgctagggacacaaacataaatgacatgcggtgcctgtccttaccctttatgtgtgagtttggggtaagagtaaagggagggaactttgagaataatggattagatatttagattgagcacttttgttgtctacactaatcctgtggtggtgcaaatgaggaaaagtttggctttattgcctgtccattcctatggcagcagccttacttcttggataggttaggctgaaggacaatcctcttcatttaggacatagctaaagataaaaccagaaagcgaggaagaaggcagtgccttcctgagctcacctgagtgttgccaagagaacagggttgaatctataagttggatgaaagattccagttttaaatgttttctagcctgatgtttc

SEQ ID NO: 844204 - DNA, 483 bp, Homo sapiens
tatctcaatgtcaaattgtaatccccaatattggaggtggggcctggtgagaggtgattggatcatgagggtggatttctcatgaatggtttaacaccatccccttggtgctgttcccatgatagtgaatgagttctcatgagatctagttgtttaaaagtgtatggtacttcccccctcactctctctcttgctcctgctctggccatgtgagatgcccactccccctttgccttctgccatgattgtaagtttcctgaggcctccaagaggcagatgctaccatgcttcctgtatagcctgcagaactgtgtgccaattaacttttttaaataaattacccagtctcaagtatttctttatagcaatgtgagaatggaccactatagtagcttttcaagacagctgactagggacatcacatgctagttcycctgagaaggaaaatcaaagttgtgggtaaatggtcaagttttgagtgga

SEQ ID NO: 844205 - DNA, 270 bp, Homo sapiens
gagtgcagcaaaccaccatggcatgtgtatacctatgtaacaaacctgaatgttctgcacgtgtatcccagcacttaaagcataataaaaawtaaagattaaaaaaagaaacatgctaaatctattctgcctgtgctctattaaatggaataacaaggcctggatgacagcacatctgtttacaaatggtttattgaatattttaggcctgctgttgaaacttacttcttagaaaaaaaatttctttcaaaatattactgttcatttcat

SEQ ID NO: 844206 - DNA, 577 bp, Homo sapiens
aaaagaaaccataaaacgagtgattacaatcagcaaagtgtgataacagctgaacgcattagacccatccttaaaaagccagaccccaccccctcccctcttgagcctgttcgatagagaaggggatgtcacacaatacaatccaaacacatactctgtccatattgggttaagaaaatatagtgctggtcattgtccccaaatgacagacatccacagatggaaagcaggagaatctgacttccacggtgcttctcattccaccagacagattctgtttggaaaacacccacctgcactaggatctggcctgagtactattaaaaaaaaaaaaaaaaaaattcttcatcatggtcactgccttgtagaaggaagcttaacttctctttgtacgtcttcctttggtaaagatagtgaaaggaaagccctaaaggcatgtaaccttttcttgcyttcattgtttaagtagggagggttcccccttaaaggagtcttgttctttctaatgcagaacacaaaaattgtcctattgaaggaatgcctgtttgatgtgtgagtataacatttcacttttcca

SEQ ID NO: 844207 - DNA, 577 bp, Homo sapiens
aaaagaaaccataaaacgagtgattacaatcagcaaagtgtgataacagctgaacgcattagacccatccttaaaaagccagaccccaccccctcccctcttgagcctgttcgatagagaaggggatgtcacacaatacaatccaaacacatactctgtccatattgggttaagaaaatatagtgctggtcattgtccccaaatgacagacatccacagatggaaagcaggagaatctgacttccacggtgcttctcattccaccagacagattctgtttggaaaacacccacctgcactaggatctggcctgagtactattaaaaaaaaaaaaaaaaaaattcttcatcatggtcactgccttgtagaaggaagcttaacttctctttgtacgtcttcctttggtaaagatagtgaaaggaaagccctaaaggcatgtaaccttttcttgccttcattgtttaagtagggagggttccccyttaaaggagtcttgttctttctaatgcagaacacaaaaattgtcctattgaaggaatgcctgtttgatgtgtgagtataacatttcacttttcca

SEQ ID NO: 844208 - DNA, 596 bp, Homo sapiens
aatcaagagaaaacaaatcaattattttgacattttagcaatatattaaaagtgaaagattgatctcataaactctgtgrcctggtcctggctgatgcaattatgccaggagtcccctgtaaaagtaattagggaagctgaaaaagtgagcactccccagatgtaatcttaccaatggccttaatatacgacatcaatgagttaaatgaggaaactaccagaggccaaacatctaggttttaagtttcagacaaggtttttgcttgtgttcacctcaggaaatgaatactgcattcataaattgttgttcttatccaggagatgaaccatagcagtttcatttagccctagagtattaaatttctttaacactttgtcacattagaatatgttttccatctgaatctgatgatgcaatatttgaagggaaaaatagttagccaagtgacattccataacaagccataaaagtttatgatgcacatagtaggataattggcacaacaggaactgaatacttccttatggataatatttgataagatatggcatgtataacaatcataacatttcaatcaaccaatgatggctacttt

SEQ ID NO: 844209 - DNA, 611 bp, Homo sapiens
atttggaagtacattgaggcctaaggtgaaaaggaaaatagcttcagataaaaagcaggaaaaagctttctgagaagctgctttgtgawgtatgcattcatgtcacagagatgaaactttcttttgattcagcagtttcaaaacattctttttgtcttttctgtggatggtcacttgggagctcattgaggccaatggtgaaaaagtgaatatcccaggataaaaactacaaagaaactgtttgagaaaatgctttttggtgtatgcattcatctggctgactaaaacctctatttcattcagcaatttggaagcatttttttttgtataatctgtgaagggatagttaggagcacatggaggcctatggtgaaagataaaatatcttcagctgaaaataagaaagaaggtttctgagacactgatttgtgatgtgtgcattcacctcacagagttaaaccttccttttgattcagaggttggagacactgtatttgtccattctgcaaatggaaatttgggagctcttgaggccaatggtgaaaaggtgaatatcccaggaaaaaaaaacctgaaggaaattatctgagaaacaggttttgatatgtgca

SEQ ID NO: 844210 - DNA, 541 bp, Homo sapiens
atctggcatgggacattgggagcacattgtggtctatgatgaaaaacaaaataaattcagaattaaaactttcttttgattcaacagaataaaaaaactgtttctgtccattctgtgaatggacatttgggtgctcattgaggccaatggtacaaaagcaaatatcccaggataaaaactagaaggaaggtatctgaaaaatggctttatgatgtgtgcattcatctcgcagagttaaaacttacttttcattcaggagcttggaaacacagtttttgtaagatctacaaagggttatttgggagcacaatgaggcctcgtatgaaaaagaaaatagcttcagattaaaagtacaaagaagctttctgagaaactactttgtgatgtgtgcattgatctcacagagttaaaactttcttttgattcagaagtttggaaacactgtttttgtccattctgcaaatatacatttggaagytcattgaggcaaatggtgaaaaagcaaatatcccaggataaaaactagaaggaagctatctga

SEQ ID NO: 844211 - DNA, 610 bp, Homo sapiens
ggaaaaaatgtttttgtccattctgcaaatggacagtcgtagctgattgaggccaatggcaaaaaagcaaatatcccagggaaaaaactagaaggaatgtatctgagaaaccactttgtgatttctgcattcatttcactggggtaaacctttcttttcattcagtagtttggaaacactgtttttgtagaatctgcaaacggatattttggtgctcattgaggcccatggtgaaaaagaaaatatcttcagatgaaaactagaaagaagctttctgagaaattgctttgtgatttgtgtttttgtcacatagagttaaaactttcttttgattcagcattttggaaacactgtttttgttgattctgtgagtggacatttgggagctcactgaggccaatggcgaaaaatcaaatatcccaggataaacactagaaggaagctgtctgagaaaccactttgtgatgtacgcattcatctcccagagttaatcttttcttctcattcagcagtttggaaaccctgtttttktagaatctgttaaggtatatttctgagtgcattgaggcctctggtgaaaaagaaaatatcttcagataaaaactagaaa

SEQ ID NO: 844212 - DNA, 642 bp, Homo sapiens
tctccccttctccttgggcttcctattccctgagatataatggtattgaaattaggccaattaataactctataatggcccctargtgttcaaatgaaaagagttgcaagtccttcattttaaataaaaaactagaaatgattaagtttagtgaggaagggatgtagaaagctgatagaagcaaaaaactggcattttgtgccaaacagtcaagttatgaatacaaaggaaaagttcttgaaggaaattaaaagtgctactccagtgaacacatgaatgataagaaagcaaaacagccttattgctgatatggaagttttagtggtctggatagaagatcaaacaagccacaacattctcttaagccaaaatccaattcagagcaaagccttaactctcttcaattctatgaaggctgagaaacgtgaggaagctacagaagaaaagttggaagctagcagaggttgcttcatgaagtgtgaagaaagaagccatctccgtaacataaaagtgcaaggtgaagctgcaagtgctgaggtacaagctgcagcaagttatccagctctaggtaagatcactaatgaaggtggctatactaaagaatagattttctcaatggagatttaaacagacttatattgg

SEQ ID NO: 844213 - DNA, 642 bp, Homo sapiens
tctccccttctccttgggcttcctattccctgagatataatggtattgaaattaggccaattaataactctataatggcccctaagtgttcaaatgaaaagagttgcaagtccttcattttaaataaaaaactagaaatgattaagtttagtgaggaagggatgtagaaagctgatagaagcaaaaaactggcattttgtgccaaacagtcaagttatgaatacaaaggaaaagttcttgaaggaaattaaaagtgctactccagtgaacacatgaatgataagaaagcaaaacagccttattgctgatatggaagttttagtggtctggatagaagatcaaacaagccacaacattctcttaagccaaaatccaattcagagcaaagccttaactctcttcaattctatgaaggctgagaaacgtgaggaagctacagaagaaaagttggaagctagcagaggttgcttcatgaagtgtgaagaaagaagccatctccgtaacataaaagtgcaaggtgaagctgcaagtgctraggtacaagctgcagcaagttatccagctctaggtaagatcactaatgaaggtggctatactaaagaatagattttctcaatggagatttaaacagacttatattgg

SEQ ID NO: 844214 - DNA, 626 bp, Homo sapiens
ctaagcaatgagtagtctatggtattataaagagcaattcaaatatgacccctcagtcctcagatgttttctttacaagccaggacagagaagtgaaggatttggaagamaacactgtaactgttaaagaaaaatttctacagcaataagataccagaaaaatcttacccccaaaccagttcattactactacattagctaaaaccagtattcaaatttgaatcagtcactataaagttttttggttatatttaatcgtgatttttgaccctctgataggtaccaaggactggtggttcacagattactgatatgacactttcatgtcaatttcaaaattaagatctagtcctggctcaaaccaattatccagcaatattctttagggtaaagcaatttacctcaatgcatcttggttttctcaaaacctttacctccttttctctcttagttcactgccttgcttcacagagaaaatttggtcttgaacccctgaacttctcatttccaaacttatgaaagaatggacctctcccacctatccttatgtctttacttctagggttagaggaagaggagcattctgttcaagattcatccctcagtccccttagggttatccttaa

SEQ ID NO: 844215 - DNA, 499 bp, Homo sapiens
gtatacatgccctagttccctcaccccatggtgggataactctgaagtgtgtttcacaaagcatgccagagttcccccaagggacaccgatgtaactgacttgataaggcatctttcactggcttcctttgcttccctgtctcgcttccccattcctctaccagagtttcctggacttacctcccaaataattacagcattcagctccttatctcagagtctacttctggggcaacccaaactaagactatgagtccaagtgtgttttgactgtccatggtgtccactacgaaatttctcacatggccacaacacagagtccacatattgcctaatgacccctctacacacatatcaaataccccaccatcatcctcttcctccacccaccactcccctggaaacttccttgcctgaatctcatggctcaagatccagctcatctgatcaaccaacctgtgccatsgggagaaggcttagggctgccaggtattcccag

SEQ ID NO: 844216 - DNA, 600 bp, Homo sapiens
attccctatttcctactgaaaatcatccaaatttattcgccggacactcaaggcaccactatcagctggatgtatctttccttacatgtttccagactggtttccctgatgtctccatcacatactagagtaatcagggtatgctggctgctgtaacaaataacccccagatctcagtggcttatcacaaccaaggttgattgcccactcatgacacaatccaatgtagctggcagtgggggagcagtagagttctgctccacacagacatttaggaacccaggctgcctccatctagtgaaggagacgatgaataatgataccatcatcttcaaattgccatctccaaggttaccatgcaagagaaggagagactgtggaggagaatgcagaaggatttggaaaggatggaaagcttagaagcagtgttcattcctttcctccatattcgattgtccagagctcagttatgtggcccaactgaactgcaagggagtctaggaaatgaagtctttctatgtgctcaagagaaaggatgcagcttgttgagtacawaacattgtctctgtcacacatgccttgttcttagctctgagcctc

SEQ ID NO: 844217 - DNA, 558 bp, Homo sapiens
ggtgctggctgttggctggactttgatccagcaggatagcttggccctttcacatggcagtctcagggcagcaagaaagtgaaaacagaagttgcacaacatcattgcgggtgtattctmttggtcaaagccagcgcagattcaagaggtagggaaatagacgccatctcttggtgggagaagctgcaaaggatttgtggccatttgaaatctaccaggctgttctgcagagcaaaccactacaaaaacttagtggcttaaaacaatggcaacatttcttttgctcaggattcttcaatttgggcaggatttggtgggggaaagatctctctactctgcccagcatcatctgggctggctgaaaggatgggggctgaaatgatctcaaactcgctattcacatatctggaggctgatgctggttatgggctgagactttgggctttgtctaaaacatgtggtgtctccatacagcctgtgctttctcccagcatggtgactgggctctcctgaaagacagacagacaaacagacagacccaggcagagctatgtgcct

SEQ ID NO: 844218 - DNA, 564 bp, Homo sapiens
cttattcttatgaatctccagtggatttttccacagactacctgacatatttacaattacctctgtaagtagattttatccatgtactttaatcaaggcatcataatgcatcagattaaatgtgggggcaaaaataagaatttgactatcttctattaagccagacgcattaaatggatcttcaaaaatgcaaaacaatgtgacttttctctttaatttttgaaaatattgggttttttgtttgtttttgttttgagatggaatcttactctgtcatccaggctggggtgcactggtacaatctcggctgcctgcaacctctgcctcccaggttcaagtgattctcctgcctcagcctcccaagtagccaggactacaggcacacaccaccatgcccagctaatctttgtgtttttagtagagatggagtttcaccaggttggtcaggctggtctcaaactcctgacctcaagtgatctgyccgccttggcttcccaaagtgctgggatttcaggtataagccacagtgcccaccccaagatattgttatttttattaaagtat

SEQ ID NO: 844219 - DNA, 629 bp, Homo sapiens
tttgtcatctcaaaatccttaataattttaaaacagaagtcctaaattgttatattgcactgagccyacaaattatgtggtcaaccctggattaataaattataactcattattctaaagataaatttcataaaaacagaaaataccaaaacaaaaattagaaacatggaatcattttatatgagactatgtgcctattttctttttggaagcctgacatttccaaagacacataaagagaagatatttttgtgcaacctaacttaaagttggaaaggaaaagacatcaattaaaataaagtcacgtaatgtttgaagttctctctcattcagatatcagggatagccttcaaaaacctttagaaaacattcacgtgttggtcatgaaagagatgcaacctgtgttctctcctcattcttggtgagtggtcttaagacagaaatagaggatttaatatgaaagcaaaagctgaagtaggaaataaccccatggccatgttgccaactcctaactgaacaatatgaaagagacctaaacaaaagcagaaaatacctagaaagaatctgctagctttacagataatagcaagatgttcttactttgactatcacatcagaaagaaatgata

SEQ ID NO: 844220 - DNA, 594 bp, Homo sapiens
ggtaaggaagcattaaatagtggctatgaataaaaatgttggtgacaatataacttgaagaatagaaactgatagtccacatgtaaagagaagattggtgaggtgtttcacatttctcaagccattatttttaatttatgttgaccttaaccaaatattcttccaacaattaacacaacaaatacagcaaaacaaaacttcctattcccattttaagaggctgcattctttacttgggtggtaattgtttcactttgatgtcaagtataaacaattaacctagcataaaaaatcaaatatactgcaaaggaaaaatatagtcctatttattttttagtaatttccatttgagtaaaaaacttaaatgtaaagtagttatagtcaagtcataaactggtaaagtagcaattttgtatttaatgtaatatattcctacatctgtacccaatagtcaatttctatctacctaatctcctgtttatttcactccactattcctcattcttctyttggatattttcacaccaatagcttccgtaaattatgcattatttttcactttcaagcctgaaacttgaaagacagcataccttt

SEQ ID NO: 844221 - DNA, 469 bp, Homo sapiens
aacaatctagagatgatttaaagtattcaggaagatgtatgtaggttatatgcaaataccatgtcattttatataaaggcctattcatggattttggtatcccgcattggtacaggaaggggtgtgggcgtcctggaaccaatactctgcggtagtgttattttaaacacagggatttatcgtatgtagcttaaatagacaacacttcattgggataatggttaaaatcatgtttctttatgtgcactgcataaataaatgttgggaaagtaagacatgggaagaaaaaacaaaatgcaggatggtttccatccattaaaatattggaaatgcttaaaataagaaaataaaaacagacaaaaraaacaggcttacaggtaatgcagacattggtgttatcaaaaacagactgtgacacaactgttattgaagcattcaagacaacagatgccaagaaagaaaatttcaa

SEQ ID NO: 844222 - DNA, 625 bp, Homo sapiens
agaagagtttacaactgaaactatgaaggcctaaagataaaataactcaaagtcactgaagtgctaaataamaataataataataacaacttttattccataccaggtataaattatctggaaaaaggaaggagaaataaacacatttttttaaagttccaagaggattcattgccaacagactggtaacaaaagcaatcctaaagggaattctttaggaagaaggaaaattatcccacatgacagaatcttaacaaatatggaatgaacagcactggctgttctggctaaagtgaatatgtatatataactaatgaatattgataacttaaaacaataataaaaatattttggaaataaaacatatattgaattcatgacaatgaccaagatgcaagagaggcattagtagaattaaagtgttcaaaggtccttgtactgtctagattgtactaagaatactaaattctaatacagtttaaaatgtcaagaatgtaaatttattattatataaataacacacaacaaacaagctcataaatgaggaaactgaataataaaacctatgtgaatgatcctacagaaaaaaaaaaaaacaaaaaaaggaataaagaacagatggggt

SEQ ID NO: 844223 - DNA, 552 bp, Homo sapiens
ccaaagtatggtttgtattggtacagtcaggtgatttccaagggctgtgtccaagtagtattgacatatacgtattgacatataagactatgtctccaattacagtatggattctttgatggatcttctccaaagcatcactgctctcagaggcagtgggtgtggtagaaaatgcattagactaatagccaaaagactcgtgttctggtctcagatctgtcattaaataactgcatgaccttgaacaagtcatttaatttctctgggtctcagttttctatactgtaaaatgaattagatattcttaaatcttttctagttctgatatgctcttaatactacattttctaggttcacattcatttgacatttgaatgtaactgttaggttggttggttggtttgtttttccctccccctcttaatgctgagtgggactgaatggaataggtggttttgggaatmttttattatgtcaaagtggttcatgaactatgaaagctcaagggtcatggctattggcccccagaaaatcctgatatcctggtttttc

SEQ ID NO: 844224 - DNA, 653 bp, Homo sapiens
cctgaggagctggtgctactgcaggtgcataccaccacacctagctttttttttttttwaattttttgtagagacagggtctcactatattgtccaagctggtcttgaactggactcaagggatcctcctgtctttggcctcccaaagtgctgggataacaggtgtgagccactgcacccaggccatctcatttcctttagtgcccttcaacttcgttacaacctgtagtccatttatcctaacatctttttattatcccttatatcttcaaccccctctgcatatagcttcaggtccacggtccatcatttataattctcttgaatatatcctcaactcccttgacttttcagcagcctttgactcagtttatcattgctttctaatgtaaaacctttattcatttggcttccaagaaacaatacttgcctgatttcctctgtctcattggttactcctaagtctcctttcctaattcctctttatctcccctacctcttaatgttggaggacctcagggttcaatacttgcacttctctttcctaacaacactgctttggagatcttgtagttgcttggttttaaatacaatctgtatgctgataaatactaactttgtaaccctgtctgtattaggccgtttgcattatt

SEQ ID NO: 844225 - DNA, 568 bp, Homo sapiens
atgttaagttatttgtgtatagtcacaaagctaatgaamaacagagtcaggactagttgtcaagttttctaaatcccagtcttacgctctttcttgactcctggttttacttccattgaaacagttagtttgatagaaggagtaagatctagtgttcaatagcacagtacaatattatagttaagaataatttattgtatatttcgaaatagaagagaatatttgaaatgttctcaacataaataaatgataaatatttgtggtgatgaatacctcagttaccctgagttgataattacacattgtatgcatgtattacaaatcacatgtacttcataaatatgtaaaattattatgtatcaattaaaatacataaaataaacttttatatttacagtaaaatatgtgtaatccattgaatgatagagttaaaattaaaggggcctttagaggtcatttcatccagcccttcattttcatataaaaaaaaattgaaggccaaagaagttactttttcaccatctcatatcttattagtggcataaccaaaagcaaaacctggatattc

SEQ ID NO: 844226 - DNA, 631 bp, Homo sapiens
aataagccagggaaatcatcactttttactgattccagttagttcacccttaacaaagaaaaccattataggtgtcaatctaaataacaaagagaaaaaaagatctctaaaagataatyatatttatttgggaatagggcattagtttgacaatacaactgctgtactaaactgtgggcactttcaggaaggtaaaggaagacaaaggtttttaaaggtcaaataggaggaacacataattgttttcagataatacgcttggctacaaggctcaattacaagggtggcactggtccaagaataggcaggcaggtgctgggtctaggtcctcacaaatgtattatctctaaggttacagtggcctttgcacaaggttcagggttttgcagagtctttttacagagcagtagtgctcattatcaggaatttgcatgagaaatctcccttcatggcttttcctggctttttttcagtatcttattgttttcgtattgttttttaacatgagtgactcaattttgattcctactcttttcacataggaaagagtattatatgttgatatggtttgaatctgtgtccccacccaaattgcatgtgaattgtaatccccaatggtggaggtggggcc

SEQ ID NO: 844227 - DNA, 623 bp, Homo sapiens
tcttaggaccactggaaaacagagaatactaatatttcaaattacatttatagagaaacaycaaattctgagagagtttctgctgtgactacaagactgtaggtgtatatagaaggagtaagaatgcttgaaacagtctatgaaaagaggtgagagaattcaaagaattaatgaagcacagacaaaattatcctaagaaggagaacagaaaatgctaagagccaaattactaaacacaagtttggcaccaaatatatgaaagggacttgaaagtataataaatgacactgaaagtggtagtattagacaaactttgttctaggagagaaaatagagaatgcgtttgtgcccttgagaaagatgacagtaaaaagaaaagaaagaaaagagcaagagagaaagaaaagagcatgagatctagtggtttaagtgtgtagcacctcccccctcactctctcttgctcctgctcctgtcacatgagatgtctcactcccgctttgtcttccatcctgaatggcagcttcctgaggcctccccagaagcagaatccactatgcttcctgcacagcctgcagaactgtgaaccaattacacgtcttttctttataaatcacctggtctc

SEQ ID NO: 844228 - DNA, 623 bp, Homo sapiens
tcttaggaccactggaaaacagagaatactaatatttcaaattacatttatagagaaacatcaaattctgagagagtttctgctgtgactacaagactgtaggtgtatatagaaggagtaagaatgcttgaaacagtctatgaaaagaggtgagagaattcaaagaattaatgaagcacagacaaaattatcctaagaaggagaacagaaaatgctaagagccaaattactaaacacaagtttggcaccaaatatatgaaagggacttgaaagtataataaatgacactgaaagtggtagtattagacaaactttgttctaggagagaaaatagagaatgcgtttgtgcccttgagaaagatgacagtaaaaagaaaagaaagaaaagagcaagagagaaagaaaagagcatgagatctagtggtttaagtgtgtagcacctcccccctcactctctcttgctcctgctcctgtcacatgagatgtctcactcccgctttgtcttccatcctgaatggmagcttcctgaggcctccccagaagcagaatccactatgcttcctgcacagcctgcagaactgtgaaccaattacacgtcttttctttataaatcacctggtctc

SEQ ID NO: 844229 - DNA, 521 bp, Homo sapiens
ttcaacatttctttcttttgtaattctatatattttattttgatgtggctcaatttatctattttctctttcattgcgtatgtttttgctgtattawtctaagaaactgttgcctaacattaggtcatgaagatttactactgtgttttcttttatgagtttattttttagcaacagctttattgagatatattatatacatcataaaattaattctttaaaatttacatttcaagagtttttaatacaggtgacccttgaacaatatgtgaactgtgtgtgagcccattcatgtggatttctaaaaaataaatttattggaaaattatttggatattttcaacaatttgaaataactcatagatgaaccgcagagcctagaaatattgaaaaattaagaaaaaaatggatatatcctgaatgcataaaatatgtgttgatgctagtctattatattatttactaccataaactatacacaactattataaaaagttaaaatttatcaaaatgtatgcaca

SEQ ID NO: 844230 - DNA, 502 bp, Homo sapiens
gctgagggctgttccaagcttccagaggctgccgcactccttggctcttggcctcttcttccatcgtcaaaagcagcagcagcaggttgagttcttcttcacatcacatctctcaaaaccactcttyttccaacatctttcacttttaaggaactccacagttagccaaagaaaagaaagaatctagcaagttagtctctagcctcctgctgctccactccacgcccccatataaccagaactgttctctgatctgttttatgtgtaagtgaataagtgttttatttgtttcaaacaaaagcttctgtggcaccaaaaaaaagtttgaataccacgaatactctaaatgcttactttgactttctgtggtgacaagtaagtgctgttaatgaggtagcattaattgatatataaccttcttaaatagacaaaattttcaaatactcagcaaccaaaagtccctagcaaaattcaaaggaatagaaattgcacagaccacagt

SEQ ID NO: 844231 - DNA, 601 bp, Homo sapiens
ataataatgtagcaggattcttgcattacataaagttgcacaatagtaactctaaacaggtataaagagttaaagatgtaaattatgtaaagtataattctagagtaactttttttcttcttctgagacagggcctcactctgtcatccaggctggaaggcagtagcacaatcatggctcactaaaccctcccaggctcaaccaagcaatcctccctccctgagacctcctaggctcaagcaatcctcccacctcagcctcccatgtccctgggactacaggcatgtaccactatgcctggccaattttttttttttttttttttttgtagagacagggtctcactatgttgcccacactggtctcctgggctcaagcagtcctcctgcatcagccttccaaagtgctaggattacaggtgtgagccaccatgcccagccaagagtaattatttttttaaatgcaaagagatatagctaaaaagccaatatataaattaaaattkatttctaaaaatatttacttagtctaaaaatattacttagaataagaaaagaagaagagaacagcagcaaaatgatggaacaaatagtaaaatgat

SEQ ID NO: 844232 - DNA, 306 bp, Homo sapiens
cctggccacgagcccactgtccccagagacttcaccaactcccatttggccctccactcttccctgagtcctttgctgcccggacacaggtcctggctcaagaccccaagtgatgcccccagagcctccaagtagaccccaaggaacaaggcccgggggtgctgggcccagttaattacggagtggcatcctgaccctcactccttctgagtcgcaaaggtgagcgaaacggcctcagcacccactccctttcccaagggctctggactccctttcctgtsatgctggcacacaggatcccctcca

SEQ ID NO: 844233 - DNA, 508 bp, Homo sapiens
agtgtgagggcgtcgtggacatttacaactgtgtgaagactctctgctcccggcgtgtcaacatgatccagactgaggtgcggggacctggccctgtccccaccattattacttctaggactggagtttctcgtgaaggatcctggagccggcagagcatgcccaaagggtgtcctgaggctcttgccttccctcagatcatccctgaccttgggccgccaactgcatagggtcatcctgaactgctcccctgtgttctgttgggtggggtcagacaaccggtcctgtagctgacatacctgggattgcatcctcagtggatgtgtgaccgtgagctgtcccccacctctcagagcactcacagagttgttatagkgggtagggatgaaataggagataaaggggcatgtccatggaggttgtttcaggtaggcttggtccagcctgtagtaacatggttggcctccacctcaggacaccctgcttcaaccttgagcttgcttaagcc

SEQ ID NO: 844234 - DNA, 560 bp, Homo sapiens
gttgtatgccagacactgagttaagcaacgtcttaaggaaaaacatacatggtctccagcttcatggaactcacagttctatgggagatatggacaccagcatttttcaaatgaaaaatgatgttacagatgaaagatccatagtcctgtgatctgatcagggaggtcagaaagcacatccctgaggaagtgactatcaagatccaaagaatgaataaaagttaaccaagcaaagagggtagggaaaagcattccacataaaggaacaagcatatgcaaaggccctatggcaggaagaggcatcacgagtacaaggaactgataaaaggtaaccacagctagatcaagaacagcaggtgggcaagattaaggctgcagagggaggcgacagccggaccattgctccagtagccatcacctccctctgcagctttgtaggttttagtttggtggggaggatgcgagcaggtgatgcacaggagcaaatttctgttttggaaaaaccatcctggcatgaagaacagacrggaaagagacaatggctgatggcagagtgctta

SEQ ID NO: 844235 - DNA, 609 bp, Homo sapiens
actaaagagcttttgcacagcaaaaggaagagtgagcagagttaacagacaacccacagagtgggagaaaatcttcataatctatacatctgacaaaggaataataaccagaatctacaattaactcaaacgaatcagaaaaaaaacaatcccatcaaaaagtgagctaaagacaaggacaatcctcaaaagaagatatgcaaatggccaaccacgtatgaaaaaatgcaggaggaagggccaagatggccgaataggaacagctccggtctacagctcccagcatgagcgacgcagaagacgggtgatttctgcatttccatctgaggtaccgggttcatctcactagggagtgccagacagtgggcgcaggacagtaggtgcagcgcaccatgtgcgagctgaagcagggcgaggcattgcctcactcgggaagcgcaaggggtcagggagttccctttcctagtcaaagaaaggggtgacagacggtacctggaaaatcgggtcactcccaccccaatactgtgcttttctgacgggcttaaagaacggcacaccaggagattatatcccrcacatggcacggagggtcctaagcccatggagtct

SEQ ID NO: 844236 - DNA, 620 bp, Homo sapiens
agctagcaatttagggtagacttagctgaatgattctccttgttctagccaggtcccctcatatgggttggttttgctaatcttgctgtattctcccacatgtctgagtcctcagctggrtgaaatggacaaatttgtctgtgatccacatattctctcttcctctagcttaggcttgctcaccatgtcacagctaggaagagtggcaagaaaatgagtgaaaactgccaaggcttattgagcctaggctgagaactggcaaattgttacttctttgaattctgttgattaaaggaagtcacagggccagcccagatttaaggaaggagaatatagactcttgtcttaagaggagaagctaatatcacattgcaaagagattttgatacagagaggagagtagttgcagccatttttacaaataatctaccaaataatgctggcctggctcctatggattcttggaggaaccacatctgtttatccttctcattgtgtggaatttctctttcctcaatttgagctatgtcattagtgtaaaaattgtatcttcttccataatcaatgctcctctggacaaaataattggataaaggctggcctcctgtcccaaatatgtt

SEQ ID NO: 844237 - DNA, 625 bp, Homo sapiens
ccagttcagtccaattagctcttaccatctagaatttagtatctgaggctctgatcagtatgtgtacaacttaacataggtcgggtcactgcatcaaccagtgttctccagggaaacagaaccaatatggggagtgtgtgtgtgtgtgtgtgtgtgtgtgtgtgtgtgagacagaaagagagagagagattttaaagaattgacctgatagatgatggaagttgccaagtccaaaatctgcaggatgggccggcagtctggagacccaggcaagagccaatgctgcagttcagtccaaaggctatcagctgcatcattcatcttgctctgaggaggtcaggctcacattccatttaggccttcaactgattggaaaaggtgcactcacattagggaatacaatctgcttcactcaaagaccaccaatttgaatgttaatttcatccataacaacctcacagaaacagctaaaataatgtttgaccacataaatagggaaccatggcgcagccagctggactcataacrttaaccatcacagtagccctgggtcctaggcacccaaaaatttctctaggaatagttgctggctttgtctagatttagggaaatcctcaatcagagc

SEQ ID NO: 844238 - DNA, 527 bp, Homo sapiens
caaaacacgtagttttgtaacagtgcagttattcacacrtgcctcttgtttttcagagcacccttttctccccttctgtgttgagggtggatctcacggccacacagttaacctatgttaaccacctcgactgcccttccagtttcctccacactcagccatttgcatatgcacacacatctagcacccggtcaccatgccatctaccactgtggggaccctctcaccagtttattctcatgagagtaaacacactttctgtatctcaatgttttcactgacaatactttccaatattctggaaattttgtagttattgtctttagcattcatgaaatacctgcataacaatgactgtcgttgacccagctgtctttccaacactgcttgttcactgttgtctggactttgggggggctctatgaacaatgttccaatcaaatgtagtttttggtgaaagtttatatccatatttgccggtatatgagactgggctgcaaatagggtacttcaattttcatgagaaa

SEQ ID NO: 844239 - DNA, 658 bp, Homo sapiens
attgttgccctgtgtgatgccagttattggacagtcagccctgaaagttcaagattcacatttttatttttgttaatactgcaaatcatattgttattcataattactggtataattacttttctcaaaacacttatatttttgttttttgttttttgtttttttttctgagacagagtgtcactctgttgcccaagctggagtgcaatggcacgatctctgctcactgcaaactctgcctccctggctcaagcaattctcctgcctcagcctcccaggtagctgggattacaggcgcctgccactacacccagctaatttttgtatttttagtagagatggggtttcaccacgttggtcaagctggtcttgaactcctgacgtcaggtgatctgcccgcctcggcctcccaaagtgctgggattacaggcgtgagccaccacgcttagccaaaaatacctaatttttaaaatgaaggcaagcagttttctgctggggagcataagctatataaaaatacagttgtcttttatttgataatttgtcatatacagyctaagaattatttgaaaagattcattcactttctatcttgactcatgtgtatatcattgccattttcattaaaaaataaactgtctttatataaatagccatg

SEQ ID NO: 844240 - DNA, 619 bp, Homo sapiens
aatcaactggggataaaagacataaaatcacaaggtagtggtgcagtgtaaaaagtaaratacatctatacaccatctatccatcagtcatacactgggaccattaatgacatactagatatttgttctaattttctagtgcagagattattctcctgcaaaaacagaagttgaaaatgaattggaaattgagtaatatcttcctgtcttccagcattttcaaatattttgaaattttcttgttgtctttccagttttatttcactgtggtcagagaatatactcttgttttaaatttgtggaaatgtgttttgtggctatgttatctattttactttatgttctatagatagttgaataggttttctgctattgttgagtgaaatgttctgtaaatggtgattagatcttgttgatttagttgtctgtaagttctcatcactgatttttctctttagttgttgtatcaattgttgagaaagggggttgaagttcttaactataattccagatttgcctctttctccttctagttctatcagtttttgcttcatctagtttgcatctgtattgtttggtgcatatgcatttaggattgatatttttttcttgttagttt

SEQ ID NO: 844241 - DNA, 631 bp, Homo sapiens
catttatctccacctggttcctctaaaatttggagactacctgtaagtactcttaacttatggcagtatagttgtttgcatcagtgcaataagaatscatttttctttgtcaacaggacacaattggataaactggttattttaccaaggctttggctgaaatggtgtgtttccctttaaggaatcaagcttgacatgcagagccaataaaagccccttggagaactggcctcataccttgtctatacagtccccgcacagggttcctaacctgtagtcaataaagaatgtcactttctaacaggtctggaagctcggagtttctcttgggacctcaagaagtgaggatcacccaactcacaggtatttgaggatacagacccattgctgggctcggctttaaaggtcttatctaagattccttgtggaacagagtttcatcaaagccaatccaagagacctatgtagaaataactattcttactgcacttcatgcaaataatcaagccaagtataagactaaagttcattcatgattagttttgaccaaaaatgagaactggagagaaaaattttgctccaaagcttatcatacatttgtcattaaatcctcatctcaattgtttttaag

SEQ ID NO: 844242 - DNA, 627 bp, Homo sapiens
tgacttcgttcagttaataaaatatttggaatactaataaatgtttaatttcaataggttataataaaatcttaaatatgcaggcaaytctgctacaatgtaatatgtatttctgcataacgtatttttgaaaaacccatttccagaagatcatacattgaaaacaacataggaattacaagaaaaggagtgttaggtttggctgctcaaaacctatgtaacttaataaccagagcacaggctgggcatggtggctcacacgtgtaatcccagcgctttgggaggctgaggcgggcagattacctgaggtcgggagttcgagaccagcctggccaacatggagaaaccctgtctctactaaaaatacaaaaattagccgggtatggtggtggacacctgtaatcccagctactctcagcaggcagaggcaggaaaatcgcttgaacccaggaggtggaggttgcagtgaaccaagatcacaccactgcactccagcctgggtgacacagcaagactctgtctcaaacaaaacaaaacaaaacaaaacaaaaaaaccacagcacaaacaaaaaacaaaaacaattattacgacttcctggcacaaaacaggggcaggaggaaattgta

SEQ ID NO: 844243 - DNA, 619 bp, Homo sapiens
caaatggtgaatgggaagggaggaggggaagagggaaacagtattacccaaggggacacctcagaggtattgacttgctggagaacctatccagcagcggagacaccaaaataaatgttcaggcaaccacttttctaccgttgtaggtggttgtctgtcaggccaggagcctaggaactccctgttccttcagcttagagaggtttgagcaagacagttgctcaagtcagcacacaagaaggagtctgtgactgcctattagggaaataataacttctaacttcagggcagaaaaaggcaagatcactattcccctagggcgagggattataacccacaatcctagagggaatgtcaatgctgaaaaccccagagcatctggaaggcagctgaaaatgcaaatgctgaaaacccagagtaccagagtttcagccagtgagggtcccatcaccaaatgccaggggcatccatccagggggtggccaacagtgaacccaaacccaagttggggtcacagaacaatgtgactctggtttcccagagtcaacacaatagggagcctctcacaaccaagtgwcctgccttaaacaaatgcccatatacagttatcagaaaatca

SEQ ID NO: 844244 - DNA, 631 bp, Homo sapiens
attaaaaataataacataaaaaagaaaggattatggagtgaaaaattttaggttgtgagttatttttggagagttcagattaggtaatattttagacttgactacagaaaagaaacccctcaccggtgtagcacagtgtcatttcagctgtagtttttaaagatgttttcgctccgtaagacagaaagcaaaaagagaggagggtcattctaatcagtatagatgtgtctgcgacatcctgtctgtcactaatcttcagcaagcaacaagagtgggtgccagggagaatcatccccaaggaacttctggcatttcctggtattcagggaaataaaaggattattcaaggtctccacatactcagggtagctggaccaggcaggacccaggtatatttgccttcatttgcttgtttgctcttagagaaagccagagttggcagacagtgacctgctgcaaccatttcaaattattctccaccaccttgaaagtttcaaacatcagcatgttgacccccacattttgactgaagagctaggcacgtggattagagcctgctaagaaaatgaaccrtgagttcacacagcgatggagcagggtgaagccatctccgggggccataaaccaggcc

SEQ ID NO: 844245 - DNA, 621 bp, Homo sapiens
gaccaactttgctttttacttcagcgctataaaactgtagctttccagaaatttctgcggatgaatcagtctggatagccaaattctccatattgccacagatttagttttgaaacttcaacattgttcattatggatggcaatcttaaagtctcaaagccaaacccagattcctttccaatatacagattttctccttctccaccatgggttctgctaagacatatttcatgccaaccccaaatttgtgctagaatctggtttcaactcaaataataaatgaaaccaagattagaagtgagcccactaacctaatggagcacaatgtttgcctagctactactcctaaatctataggattggggaaaggtgcctctctccttctcctcccaatttctgactcgcaatttgagttttatacacattttccagtcctgttctacatgtccatgttaagaaggcacaaccaggccgccggacatttgacacatccatgaagcaggtgagccccagagaggtgaagggccttgcatgggccacaaggctatttaatggaagaatccaggcmcctgtcctcgcccctttcactgcacgcttccctgctgcaggccctccattggc

SEQ ID NO: 844246 - DNA, 603 bp, Homo sapiens
gggctgagggaccccagagcctgtgctggccacctcccagcctgcccacgtggctggggcgctgccccaaacacccttcgtgccagccccccgmggggctttccaggcagcaggcccccagggagcagaaaccaaggagcaggggcagttcctgtttcttccgtcctaattagaaatccagccttcttctggggccaggtgccatggccgaagtcatcttgacttctcatcagcttgtgtgcttgaatgagatttccacagcaccggccgttagaaggccgtggatggaacacgggtgaagactctccattgcctcctgacagctttgtcctgggtgggtctgtctgtgaccgctctcgggtgactgtcacgctcatcacgttaaaaacgatctccatctccctctgtcaccctctgcacccccggctgcaggacgcgaggtggggacacagcacgggctgacagatggtgacgcttggctgtggtgctgacagaccagccggggacctcgtgtgggaggaccaattaccaccgcatcccctcagggaagagcctctcagctgcatgtgggggctcatgataaatgaattggaaggaaaagat

SEQ ID NO: 844247 - DNA, 603 bp, Homo sapiens
gggctgagggaccccagagcctgtgctggccacctcccagcctgcccacgtggctggggcgctgccccaaacacccttcgtgccagccccccgcggggctttccaggcagcaggcccccagggagcagaaaccaaggagcaggggcagttcctgtttcttccgtcctaattagaaatccagccttcttctggggccaggtgccatggccgaagtcatcttgacttctcatcagcttgtgtgcttgaatgagatttccacagcaccggccgttagaaggccgtggatggaacacgggtgaagactctccattgcctcctgacagctttgtcctgggtgggtctgtctgtgaccgctctcgggtgactgtcacgctcatcacgttaaaaacgatctccatctccctctgtcaccctctgcacccccggctgcaggacgcgaggtggggacacagcacgggctgacagatggtgacgcttggctgtggtgctgacagaccagccggggacctcgtgtgggaggaccaattaycaccgcatcccctcagggaagagcctctcagctgcatgtgggggctcatgataaatgaattggaaggaaaagat

SEQ ID NO: 844248 - DNA, 613 bp, Homo sapiens
gcaaaataaaattctgcttttataccacaccttgggtaatttcattcaaacccacagatgcatttttcatatayattttagtattcacaaacatacatatatacatctatatgtgtatatgtatgtatgtacagtggacccttgaacaaaacagggattagagatgcagacccctgcacagttgaaaatttgcatgtaacttttgacttcccaaaaccttaacagttggttactgttgaatagaagccttaccaataacaaagttgattaacaaatattttatgttatatgcattatttgttgtattcttaacaaaaaagtaagctaaagaaagaaaatgataagagaaaatacatttactattcattaagtggaagtggatcattacaaaggtcttcaaactagtggtcttcatgttgagtaatctgaggggaggtggcacaggcagaaaacaaatctatgtatgagtggactcacatagttcaaacctatgttcaaggaataactgtatatatatatgtgttcagaaatacacacttcacttattgaataaatgtacatgatttaaaaatgaaatagtactaaacaggttatattaaaaaaagatttactg

SEQ ID NO: 844249 - DNA, 598 bp, Homo sapiens
attactaagcttgtgttatatttgagataacagagaattagaaggtatatttcttacccaaggcaactggtatacctggagtgagcaagccaatccaagatattcatttttcatttatcctattaggttctgagtttcatggacctcatggtacaatgtatacccttgtgttcattaggctgaaaacttctatatgctttagtgacttcacagtcaatagtatagcatgatgcttttgtatctgatttggctctggttcctactgagacttgatctagttaatatcctagaagaggcttccctatattcttattattcctgttagggtcccgttaaatttatgcccatccctgccaaccaccactactacccttggttattacgcaaacattgttctgacatgttctgctatagcctgaacaactctaccatcctgccatatccactgttggaatgctaactattaacatccagatagaatgtgagttgcccatactctcttgaacatttttctttggatttacattaatctccaaataagccatatccaaattcaagmtaatgcatctgtgtttccaagacttttcatgtcccagtt

SEQ ID NO: 844250 - DNA, 574 bp, Homo sapiens
cctgcccactgcttgatcctccctctactaccacagctgatgctgtcttgaaaacgccacttcctgggaggaggccaaccagcacaaaactagtgcattaaaccaccaaagctaagaaccctcacagagtccatttcaccccctctgccacctccactggaacaggtgctggtatccacaatggagagacctgaagatggttcacatcacaggattctgtgcaaacacccctcagtaccagcccggggcctggtagtcctgctgggtggttagatcctgaagggaaataataatcactacagttcagctctcaggaagccacatttctaggaaaagggggagcgtaccacatcaagggaacaccccatgggacaaaagaatctgcatggcagccttgagccccagatcttccctctcacatagcctacccaaatgagaaggaacccggaaaaaaaatactggtaacatgacaaaacaaggttctttaacacccccaaaaagtcayactagctcacctgcaatggatccaaatgaagaagaaatccctgatttacctaaaaaaagaatttagaag

SEQ ID NO: 844251 - DNA, 614 bp, Homo sapiens
cacatgtaggagaatgaaactggatcctcatctctcaccttgyacaaaagtcaactccagatggatcaaggacttaaatctaagacctaaaactatacaaattctagaagataacattggaaaaacccttctagacattggcttaggcaaaggtttcatgaccaaaagaacccaaaagcaaatgcaacaaaaacaaaacaaagatacatacttgggactttaaattaaactaaagagcttttgcagagcaaaaggaacagtcagcagagtaaacagacaacccacagagtgggggaaaatcttcacaatctatacacctgacaaaggaataatatccagaatctacaaggaactctaacaaattagcaagaaataaacaatcccatcaaaaagtgggctaagagcatgaatagaaattgctcaaaataagatatacaaatggccatcaaacatatgaaaaaatgctcaacataactaatgatcacagaaatgcaaatcaaaaccacaatgtgataccaccctactccctcaagaatgaccattatcaaaaaaaaaaaaaatagatgttggcatggatgtgctgacaagggaacacttctacactgctggtagga

SEQ ID NO: 844252 - DNA, 476 bp, Homo sapiens
ccataagctttctgcaagctagagaaccagggaagtcagtagcatgactcagtacaaatccaaaggccygagaatcaggcagactgctggtgcaagttccagagtccgaagaccagagaacccagagttccaatgtgcaaggacaggagaaaacgggatcctagttccggaagagaaaaaggagcaaattcacctttcttctgcctttttgttctatctaagccttcgaccaattagatggtaactgcccacacttaataagggtggatctttcttactcaatctactgattcaaatgccagtctctcctggaaacactctcaaagatatacctagaaataacgttctaccaattaggtgggtatcccttagtccagtcaatttgagacctaaaattagccactgcagtcttcttctgggatctctaggcatcaagattaatgagtctggaactgccgttctgctcaccatggaga

SEQ ID NO: 844253 - DNA, 583 bp, Homo sapiens
atagagattaaacatggctccagaatgcacaagcatacaaccaatatatattaaatgtgcgctatyataacaaactcagcacttgctattttccttctttaaatctgctggccactaccataatatttactttctccaaaagaaagtaagtggcaaaataaagaggaaaaagtagataagataaatccagttctgaggttttatagttttaaattctgaaacatcatgaaaaatttagcaaatatttatagcacatcaaagattagagtcatgataaccaaatcggctactaagatccttaaacttagttctcaaaagtttggaaatggtttcctacctctctttagacaagacagattactaaagcataaaggttgaaaaagagtgagaaataaaaaacataaaattacttacaactgatcggatgttattttctttcacgagcttcagagatgatttatagcaatttgcaaggtcttccttgtgggaaccattaatatggcccctggctattggccctacagtatggatgacatctgtaaatacaaaaggaaggaaaaagaggataagcgaggtatttttc

SEQ ID NO: 844254 - DNA, 592 bp, Homo sapiens
aacagagtttgaattcacttcacctctgttgctctataatatcacttaygataaaccattaatatgactttgaacacgaacatttctgagaagtttccatcggtcagagctctccaatcatatggcatcctgccttaggcagcagggaatgccctatcattcaaggcaatccgatatgactacctatgtcccaagattcttgctaactctgcaatgtcatgattctgtgatttctgttttcctgcagtgactcgatgcttccactgcagggaatatgacaaatctatgtctgtgtttcccacaaagccaagaattctatgggaacagttgcttaatggataattagtgaatctgtgggtgattaaataaaagttggcccgatataatcaatctaatcaggaatgatgtaccagattagagaaaacaatgaggtagaagggataatctagactgggcaagcaatggcatctagttatactggttcagctcattcagcatacattttatagagctgaaaagctgtttcttcatagaaagactcatcaaaacctcatcaaaaatctcctaatgactgcactatggaagatttaaa

SEQ ID NO: 844255 - DNA, 592 bp, Homo sapiens
aacagagtttgaattcacttcacctctgttgctctataatatcacttacgataaaccattaatatgactttgaacacgaacatttctgagaagtttccatcggtcagagctctccaatcatatggcatcctgccttaggcagcagggaatgccctatcattcaaggcaatccgatatgactacctatgtcccaagattcttgctaactctgcaatgtcatgattctgtgatttctgttttcctgcagtgactcgatgcttccactgcagggaatatgacaaatctatgtctgtgtttcccacaaagccaagaattctatgggaacagttgcttaatggataattagtgaatctgtgggtgattaaataaaagttggcccgatataatcaatctaatcaggaatgatgtaccagattagagaaaacaatgaggtagaagggataatctagactgggcaagcaatggcatctagttatactggttcagctcattcagcatacattttayagagctgaaaagctgtttcttcatagaaagactcatcaaaacctcatcaaaaatctcctaatgactgcactatggaagatttaaa

SEQ ID NO: 844256 - DNA, 550 bp, Homo sapiens
caacaaaaaggcagatattaataagtgttagtatgtggagaaattaaaaccctcatacatcagtgataggaatggaaatgccactttggaaaacagttagttcctcaaaatgttaaacacagagttaccatatcactcaacaattccactgctaggatctacccaagagaactgacaacacatgtccacacaaaaacttatatgcaaatattcatagctgttttatgagtccatctgcattgctataaaggaacacctgaggctgggtaatttaaaaagaaaagaggtttattttggttcccagttctgcaggctgtacaggaagcacgacaccagcatctgcttctggtgagggactcaggacgcttacgatcatggtggaaggcaaaggggagctagtatgccacatggtaagagacgagagacagagcaagagagtgaggaagaaattccagcatcttttaaacaaccagctctcacgtggactcrtagagtgataactcactcattactgtgaggacggcaccaagccatttataaaggatccacc

SEQ ID NO: 844257 - DNA, 628 bp, Homo sapiens
gagctaggacctgaaaaggggcctcacggtgccctatcctgctgtggttgagctgatatccatgtgggatatgatgaggtttctcttcaaatagcctgatcaatcctttattctttaattcatagtacctccccacccctttttcacttttctcttttttcttcctttctgtctttgtcacatgcccagacacgccacagtaccaggtgttatcagtaccagctcacattcctttccttatttggcaagaagacttgctctctagctcactgcagacaccccttcccctttcgcctctcttccttacataccctccttatccgaaaaaaagttcaaatgtttagccaaccagggttaatttagattgtactgcctgaccatggccaatggggaaagggtacaggggcaggacttgcttcaggaataaaggctcttgttcaagtgtgctctcatggtgactggccaaggagaagcacccctctgtgcagaagtaaaattgctttgctaagaatccttgtttgagtgttcaatttccttaggattttgagcrttattcccaacatccaagatgcaagacaaagtcctcctcattcttccctctcctctcctcaagtggagggaagaggcc

SEQ ID NO: 844258 - DNA, 620 bp, Homo sapiens
tcttgttagatgtatgttgggtcttttcattctgtcttctgtgtttcataatctcttgtattttccatctsggggtttcttcacagtgcttcctttataatcatcaaatttggtttcctgttcattagtttttagctgtgcttaatttgtttgttttttttttttaactccccattgaatgttaaggtttcagttattatattttttatttccagaagttctctttggttcctttttagatcttgatcatttctgatagtctcttgttccttcagcatactttcaaggtcttcttttgtattgttaagcagttgaaccatgcttattttatgtttcttatctaaaaattctcgtatctgcattctgatttcatagttttttgtttctcctgacccttgctcatggtattttgtttcttcatgagcttagtgatttttaataaaatagtgagtttatgtaatttggaacttttatctgtgggaattctttgaggcttgagtttcctgtgcatttttccacatagggtttatgttgcttcctggtaggcacctggggcactattaacaaaaatcaaactaaattagcaacttaaagtttctttgggtcatgtacttggtgtg

SEQ ID NO: 844259 - DNA, 620 bp, Homo sapiens
tcttgttagatgtatgttgggtcttttcattctgtcttctgtgtttcataatctcttgtattttccatctcggggtttcttcacagtgcttcctttataatcatcaaatttggtttcctgttcattastttttagctgtgcttaatttgtttgttttttttttttaactccccattgaatgttaaggtttcagttattatattttttatttccagaagttctctttggttcctttttagatcttgatcatttctgatagtctcttgttccttcagcatactttcaaggtcttcttttgtattgttaagcagttgaaccatgcttattttatgtttcttatctaaaaattctcgtatctgcattctgatttcatagttttttgtttctcctgacccttgctcatggtattttgtttcttcatgagcttagtgatttttaataaaatagtgagtttatgtaatttggaacttttatctgtgggaattctttgaggcttgagtttcctgtgcatttttccacatagggtttatgttgcttcctggtaggcacctggggcactattaacaaaaatcaaactaaattagcaacttaaagtttctttgggtcatgtacttggtgtg

SEQ ID NO: 844260 - DNA, 642 bp, Homo sapiens
tttcaacatccggtcacttatgatatgcaggtgytaatggagcaaaggatgtatatcattggataaatatgaacactatatttttcttgcgggacaatacatattcttaggactgttactgaattacattttactagtcctaaaatatttagagttatgtatttaaaagatacagagcataggtattagatccacacaaagtattttagtcagtgaatgttcaatgtagcaggtagagatgaacttagcatgtctcgtagactgaactgggaacagactcttcagccataaaatgcacttaacagtctatttaatagtggtaaggtccttgaaaatgcaatatccatgctaatcttgcctttttctaaatcacagatgaaaaataggtcagttaggtagagccttctctttctatttaaagggtgacatttaatctatttaaacaactaccaaaactttattaattcaatgtaagaaaagtatgctgagaaagtagagaactttattaagaacacaaggttttccaaaatttgatttggatgtcttagatctcaggactcaataaaaatctctacgtgggggtttcgatcaaatcagtagcagcaagtaaggaccagaaaagagcaatccagaatgtaatta

SEQ ID NO: 844261 - DNA, 612 bp, Homo sapiens
ctgaagatcatctataagtattaaaattgtccaggaaaaaaaatatgacctcaccaaatgaactaaataaggtaccaggggccaatcytggagaaacagagatttgtgatcattcagaaagagaattcaaaataactgtcttgaggaaactcaaagacattcatgataacacagagaagacaatcagaattctatcagataaatttaacaaagatattgaaataattttaaaaaatcaagatgatattctggagctggaaaatgcaattggtgtactgaagaatgaatcagggttctttaatagcaggatggatgaagcagaagaaataattagaaagcttgaagacagtttatttgaaaatatacagtcagagaagaaagcgaaaaaagtaaaacaaacaaacaaaaaaagaagcatgtattagttccttctcacaatgctataaagaactacctgacactgggtaatttataagtaaaagaggtttaattgccctaaagttccataggctgtgcagaaagcatggctggggagttttcaggaaacatacaatcatgacagaaggtgaaggggaaccaggcacatcttacatggccagagcagtagaagac

SEQ ID NO: 844262 - DNA, 599 bp, Homo sapiens
actcagcaattgtcatatttttctccacttttccctaagtcaataggcaaccatgaagttgacaatgttgctgataacattgtcatactcaacatcatttcccacaaagcttaaacctctacagaaactcagcagtccctacaacacatccttgaagaatgagaggggtgtcaataatttcagctgctcaaatggaaggctctgacatcaaggaatattaagtggcacattgaagggaattctactattaagtaatgaaggtgaggaaaacaatttctcaatccacggttatttctttgttatactaagaaccgtgcccaatacttatggaacaaaataagcctatcatttggacgtctcctatcagcctgaagcctgatgtcatataaaccaataatctgtgattgaatttttcagctttcagtgttttatttttagcataatatttggtattgccatacgtgacttattattctgttcaatttaatcaaattagagaataaacaaaacgacaaacataatttctcttaatgtgygtgtgtgtttttcttttttgagacgaagtttcattcttgttgcccaggctcgattcgagtgcg

SEQ ID NO: 844263 - DNA, 619 bp, Homo sapiens
cagcattatgcttcctgtacagcctatggaactttgagccaattactcttttctttaaaaattacctcatcttgcgtatttytttatggcagtgtgagaattgactaatacagccccatcgctaaaaaaaaaaaaaaaaaaaaaaaaaaaatgtctaatcaaagttggaaagtgaacattagggaaatacatattttgtataaataaatcctttggactcccagcttcttcctttgccgatcagctttaagggacagtggttctgtttgacttttgaaaggacagaacaagatccttatatatcacatttctgctatcaatagttaagagtttttgctataaattgaaagtatcatggacacattctttagtcagcagtcactccctgtcattaattaggtgttggaatgatgttctgaaatgctgtttaatttctatgaatttcaagtgggattgcccagcaagtacattgccagcatatgtagtaagtaggtaattttcttttaagattatgaatgttattctcaaaattttaggttgtttttataagggacagtgtacagtttgggcttttgtgttaattggaggttgacaagggaaaaagggatagttttccagc

SEQ ID NO: 844264 - DNA, 558 bp, Homo sapiens
aattaaaaggaactattacaactttatgtcaataaattaaacaagttagatgaaccaaattccaagccaggaaactactaaaactgactcaaaataacataaaatctgaatatgttaacatcagttatagttagtaattttatccattaggattagtaatttaaaatcttctcacaaggaaatcccaggcccagattgtttccccagaattcgtttgatgaagtcccttgtaaattctatcaaacatttaacgaaaatgaatgggctagtacaatccaacacaaattctataaataagtattatagaaaggtaaagaacaatttccaactcattttattaagccagtattaccctgacaccaaagctaaagacatcataagaaaagaagactatgggtcaggtgcagtgtctcatgcctgtaatcacrggattttggaaggccaaggtgggtggatcacttgaggccagaagtttgaaaccaatctggccaacacggcaaaaccatgtctcatctctactaaaaatcaaaaataaaaataaaaataaatcagctgggc

SEQ ID NO: 844265 - DNA, 595 bp, Homo sapiens
tgcctgtaatcccagctacttgggaggctgaggcatgagaatcatgwtgaacctgggaagtggaggttgcagtgagctgacagcatgcctctgcactccagcctggatgacagagcgagactctgtctcaaaaaaagaaaagaagactgaacaaatagctctcatgaacaaagatgcaaaatccttaacaaaatattaacaaatgaaacccaagaacatataaaaagaaattgtggtggttttcacaaatagccacaaatactttgatactgctccctttaaactatgaatcctaactgtcctcttgattgtgggctgaacttagtgggttacctctaatgaaaagaatgcagtggaactggcagtgttaggatcccaagggtaggtcacaaaaggcattgtggctttctctttgctccttctctattttccttattatctctggggaaagccagctaatgtgtaatcggtccactcacacagccctgcaccctatggagaggcagacatggcaatgaactgagcctcctgccaacacccagcaaggaactgaagcctcctgccaagagccatgtgagtgaaccaccctgaaatt

SEQ ID NO: 844266 - DNA, 561 bp, Homo sapiens
aaggatgttcaacatcattagtcaytgggaaatgaaaattaaaattgccatgagatagtactgcactagagttgctcaagtttaaaagctgacaataccaagtcttgtcaaggatgtgaagactctggactctaatatatggttgatggacatgtaagatggtgcagctatcttggaaaacagtttggagtttcttataagacatatgaaccagccattccacccttaggtatttacccaagataaatgaaaatatatggttaccaaaaagatgttcacatgaatgtttatagcaattttattctaatagctccaaactagaaaaatccagatgtcctccaactggtaaatgaacagttagaggcacatccatgcaatggaaagctactcaatagtttcaaagaatgcacccctgaaacccacaaccgcatgaacggacctcacagacatcatactattcttgagctgaagctgcagtgtaaaaataaaattaagtttaaaaataattagaaataagtaatttgaaaacagaaaaaaataatttaaaaacatgccaaatga

SEQ ID NO: 844267 - DNA, 558 bp, Homo sapiens
aaaggaaccagacacaaaagaatacatgctttgtgattctagttgtatgagagtctaggaaatgcaaacgaggcaataggagcagaaagcagctcagtaatgttatgggggtcaggtgcagggggttggcctacagaggaggacaagaaacttccagggatggcagaattgtacactttaagtggctgcagtttattttatgtaaattatacctcaataaaattcatttttcaaaaagcacctagaagcatgcccaacacatagcaaatggtcaataaatggtggacttcataaaaaatttgtgtatgtgtgtgtgtgtgtgtgtgtgtgtgtgtgtgtgtatgtgtgtatgacccagtaagctcatagaatgatgttcaacatcattagtcattaggaaatgaagattaaaactacatgagatcatgtagtactagtgcagtagtactgcactagagtggcttaagtttaaaagttgacaataccaagtcttctcaaggatgtgtagcaaccaggmtctaatatatggttgatagaaatgtacgatggtacagctac

SEQ ID NO: 844268 - DNA, 620 bp, Homo sapiens
ctaagacataaactgtttgcaaatgtattttgaaatcccctgcagacttgtcactgcacacagtttcaatctgttcctttctcccaaggrcaactactaactagaattgtcttttggattcctgtatgtatccttatgccttttccacaaatgtatgtacccatgaacaatgccaagtatcagctgcatgtttttaaactttgagtgaatgagattgtgctatgtgtattctcctgcaatgtgctttttcctcttgacattatttttgtgaggtttatctgtgtcgctgtatgggaccccagttcacttattctcaatttgcatggtgtcctatagtgtggctctaccacaggtaagctagctattttgttgttgattgacatttggattgtttccagttcttcacatgacagtactccacagaacattcttgtgggtgtctcctggtgggatgaatttgtctatcagtggaatggctggggaataaggtatgtgcatccttggtatctacaggttctaccaaactgttctccagcatgtttcttccgatagatttacactttgactagcaggggatgcaagttcctactgctctacatggtcatcagtacttcatattc

SEQ ID NO: 844269 - DNA, 620 bp, Homo sapiens
ctaagacataaactgtttgcaaatgtattttgaaatcccctgcagacttgtcactgcacacagtttcaatctgttcctttctcccaagggcaactactaactagaattgtcttttggattcctgtatgtatccttatgccttttccacaaatgtatgtacccatgaacaatgccaagtatcagctgcatgtttttaaactttgagtgaatgagattgtgctatgtgtattctcctgcaatgtgctttttcctcttgacattatttttgtgaggtttatctgtgtcgctgtatgggaccccagttcacttattctcaatttgcatggtgtcctatagtgtggctctaccacaggtaagctagctattttgttgttgattgacatttggattgtttccagttcttcacatgacagtactccacagaacattcttgtgggtgtctcctggtgggatgaatttgtctatcagtggaatggctggggaataaggtatgtgcatccttggtatctacaggttctaccaaactgttctccagcatgkttcttccgatagatttacactttgactagcaggggatgcaagttcctactgctctacatggtcatcagtacttcatattc

SEQ ID NO: 844270 - DNA, 607 bp, Homo sapiens
aaaattgttttgtggctcttttgccgttcctttattcaattcttccaatcttgctgtcttcctttgtgatttgattatttttgtagtgatgcrctttgattcttttctctttatcttttgtgatttatctttattgttaccatgaagcttacataaaacatcttatagttattgcagtatattttaatctgataacagcttaccattcattacatacaaaaactctccattttaacttctcttccccccaaactttgtgttattaatgtcataatttatatcttttatatatccttattaaattattgtatatatagttatttttaatacttttgtcttttaactgttacactggaactaaaagtgatttatacaccactagtacaatattagaatactctcaatttgactatattcttacctttaaattgagttttatacttttacatgctttcatgttagtattcttttgtttctacttgaagaactccctttagtatttcttataatacaaatctagtgatgattaactctcataccttttgtctgtcagggaaagtccttatctctccttaatttctgaaggacagtcttgcaggttataata

SEQ ID NO: 844271 - DNA, 500 bp, Homo sapiens
tgaaatagatgctcttctcatccccttttcacagaggaggaaactgaggttacataattttcccaatgccacaaggccagtaagctgtagagccagggtctgaaccctggcagtttgctccagagcttggactctaaaccactgtaggtgtcgattaattttcatgttttgctgtcatcatttccagggaaatattgccagagaagctgcatccgaggaagctttaacagcagtccaaagtggaaatgttagtgaaccggaggtagggtttgacgagggcctttgcgtgccttctagccaccccatgggtttcacacctttctacctcagaggatttgtgccctttcctcctcccaatctccctgcctgyctccaccagttcacacctaccacctcctttaggacttgctgcaccaagcctcacctccttacctcttcccctgctgtgattaatcttttcttctgtatcctctgcatggcctggactgtaagttgcattt

SEQ ID NO: 844272 - DNA, 519 bp, Homo sapiens
aagaagcagaggagggtgttgtaggcttttgagtgggaggttggtacaataaagcattttcattccctgatgatgagcatagtcctggaatttcagtagtttcccaagagcctcttggtgatggatggactgactcagcaacagaagcctagagaacccttgagaagggaatggaacatggggcttggtcatatccatagaggcactgggacagattcactgaacactaagcccagacactgaagttctgccagaggaccaggttctccaacctgtctcctctccagattctgaccagtgaaggagtctacccagaagtcagctagggattgaagtacccctttctcatggctaacactgaaccagagaacaaagcttggaccgagaacacaartgggcttcccatttctccttactgaattaagtgcccccatgtggttgtaggcaggcctcacctgtggggcagggtctccccactcccagctaattgcatggaggggaggagaaaacacacaacct

SEQ ID NO: 844273 - DNA, 506 bp, Homo sapiens
ccttattcttcacacttttttgtgtttcaggttttctataatgaaatgagttacttttataattactcaaaccccagtgttatataaacatactttactggatattattttatataagtgtgatatrttacaattctgtctccatttggggggaatacatatttagtactttaacttaaaaatatattcctctccttacccaggtccattaatataagatttgccactctcttggatactcctggtgtggaaaatcttgtcagcaccctcatgttgaataaaagcatattggaggacttagaccgttacaacaaggctcgcaaagaccctgtaagtacctgttgtgaccagacctcaggatatgggaccattatgatgacccatgtagattcagccctgaaacttccttggatctgagttggaaaatcatatggcagggggcagtggaggtagagttagaagatgggagcaagaagagaaaactgtggagactggggcttgaggaa

SEQ ID NO: 844274 - DNA, 611 bp, Homo sapiens
accttggtggtcttggataagatccagaagaatactctggattaccaggcagagactcttattctcttcctttactttctgtcaaacaaatgaagtctctctctctgtgttgagccacctraagctgggggaggggtgacacaaagcacccttgtggccaccaccactgtgactgcaaagggtcaaaccttaaggcagcacagccatgggtcttgcccaaggcccactgtaaccactacctacattctctcaaggccctagggctctgcaatcagcaggtgatgaagccatccaggcctatgtccttcccttaagggcaacaagttcccctggccctacagaggtccagagatgctgtctgggagccagagccaggagtaggaaaccttagaaatctatctggtgctctgttctactgcagctggcctgactgtgacagcactaggcaaagtactttccgctcttccctccgtttttcccatgcaaaggagtctctccccatgtccaccaccaccacaggcccacagggagtactaccagggtactactgatgttcactaaaggcccaagggctcttctgtcagcttgtggtgaatgctttcaggcctggg

SEQ ID NO: 844275 - DNA, 612 bp, Homo sapiens
gggctaaagagtcagtgaaagaaaaatgaacatcttatttcttccaaactgtttcagttggtaaaatacaaaatggtgcttagtgtggtagctaaaatgaaaacagattcaatgggtcaaaattataacttgtatcgataatttgcaatatgagcagtttagaaagatcaaggcaatattaaggtagctagtttcagactgtagatttgttcttagaaagaggatctgactcgtaaatagacacaagagggatgccaggaacgtgcttttgctggaatgctaagatacatgcgtaactaggggatttagagaaggaagacattcttatttctgttcctttcttttgccactgtttacaaataacatggaggtgtgacgtctgtgtgtcttgtcgatgcgactacaggaaagagatttcgttcataaattccctctccaggagccatgctgtttatgtcagagcctgattcttatccagtctattgttgctgcttattggaaattgacataaagaataaccmaaacatagacatttgtctggaatcctcttaatatcataaattgcatctgtttaccatcctctgtcagtttccactggaaatttcaacaccc

SEQ ID NO: 844276 - DNA, 440 bp, Homo sapiens
taactttcaagtctttttatttaagaaatacatttcataaagccatagctgccatagatagtgattcctctaatggatctgggcaaagtcaattgaaaaccttctggaaaagattcaccattctagacaccattaagtatattcatgattcatgggaggaggtaaaaatatcaacattaataggagttggaaagaagttgattccaactcttatggatgactttgaggcattcaagatttcaatgcaggaagtcactgatgatgtggtggaaacagcaagagaattagagtgcagcctaaagatgtgactgaattgctccatctgatggtaaaacttgaacagatgaagagttgcttcttatgtgtgagcamagaaagtgtttttcaaagatggaaactactcctggtgaagatgctctaaacgttgttgaaatggcaac

SEQ ID NO: 844277 - DNA, 601 bp, Homo sapiens
aaaaaaacttatatctacacaaaaacctgtgcacagttatttatagcaggtttattaagaattgccaaacttggaagcaaccaagatgtccttcaatatgtgaatggatagataaactgtggtacatccagacaatggaatattatcagagctaaaaagaaataagctgatgatgcacgacaggcaaacctcaaaattaggacttatcccaggagagttgttggcttcgcctaggaaataattcaagggtgagccagtggtgttaaacagcttttattgaagtggcagtttacagcagcagcaaaggtactattccttgtgggtcaggggtatcccataggcagtgtgtccagaataacagcttagaggcagttccgtactactagtacagtaatatttgtacccacttttaattatatgcaaattaaggggtggctcgtgcagaaatttctaggatgaggttggtaacttccaggttatcaggtcattgccacggaaagaggcaggaacatctaggtgttgccatggaaatggtaaaccaaccatggcacactggtgggcrtgtcttaatggaaagctgcttctgcccgggacctgtttt

SEQ ID NO: 844278 - DNA, 659 bp, Homo sapiens
cagagtgtcttggacaccacaaagttaacgccaaattagttacttaggttcattaagcaacaacactaagtcactttcattggtatatttagttcaggtttacactttagaactactttacctacccgttgatagccagagtaatcccggggagcactgaactgagactgtgtataaccactgtttggagtgttagagaatgaagggcggtaaccatcatatcctcctaaaatttaggacaagaaaagaaataattttcttatcttcacaaggaatttttacttttttattaatgaagacgggaagaactagaaattataagccaggctagttaatcaaattaatctccaatttcctatcttgatccaatctgtttataaatttctgtaagtactaactgcccctcagaagataaacttttaacccatctatgcatgtaaacacacatctgtacaaatataataaacaatccccgtaagttttggtaatgtggaaaatacttatcctccaggagatagtggtagacattaatttgacataacyaaatgaacaaaaattccatgatctgttatttaaataacaaattataccaaatacacaaattgtaccaaaatatacattgtttaaattgcacataggaggctaatgcagatacatcc

SEQ ID NO: 844279 - DNA, 626 bp, Homo sapiens
cagagtgaaaagtagcttagagaagcgaggatcaggtgtgcacagggttcctaactctgctgatatcttgggaggtgctgggaaattttccagtttactggcagaattactctcctccctaaatttcaaaaagcagagaaggacgttatctattctcttttctgggggaaaaaaaaagtttttttttggagacagaggctcactctgttgcccaggctggagtgcagtggcacgttctcatcactgcaacctccaccaggttcaagtaattctccctcacctcagcctcctgagtagctgggattacaggtgtgcaccaccatgcccggctaatttttgtatttttagtagagatagtgtttcaccacggtggccaggcaggtctcaaactcctggcctcaagtgattcacccgtctctgcctcccaaagtgctggaattacaggcctgagccaccacggccagccaggatgctaactattcttaaaggatagttagatgtgcaaaggagtttggacttctttgtgaggctaacagagagtcattgaagagtacaaagcyggagcaaggtgaccagagtaaggggaagggggtaagcctggaggcaggggatgggtgaggaggctg

SEQ ID NO: 844280 - DNA, 623 bp, Homo sapiens
aaacttagcaaggcttgtttgttcktactcttctcttccctgtgtcttcagagctaagaatgcttttttcctctgggcatagggagggcccctctcaaatgagggttttatgacttggtttaggggaactgatgaagggactgtgagagtgactttcctgcttctgccattttctcagataccaacataccattgtttggggtagtgtattctgaactccatcacctatgtactcttaggtacatatttttaataaatagaggtaatttaaatagaaaacaacgttgtgatgtaagtaaggtagtacagataattgttcagtttttcaacaaagaaatttagatagaggttaaaagcaaagtatttaattaaaatatttcacagataaagctgagtcttttaaacattaaaattatcaaggatgtgtttgggctataatataattgtgtgtcattccagtatctaaaacctagcaattatgttatcagttccgtgactgaaacaaattccagctctccaatgtcattcccatccatggaggaagtaatctggtgatccaaccatcttaatttccttgttctctttcatattttcttcacctcaaggtctctaactcttacata

SEQ ID NO: 844281 - DNA, 623 bp, Homo sapiens
aaacttagcaaggcttgtttgttcttactcttctcttccctgtgtcttcagagctaagaatgcttttttcctctgggcatagggagggcccctctcaaatgagggttttatgacttggtttaggggaactgrtgaagggactgtgagagtgactttcctgcttctgccattttctcagataccaacataccattgtttggggtagtgtattctgaactccatcacctatgtactcttaggtacatatttttaataaatagaggtaatttaaatagaaaacaacgttgtgatgtaagtaaggtagtacagataattgttcagtttttcaacaaagaaatttagatagaggttaaaagcaaagtatttaattaaaatatttcacagataaagctgagtcttttaaacattaaaattatcaaggatgtgtttgggctataatataattgtgtgtcattccagtatctaaaacctagcaattatgttatcagttccgtgactgaaacaaattccagctctccaatgtcattcccatccatggaggaagtaatctggtgatccaaccatcttaatttccttgttctctttcatattttcttcacctcaaggtctctaactcttacata

SEQ ID NO: 844282 - DNA, 547 bp, Homo sapiens
gtacatatggtccttaccatagtcacaggatgtaggtatgtctatacccattttatagatgagaaaataaaagaaagaacacaaggtgcttgcccaagsacaccccatcggtaagctaggagtcaaacccaagcagcctgaccccagacctgtatttgtagctgataggctgcacagggcaatggtgtcaatcaccttctgcagatgaagggaacaatgtgcaaggaagggttcaaggtcaattggctaacaagttagggggcagatttgaatccaggcttggtgggctccaaaggtcctcccactgcaccggggcaccttctaggggcaggacagcatcacatcattggaacatttgttctgacctctttccagcttctgggcagctgacactctggcttgtagctacctccgagggtcagtgcttaacaagggttgaatcaacattcatacacacccgcacggaggcttctaatttgagtaagtttgctgtttccaaggacagattgtccctgcctttgggaggctgctctggttgtggtgtttc

SEQ ID NO: 844283 - DNA, 547 bp, Homo sapiens
gtacatatggtccttaccatagtcacaggatgtaggtatgtctatacccattttatagatgagaaaataaaagaaagaacacaaggtgcttgcccaaggacaccccatcggtaagctaggagtcaaacccaagcagcctgaccccagacctgtatttgtagctgataggctgcacagggcaatggtgtcaatcaccttctgcagatgaagggaacaatgtgcaaggaagggttcaaggtcaattggctaacaagttagggggcagatttgaatccaggcttggtgggctccaaaggtcctcccactgcaccggggcaccttctaggggcaggacagcatcacatcattggaacatttgttctgacctctttccagcttctgggcagctgacactctggcttgtagctacctccgagggtcagtgcttaacaagggttgaatcaacattcatacacrcccgcacggaggcttctaatttgagtaagtttgctgtttccaaggacagattgtccctgcctttgggaggctgctctggttgtggtgtttc

SEQ ID NO: 844284 - DNA, 619 bp, Homo sapiens
tattcttatgagtcaaacaactyttttgtgaagtgttcacttagggaagtactcagagatgtaaagatctatggacaaagatgtacatctcagggttgttcaatagtgacgaattgggaacaatgtacatgtgctacagaggaaggttggcttaagaaaccatgctccatgtagaagtaaagtggttaagcacatagtctctggcatcaaaccatctggttacacattgtgccatggtgtgtgtcatctaaccctcgccatggaagctgtgcttggcaggagacacctaggaagtgctcaatgaacatgaaatttatagataaaaagttattttctaggaaggcccctctacagccattaggtggatgcttctgaagcatatttaatgatatgtaaaattatttgtggcataacataaaataaggataaataaaagaataatttagaatttagatatagaataatcctcattatttcagcatgaaggtatgctaaaatgatatgagcctttagatctagatggtatgattactgttgattttgattttctttagttttcaaattatttaagattgattattaacctactccttttcctctttctctctcttactatgga

SEQ ID NO: 844285 - DNA, 509 bp, Homo sapiens
tctactgcaggaagtctcgtttgtgaagagtcacagattgtaccaggtttcctttttctgtaataggatagatgaggagaagacttcgcagctgccacataggttatgctgtgctcctagcgcgctgtgaaggatctgtctgtaaagaatctgtgtgtcatagagcagtcactgaatggctccatgcctctgttttcacctgtaaagcaagcataccacctgcctcccagaaatgtttataaaatcgatgagtcatgtacttgtttatcacctatctctctctcctaaagggaggtggaagattattaaccccttgagcagtcattctgaagtgattagtaattaaaaaggctctttttttttttttttttttttttttgacatagtctcactctgtcrcccaggctggagtgcagtggcatgatctcggctcactgcaacctccacctcccaggctcaagtgattctcctgtctcggcctccagagtagcagggattacaggcatgca

SEQ ID NO: 844286 - DNA, 587 bp, Homo sapiens
ctccattccgatgtcagcaccaaagccagcttcggtcactgtggggaagcaagtggaatatgtgytattatcttctaaaaacaaaggtaggttttggcaatcaccactatgattcgagctcaaaggacagcttacattccttttgtttaccaacacaaaggtgaactgatttccccattgtcatagaaatgttcttcactttctgccctaaagagactgcgccctcctctgcttcccaccgccaggcctgagggattccttgtggtggccaggccaagacttttcttcccatatcataactcacagtgaagcttttttttttggagatggtgtcttgccctgtcgcacaggctggagtacagcggcatgatctcggctcactgcaacctctgcctcccgggcacaagcgattctcctgactcagcctcctgagtagctacaggtgtttgccaccacacctggctaattttttatttttgtatttttagtagagatggggtttcaccatgttggccagactggtctcaaactcctgaccttgtgatccacccgcctcagcctcacaaagtgctgggattacaggcgtt

SEQ ID NO: 844287 - DNA, 624 bp, Homo sapiens
cccttggttgagcttttgtagrtatcaaatattaatatctacagttacccgaaaaggctattgaatttcttctctcctatccatctacatgtttatgtgaggctggattttctttatatactttaccctaaataatgtatttcaacagatttaggagaagctgatctgagaatccagctgtcttctgttaagccagacattaaagttggcaaatatgtaaaccaatgtcactctttccagtaattagtttttcagacaaatgtaattgtaaaaaaaaagtatctgttagcatgtgtttattattttaaatgaattaataaataatatcatttaaaatttttgttttataataaaccttgagagagatagcccacataaacacaagttgttttggatcctcaatagtttttaacagtgtaaaggataggagaaccaccgctatagagggaagatgagagcatttggcaactggaaacctttggctttttaatgtaacttttgctagttatcctgtgatttggggcaagtgacataactctgagtcatagttataccacttataagatagagatagtaaagtctactgcacatggtttttgtaaagatttatttaatgagaccatg

SEQ ID NO: 844288 - DNA, 587 bp, Homo sapiens
aatgcactcaggcctctaggaaaggcagtgtccggtgctgccccctggtggggtgcaggacgcctaaacgctaattgctggttccggrgtcgggggctggaaatccctccgcgcacacaaggtgcctatttcccactatagaaaagtggcctgtcagtcaacttccgaaaagttagagtaaaaaagcccaatagacaactggatgtaatgaacgtatacacactttaaaaaacagagtcaagaataaagaccatccaatatcatttggtgtgcttttaaagcaatcatttgctttttgttttttaatgcaagacaattccaggctcagatttatttctaagaacaattttggaataatttttactcagttcttctgacggaaagttggctacagcccattgtgcaagactatataccatcttgagttggaaaactgtgaagaaaagttcaaagtgagatcggaaaattataggtcttttatatatgttcctacttcttatatagctggtatagactgataaatttcctttcttttcctgcaaaactattaactaatttttctaaacatttaatggaaagccagaaaa

SEQ ID NO: 844289 - DNA, 587 bp, Homo sapiens
aatgcactcaggcctctaggaaaggcagtgtccggtgctgccccctggtggggtgcaggacgcctaaacgctaattgctggttccggggtsgggggctggaaatccctccgcgcacacaaggtgcctatttcccactatagaaaagtggcctgtcagtcaacttccgaaaagttagagtaaaaaagcccaatagacaactggatgtaatgaacgtatacacactttaaaaaacagagtcaagaataaagaccatccaatatcatttggtgtgcttttaaagcaatcatttgctttttgttttttaatgcaagacaattccaggctcagatttatttctaagaacaattttggaataatttttactcagttcttctgacggaaagttggctacagcccattgtgcaagactatataccatcttgagttggaaaactgtgaagaaaagttcaaagtgagatcggaaaattataggtcttttatatatgttcctacttcttatatagctggtatagactgataaatttcctttcttttcctgcaaaactattaactaatttttctaaacatttaatggaaagccagaaaa

SEQ ID NO: 844290 - DNA, 587 bp, Homo sapiens
aatgcactcaggcctctaggaaaggcagtgtccggtgctgccccctggtggggtgcaggacgcctaaacgctaattgctggttccggggtcgggggctggaaatccctccgcgcacacaaggygcctatttcccactatagaaaagtggcctgtcagtcaacttccgaaaagttagagtaaaaaagcccaatagacaactggatgtaatgaacgtatacacactttaaaaaacagagtcaagaataaagaccatccaatatcatttggtgtgcttttaaagcaatcatttgctttttgttttttaatgcaagacaattccaggctcagatttatttctaagaacaattttggaataatttttactcagttcttctgacggaaagttggctacagcccattgtgcaagactatataccatcttgagttggaaaactgtgaagaaaagttcaaagtgagatcggaaaattataggtcttttatatatgttcctacttcttatatagctggtatagactgataaatttcctttcttttcctgcaaaactattaactaatttttctaaacatttaatggaaagccagaaaa

SEQ ID NO: 844291 - DNA, 611 bp, Homo sapiens
agaactgatcttatgttttgtctattaatattttaaatgaagctactttgaacttcacttttatttaagattataattatacaccttaatcagagagaaaaatcaaagttycttttagatttacaaatacatgcataatttacagaagagaacaatgtgagatcttcctaatataaattaagcattataaattatcttattggaaactgacaacgcctacacctgaatacacatattcttactctggaagttgtatacacctgccttcaaaatgcaaccacttttgcagtacaaccagagggctacacgtttccttaggcattagaggcaactcctaaaccgtaagtaagagggagaagctggcatgaattaaaaaacttgtttcatatgatgatgtcagaaaagtgatgagtaattcaagagagattgtagtaataaatggtgacagtgatacattacaataatattgttaaatattttctgggtagtaggtcccattctaaaagcttaactttaataattcattcaaacctcacaattcagcaagttgggtactactaatggaaaaactaaggattaaagagctaaaaaattcatataagcccacatac

SEQ ID NO: 844292 - DNA, 611 bp, Homo sapiens
agaactgatcttatgttttgtctattaatattttaaatgaagctactttgaacttcacttttatttaagattataattatacaccttaatcagagagaaaaatcaaagttccttttagatttacaaatacatgcataatttacagaagagaacaatgtgagatcttcctaatataaattaagcattataaattatcttattggaaactgacaacgcctacacctgaatacacatattcttactctggaagttgtatacacctgccttcaaaatgcaaccacttttgcagtacaaccagagggctacacgtttccttaggcattagaggcaactcctaaaccgtaagtaagagggagaagctggcatgaattaaaaaacttgtttcatatgatgatgtcagaaaagtgatgagtaattcaagagagattgtagtaataaatggtgacagtgatacattacaataatattgttaaatattttctgggtagtaggtcccattctaaaagcttaacyttaataattcattcaaacctcacaattcagcaagttgggtactactaatggaaaaactaaggattaaagagctaaaaaattcatataagcccacatac

SEQ ID NO: 844293 - DNA, 508 bp, Homo sapiens
aatatatccccagagtgatttagactttggttcctatctgtggtcacagaagctgtttacagaatactaaacaggcttcaggaagaaactacagttttaaaatgccatcctatatccaaacactccacattaaactgtttttctgatgctctggctccatcttttagtacagaagtatacttctcctgattgttttatctgttgctattaggaaaggttttgtatcactggtaaattttttgttaactgagattataaaattgcagtaaactactcatcaaattactaatctgatagttttctctgatgacaatttaccagcacggcaattttaatgaaacatgttttccagaatggtaaaaattcaagaccctataggaycttttcccctcttttcagattgatatctttaaacaaagtgcttggaaatttagtagtaataagtttataagaaaaaatccttctccataaactattctaacatgaaacactgaaaaaagcaaaaatt

SEQ ID NO: 844294 - DNA, 603 bp, Homo sapiens
ttcaatggagatggccatttacctttttaagataaataattgtagatacaatgctaataatcatttaaaaaatattttcttccaaataaaataaattttaaagtttttaaattttcttctgagataaattcatttcatcacttgaaacaaattaaaagtgtttaaacaacttttcaggatgaaagctgaacctatcaaagccaggaaagatcacgtaaggctggatttgcaagtatctacttctccaactttttaccaccgagtactgttcctggattccgggctatggcagatggagcaccaatgagttacgggtgacaaatggcatcagggaaagctaagccaattgaagatcaggaccctgaataactcctctaccataaaacaaaaggactttgttccctgcaaaggaacaaaagatttgttctaaaagatttgtcaaaaaagcattaaaaacagtcctgaaaggctcgcagttttctcaccacttcagttagtcattccgtccracagagcattagtggcatactatcacaataggagcaatcagaatcccagctccgtacacacggcattgccaaaggcagatatatcaaggcatcc

SEQ ID NO: 844295 - DNA, 607 bp, Homo sapiens
gttatattttatctaatttaaccatcttaacaaatccatgaagtcagtattatactccatttcacaggtgaggaaaccaagataaaggaggttgcccaagatcaaatcgctacatacacagccaagtaagattcgaacctgactacaaagcccattttcttagtcactcttctgcaaattttaagaccctactattgagaatagcaatgataagggaaaaaattgaattaggaataaagaagaatggtaatgtggaaggcaggcttggattatcaaggtttgacaatatagccttgagggccatatgagttaagttcagtcttagaagcctctttcacatataaagaaaggtgtaggctaagatatgtgaaggagctgaaaacacaaacttgatcatgaaggtaatacacagagcaatgaacagatggtcctgggtagtgggaacctcctaagccacactaaatgattccaataagcataactccaattgtttatatattagccatctggattgctatgcacattatagccagaaaagaaagcaaacaatgtgaaataacaattccaaatcattaaartcacagacacaggcaaaatatcttcattt

SEQ ID NO: 844296 - DNA, 639 bp, Homo sapiens
ttatgctgataccaaaaccagacaaagacacatcaamaaaggaaaactagaggtcagtattgctggtgaacattgatgtgaaatccttaacaaaatactaacaaactgaattcaacaacacattaaaaaggtctttcattatgaccaagtgggattcatcccatagatgcaaggatagttcaacatatgcaaatcaatgtgatacatcatgtcagcagaatgaaggacaaaaaccatatgaccattttaattggtcatatgctttatcaaatgctgaaaaagcatttgataaaattcaacatcattctatgattaaaaaacctcaaaaaaactgggtatagaaggaatatacctcaacacaataaaagccatatacagcagacccagaggtagtatcataccgaacgggaaaaatgaaagcctttcctctgagatctggaacaagacaaatatgcccacttttaacactgttatttaacatagtactggaattcctagctagagcaatcagacaatagaaatgaaggcatccacctcggaaaggaagaagttaaattatgcttgtttgcagatgatatgatcttacatttggaaaaatcttaagactccaccaaaaaactaatacaactgataaacaaa

SEQ ID NO: 844297 - DNA, 639 bp, Homo sapiens
ttatgctgataccaaaaccagacaaagacacatcaacaaaggaaaactagaggtcagtattgctggtgaacattgatgtgaaatccttaacaaaatactaacaaactgaattcaacaacacattaaaaaggtctttcattatgaccaagtgggattcatcccatagatgcaaggatagttcaacatatgcaaatcaatgtgatacatcatgtcagcagaatgaaggacaaaaaccatatgaccattttaattggtcatatgctttatcaaatgctgaaaaagcatttgataaaattcaacatcattctatgattaaaaaacctcaaaaaaactgggtatagaaggaatatacctcaacacaataaaagccatatacagcagacccagaggtagtatcataccgaacgggaaaaatgaaagcctttcctctgagatctggaacaagacaaatatgcccacttttaacactgttatttaacatagtactggaattcctagctagagcaatcagacaatagaaatgaaggcatccacctcggaaargaagaagttaaattatgcttgtttgcagatgatatgatcttacatttggaaaaatcttaagactccaccaaaaaactaatacaactgataaacaaa

SEQ ID NO: 844298 - DNA, 614 bp, Homo sapiens
ctgagcaccgcccaacgagtgctttgaaacagcactctgtctttactccccagcatccctccacagccaytgctgcttttgccttcagttccttcccagggtgaacctgggaaaataaagacacaaaacaagcttccagtaaatgaaatgagttctagatatggaaacttactaggtacaaataaaatgacagtacattaaatttcttaaaataggttatttatatcaactaaaaaactgatacataagatatttggtcattcaacactattctgcccatgaggttctattagtgctttagttataaaagtagtagtaagcatagcattaccttcgtaagtgtgatagttgtagtaggcaaagtgattccttctccctggggttaagacacatgccaggacccaggtgaaggcagcatcagcaggagagagaccatgcagaacacgcggaatagggaaggaggagaagagacgcagagggtgaacttcagtgagacacgtttcaaaggaagaaaaggtacacttcacccatcagcttttgtgaggacaagactatactagtgccccagtcagtgttttagaaaccaatgcagactgttaagggaaaccacagga

SEQ ID NO: 844299 - DNA, 576 bp, Homo sapiens
cacaataaaacaaatactacaataaagcaagtcacatgaattttttggtttctcagtgaaaagttgtgtttaaggccaggcccggtgactcatacctgtaatcccagcactttgggaggcyaaggcgggtgaatagtttgagctgaggagtttgagactagcctgggcaatgtagtgagcccttgtctctacaaaacattaaaagaaaaattagccaggcatggtggcacactcctgtggtcccagccactagggaggctgaaatgggaaaattacttgaccctgggatgttgaggctgctgtgagttgtgatcatgccactgcactccagtctggatgatggagtgagaccctgtctccaaaaaataaaataaaataaaataaaactcacttgtgtttacactatactgtaggatactaagtatgcaatagcattatgtttaaaaaatttgtctaccttaattaagaaataactttattgctattgaatgttaatgatcatctgagccttcagagagtcataatctttttgctggtggagggtcttgctttgatgttgatagctgctgactgatt

SEQ ID NO: 844300 - DNA, 489 bp, Homo sapiens
ttggcaaagtacagtctgtgagccaaatctagccactgcctgtttttgtaaagttattgcaacaaagccatgcccacttgtttatatattgtttacagtggctttcatgccataatagcagaattaagtctgggatagacactgaatggcacacaagccctaaaatatttactatattgccttctatgaaaagagtttgccaacctttggtctaaagaattaaacatgaaagagttggtgagtgttgaactaaggagttggtaggttgacttgggtaggtttgcatttggaaagattattcacactgtcttcagtctagagaacaggattgaattggagcacatttgaaggctgttgctgaaatctatgatggtggcatcttgctctaagaaagtgccagtgaagttagargtagacaggtaattagttgttgatagtgaaggtgagaaaggagccaaggatggagcctaggcttttgccttgaagaac

SEQ ID NO: 844301 - DNA, 483 bp, Homo sapiens
ggcagggcagtaactgagatggataaagtgagagacactgttaaatgcagatgttaagagcttrgactatagagtcacactgatttgctttgccctttactagctatggactttgaccaatttacataacctctctgtgtttaatttcttacctgtggcagaaagttatataacagcttctattttttttctttgaaacaatagatcagaagtttgaggaaaacaaaaaatatatgtaatagccttaaagaaatatttatttctttgaaataaatgttattttcaaggaaaataacaatcctgttattttctttgaaataacaggattggaagtttgaggaaaataaaaaaaaacagatctgaaagaactattgtagagaactagagagccaacggactatgaaacataaaaggattcagtcagcagacattgcagattcagttgaaattaatactgtaaatgtatcatgatgctggctgagc

SEQ ID NO: 844302 - DNA, 561 bp, Homo sapiens
ctaacaatgacataaatatgacttcaaattyttttcttagtcagtagcataaattggtagggctaaagctgaagccaactccaaattctgagacctgctataaaacacaatgtgtgacgaacaatataattatttaaattatattttgcatggccatttgttaatgctagttctcacatgtctgtaaaattaggatttttaatatcaattaaatgaaggactttgttttgttcactgttacatctccattgcctagaacattgacatataaatatttgttaaacgaatgaatgaaataacattctgacaattgaagaagagattttaagaatagctgtaacacatcatacataaaaatgttaagcataaatatttgtaatatatgtaccgaaatttattgaccctcacatgtttggcagattcttaattttttcttactggctttacttagggacgtgcttccttaacacaagagaaagagaagtttgcccatgaacatgaagaaatgaagaacctagaagccattgttcaagaaataaaaccaactgccctcataggtaa

SEQ ID NO: 844303 - DNA, 614 bp, Homo sapiens
ccattaaaaacaataattggattgtttgtctttttcttactggttcatggagattcttcatgtattctgattatgagtatgagccttttcccagttgtgatgttactaatagcttttccccctctgtgacctstctttcccctgtcttagcagagcctttgggtgaacggaagttttaaattttggtgtagtcaaatatcttcgtgtttttctttgtgataaatgcttttggtaccttattgcagagatcttctgttctctgaaataatgaagacttatttctttttcttttcttttctttttttttttttttgagatggagtctcactctgtcgcctaggttagagtgcaatggcatgatctcggctcactgcaacctctgcctcctgggtttaagtgattctcctgcctcagcctcctgagtagcttggattacaggtagctgccatcatgcccagctaatttttgtatttttgtagagacagggtttcaccatgttggccaggctgatcttaaactcctgacctcaagtgatccacctgcctcggcctcccagagtgctgggattataggcatgagccaccttgcctggccctgtttctatattgtcttcc

SEQ ID NO: 844304 - DNA, 584 bp, Homo sapiens
cacagactctgtgttctcaattatggaatcttggtttgagggtatgctctgcaccagctggctgcataatcttggagaatcacttctgctctctggctcttagtagcctcgtctgtgaacaaggagagggatggtactatgtaattcctaagggcccttctaacagcaaatagcctgaacagaaaacggctgataaacccatttatactaaagtgtgactgattgctgagcaggcttgctcggtcatctcatcaaagagaagttgcattaaacaggggatggctgaagagggtattatttagccaaaggaatgactctgtcattatagaatgaaagatacctggggctacctagctgcagtgttttggacaacttagggttgggagattcatgaaacgttttaggtctatcatataagcatgtttcaagcccccacagagatcatggcccatccatactcaaactccctgtaggttatagcataaaatcccttgcctgctccaaccccytcttccaaatctatccattactgcttgcccttgtgcttcccctcaagccaaaaggagcccccattattgctcaaa

SEQ ID NO: 844305 - DNA, 576 bp, Homo sapiens
gcttggcacttcttgctgtcactatgtgaagaaggacgtgtttgcttccccttccaccaggactgtaagtttcctgatgcctccttagccctgtggaactgagtcaattaaacctctttcctttataaattatccagtctcggggtaggtccttacagcagcatgagaacagactaataaacagccccattttacagatgttgaaaaaaactcaaagaggtaagcagcttgccaaagttcatgaagccagaaagtggaaaagcagggtttgaacacaggtcagacagaatccaaaaccctgtttttagacaatttggcagcttcttacaaagctaaatatagtcttactaaatgatctatgaattacgctcctaggtatttactcaaatgagataaaaatttataatcacacaaaaacctgcacataaatgtttacagcaactctattcataactgctaaaatatgcaagcaagcaagatatccttcaatagttgaatkaatagacaagctgtggtacctctgcataatggaatactatgcaaggataaaaagaaataagttaccaagccatgaaa

SEQ ID NO: 844306 - DNA, 579 bp, Homo sapiens
tgaagttgcctaaggaagcatggctcagagcacattcctgccattaagcgatacataaccgtatatgttcgttgccttccctaaggaagtggtgaagccagcacagacagagattatgagagaagatcctcggtgctgccctcacaatgccagcaacagtcctggagggagggcagctaacatcgatgaaaggcattctctctgcagggcacgtatatattactgtactaatatctcggactaaccctagcaggtgtgtatcgttattcctactctaaagtagggaaactgggacctgagatgatacagctcttaaatgatgatgctggattcaaattcagttccatttttccaggctctacttgcttcactcctggccaggcctcctataatactagggggaagccagaggctctaaaagagcaccactgcctccagctgaggggtctggggagscttcctggaagagaaggcgtttctgaagtgggcctgaagccagtcaggatttggacattcgatcccaccacatttgcacacacatgtgtggacgcacacacactcacactcacaaacacacat

SEQ ID NO: 844307 - DNA, 630 bp, Homo sapiens
agacaaaggaagaatttgaagatcaaagcattgaagtaccatgctttgtccgaggtcacacagttagtctgtagctgatcagaattkgaatacagatctgtctgtatccaaaacctacgctcattgtttgagtgtccaaaacctacactcactgagtctacagttctaatatttattgaatacctattatgttcccagcaaggacaaagtgccatggggaatagcaagacaaatcagacatggatgttctattttctgggtaatatcaagatgctttatctcacagaaaggaatggaaagggtgtcagaactagagtcagcaagcatgggttgctttgcttctaactacctctgtgtccttttgcacatttctagcttctccaagttttttctttcttacctataaaatcaaaataatgcctctatccacagcaacctccaaagtcactaggaagatcaaataaatgaaataacaggtgtactgatgatgtgctaactatgatgcactggacaaagatgctttaggatattctgggaactttgctgtgctgtcacaaatgtttcattaatgtccgcagagacagtgagccaagcatatttgctcccttggggacaaagggagtcaactag

SEQ ID NO: 844308 - DNA, 545 bp, Homo sapiens
tcttcatctgtcaatgtgatcttatcaaggatttttataatttctataaacaatcattatattttagctgaatcagtagcattatgctgtctaaacagatagtcagattccttctattttaaaacactttctaccagttcccatcccaccactcaccactcacccccacgctggccctgtaaaaggaatttggcttcaactttcttttcttaatccactaagcaatcgcatgaataaaaagataatcacatgccctgcatgcctgatagaatttttataaatcttctgttttaatatttattttctattttgtgaaaataatatttactgaacaagctagatcatcttctttctccacagaaaaaaaggtaaggttggtgaaaatacactgaaagctctgctaggtacacattayttttgcataaaattttgcttaaaattctgtggaggctggcaaagcactgtagaatgattgacgtggctgccttgatattgttcttgctttttctttgtccacttatgttgaccctgccactcctaaatat

SEQ ID NO: 844309 - DNA, 634 bp, Homo sapiens
agatacaacctaattcacatatatcttctatctttatcttttctacctcaaggatacagttttttaattgaaaattttaactcaaaaattattttgcaaacggatatttgaaaygtggggagtaaaagataagctacaaacaaaagaacaaatatcttagacattaaactcttcaatttacattctggaccagtggtctgcaaaattaggtgtgtgtatcccagaagcacgggaggtgtaagatcatccactggggcactggaagaaattttaaaacatctccatatttatgggctaaaaaacatataataagctttacttagagttaacatatgcatacatggtttaatagccagacatttatataatgtataaatatgtatttacttgaggaagcgttcatgctttaaaaatgtttttcttggggtatacattttttaagggtttgaagggtcctgctttacccccagatttcacaaagtaggatacatatgcgctcaagagtatacagtatgccagaaaaatgcaaagaaactggataaacctggtatatcttcctggcatctctatttcactcactctagggtaagtgacattcattcttccctataatcaggtgctttggaagacacct

SEQ ID NO: 844310 - DNA, 550 bp, Homo sapiens
tggcaggttatgggaagaacatgacattgatcctgactttaagggcctgagaattaataaggggaggtaagacatgagtgcaaagctcaccaggtcagagtaaagaatggagaggttctaataatgcggctgaagcacatggtgaatgatgagaaaggacgaaagggatttagaagtccttgaagggagttaatatttgcatttgtgattatttgagaggagtgctttagacatgaagaaaaacactgcagcagtaaattttaggaaatgtttggaaaataagaaaataatctcataaggttgaaagggcaggtgggaagagactctgagtgacatgtcaaaggttgcttttaaaaacatgtcagaggctcctgaatgtcatgacaaagaatttaaaaatgtttttgtaggcaacaagtagccagagaagatttytgagcagaaaattgtacagccagacatatgctttaggaaagctaacatactaataacaagtagaatggattgggagccagaaagtctggaggcaaaaacaaacaaacaaaaacaa

SEQ ID NO: 844311 - DNA, 560 bp, Homo sapiens
agaagtccagtggctccctgccccttgtgaaacctcacagtttgaatctgcttagccacgggtctttccccacttgcctgttgccacagcgaaagaaagacacctgtaactccatctgcactgatactgagttctttggctttgggcagagctctcaaccaacttggctgttaagcaaagttgctccaagtggcaggttgcttccctgcagggtccactagactttgctctggtcactgggctggtcacagtcttagtccctgacccaggtcgtcttgttctctgttcctaagaggacccagtgagatcatgtccctatctcagtacaatctcctcctcagaaattcagagtcaacattctgaagatgactaattcacaccatctggcatcatgagctatcatatcaccatccaagatgaatttccagaataaatgactaaggagagcccccctgccaaccgccaccacctcacacaccttcaaactatgtttttactttagyattgcttgtatagtgcaatgagaatccactgttatgatataagcattccatgatgta

SEQ ID NO: 844312 - DNA, 591 bp, Homo sapiens
aatacaaagatgaatactagaagataaactaactgcaataagtattttctaagtagaagaccaaacaccaaggggaatccctctttccaatgtcttctgatatggcaagattttgccagaatggaagtctaacacttaaataagctttctcttggccaagtaagaaactacagttgttgtgggtattaccctacaattaccatatgtattacatattaaattaaactcagcattaaatatgcttgtataattacgctgttaatgatgatagcagtgatgatgctggtggaaaaagcctgtctttagcaaaagaaaagtaagggagaaaaatgtaacaagcagaaagcaaacacagagttgggcaatttttgactaggaaagagaattttaaacactttttaaatcttcaaaatatttaaaacaaatttaaagggtctgttaattcatatatttttctttactaatcattttggattttttttctytgaattattgggcagggaagatacttaggtatggaagattattgctctaatttgagtgaaataaaagatattagtgcgaggcaaacataactcatttgaggataaa

SEQ ID NO: 844313 - DNA, 613 bp, Homo sapiens
atcagggagtatagagagtaggaatgagtcagggttcctcaagcctatgctgacacaccctcctgtgtcccctgagcactcactgccccatgcactctacagacatttttactgcatgtgagtgaaatcccccattcaagggttgcctctgggcacaggaatgtgcttggttctcatgtggggcagcaaagacatccctagaatgtgcacttaatcaagggtaatgggagttagtggacctctggcccagcttcctcactcctggggtggggcagcactgtggacagggaagtcccagagggactaagcttcagtagcccacagatgcctgaacatgtgtcatttatggccttcctcctctgtctcaccccattccccattgttactctctggggtcacccccaaaataagctgctgcactcacagtcttgctccacactgcactcgcagcctgtcacagctccagcatactctgaccttggcagtgggatattttgctccctgtctccctttgcttgataaaatgtcctgtattttttcatatgagaatagtaataggatgamtttaataaagagttgttgataatatctgattttcttacttgttacccaa

SEQ ID NO: 844314 - DNA, 633 bp, Homo sapiens
agattttctagcataaaatattaaatcctatcttaataaaatgtagcttgagataagcttccacaattaacatggaagacaaaaaaatgtttcctgataatcatccgtgrggctagaacttctctctaagaatagagatatgaatgtctgcactaggaaaggatgaaggctcttcattaagaggtggcaaagtcaacgtttgaatggttttagcctagtcttctccttatgaggatcagaaaactcaaagccagcactgagggaatggtttgatctcctttcttgaaggaagattgcagaagggcttggaaaagtgaatgattaacttgaccacatttctcctagggccgggaagtgagtgcactcaaagcaggatttcctggcaactgctccagtaatgtcttactgagaatggagaaatctggaggataagaggaaagaggaaaaatggtaaattacagactgtttcaacagcaaaacaaaggactctagagaaaatcgggaaactccagtcctttggggagggtagaaacaatgcactattgttttctagaagtcttcatggaagatattttatccatggaactgcacactgtggaagccttgcagaacccgtgtcacatcttagggaca

SEQ ID NO: 844315 - DNA, 633 bp, Homo sapiens
agattttctagcataaaatattaaatcctatcttaataaaatgtagcttgagataagcttccacaattaacatggaagacaaaaaaatgtttcctgataatcatccgtgaggctasaacttctctctaagaatagagatatgaatgtctgcactaggaaaggatgaaggctcttcattaagaggtggcaaagtcaacgtttgaatggttttagcctagtcttctccttatgaggatcagaaaactcaaagccagcactgagggaatggtttgatctcctttcttgaaggaagattgcagaagggcttggaaaagtgaatgattaacttgaccacatttctcctagggccgggaagtgagtgcactcaaagcaggatttcctggcaactgctccagtaatgtcttactgagaatggagaaatctggaggataagaggaaagaggaaaaatggtaaattacagactgtttcaacagcaaaacaaaggactctagagaaaatcgggaaactccagtcctttggggagggtagaaacaatgcactattgttttctagaagtcttcatggaagatattttatccatggaactgcacactgtggaagccttgcagaacccgtgtcacatcttagggaca

SEQ ID NO: 844316 - DNA, 633 bp, Homo sapiens
gaaacgacactgaggtcaggaacttaaccagacaggcactgaagaagcagacagaggaagggagctcgtgaaggaggagagaggtgggaggagagccaggagtcagataacttcraatgctacagagacaccagtgaaggcagaactgagatggggccatgaggtttggtaacaaggagattgctgatgatctgtgtgcaaataactacggcaaggcaacagagtcttgttcttccaatatgtcccttggtccataagcgctgagaggaagtgacaatctgtgagtagaaaccaagtgaaaggagtgttagtgcactcttctttagaagagagcaaggcagagcctgtgagagaaaaatgtctttgtctcttgtctctctttgtctggctcaaggtaatgtaattgcctcagacttcccagggaagcaagtggctcccacgttcctaagcaaaggccaagccatagaacaagggcagaggccgccactgggaatgtttgtgttgttaattttttgtagttgaatcatatcgggaaaattgtttccaagttgctcaaacatggatagagaagctaatgttttgctggaggttggcatttttccctgatgacatcacatgccttgtgtcaccagt

SEQ ID NO: 844317 - DNA, 626 bp, Homo sapiens
cttagactcccatacaataataatgggagactttaacaccccactgtcaatattagagagatcaatgagacagaaggttaacaaggatatccagkacttgaactcagctctgcaccaagtggacctaatagacatctacagaattctccaccacaaaccaacagaatacacattcttatcagcaccacctcacacttattctaaaactgaccacatgattggaagtaaagcactcctcagcaaatgtaaaagaacagaaatcacaacaaattgtctttcagatcacagtgcaatcaaagtagaactgaggattaagaaactcactcaaaaccacacaactacatggaaaatgaataacctgctcctgaatgactactgggtacatacgaaatgaaggcagaaataaagatattctttgaaacaaataagaacaaatacacaacataccagaatctctgggacacatttaaagcagtgtgtagagggaaatttgtagcactaaatgcccacaagggaaagcaagaaagatctaaaatcaacaccctaacatcataattaaatgaactagagaagcaagagcaaacaaattcaaaagctagcagaaggcaagaaataactaagatcag

SEQ ID NO: 844318 - DNA, 533 bp, Homo sapiens
aaaaaaaaaaaaaaaaaaaagaatgaggtaacttcttaatagttttcatatttttagactataaaaagtcaaatcaagaataatttttggtatgtaatggttcccaaaattgttgaacmaattttacttcaaaataattttgttctgatgggactttgagaatgggtatttctgggtcttggtatattcactcaccaccaaaaggcagcaataaaactggataaaattataaaaataatctctagaaattggccaaagagcatactgttgggaaatatttattccagaaagtccacataaatctcagtaaaaaagagtggatgcttttatccacctttgtctcacagctcagttctgtggctcagaagttgaaccctgggtaggcaagcagtctgtgtggactggaaactctgctgctccactggaggggagtgactttatagcgtggaaaattccctgcccaaggatcctattgaatataaagaggttacagtgggaagcaagtagagaagattagtatgtgtagaggatat

SEQ ID NO: 844319 - DNA, 353 bp, Homo sapiens
tcatttttgtgtgtggtgagactgcttaaaatctacactaagtagttttcaagaatacaacatattattgttaactaaagtcaccatattttacaacggattgcaygtataagtgcaatcatgtggttttgtctgtcttattccacctaacttaatgtcctccctgtttattctatgttcttgaaaatgcaggatttccttttttcaaagctgaatagtattacgttgtgtatatagaccacattttctttatctattcatctgtaatggatacttaagttgattccacattttggctattataaataatgctgtaatgaacatgggaatgcagataactctttgacatactg

SEQ ID NO: 844320 - DNA, 454 bp, Homo sapiens
taaatgggcaaaaactggaagcattccctttgaaaactgacacacgacagggatgtcctctctcaccactcctattcaacatagttttggaagttctggccggggatttccgtcaagagaaagaaataaagggtattcaattaggaaaagaggaagtcaaattgtctctgtttgcagatgacatgattgtgtatttagaaaaccccatcgtctcagcccaaaatctccttaggctggtaagcaacttcagcaaagtctcaggatacaaagtcaatgtgcaaaaatcacaagctttcctacacaccaataacagacaagcagaaagycaaatcatgagtgaactctcactcacaattgctacaaggagaataaaatacctaggaatccaacttacaagggatgtgaaggacggacctcttcatggagaactatgatccactgctcaacgaaataa

SEQ ID NO: 844321 - DNA, 353 bp, Homo sapiens
tcatttttgtgtgtggtgagactgcttaaaatctacactaagtagttttcaagaatacaacatattattgttaactaaagtcaccatattttacaacggattgcacgtataagtgcaatcatgtggttttgtctgtcttattccacctaacttaatgtcctccctgtttattctatgttcttgaaaatgcaggatttccttttttcaaagctgaatagtattacrttgtgtatatagaccacattttctttatctattcatctgtaatggatacttaagttgattccacattttggctattataaataatgctgtaatgaacatgggaatgcagataactctttgacatactg

SEQ ID NO: 844322 - DNA, 353 bp, Homo sapiens
tcatttttgtgtgtggtgagactgcttaaaatctacactaagtagttttcaagaatacaacatattattgttaactaaagtcaccatattttacaacggattgcacgtataagtgcaatcatgtggttttgtctgtcttattccacctaacttaatgtcctccctgtttattctatgttcttgaaaatgcaggatttccttttttcaaagctgaatagtattacgttgtgtatatagaccacattttctttatctattcatctgtaatggatacttaagttgattccayattttggctattataaataatgctgtaatgaacatgggaatgcagataactctttgacatactg

SEQ ID NO: 844323 - DNA, 484 bp, Homo sapiens
aatgtgatacaaaatgatggagaaattactagaaatacattttcttggttgctgctagcaagtttggtgatattaaaacatctcatggtggaaagtaaagcaaatgaacawtcaaccccagcaatattgagataaatatctgaaccaaatataattggcttcatgtgtgacaaaggttttgatggagacttggggagatacaggttaaatcatggcactccttcactctgacccttcatcaacagatcctaccttccaagcgccaggatttaaagaccaaatgaccatcaatactagagaaataacattaaatatgtggtctgttttgcaaaacagagaagtatcggtgcctgccagattaatctttccacagagtccttgaaataaatggtttgtaatttggtagtgaattcaattaccgacttatagtcagattttggaaaagggctctcttcacctggtcttagttattcttgttaaatgg

SEQ ID NO: 844324 - DNA, 484 bp, Homo sapiens
aatgtgatacaaaatgatggagaaattactagaaatacattttcttggttgctgctagcaagtttggtgatattaaaacatctcatggtggaaagtaaagcaaatgaacattcaaccscagcaatattgagataaatatctgaaccaaatataattggcttcatgtgtgacaaaggttttgatggagacttggggagatacaggttaaatcatggcactccttcactctgacccttcatcaacagatcctaccttccaagcgccaggatttaaagaccaaatgaccatcaatactagagaaataacattaaatatgtggtctgttttgcaaaacagagaagtatcggtgcctgccagattaatctttccacagagtccttgaaataaatggtttgtaatttggtagtgaattcaattaccgacttatagtcagattttggaaaagggctctcttcacctggtcttagttattcttgttaaatgg

SEQ ID NO: 844325 - DNA, 484 bp, Homo sapiens
aatgtgatacaaaatgatggagaaattactagaaatacattttcttggttgctgctagcaagtttggtgatattaaaacatctcatggtggaaagtaaagcaaatgaacattcaaccccagcaatattgagataaatatctgaaccaaatataattggcttcatgtgtgacaaaggttttgatggagacttggggagatacaggttaaatcatggcactccttcactctgacccttcatcaacagatcctaccttccaagcgccaggatttaaagaccaaatgaccatcaatactagagaaataacattaaatatgtggtctgttttgcaaaacagagaagtatcggtgcctgccagattaatctttccacagaktccttgaaataaatggtttgtaatttggtagtgaattcaattaccgacttatagtcagattttggaaaagggctctcttcacctggtcttagttattcttgttaaatgg

SEQ ID NO: 844326 - DNA, 522 bp, Homo sapiens
tctattaggttatccaacagttatatgttggcatataactgtttatagcggtctcttctgkttttttgtatttctgtgctatcagttacaatgtttcctgtttcatttctaattttatttgttccttctctcttttttagttcagctaaaggtttgtcaatcttgtttatattttcaaaagccaacttctagttttgtggatcctctattatttttccagtctgttttatttacttctgttctgtaccttactatttttttctttccagtagctttgggttaatttttttcttcattttctagtttcctgagatacaaagttacttgctttattaggatcttcatggagtcattcatatctctagacatccctttatactgcttttgttgcataccatatgttttttagtatgttgcttttccatttttgtttttctcaagatatttttaaatttccctttgaatttcttcattgccccattggttgttcaggatcatgttgtttaatttccatgtatttgt

SEQ ID NO: 844327 - DNA, 522 bp, Homo sapiens
tctattaggttatccaacagttatatgttggcatataactgtttatagcggtctcttctgtttttttgtatttctgtgctatcagttacaatgtttcctgtttcatttctaattttatttgttccttctctcttttttagttcagctaaaggtttgtcaatcttgtttatattttcaaaagccaacttctagttttgtggatcctctattatttttccagtctgttttatttacttctgttctgtaccttactatttttttctttccagtagctttgggttaatttttttcttcattttctagtttcctgagatacaaagttacttgctttattaggatcttcatggagtcattcatatctctagacatccctttatactgcttttgttgcataccatatgttttttagtatgttgcttttccatttttgtttttctcaagatatttttaaatttccctttgaatttcttcattgccccattggttgttcmggatcatgttgtttaatttccatgtatttgt

SEQ ID NO: 844328 - DNA, 638 bp, Homo sapiens
ctaatccagatgaaaagacaaatgaatttttttctacatgcctggaaataatgccagatgattatagatttcaaacttcatagaaaattgaaatttcccccttttgtagggggaatgttttgttaatctagcatacacagcctatgttttctattcttattacttttaataataatttttttcttttcttttttttcagagacaaggtctttgtctgttgctcaggatggagtgtagtggtgccatagcacactgtaatcttgaatttctggactactggcatacaccaccatgcttaggtaattgtttcttattttttgtagtgacagggtcttactatgttgcccaggctggtctcaaactcctgacctcaggtgatcctcccaccttagcctcccaaaatgctaggattataggcatgagccaccatgcccagcctacttttttttttttttttttttttgagatagagtcttgctctgcagcccaggctggagcgcagtggcttcatctcagtttactgcagcctcccgggttcaagcgattctcctgcgtcaacccccagttaactgggtctacaggcacctaccaccacactcagctaattattgtgggkttttttttgtttttttttgttg

SEQ ID NO: 844329 - DNA, 645 bp, Homo sapiens
gaacctattgaatcaggacaaggtgatggttctgctcctgtggcaatctaggtctcagaatctggtatgcaggcagggtgtaaagagcagattgcattttcaagagaaaggttaagcttgaatgttttggacaggaggtgattagatgcatttttaaaaagtccttgaatttacctgatgatttttatgtccttgtgatggttgtagcccattccaggatacgaataaatttagcaacacaaagaagttcatttaaaaatctttccctcagatgctccacttcctcttccttctagctttctcttcttcactaatttgcaacccgcgaggctgcccttttgatcactggcagtctaagaatagtgataagtggcttttgaaaatgttttaaaacttttataggagagtggtggaaagatggaggtttctagaaaacccttaatagaagagacccatttcatttatttatttttggttttaaagcattattttattttgaatgaattttagactttaagaaattgcaaaaacactagaaagtgttcctttaatyccttaccctgcttccacttatgttgaatctctctcatcattttaattatcaagaataggaaattgacattggtacaatattattaactaagc

SEQ ID NO: 844330 - DNA, 611 bp, Homo sapiens
ccagcctgggcgacaagagcaaaactcttcaaaaaataaaaaaaaagaaataaataaattagacacaacaaatataaatactttatagctcttatattcaatgcttcatgttatcagcttctattacaaaaaagaacatagtttgtagtaaaaaagaaaaaatataaagctaacacaattgtatttatgaatctataaaatttcctcaactataaaaggatacctttcaaaaacatcaacaatgataatgccaccaataatagaacatattagaattcaaatattcccacatatttaataacctgtccaacattaaaacattaaaaggctttattaatagccctattataactactaattataggtagaaaataaattttctagatagaagatagatggatagatagttataaatagacaaatagacatagacataaacatatgtaacacttctagtatagatttttttttactgtatttttgtctctctgaagggaactacagaccatttagtaggaaaataaaaatgttttgaatgwagaaataaattaatctgtcttgattacttcatttcagagatcacagacttgaggtgcaaagaagttaaatga

SEQ ID NO: 844331 - DNA, 640 bp, Homo sapiens
taaagagtgtcacccaaatatcaatcccagtataagtacrttgtaactataataaatctactggaagatactttaaaatactgttatctgttaatgtattgtaaaatattagatgtataaagtagctttaataagtgaaatagctacaacaataaaccttccttcacatgaagtgaaaaaaattttttttaatttttctatttgaggaagtgaaatacatttacactaagacagagtaagcaaaagaaaaagtgcaagcaatagcctgcagaaaataaaatgtaacattctgtagctccaattacagaactgctaatacaaaagaaatggccgggcgtggtcgctcaggcctgtaatcccagcacttgggaggccgaggcaggtggatcacctgaggtcaggagttcgagaccagcctggccaacatggtgaaaccccgtctctactaaaaaatacaaaattagccgagcatggtggtgggtgcctgtaatcccaactacttgggaggctgaggcatgagaattgcttgaacccaggaggtggaggttgcagtgagctgagatcgcaccattggactccagcctgggcgacaagagcaaaactcttcaaaaaataaaaaaaaagaaataaataaattaga

SEQ ID NO: 844332 - DNA, 502 bp, Homo sapiens
aggcaggggttagaaccatttggaggggtcagaagaagacaggagaatgttaaaatgtttggaacttcctagggagttggacggctcagaagacaagatgtgggaaagtttggcacttcctaraggcttgttgaatggctttgaccaaaatactcacagtgatatggacaatgaagtccaggatggggtggtcacagatgaagatgaggtgaggaacttgtttgaaactggagtaaaggtcactcctgctatgcaaagagactggtggcatattgccctgccttagagatctgtggaactttgaacttgagagagatgatttagggtatctggcagaataaacttctaagtggcaaagagctcaagaggaagcagagcataaaagtttggaaaatgtgcagcttgtaaatgcaatagaaaataaaacttcatttttctggggagaaattcaagcctgctgcagaaatttgcaaaaataataaggagccaaagttaatcacca

SEQ ID NO: 844333 - DNA, 673 bp, Homo sapiens
attcagtctctgcctcccaccaaatatatcttattttcttaacttgactctaactgcacatgctgccttttctttccttttttgtctagaacatatttttctcctttggtctgactctactctgtaactcccccctcaacactttattgtctttattgacttttattgtctcctcttcatattagctagagtagaggtggggactttgtctcgcctctattcccatcatctgatatagtacctggcaaatgacaggcacttattaaatgcttgttggatggctgctggattgcatcattgctggttcagtggacgaagacttctgttttggggcttaaatttagtgacagttctgatgcaatgggttgattaaaatgctcccaaaccatctttttgttttgagaggcaggaatgtgatgtgactcatatgatccctgttatatatttttggctttctgttctttggtctagaagggatcaaagtgaagagcgtaagtttaagtatctctgtaatttaaggcaagttgtacattactggcttctgggtgttactaargaacaattgtgtggaactgttctatccttttgttttacttttcagtatgaataacatcagccatttcactgaatcattaaaggcaaaatgtgaaagggaaggggagcctttcatcct

SEQ ID NO: 844334 - DNA, 565 bp, Homo sapiens
aggcagagcagggccaagaatttgggccacaaggcagctgggggtctcagacattttggggcctgcccctgccctctgatatctagggaagagaacatgggactgacagttacggaagctgagttccggtcccagttctggcgccaatgtgctctgtgatgttgaagtcacttagcctctctggatcattgctcatccatatgtaaaccaaaagggtctagacccgccaatgcctttctttccactcaacaccagacagccagggagagagctcatatttactttattaatatttttttgagacacggtattgctctgttgcccaggctggagtgcagtggtgtgatcttggctcactggagcctcaatctcctgggcccaagtgatcctcctacctcagcctcccgcgtagctgggactacaggcacacaccaccacgcccagctaattttgtttattttttgtagagaaggggggtctcactatgtggctcaggctggtctcgaactcctggactcaagcgatyccccgatcctgcctcccaaagtgctgggattataggcct

SEQ ID NO: 844335 - DNA, 386 bp, Homo sapiens
ccattctgtaggtgagtataagtcacagagacagaattgactaacccaaggtcacacagcttataagcaagaagccaaaaaacataacagaacagtaccctttaacaagactaacaaagccctttgggtcctgaccacttccacttgcccctcccaccccatccagcatcaccaccctgccactcccccacccccacccctctcagtttcctatccaccctggccttctcttggtacttgtctcattccttccttgcctatctctggacatgctgccctccgayctggaatgtcctttcttcctctcttcacctggattaactcctattcatccttcaggtcttcactcccatctcacctcctcagggaagccttccctggttagc

SEQ ID NO: 844336 - DNA, 626 bp, Homo sapiens
ccagcttgccttggccaccaatcatatagcttaccacagacaaagaagccaaaagaaccaacaactgagcccaattaaaactgccagtctgcggaatcatgggctgaatcactggctgtcaytaaaagacacaaaattctggagttgttacgtaggaaatttaactgacagaaaggctaaagataaatactagctcaacgtaaatcacattcaagctccttggataatatattacagggcatcctcataagacattttgtaaaggctgaagctgctgtagtattatatataggcaaattttgcagataagaatacacacacatcactgaaagctaccaggatagtatcttgtagtgggtcctcacaagaacttttatagaagctgaattcactacagaatcatatattagcaaaatttgcagatagaaatttagatatagatacacaggagtacacgtgtgcatacacaaataaaacaaataaataaaatggaaagctaccagaataataccttttagtgggtcttcacaagaattttcatacaagctgaagtcactgcagtagcccatataggcaagtttatattttgttgatctatgtttccaaaccgaggttttgatttgctt

SEQ ID NO: 844337 - DNA, 333 bp, Homo sapiens
agaaataattgaaacagaaaatggagatttgaaacaagtactaaatcaaacactggtttacctattaccttcctccttccaaaaaacaaaacaaatgaaacaaaataaaaacaacaaaaatacctgaaagacaaaacaaaacaaaaacagggtcataattagaagaaagtataatttataaagtaagtaaatgttcttttaaaatatatgtgagtaaaarccatgaaattgattatttctctaaaaaattaaatttttactgattcataattgtaaatggcattataggatgatttagggaagaaaaagtacaggctgacttcactcatagac

SEQ ID NO: 844338 - DNA, 321 bp, Homo sapiens
cctgaccaatcagagccttcccagggattcatgtatcctcaaatgagargagccatttgcttgctctggggttattggcagggacaaagcaaagcagcagccatctgtgactacgactgcccctcccactcgcttggggtatggaggaagcttgttacctcccccaaggaggtgagccaaatagatgcatcactgatgctgtctgactgtgacttagaagccaagctccactgccagtcttcccaggtacagaagttcacacttccaccctctttgctagggccggtgttagtggccctaagttttgttagttgttagttt

SEQ ID NO: 844339 - DNA, 411 bp, Homo sapiens
taattttggtgagacagacattcagtgtctacgttactatgcgggtgcagctcacgctgagccgtgcagcagsctggggttcctcattttccctggagtgcatctggttcccaggccacttgtgccccagtttcttcctggggctgtgacttcacctctgcactctccttccgctatgtaagccgcctctccacgtgttcagacacattggaacagtttcctcccagagcctcctgaccatcccctgtggcctggtgcctggcctctgtcatctggcacccactctctcctatcagttggctcctgctgcctggaccccatcttcctctatgtggctgcccctcgttttgctcatgcccaccctccaagacttcttttttttttaaatatatataatggggacggggtgcg

SEQ ID NO: 844340 - DNA, 411 bp, Homo sapiens
taattttggtgagacagacattcagtgtctacgttactatgcgggtgcagctcacgctgagccgtgcagcaggctggggttcctcattttccctggagtgcatctggttcccaggccacttgtgccccagtttcttcctggggctgtgacttcacctctgcactctccttccgctatgtaagccgcctctccacgtgttcagacacattggaacagtttcctcccagagcctcctgaccatcccctgtggcctggtgcctggcctctgtcatctggcacccactctctcctatcagttggctcctgctgcctggrccccatcttcctctatgtggctgcccctcgttttgctcatgcccaccctccaagacttcttttttttttaaatatatataatggggacggggtgcg

SEQ ID NO: 844341 - DNA, 522 bp, Homo sapiens
ggatcacagtgtcaggagtttgagatgagcctggccaacatggtgaaaccccatctctactaaaaatagaaaaattagccgggcatggtggygggcacctgtaatcccagctatttgggaggctgaggtaggagaattgcttgaacctgggaggcggaggttgcaatgagctgagatcacgccattgcactccagcctgggcaaaaagagcaaaactctgtctcaaaaaaaataaaaaataaaagaagataaattagcccggtgtagcggtacacacctgtggttccaactacttaggaggctgaggcaggaggatcgctttagcccaggaggctgaggccgcagtgggccatgattgctccactgcactccagcctgggcaagagcaagaccatgcctcaaaaacaaaaacaaacaaagaaaaagagacaaggaggagggagattacatcttgattttccctacactttaattgaaattcagcatttccttccatggtgaatgttgctgggaacaaacctc

SEQ ID NO: 844342 - DNA, 613 bp, Homo sapiens
gtgagtcgagatcacaccacaccacactccaccctgggcaacagagtgagaccttgtctcaaaagaaaaaaaaagaagaaagttattgatgggagtgtagtgaaatttgtgaactcactccagctaacagttgacatggtgctcaacttagatggagtattcccacgcttccctcgaaatacccaaatactccacagtgcccctgcaaatcactatgacacgctggggtaccttggtacccagtttgggaaccatgtcttagttttagtgtttttcttttttttctttctactaaatggtttatttatgataaatgtctacgtttaggattatttggcttagaagtctgaccacattgtgtggctcttgataaaattatttttttctttggtttttttgtccctttctcctcttccttctccatctttcctccctctgttgcttcctccttttcatatctttcagcgtctactgtgtgcccagcactgctytcagtcattctgtttataggagaggggtggaaggacttcaccttttcatttttatttttatttttttttgagacggagtttcgctcttgttgcccaggctggagtgcagtggtgcaatctcg

SEQ ID NO: 844343 - DNA, 626 bp, Homo sapiens
agtggcaatggcataggctctggaatcctggctgaacttgggcaagtcatctcagccctctgtgcctcagtttcctcatctgtaaaatgggcatgttcatagcaccagtttcatagtcattctggggattaaacgaggtaaggcggccgggcatggtggctcatacccgtaatcctggcactttgagaggccgaaatttgggagggagcactttggattgcctgagcccaggagtttaagaccagcctgggcaacatggcgaaaccctgtctctacaaaaaatacaaaaattagccaggtgtggtggcatgcatctgtggtcccagctatttgggaggctgaggtgggaggatcacctgagcctggggaggtcgaggctgcagtaagccgtgattatgtcattgcactacagcctgggcaacaaagtgaaggcctgtctcaaaataaatgcaaattaaaatactttttaaatgagataaagcatttcacacatacagaacactcaaatgttgctgctgttgttaatattctacttccccttttataaagattcaatgagatgatgagatattcattgtagagcccayagagtaaggccttgcacacagcaggccctcagtaagttg

SEQ ID NO: 844344 - DNA, 634 bp, Homo sapiens
caggtattctaatggttcaggtatggaattcaggtagtctaataggatycaggtgatctaatggagtcaggcattttaatggatccaggtatttcaatagaatgcaggtattctaatagattcaggtattctaatggattcaggtggtctaatagaattcagtattctaatggattcaggtatggaattcaggtagtctaatgggattcaggtgatctaatggattcaggcattttaatggattcaggtatttcaatagaattcaggtattctaatggattcaggtattctaatggattcaggtggtctaatagaattcaggtactctaatggattcaggaaaatagaattcaggtatcataatgttggactcctgtcatgggccaggtgctgtactaaggattaacactaaggatatttctcatgatgacaccaacaaggcccagcaggtacagctgttatcctgacagtacacaagtgttaatttgctgaaggccaaaagctagtgctacacagccaggactggaagcccgcacatcctatccaccccttcctttccaggtctttctgacaggctgcaggtggggcaggtctctttcaggagaataagggcttatgattctaggttcccacc

SEQ ID NO: 844345 - DNA, 596 bp, Homo sapiens
agtggcacgctctcggcttactgcaacctccgcctcctgggttcaagcgattcccccgcctcagcctcctgagtatctggactacaggcaagcgccaccatgcccggytaatttttttttttttttttttttgtattttagtagagacagggtttcaccatgttggccaggatggtcttgaactcctgatcttgtgatctgcccgcctcggcctcccaaagtgctgggattacaggtgtgagccactgctcccagtcttttttacagtcaagacagaaaataatatttgtatggcacaatggggtaaatgatcaagactgctctggatctgaggtcattagtttggatgctgtatccaaactatattctgcatgaatggccagaggtgtgaggggaccagtatctcaacacatctgtaacgcaccctaacacaatacactggttgagaaattctagtttaaataacttgtggagatcacgacctgaatagtcaaaatccatgcagcaggttgagaaaactatttcacaattcctcttatttcaagagatacgcaatcaccttttgcagctttcaagtatagaccagatgtactaac

SEQ ID NO: 844346 - DNA, 619 bp, Homo sapiens
ttacctgtcaaaaattactttaaatgtaaatggattgctcggtgcgatggctcatgcctgtratcccagcactttgggaggccaagtcaggcggatcacttgaggtcgggagttcgagaccagcctgaccaacatggagaaaccccatctctacaaaaaatacaaaattagccatgcatggaggcacatgcctgtaatcccagctacttgggaggctgaggcaggagaattgcttgaaccagggaggcggaggttgtggtgagccgagatggtgccattgcactccagcccgggcaacaagagtgaaactctgtctcaaaaaaaaaaaaaaaaaaaatgtaaatggattaaattctccagtcaaaagagaatgccttaaaaaaaaagttctggccgggcacggtggctcacgcctgtaatcccagcactttgggaggccgaggcgggcggatcacgaggtcaggagatcgagaccacggtgaaaccccgtctctactaaaaatacaaaaaattagccgggcgcagtggcgggcgcctgtagtcccagctactcgggaggctgaggcaggagaatggcgtgaacccggaaggcggagcttgcagtgagcggagatcgcgc

SEQ ID NO: 844347 - DNA, 576 bp, Homo sapiens
cctggggttcttggcctcacggattccaaggaatggaaccttgggccatgtggtgagtgttatagctctattagaagccatgggtcatggaagagaaccatggaacccagtgactagtgttcagctccattaggactaacctcggcacttagccatgcaggaataatggcaagcctctagcctgatcaggagtggcaatgggcacctcactggatcagaagaacagcggacaccctgccagatcccaaggggtggaagtcaacggggggtctgtgatggcggcattcagcagtggtggacggcaagtgaaagctctgctcaagccagaacaaacatggaccagaagagtgtgcagttgcaagatttaatagagtgaaaacagagctcccatacaacgggaggggacccaaagggggttgcccagtccagcaccaatgcctgggtttatatcccaatcattgtccctcctgctgtgctctcaggtgatagatgattgactatttctttacctcctgcttttagcctaaytggtattttagtgagctgagttgcaagcccagtgtttaaaggtttaaa

SEQ ID NO: 844348 - DNA, 630 bp, Homo sapiens
tatttgtttgtgctgttttccataaaaggaaatgggggtgagaaatagtgaaatagctccatccagatagttgaagcaatatagagttgcacaaaattaaactcaccttaagataaatggacattgatgttttggtgctctaaaattgctccaaaacattctttgtaagttatgcatactgttaagggtatttattagctgtggaccttgaacaagtgatttaaccatcctgtgcttctggtttttttgttcgtttgttttccctctttcagcagaatcatgtttctttatctgtaaattggagtaatgatagtaccttcttcagaaggatgtaataaggactaaatgactaaagtgcttggaacagtgcagagcagtacatgaagtaaggacgtgtgtactagctattgttgttactgatgtagaaaaaaaaacaggttcttgtcacatgaccaggataatttaggcacagggacacactgtaaggttagtagggcagggtttatygggtgaaaaggaaaaaaaaaagggaaacaggaactccagcaaaccgaaagagaggccggctagcaggttttcctcctcaaagattgaatcccaggtcaccacacaggaacaggagatgccagg

SEQ ID NO: 844349 - DNA, 633 bp, Homo sapiens
gatgggtaagggacacaccaaaatgtcaaaatttatcaacttacatactttaattttttatttattattattttttaaattgarctgaggcttttgctatgttgtcaaggctggtctcaaacatctgggctcaaatgatcctcccaccttggcctcctgagtagctggaactacaagtgtgcactgccacacctggctgacctgtatgctctaaacatacacagcatactggatgtcatacatacctcaacaaatcaattcagtgtaataaaattataagaaaaaataagtcactttgataaagacaaaggtaaagagaggaaaacaaaatagcagtgaccttaatagtttacttaaatgacatatggtggtgacttagattacaatggtggcaactggaatggggaaaaaaaataaggacttggcgattgattagatatagtgattttcaggataaaggagaaaatgacatctggtggattttcctgatttctggcttcagcaaactggatagatgatggtattgcaggctggcttctttggggtaacagtcaaattagcatgcagaacactaactagcatgctttggggaacaccaggggaaaggaggagagagaagcagaatcagacaga

SEQ ID NO: 844350 - DNA, 637 bp, Homo sapiens
gttgtacatagtagtctctagggatcctttatatttctgttgtatctgttgygacatctttttttgcttttgattttattttggtattcccttttttcatagtctagcaaattgtttattttatttatctttttaaaaaactgacttcttgttttgttaatcttttgtaagttttttagtttcagttttgtttatttttgttttgatatttattatttttttattctgctaattttaggttaggtttgttcttgcatttttagttccttgagatgcatcaagtggtttatttgaaatagttctaattttttatgtaggcattttttgctataaatttgcctcttaatactgcttttgctgtatctcataggtttggggatactgtgttctatttttatttatttcaaataatttttaaatttcattctttattgcatccttcacccattggtcattcaggagcatgttgtttaatttccatgtattcatataattttgaattttcatcttgttattagttcctagttttattacattgtaatcagataaaatatttgatatgattttaagtttttaatttttctttgagacttgttttgtatcctaacatatggtcaatcctgaagaatggagtgtt

SEQ ID NO: 844351 - DNA, 637 bp, Homo sapiens
gttgtacatagtagtctctagggatcctttatatttctgttgtatctgttgtgacatctttttttgcttttgattttattttggtattcccttttttcatartctagcaaattgtttattttatttatctttttaaaaaactgacttcttgttttgttaatcttttgtaagttttttagtttcagttttgtttatttttgttttgatatttattatttttttattctgctaattttaggttaggtttgttcttgcatttttagttccttgagatgcatcaagtggtttatttgaaatagttctaattttttatgtaggcattttttgctataaatttgcctcttaatactgcttttgctgtatctcataggtttggggatactgtgttctatttttatttatttcaaataatttttaaatttcattctttattgcatccttcacccattggtcattcaggagcatgttgtttaatttccatgtattcatataattttgaattttcatcttgttattagttcctagttttattacattgtaatcagataaaatatttgatatgattttaagtttttaatttttctttgagacttgttttgtatcctaacatatggtcaatcctgaagaatggagtgtt

SEQ ID NO: 844352 - DNA, 518 bp, Homo sapiens
gcttggcttgcctgtcagtgtgtcttccttcccagggttgtttctcaggtctgggatgcaggtgcaaggctacctgaccagcctggggagtgtctttttggggaagctcacagggatgcttttgcagctcaggatataggcgcacagttgcatggctgacatggggttatgcctgtcaggggcagccaacagggctgtttctcaggcccaagatgggggcacatagcttcttgactggcttaggggcatgttagttgcttggtggctgagggaactctcctgctcaggagagggcacacagcagtttggctggctcaagagtgggttttccctgggtggaatggccaggctgtttctctggctggtagtataacagcagaaggttggtttccctgatgtggaggaccrgactcacagccaatcttgggcccatgctccatgtggctggagttgtggtgtccagcaaccattgtagcattggtggaatgaagatggatccccactgctggagaggctac

SEQ ID NO: 844353 - DNA, 585 bp, Homo sapiens
tgccctttccatacgtttcatatagatggaatcatataatacgtaatcatttgcctctagtttttttcacttaatgtagtgtttttgagattcatctatgtcctaccatgtatcagtactttttccttttgattgccgagtagtattccactgtgtggacatatatatttagtttgctcattcatctattgatggacatttgtattgttcccagtttttggctattataaataatgttgctatacatatgcatgaattggtctttgtgtggatataaattttcagttctctaggatatatacctaggaatggaattactggattgtatggtaatttatatttaactttatttatttatttaaaaatttatttaagaactttaaaaaaaattttaaaaattaacagttttaaaattgtacctatttatgggatgcatagtgatgttgcaatacatataatgtatcgtgatcagatcagggtaattagcrtatctattataaacatttatcacttctttatattgaggacattcaatatcctccttctagctatttgaaactatatagcattgttaaatatagacat

SEQ ID NO: 844354 - DNA, 591 bp, Homo sapiens
aaaaataaaaaaaggttcaatccacccaaaaaataataaataaataaatcaaactttttgcaggcatctcaagatgaaggtttcctatttgtgattatgaaaaaaatgtcaagaacaagtcccttggtgttcttagaccaaagtcagaacaacagacctagtaagtattctctcagcattcattacatgttagcaaccttcaaagcagtttgtgttccctcatatggtcctccatgaggtaagtatcagagctatagtaagatctatttaacagtgagacccaaatgtgtcccaagaccactcaggattgccctggtaaccctgaagctcgaaaatccctgagatcaagactgaaggagtctgtgttgttcctcccgcatgcttcttccttgcatgtccctttttcttccctttctgtatcctttcttccccatctttaatttcttcatttccaatggtttcctgcgtctttacaaaatcacttaatctgtggaaataaactgaattttctatttgctggttacagcattaaacaatraaagctagatgggtattcaccaaatttagagggtatagtttggaatatttggt

SEQ ID NO: 844355 - DNA, 612 bp, Homo sapiens
tagtgcttaggagttgtgtgctgaaatatttggggtaaggtgttataacatctgtgactgacttgccacaaaaagacaaagcaaatgtggcaaaatgataattcttggtgaaaagataaaataataaaatagatgagtcctaaatgtaaccaatgacaacaaacagcagccggtatgcaatcccgtgtccctcactgtgaccgaagagcactctctccatttctgccatgtctttctctgctcccaggatgctggatgagtactttgaggagcagatgaaggagatcatccgaatgtgttcccaccaccgccagaccatgctcttctcggccaccatgacagacgaggtgggccgagggacttctctgtggcgggtggcaggtgtgcccagagggggccatgcagaggaccctggctgggcttgagggggtttgcctggggtgagcactgcttcctccttccctaccaccttgcagagagctgaggaaacctggctttgtgcttggcaggtgaaagatctggcttctgtctccttgaagaatcctgtccggatatttgtgaacagcaacacagatgtggctcccttyctgcggcaggagttcatccggatcc

SEQ ID NO: 844356 - DNA, 552 bp, Homo sapiens
tataaagattaaatgtttataaagtgcttagtatagtactggacacattaaaaactctcaataaatgttagttattactagtagcartaattgggaatatcctattgattctaagggggccactggttctaccactaaacaattatcacagccaacagagacatcaagtgaaataatattacaaagggaagtactacctgaatgctgtccagcatcagcaaatgcagtttgaatgggaaagagaaaggtggggtttccttaccaagatgtttttgagctaacagactatgaaagaaactgaaaaatgaaactcaagttttcctcctttctgtagcatgaacttcaccctcatagtacttaccaattaccaacccttatacaggaagcctaacatacccaaagtccagtttttttcactttcctttttgctaaaactgattctggggctgacctaacttagcagaatgacatgaagattttaaaaacaaataaaatacgactgtatacaatgatttgataaaaaagttgtaaaagcttcaaatgcatgttata

SEQ ID NO: 844357 - DNA, 583 bp, Homo sapiens
accttggtgttctcacttgcggtrtgcccactgcacgagctttctgctattctactgcacattcacagctcacttggaagaaactttagtaagattcttggaatctttctcacagcaggaagagtcctaagagaccgagctactccttttacaataattgagacacagaccgctggcaaatgaaatttgccccaaatttggaagaccatctcataggcatgacaacaaaagactcatgtgtttgttttaacttggtgtggttttttttaattatgggggtagttttatttattttcaaatatgtagtagctacttgcattactttttaataaaccacatgttcatggtctatgtttatttttctatgagaagatctattttccttattgtgttttaaaaattctttcaatatattatagaatatctctattcccaccatatgtgtttatacattttaaaaatttctgttttcttactgtatgcatgattttccctgtaaaactttttatttgcttgtagttaatgatattaatttacttcagaaaatcattcacgtgtaaatattctacaaaacttgtctcat

SEQ ID NO: 844358 - DNA, 521 bp, Homo sapiens
gcatcaccagaaactgagcagatgctggcaccaggcatcttagcctgcagaactttgagccaaacaaacctcttttctgtatacattctctagtctcaggtattgttttatagtaatrctaaatgccctaaaacacctactattattgtatgcagagatctctcttcagaatatttgctttatatctttaggtgcttggatttggggtgcatacgtacttacgatttctgtattatcttgctgaattgacctctttagcattatataatgatcttctttatgtctttttacatttttgacttaaagtctatttgatctgatataagtgttgctactcctgctctcttttggtttccacttgtgtggaatgttttttccatccattatcgttcagtctatgtgtgtaattaccagtatggttgcctcttttaggaagcctattgatgtatcttatttttttcccattcatccactctaggcatttaattagtgaatttatttaccttcaagataattattca

SEQ ID NO: 844359 - DNA, 636 bp, Homo sapiens
cacacctggcacccaggagcccccaggctgttgggagttttgtgtggatccagcccactctgggttgtgggtagctgcgaccccaacgtaggctgggtttcagcatcctctgaccttcccctcttcccgcccacagccatcagcgagagcttcctccccacctctgtgagtttaatttctaggaggcttcatgggaagtggaggagcgtgtactgtcacccacgtgctccacctctgggcatttgttaatgtgagcgagagataattccaagtctgtctgagcctgctctctagggtgacgcccggggtggagatatcagctgcatgaggagtctgtccgagcctggtctctggggtgacgcctgggtgggggtatcggctgcttggggaggggcgaggcaggtgccgatctgcctgttcctcagttcccaggggctactccaacggctgaagggtgccaaggagcccatgctttatttccactgaggattagccccggcacggaggctgccattcctccatgacrgcaatcacgaaatgacaggacttgtgggaaactgcctttttattgcatttcaggcggagaagacatcaggtcatataccaagcagaaggctgagagacgggaacataacg

SEQ ID NO: 844360 - DNA, 607 bp, Homo sapiens
tacttctgagagatttaaacaataagggggatgaaaaactstagccctcttcttggaggccttgtacatatgtccgaaagtataaaatctgtgcccagatagttacaaagtccagaaagcatgcagactctgccttctgacaatttttgagcaatggggctagaaaagttactagcaatgcatttctatccatagattgatgtgattaacaaggaagttgggttaatttttgctaaattacaaattccatcttattataatacagattaataagcatatgttaagcagtgaatctctgaacattttccacataactgggtagttatttggtgagatatgactttttaaagtgggtttttttgaagcattgattttgtgtttcgaattatctaaaatgtattctgtgcactgtggctatgaaattttgaagaggtacaatcttgatcacttactctggatttgtttcagccaaagcaatacgttttttcaactaattgtaaatatcacctttcggtggttttaatgaacctaataaaaagatatggtaatttgtctgctctatacaaacacttagctatgagaaaatcaaataagaatgaagccatat

SEQ ID NO: 844361 - DNA, 654 bp, Homo sapiens
gtctgtcttagaacgttccatatgtacttgagaagaatgtatattctgttgttgaaagtgttctataggtgtctgtgaggtctaattgattttatagtattgttcaagctttctgtttccttgctgatcrtctgccctgttgtcctactttttattattattattattatcattattattatttttcgagacagagtttcactcttgttgcctaggctggagtgcagtgacacgatttcagctcactgcaacctctgcctcccaggttcaagtgattctcatgcttcagcctcccatgtagctgagattacaggcttgcacctggctaagttttgtatttttagtagagacggggtttcaccatgttggccaggatggtctcgatctcttgacctcatgatccgcccaccttggcctcccaaagagctggtattacaggtgtgagccaccgtgtccagcccctatttattattaaaaatgagatattgcagtcttcaactattattgttgaattgtctatttctccctctctttctgtcagatttgtttaatgtactttggtgctctgttattaaattaactgcatatgtatttataatttcatatcttcctgatagattgacccttttatcattataaaatgtccttctttac

SEQ ID NO: 844362 - DNA, 449 bp, Homo sapiens
aagaacaacagctttatggatccatgcagaaacrttctgggagtgttctctatcagtcatagtcctatgactcatatcagtcatcgtgagtaatgcctgtcaaagtcaccaccatagaccctggctgaaaaatcagtgctatgcaccctagtgtggtaagttgcagcggttaatgagattgatgttgtcatatccatgagaacagttaagctcttacaattatttttagacctaataggaagagtatttcctattctggtagccataattattctctaataaataaatgaccaaactctgagtctatgtattaagctttgactgaaatacatatttttcagggctgatttcaaggtcatttcattaaattagatttcccaggggaacagaatgtcaatgtactgccctgaaaaaaaggttgagatattaaatgtgtttacatttcccct

SEQ ID NO: 844363 - DNA, 480 bp, Homo sapiens
aaaaaaaacatttatgacatttgttaaagatggaaggcagacagtattcacggagtgtcatggccaatagttgtaggggccactgcaaccaggtcttgcagtggaggagagagattggactcaactccagctctgacaaagacaagtggggatttacaaccaagaagtaagatggggtcagtggatgcaaaattcctgaaacatcaaggataactggtttctggccaagctgactcgacagaattattgctgaaggctggccaggttaataaggtattgagggtggtcagatactataggtgaaggattttcttatccaaatccatatgattaccatttccacataggtaattattgaactggcttagtgggattcttgcccaaactggrttctataaggacagagaggaaagtccaagttcaggcctcaccaagcagaagactcagaagagactgactaaagttttggtgaacactatc

SEQ ID NO: 844364 - DNA, 532 bp, Homo sapiens
ccatagtaataacagactcaaaagcacaccgtttattagcttccttttcttccttgtctcacttcttttcctatcagtgcttcctgggatcaacccccaaataacctatttatactcaaattcttatatcttggtctaattctgggaaaacttgatctaagacacataataaaagacagctggaccctgtgaattaaattctggaaattagatcattctggtcagatggttaaaatgatcccattgccaataggaagcaaggtggtagtaacccatggtgagctgtagtaacaaaatgtctaagagttatacctatattgaattgggatgaaatacaggatgaaagcaacggtgtttattaggattgcagagttgattggctgtttttaactgtcattgaagccagaaagaacaaagtgaccaggtacagatggagccactaaccaattcaggacgcagtgtrcaagtcaaaaggcatccataaaagcatttaaggacatccgcacttcctatagccaaaatgctaactgtg

SEQ ID NO: 844365 - DNA, 647 bp, Homo sapiens
ctttattaaagttgtaaataaataawgactattaatacatttcaaataaattagtagtgttttccaaaatcatcacaataagataccaataataagcagctggttaaaagcataaaaccagaatgccagggttcaaaccttggctctaccatttattgactgtgtgcctttagtcaaattaatgaacttctctagacctcagcttcctcacctgcaagatggaatgatgataataatagtagatagttcatggggctgttacaaggattaaagaatagatataggtaagtatgtaggaaactatatgtgctcaaaaaattattagtaactttatatgcataaattttttaattcactctctatatataacaatgatcaattaaaagcatacttccatgttttctgtttcaacttttaacagtcatacaaatatataatgataaataattcttttagaatgactgttaaaaataaaatttaaaacttcagtctgttttcttacctgtctaaatgcttatttctccagctatatgtttttaaagtaatgattacactagtgatattcatgaagtataaatgcagttcaactaggtgaaaatctttttgaatacatttattacatttaatatatgtaagccacttacttg

SEQ ID NO: 844366 - DNA, 483 bp, Homo sapiens
agaccatattgaaatgtcatgctgaatatgactatggggaaacacttgacaagcgtctgatcattatgaaaagaataatgcaaaactcttaattctataagatgcatgattccagctattgtcagttatctcaccaactgatttccaacagcagtatctaccctgggctttgctgggtttaatcaatgaattttccagagtcacccacaccatcccttcattcccccagaataatgaccatattttgtgaaataaatatggtcatttctttcacaaatttcaattttgatgcaattgaaacatgtttttgtttctaggcagggctaactagaaccttagccactaacaccgtaacaccagatttacctagctaaaccaaccaaatcagatgccatcccctcaacaagcaaatgcaacagcctttatattaacaacctgttgaaacagacawgtaagcaagcccagatgcaagtcaataagcaa

SEQ ID NO: 844367 - DNA, 503 bp, Homo sapiens
ctgttacatatgacgaaaaactgacttttttacttgctttattattacttataggttgtaaatttaaagatgttagaagaaatgtccaaaaagatacaggtaggtrtaatatcacgcaaccacactcatgggttttttaaatgaatagcattgaaaaactctctgtcaaaaagaacaaatcagtttttttttaatataaaaataagttttcaatattgtgtgaagttccaaactatagacttattctgatatgtaaagaggtatttgtgaagaccatcatttacctaaccatggagttgcttttcactgattgttgtagttatattatacatataaactacatttgaggttagaatgtagaagttggcatgaaaaaaagtatgtaaataggaaactgacatattgctccccccaggtctttactgttccttgcagacttgactgtggtagtagaaattaaacatgagctgggaactccaagttagcagtgaaattgtgaatcc

SEQ ID NO: 844368 - DNA, 625 bp, Homo sapiens
ctagattagaggagaggttggcaagctttttctgtaaaaggcccgagggaaaataagtgtgggcctgacactctctataatagttactcagctctgccactgtggcatgaaggcagccatggataatatgtaaatgatgagcatggctatgttcaaataaaattttatttatggacactaaaatttgaatttcatataatttttatgtgtcatgatacattatttttcttttgtttttattcagtgatttagagtgtaaaaaccattcttagctcttgggccctacaaaagcaagtggacagctaaatttggtccccagtctatagcttgctgacccctatggaatagagtgacagggaaagaaggaggcctctgccaggaaggtgacattcgagctgagactagaatgaggataaagaaccagccatgcgaagagagaagggaagaacatttcaagcacaggaaaaagttgtacaaaagccataaagaggggatggacttgatgtgttcaaggaacacaaagatgagcagggtggctaacatacagtgagcaagagaaagttgtatgagatgagtgcttcctgaggyatatggtctcaaaatcagcttttaacaataatatata

SEQ ID NO: 844369 - DNA, 540 bp, Homo sapiens
tgtttctaatccatatctcaatcaaacttaaggcttgcaaattgacacattcaatgccagaaataggctgttgtgtttttttaaacaataatagtagcctgtttactagaataatgaatgtttgaaataggttctcattggtaaaatttcaagtacatagcatgtatagaataacaacaaatatagaccatccccacccttacatgaatgaagtttgagattccaggtccagcccacacataagagggagggattataaaaatgtatgggcaccaggagatgggcatgattgggggacatctcaaagtctgactgccttctgtttccaactgtggatcctggaggattctggtttcctgggccagttataagagtaaacaaatcctgcctctggaatcttggcatttgcctcgaataaccttttacataaaayagtggtcagagcaccctccacagaacgtcactcaatcctgaactccttggtcagttcccccttttccagagtgttcctctctttctcttccagtataaataagccaa

SEQ ID NO: 844370 - DNA, 596 bp, Homo sapiens
tctgtgctcatgccctgtcacacttcctgaaagagtcttggcagacccgtgagtaggtgtgtacttgttagcggtaccctttaattgcccttttatgtaccccaacaagatgaggcacttcctgtcttgccacaagccatgcccccaggtcaaacatctcccctcacattttgttcatcaaagaccaagagaaaatgatcatgcagcattcacatggagatgacatcaaagatccaactgaactgaacctgatgaaggcctcccaggggctgtggaacagaggaggagctccttacaaggaggcccccctcacagtacatctgggctgctctccactgccagggaggacacccgcatgcatgcacatgtggatttgagccagatggcgcacaggaggtttgaggcttccctcctaaatgtctgccacaatggtttagataaggaaaatccctgataatagaaatgtccctaggagacctttttaaattccgtggcatccttacctaatagcttctatgatcctttcctttttttwaaaaaaaaaaagaaggatttattatcatgatacaaaatttattctcaatctaatttatttc

SEQ ID NO: 844371 - DNA, 589 bp, Homo sapiens
ttttttgccatctattgagatgatcatatagcttttgttttattaatatggtgtattaaattgattacttcttgtatattgaaccaaccttgaaagaaatcctagtttgtcatggtrtacaattctttttctgtgttgcctgatttggtttgctagtattttgctgatgatttttgcatctctgttcataagagatattggtctatggttttttggttgttttttctcgtgacagctttgtttttgggaggctgaggaaggaggatcatttgagcctgggaggttaaggctgcaataagctgtgactgtgccaccatccttcagaaaaaaaaaagaaaaaggaaaagaggtattgacaattcacattcatgtttcaaagattccttccaggttagaatttgaattttaagtaccacagtcccaggaatgagacacttatttttcatttttattttttagctttagttttagtatgaggataatgctggcttaataaaatgtgttgggaagtgtttcctcttcttttttttaacccttaattcttggtttggatcttcttctattttttggaagagtttgtgaagggttg

SEQ ID NO: 844372 - DNA, 625 bp, Homo sapiens
acaaacacaagaatgtttgctctccatccacactaagctttgtcagtggattgagtcttatgagaccatctttctgtttaggtttgtttgggaaarcatgtgatttttaaattatatgtaatatagtatctactacctagctcttgataactgtgcccatttataggcatggcagactagagtatagatgaaggagggaagagaatttcctgagtctggttttaaaagaaaaggtaccatgttgtaatcttaggagcagatttacacatagccttttccaggagtaaagaaatgattttcttataaagaaatcattaaatgtgcaacaggtttttttctttttacctccagaggttaaacaaattggtagcatgaaatagtgtctgctttaaatttctttaagcttcttttgtaaatattaatatccacagggatataactattgaaaaggttaccccagggacagagacatgcaagggaggagaaatttctcaacaaagggcctcagaaaataaactttctgacctgaagggaattgtccccaaaaagcccgtgggaactaaagtgactgtttacttatgtttatgatatttaagcaagtgttatactgagcagtggttgtgtt

SEQ ID NO: 844373 - DNA, 670 bp, Homo sapiens
tctgcatgtcctccccacaggccactccctagagagcaagaggaagccaccagagagggtaagcacaggccctgaagccccccagagagggaggccccrgacagagggaggcctcagggctcctgtgaccctgcctgcagggcgcactctctctgttcagttggccttgtctcctcgagaccaccctggtggagggatgatgcctaccgaggcccctggctcccacctccccgcagccgcacccaatttgggcctctaagcacctctcgtgggtgagacggggctgggcctttgggggtggtccgctgggggaatttgtggcttctttcccaattctggagcagcagggagggagtgaggaagccactttgggggcacggctggggcagccacttggaggtgagaggagggcagcaggaaatgaaggataagaaggttctggaggaagcagagaagggaaggagcttgggagcagtgcccagaagtgtgcccggccaatcctccctgccagactcccctctgggtccccacagagctgcagagaccccgagacagagccaggactgtgtggggagggagcacttctaaaggtcatcccagccagtctcctgcctccgaccacctccaccagccccatgggtggatatggatcctgttgtccagatctttg

SEQ ID NO: 844374 - DNA, 594 bp, Homo sapiens
agaagagggagggacttaggatggccctgggagaaagaactcggcccagggaccgagatgaccggaggcagacatttaggctgtctatattattattatttttwttttttttgagacaaagtctcgctctgttatccaggctggagtgtagtgcgcgatctcggctcgctgcaacctcctccttccgggttcaagtgattcacctgcctcagcctctggagtagctgggattacaggtgcctgccaccacgcctggctaatttttgtattttatagagacggggtttcaccagttggtcaggctggtctcaaacgcctgacctcaggtgatccgcccgcctcggcttcctaacatgctgagattacaggcgtgagccaccttgcccggccatattatctttactatactatctctctaaaaaagaatgctgtccaacgttggaatggggaagaaggtgtacactgggaatgcttccccaatcaccctcttgtcacagacctgacgtcaagatgagactggacgacctctgggcctccaagttgtatgagtccggaccggggaggcagagaagggtcaatagacccgagaggccg

SEQ ID NO: 844375 - DNA, 417 bp, Homo sapiens
aattattaaggaaataatacaattaacattcctagaattaaaggtcacacattttgagattgaaatggcttaccaagtatctagcacaattattgtaaagtttcagaatttcaaaataaatagagaatcccgtagccttttaaaaaaaaaggtttcttgtaatggaacaggaatcaaaatggcattagatttcacaacaatacactggatgctaaaagctagtgggaaatactttaaaagttctaacagataatcattttcctcctagaattctgtacctagccaaatmatcaaatgggagcctgtcatatagatagtgtcattcattccaagacaatatacctgctatgcacccttcttagtaagcttcagcaaaggaaggagtaatgcaagaaaaaggaagacacaggatgctgg

SEQ ID NO: 844376 - DNA, 638 bp, Homo sapiens
ttctaatgaatcctgtcagatatttcctggaattgccatacaagaaattttcagaaatcacaataaatataagaggtttataagagcagagagttaataaaagaacagtattacatccaaaagtttaatcttttcctatggaaattttccattccaactacagctgtttgtcagtgttccttccccaccacacacacacacagataccaaaatcctcagatgcccaagtctctgatataaaatggtttattatttgcatataacctacagtcatcctctctctttactttaaatcatctctagattagttacagtagttcatacaatgcctacacatcacttgacacagggaaaacttgggttttttttttttgtaaccgtgaaatttttttttacaaatatatttgatctgcagttggttgaattcatgaatttggaacccatggatatggagggccaactatattttactgagcaaaggaattttttcctttaggtgctgctataaattttatagtttcttaggcttgaattcgtaaagccgtaaaggcagcatttggtcagaaaacgactgtgtcatggaagatgagtctgasttgcaggtgccacttgggcttagctcccagcccatccagatg

SEQ ID NO: 844377 - DNA, 591 bp, Homo sapiens
aagagggtcagccgttcctttgaagctttgaagctaggcattgacttctcctctctagccatgaaagtcctagatggcatttttttttttccartagagggctgttttgtctacactgaaaaatctgttatttcgtgtggccacctttatcaatgatcttagctagatcttctggagaacttgctgcagcttctccatcagcacttgctgcttcaccttgcacttttatgttatggagatggtgtctttccttaaacctcatgaaccaacctctgttagtgtccaacatttcttctgcagcttcctcacctctcttagccttcatagaattaaaatgagttagggccttcctctgaattaggtttggcttgagggaatgttgtggctggtttgatcttctatctagaccactaaaactttttccctatcagcaataaggctgttttactttcttttcatttatgtgctcactggagtagcacttttaatctccttcaagaacttttcttttgcattcacaacttggctaactggcacaagaggcctcgttttcagactatctcagctttttacctgaattgctcacaaagc

SEQ ID NO: 844378 - DNA, 525 bp, Homo sapiens
atcatatgaaatttaaattttggtgtccatgtataaagttttattagaacacatccacgcacatttgtttccatagtctacggatgctttgacactatacaaagttacgtacttgcaacaaaagccatatggcytgcaaaacctaaaacatttactatctggatcattacagaaagttttctgatccctggtctatgatattctaaattccgacacattttcttaggatagatttccatttgcaaattcagtgtaagacataaacaccggcaatagttgtgttttttttttctttttacttcctagattttattgcattctcaacttgtttcatattaccttaaaaaataaagtgcacttaaagattgtttcacatccacagtttgtttaaggatttaaatttagttcactattactgcctggctttgattgatttagagggttagtcaattacagactaaataattagttcaatcaaaaccatcagaaaaattgacacaaactcacttccatgcaccagtaaac

SEQ ID NO: 844379 - DNA, 614 bp, Homo sapiens
caactatgaaatgataaatgataaatgattgaggggatagatacacaattttccatgctgattattatatattgcatgactgtatccaaatgtctcaggtaccccataaatatatatacctactatgtacccacaaaaccttaaaaaacaaacaactaagaaaccagaagctcagacaaaaaaaagtaccttggccaaagtcatagtcggtaagtggtagaaccaggtgttggttgtagaagggtttgaataccatactgagaatgaagactttatttaattgacatctaggaagcactgagggtgttttgagcaaggtaaaataattcttaaaatatctgattagtaggagtattcatgccctgaattataatagccaattggtagtttcacctttgaaacctaaatggagctgatattcaatttctctctcaggctttgcccaaggactcaatttctgattctactccctcaattaaagagaattgggttaactttttgaatgtaaaattctcctctgacacacaaataatcacaaggacaattaaagtgataaaatgtcargttaaatgggaaagaaagtcaaacataatttcttctgagtgtttataatt

SEQ ID NO: 844380 - DNA, 521 bp, Homo sapiens
actattctgagggtctaccacattcctcagtttctcaaagagttccatcaccccaaaagataggaatccctgctctgactcttaatactcaaaatatgctccagagaccagcaacatcagtggctccagggaagcttgacagaaatgaaggttctcagtccccacctaaaacctacagaataggaacctgcattttaacaactgtaaatgattctgatgaacgttaaaatttaaaaagcactgctctgatgctgtacttaatatgacatagtaatagatgggtcttaggtttacccttatgaaataaactacttcttacactggaaaactcactaacctttgttctttgacttttaaattttatttttaaaatcacatgacagaatatgratggatataccataagtcagctaatactgtctccattctatgctcttaagttgtaagtggcttctgaccaagagcaataactgctgacataatctgatgagagatgtcatgtgaatgtcatgacactcagg

SEQ ID NO: 844381 - DNA, 615 bp, Homo sapiens
tgggtgttccaaagttgttgctgagaggtgtgtaatgttcctgaagatccccaaggcactaagacttctctgtacatgaatgactcatagagaagaaatacaccagatgaaaatatatggagaagtttgccgaatgtcatataacttgtaagtattagagccgaggtctgaaccctgatatctgtgtccttatagctcaggccttttccttcagcccctccttctcagcagagatgtgttggagaaatcactagaaatggaagagcagctgtcagaagcagaattgaatgaagtgataggggaaaaacatacatgttgatacaaatggtcagccttaagcaagactgtgacattgatgcagcacagggaagcctcaaaattgggacttagcccaggagggttcttggcttcacccaggaaagaattcaagggtgagctggtggtgttagaatgcaactattactgaagtggcagtgtacggcagtagcagaggcactgcttgcggagcagggataccccagaggcactgtgcccagagtagcagctcagaggcagttctgcactcatatttatatccacttttaattayatgcaaattaaggggtggtttatgca

SEQ ID NO: 844382 - DNA, 557 bp, Homo sapiens
gaaggcgaagttaatcaagtcctgttatggggtttgagggccggaatctaatttayggagctttttctaatgtcaggagtggattgggtaataaaacacatatcgagaataagatggccttctggcccttctgggtctagggcggtaaagcatctaagggttgttgccagatgggccgtgaactgggttgagtgtttatatttgatgaaaaagagcctcaatgctaacttatttgggagaggtcagataaagtaaaaggagcattaaccttggctatgccttcagctccagccacctctttaagaggaaattgttgggcaggtcggggagggctagttgcggaaagaaacagtaagccggacaggatgtgaggaggggatgataaaaggattatagggtggggaagtggaggctgaggaagaattgggacctggctcagcctgccaaggagcagcctggggaggaggggagaggtcagatgagtccatagaaaaggaggattcaaaggagtcagagcttggggtggagactgaaggaacagacaggagagaaagaag

SEQ ID NO: 844383 - DNA, 557 bp, Homo sapiens
gaaggcgaagttaatcaagtcctgttatggggtttgagggccggaatctaatttacggagctttttctaatgtcaggagtggattgggtaataaaacacatatcgagaataagatggccttctggcccttctgggtctagggcggtaaagcatctaagggttgttgccagatgggccgtgaactgggttgagtgtttatatttgatgaaaaagagcctcaatgctaacttatttgggagaggtcagataaagtaaaaggagcattaaccttggctatgccttcagctccagccacctctttaagaggaaattgttgggcaggtcggggagggctagttgcggaaagaaacagtaagccggacaggatgtgaggaggggatgataaaaggattatagggtggggaagtggaggctgaggaagaattgggacctggctcagcctgccaaggagcagcctggggaggaggggagaggtcakatgagtccatagaaaaggaggattcaaaggagtcagagcttggggtggagactgaaggaacagacaggagagaaagaag

SEQ ID NO: 844384 - DNA, 527 bp, Homo sapiens
gtcttcagagacacactgtccagtgttttactgaragaaggtgattgacacctgtctaatctatacaagcgagggtgtcaactgctgcacatatagaactttaatggctttcagccccattttccattactgctatctaggatccttttcatttccagactgaagcacctctcatcttctgtggagagaatcttgatcccttagctgcagctcactccaccctgctgtattagtcagtattcatacatctatttctgtttccaagaaatctgttgaaatctctataaagcagattcctatgttcttctttattgtaggcttatgacattttaattcctgagctagaagattcctgaacttaaattgctgtatggtactctataacatggttgtatgtttaattgtagcaaatgtataaacaatgttatgatgaagatcctggtagctaaatcattacacacatccatgattttttatttagaataaattgtgagaaaaattgctgcattaaaatggaagcagttgtg

SEQ ID NO: 844385 - DNA, 397 bp, Homo sapiens
ccacacagttgcttgtgctggtccaagaatcagtcttcctgtggcttcctcatggcaggagaactcagctgtgccagcaaaaccatcgcctgcaaacattgaccctaagtagccctgtgtgccgggcctggttcctctgcactaagcccaagtctggtttcacagccataagcagcttatgggaacaggttagcgcaagtctccatctgcctcaggaatcctctaaggtagcagaggtcactaccaagacaaaattttccctccccaaaccaccacaaaggacaaaagcttaattacaaagagctactctaaacgtcctttctwcaccaaagagattcttcccctaaagtaaaacaaaaaattcaattctgaagccccaaagcagggagcaaatttt

SEQ ID NO: 844386 - DNA, 626 bp, Homo sapiens
agaaagtaaacaggtacctttccacaaggagattgaagaaggttttaaagaagtgaaagttgaatggaatttgaaactacatataaaggcataaagatagaggcaacttccagacaaaaggaataggacctcctaactgtgatgccaaaataaaggtatggatgagcaaaggtcttggtgtgaacatagaaatgcatttctatgtttagtgcagctaaatgtgatggacttaaggctagaatgagatgaagaaatcaagtagtgaagggatttctaaagtttgaactttatgctgtagaaaacagagtgtattggagaaatataagctgctattagagagactgaaattctttaataaagtagaaaagaatattcttataattacatcttgcctagtacaacaggggtagctgccctggttcccagcctggtgagttgcagagaggtgatgggggaaggtttgggtggccctattactaaagttgacactactagcaattatgttattttaatttactcaatccccctctctctcatcatctttttctccctttccctgtctctatctccatctctttctagcyctatgtcttcgtgttagtccatttgcattgctgtaaagaaat

SEQ ID NO: 844387 - DNA, 594 bp, Homo sapiens
tgctcttaaatgcaggtttctgataactttggagattgtgacatcagaataaaggaaaaacgttcargactcttgaaaagctaaaatatttgttaatattaagcaggacaggaattaacttcatgaactgaactaacaggagactgaaatgatctttttgactttttgcttaaaatgttactaatcttttattttgcttttcagagtaaaggaaacttttcttttgagctattaacagcttttaacaattaagtaaagtatactccacaaaatttgaagcatatttgtttctctctacctgattcttccaaatatctgaaactatttgtgagtattcttaatttatggcaatatagttatttgcataagtgcaataagaatctgttttattttgtaacagaacacaatttttaaaaaactggttattttaccaaggctttgattggaatgctatgctctctcttagggaatcaaacttgacttctggcaccaataaagcccttggaaaactggcctcatattttgtgtacacagtccctgtacagggtttctgatctgtggtaagtaaagaatgtcactttcttacaagccagg

SEQ ID NO: 844388 - DNA, 626 bp, Homo sapiens
tgcttactattccaggtttagaaggaaaatgataatattgcctttaacaggcaattgcagcagagcatgactgatgctgagaaattcctgaaaatatgcaacctcctaaaattggaccaggaagaaacagaagtggggaatagaccaataatgggcagtgagactgtatcagcaataaacactctcccaacaaaaacaaaacccaggaccagatggattcacagccaaattctagtaaatgtgcaaggaactggtaccaatcctcatgaaactgttccaaaaaatcaaggatgagaacattctccctaactcattctacaaagccagtatcaccctgataccagaaccagacaaggacacaaccaaaaaagaaaactacagattaatgtccctgatgaacactgatactaacataggaacagaaaaccaaatactgcatgttctcacttataagtgggagataaatgataagaacttacaaacacaaagaaggaaatgacagacaccaggtctacttgaagtgggattgtgggaagaaggagaagagcagaaaagataactgttgggtactgagcttaatacctgggtggtktaataatacgcagaacaaacccccatgacacatg

SEQ ID NO: 844389 - DNA, 608 bp, Homo sapiens
ctttattaggagctacatcagaccccctttgaattagttttgtaaagacagaaaaaataaaccccaaatggagttatgtgtaaaggaaaacagccacagagaacaatccccaggcttcttcccacaagagctggggattggccaagcgggacctctggtagtcacccaagtgcccttctctgcacagaaaatctgaacccaggggctctgaggtgtgtgaaataaaaacaaatgtccatgtctgtccttttatggcattttgggactttacatttcaaacatttcagacatgtatcacaacacgagggaataacagttccagggatatctgtagcttaaatgagtagaggaaagtccctgaacactttccaaattgctctcttggaactgagtttctaactcactgtccaagcccagggctagtcagtaagcacattcactttgactcgtgttgattttcattagccacattatgtggtggtcaccctgggyctgcatgtcagtgggggctacttgaccttcaacagctcccctccaattaaaatagttttattctctgttttctaccagatgcctactgtgctattatgtaatatttcacctgtaga

SEQ ID NO: 844390 - DNA, 549 bp, Homo sapiens
cagaatgagataccgaatgtcacagatacaagcaggagctgtgaatccaggtttcctgcatccaagcccagggctccttccgctacacagtagctcaatctcactagaaaatttcaccttcatcttattccacacaggacccagtgccctacagcctgtgctgacccaagttagagcagattccctgagaacaacctaggcatgccctgggatggtgaaataccactcatggggacccaggtaaggcctcctggtagttgttagtgccagagaccatcatccaaacttcagaagccggcacttgaagaggtgattttcaacagagaaactgtgatcaatggcagcaccacagaccactcagctatgatggcaacaccttttaaagatggcactttgattagaaagattttctttttagcagrtcctatgtgctattgtcaagcctatattcgagactcctcccctcttttaaaataaacctgaaagctaatttggttatacaaggcagcccaactgcacaaaaccatcaacaactgttccctgagaaca

SEQ ID NO: 844391 - DNA, 484 bp, Homo sapiens
aaatactagttgggtgtaagtatttggctttattgctggttctctattttgttccattattctgtgtgcctgtttttataccagtaccatgctgttttggtgactatagtctttgctagtatagtttgaagttgggtaatgtgatgcctctagatttgctctttttggttagtgttgcttcagctatgaaggtacttttttggttctatatgaattttaggattgttttttcaagttctgtgaagaatgatggtattttggtattttgatgggaaatgcattgaatttttaatttgctttctggtcctgggcttaagaaagaaaggaagtgaaggtatagtaataattaaagacaggaagttcttgatcagggttgtgaaagctcctttccctgtaatggattagagaggtcctaaagatcctarccagactacagatcaaatccctgctcttcaatattctttgatgtctcaagcaagtacag

SEQ ID NO: 844392 - DNA, 555 bp, Homo sapiens
gagtagaatgttctgtaaatatctgttaagtttatttcttctagtgtaacttaagtccattgtytcattgttgactttctgtcttgatgactttctagtactgtcagtggagtattgaagtccccactattattgtgttgctgtctatctcatttctcatgtctagtaataattgttttataaatttggaagctcccatgttaggtgcatatatgtttaggattgtgatattttcctgttggagttatccttttatcattgtataatgtccctctttgtcttttttaactgttgttgctttaaaatctgttttgactgatataagaatagctactcctgcttgcttttgttttccatttgtatggaatatctttttccactcctttaccttaagtttttgtgagtccttacacattagatgactcttgaagactgaagatacttggttgctgaatttttatccttcctgccattctgtatcttttaagtggagagtgttaatattgagatgtgaagtactgttctatttctcatgctagttgttgcctgaattcc

SEQ ID NO: 844393 - DNA, 555 bp, Homo sapiens
gagtagaatgttctgtaaatatctgttaagtttatttcttctagtgtaacttaagtccattgtctcattgttgactttctgtcttgatgactttctagtactgtcagtggagtattgaagtccccactattattgtgttgctgtctatctcatttctcatgtctagtaataattgttttataaatttggaagctcccatgttaggtgcatatatgtttaggattgtgatattttcctgttggagttatccttttatcattgtataatgtccctctttgtcttttttaactgttgttgctttaaaatctgttttgactgatataagaatagctactcctgcttgcttttgttttccatttgtatggaatatctttttccactcctttaccttaagtttttgtgagtccttacacattagatgactcttgaagactgaagatacttggttgstgaatttttatccttcctgccattctgtatcttttaagtggagagtgttaatattgagatgtgaagtactgttctatttctcatgctagttgttgcctgaattcc

SEQ ID NO: 844394 - DNA, 622 bp, Homo sapiens
cttttagcattttgtgtagtgctggattggtagcggtgaagtctctcagcatttgtttgtctgaaaaagactttatctctccttcatttatgacgcttagttttgctggrtacaaaattcttgcctggaaattattttgtttgaggaggctaaagataagaccccagtcttttctggcttataggctgctgttaatctgataggttttcctttataggttacctgatgcttttgcctcacagctcttaagattctttcctttgtcctgactttagataacctgatgactatgtgcctgggcgataatctttctgtgataaatttcccaggtggtctttgagcttcttgtatttggttgtgtagatctctagcgaggccagggaagttttccttgattattccctcaaatatgttttccaaacttttagatttttgttcttcctcaagaatgccaatcattcttaggtcatttaacataatcccaaatttcttggaggctttgtttatttattaaagttcttttttctttgtctttgtctgactgggttaattcgaaaggcttgttgtttgagctatgaagttctttcttctacttgttggatcctattgttgaaactttcca

SEQ ID NO: 844395 - DNA, 622 bp, Homo sapiens
cttttagcattttgtgtagtgctggattggtagcggtgaagtctctcagcatttgtttgtctgaaaaagactttatctctccttcatttatgacgcttagttttgctggatacaaaattcttgcctggaaattattttgtttgaggaggctaaagataagaccccagtcttttctggcttataggctgctgttaatctgataggttttcctttataggttacctgatgcttttgcctcacagctcttaagattctttcctttgtcctgactttagataacctgatgactatgtgcctgggcgataatctttctgtgataaatttcccaggtggtctttgagcttcttgtatttggttgtgtagatctctagcgaggccagggaagttttccttgattattccctcaaatatgttttccaaacttttagatttttgttcttcctcaagaatgccaatcattcttaggtcatttaacataatcccaaatttcttggaggctttgtttatttattaaagttcttttttctttgtctttktctgactgggttaattcgaaaggcttgttgtttgagctatgaagttctttcttctacttgttggatcctattgttgaaactttcca

SEQ ID NO: 844396 - DNA, 648 bp, Homo sapiens
ggaagttttctcctgtctcttgtcttttatgaacccacttcctctctgttttcctaccamtttctagtcctctgcttttcagcctctttcttcatgtctgtgtttgtctggatgcaggagcacacactcagatccctgctatcctgactttgtgtacttttcttgagtgacctgacccaaaattagaacttcacccaccatgagcctccttccagtttatgtcactaacctaatgtagcatgacactcatccatttatttcactgccttcaaatcaactgtatgttttcccctagaagtttaaattcagtatgtctcaaacagaaaattttaccttctctcaatcacttaattatcacctttgcaggcacggatgccacaattctccacgttgcgtggttattctcgacttcttcatatccctacttctggcatgtgatttagtgattcctgtggcctctcatgtcattactgccatcaaatccatctgctgtcctcctcaccccatgttcctgccctggcctacgccttcattacttcccaccagaggcttaaaagtgctactggtcttgccttgagtcccgcctcctccagcccatccttcctacaggtgccccatccaaacacaaatctgaccgtgttactctcc

SEQ ID NO: 844397 - DNA, 593 bp, Homo sapiens
caggttacagtgctgcctggcccacatctcccctggcttcagtcacactgaagaactgcagttctccttgcaacttcatgcctctctgctcctgagcctgcttctcctgctggaaatgccatttcccctttctctgttttgctatctgcaggtgaacactgtccctaggaacctttcctaaatcgtattttaattttgctcctgagtagctcttgtgtataccttgtgatactcagtggtgatcaaaccacacatgtagcaatcatcttttctttgtctgttttattcttgaatttcaagtagattaaggacaaagttcccatctttagagtttcatccttattacctagagagtgaaagttcacaaaaagcatttattaactgaatgaaaattaacatttgaagtgtggaatttgcttcaaaatgtgccaacctttagttttcagattttgtaaatataataaatacaaagtracctaagctgaaccaattacatctgtgtagcccagtctatacaccgtgtatttttctttttcctttgggattcatttctgtaggtgagtaatcctctagaccctaaactcagtggggga

SEQ ID NO: 844398 - DNA, 593 bp, Homo sapiens
caggttacagtgctgcctggcccacatctcccctggcttcagtcacactgaagaactgcagttctccttgcaacttcatgcctctctgctcctgagcctgcttctcctgctggaaatgccatttcccctttctctgttttgctatctgcaggtgaacactgtccctaggaacctttcctaaatcgtattttaattttgctcctgagtagctcttgtgtataccttgtgatactcagtggtgatcaaaccacacatgtagcaatcatcttttctttgtctgttttattcttgaatttcaagtagattaaggacaaagttcccatctttagagtttcatccttattacctagagagtgaaagttcacaaaaagcatttattaactgaatgaaaattaacatttgaagtgtggaatttgcttcaaaatgtgccaacctttagttttcagattttgtaaatataataaatacaaagtaacctaagctgaaccaattacatctgtgtagcccagtctatacaccrtgtatttttctttttcctttgggattcatttctgtaggtgagtaatcctctagaccctaaactcagtggggga

SEQ ID NO: 844399 - DNA, 593 bp, Homo sapiens
cttactatgttctaggcactattctaagtgcttctcatgtgttcacttatttacatctggaggttggttcttatttatttcatgttacagagcrggaatcagacaccgggagaggtgaagaccacacagcttcaaagtgcaaagcttggatttaaacccaggctttgggcctgcagtggctgcagtcttgtccagtatttagattatttcatctgcagtcactatctgtcttcctacattttacacagccttaattttcttctgcccgcagagtgatgttcagaacttccaatgctatgttaaacatttccagcaacgaaggacatcctatcttttgcacaatctcaaaggcaatccacctcatttctttgaaatatatatgctatagatttttggttcactacctttaacatgtcatgaaattgattaaattctgtctatgtcttgagctgaattcagtttaaattaatatgaattttgcggagtccactaatgtgttaaccacattatatattttctgacactgaagaatcattgcattcctagaataaatctaaaattggtcaaaacgtattgtttttataatgtactgt

SEQ ID NO: 844400 - DNA, 593 bp, Homo sapiens
cttactatgttctaggcactattctaagtgcttctcatgtgttcacttatttacatctggaggttggttcttatttatttcatgttacagagcaggaatcagacaccgggagaggtgaagaccacacagcttcaaagtgcaaagcttggatttaaacccaggctttgggcctgcagtggctgcagtcttgtccagtatttagattatttcatctgcagtcactatctgtcttcctacattttacacagccttaattttcttctgcccgcagagtgatgttcagaacttccaatgctatgttaaacatttccagcaacgaaggacatcctatcttttgcacaatctcaaaggcaatccacctcatttctttgaaatatatatgctatagatttttggttcactacctttaacatgtcatgaaattgattaaattctgtctatgtcttgagctgaattcagtttaaattaatatgaattttgcrgagtccactaatgtgttaaccacattatatattttctgacactgaagaatcattgcattcctagaataaatctaaaattggtcaaaacgtattgtttttataatgtactgt

SEQ ID NO: 844401 - DNA, 342 bp, Homo sapiens
agtaattctttaattttcttcgctatataatattgttttgcattaatatcccaattgtctccagctttttgctattatgaattgtgttgctgtaaacattcttgcatatgtctactagcatacatctataaaataataagagaaacacaaatgaagggacaattagatatcatttgttataaaattagttgaaatatcaaaaattaaaaagtctaccaagattaagtgttggaatgataagtagmaatgggatcttgtatacacattgctggtaggaatgtaagtataagcaccatttaaaataatttggcattatttttaaagttgaacattggtatatac

SEQ ID NO: 844402 - DNA, 468 bp, Homo sapiens
ctcttaaagctttcaattgattggatgaggcctacacacattatggagaataatctgttttacttaaagtctactgattgtaaacattaattatatttaaaaagtactttcacagcaacatttagactagtgtttgaccaacaactgggcaccacggtcaagccaagttggcatatagaattagccagcaaacttggtattcacaatctgtcattatagtcttatctataaacctaaggtttagagaaacgctggtcattctgaacaattccctgtgaatgcagagatcaaggagcctccccttaactgggtaggcagtgtgaaatacctgcagtgtrcttgaccttactgttcacccactggcagctgttcctacagcttggcttcagatatataatattacattggctaacttcaaagagcattgttttccaaggatagagatggtgatggtgtatattactttta

SEQ ID NO: 844403 - DNA, 517 bp, Homo sapiens
caaagtgatccacccaccttgacctcccaggttgtaagccactaaatcttatgtcacatgatacaggaaaaagaaaggaagtaaaatgaagatattgtcttagtacaagtgtatacakgcagaaagatgttcttaacaaaataaggaggaaatactcatgacaattacagtaacctggttgctgcaactcatcacatggtcgtagctgttattgatgactaccttcttctacaacccattctgttttccctttgcctctagcaagtacctcagcaggtcatggttctttacctggtggagtgtcccaaaccttcattcctgaagggtctgggccatttgtagtcctgcctggatcgagttgttgtcattttttattgaccttaatcacagggcttggtaatactaagagacaccctaaggaatttcctgtattccacacatgttcttccttaccttcattatggagtagtagactgagttcatcttgataggctaagtcagtcaccccagccaacac

SEQ ID NO: 844404 - DNA, 517 bp, Homo sapiens
caaagtgatccacccaccttgacctcccaggttgtaagccactaaatcttatgtcacatgatacaggaaaaagaaaggaagtaaaatgaagatattgtcttagtacaagtgtatacaggcagaaagatgttcttaacaaaataaggaggaaatactcatgacaattacagtaacctggttgctgcaactcatcacatggtcgtagctgttattgatgactaccttcttctacaacccattctgttttccctttgcctctagcaagtacctcagcaggtcatggttctttacctggtggagtgtcccaaaccttcattcctgaagggtctgggccatttgtagtcctgcctggatcgagttgttgtcattttttattgaccttaatcacagggcwtggtaatactaagagacaccctaaggaatttcctgtattccacacatgttcttccttaccttcattatggagtagtagactgagttcatcttgataggctaagtcagtcaccccagccaacac

SEQ ID NO: 844405 - DNA, 517 bp, Homo sapiens
caaagtgatccacccaccttgacctcccaggttgtaagccactaaatcttatgtcacatgatacaggaaaaagaaaggaagtaaaatgaagatattgtcttagtacaagtgtatacaggcagaaagatgttcttaacaaaataaggaggaaatactcatgacaattacagtaacctggttgctgcaactcatcacatggtcgtagctgttattgatgactaccttcttctacaacccattctgttttccctttgcctctagcaagtacctcagcaggtcatggttctttacctggtggagtgtcccaaaccttcattcctgaagggtctgggccatttgtagtcctgcctggatcgagttgttgtcattttttattgaccttaatcacagggcttggtaatactaagagacaccctaaggaatttcctgtattccacacatgttcttccttaccttcattatggagtagyagactgagttcatcttgataggctaagtcagtcaccccagccaacac

SEQ ID NO: 844406 - DNA, 647 bp, Homo sapiens
tatgagtatgaagatttttgttttggatgtcttgcatttaaaatgccagtatctatggagaattgccctcaggaagcaggagggcagaactagcttcaaaagactagttgattmgagatccaggtatgggagtcaattgcacagaaatttcgatgggctccttagaagaggaggagcccaccaaaggagagaccaagaatgaagtgggaacctctggtaatggggaatagggagaggtatgtcccttatgtccatcgaaacccttttatttagttaatttcattttcctcttgaaattctagcaagtgttactaatttggatataagggaatgaatttcagttttctttcttctcctttaatgtatctgataagagatattatgtaccgagaagaacaaagaagtgaaacatgaaaaggagcaaaagtaaaaggtttagatttgctgccaactgaatattcagtccgctaagagttgaccggacatttatctgcaagaccattagccaacagatctggtaatggtcaaaaccccagatatgccattgcctcctttgcatggtcagctggagaactggagcaaacagaaacattcttcaaagaaaccaaagagaaaagaatttggtgatttccttcttggtatctcac

SEQ ID NO: 844407 - DNA, 506 bp, Homo sapiens
gaaaattattaagctggcttataaattattaagcaggtttatgtgactctatattacttataactaataaattcagaaacagacattgtaataaatcaaaagtttgtttcctgattactaaraggaaataaccttaatgtatgattagcaattgtttcaaaaaatattcttagtcacaatgtactgaaagattgatatcaatatcctgaaaaaagcaataaaaataagtctaaagcaagatgatagaaaagtaaaaggtagatacaaaaagtaaaatgaagctatattactatgtgaacagtttttgcaagttcagtgaatcattctatcccattcattttcttctttactccaagagaaatttgtttttatttgtaaaatgttccacaattgagatttgcctagttagttttttcagtattagctgcaatgttgtaccagggtaataaaaagatctaatttacatttaaaaagagaacgtgtgtagaaaatggttcagtaaggtc

SEQ ID NO: 844408 - DNA, 622 bp, Homo sapiens
caagggtaccaaaaatacacaatagagaaagggtagtcttttaaaaaatggctctgggaaaaccagatacctgcatgcaaaaaaaaatgagattggacccttaccttacactatacacaaaaattaaccraaaatagattaaataattaaatgtaacacctgaaacagttaaaatcctagaataaaacataggtggaaaaccttttgggaattggtcttggcaataatttattggatatgacaccaaaagcatagacaacaaaagcaaaaatagataactggtactaacatgtgtctgcacagcaaacaacaaggacaacaactaaaacctacaagaacagagcaaaaaggcaacctacaacatagaataaaacatgtgcaaaccaggtatctgatagttaatatccaaaatatataaggaatttcttcaacttaatagcaaaaaatcaactaacctaattttttaaatgggcaaaggatttcagtagacatttctcgaaagaacacataaaaatggtatatattatatataccatttatatatctatatctatatatataccatatatatatttgatgcccaacatcattaatcatcagaaaactaaaaatcaaaccatac

SEQ ID NO: 844409 - DNA, 596 bp, Homo sapiens
tgtaagtaatataaggtgggtgkataactggttgaaagtgtgtctagtatttttttgactttccatttttcatatacatttgatacttgttcctcaaatatctacaattagaaaattctgataagagtagacaaataagaaaataaaatgaataaaaatatttaagaaaatacgagttaagatattgacaacccatcaccctatggatgacattccactgacaaacccccccgactccaccacccaagattgtcattcaggtgaaaaaaaaaaaagaaagaaagagagaaaaagatagagaagattaaaaaaataacattttagttttgaactttcttgggttttttttgttttattttgtttttctgttttttttgagaaggagtcttgcttctttgcccaggctggagtgtaatggcatgattttggctcactgcaaactccacctcccaaattcaagtgattctcctgcctcagcctccccagtagctgggattacaggcatgtgccaccatggccggctaatttttgtatttttagtagagacagggttgcaccatgttggccaggctggtctcaaactcctgacctcaagt

SEQ ID NO: 844410 - DNA, 543 bp, Homo sapiens
atcattatgacttaaaaatatatgataaacattaaaattttaaaatatgttatttttgttatgttggtcaaattgtcccatatctgagcaatgggagcctattcacataggctcctaattttctttttttttttggcaatcatgtatttttatatttttctatatttcttatatgacaatatgtttcaaggatcatcttgtacattttctgttccagacccgaagtcagtcttttttctgagatctaactccttttttttccctctctttttgaaaataccatttagggatcacaatctgtgtacaagtggtgctttctactactgagttagtcattttttaaaacatatacaaagctcataaaaagtgtttaatttgttaacacaaactgttaggagttacaatataaactttgaagctatatcgaataagtgtaccaagtatataacttaaatatcctaagtctttgaaygtatgtgattttgtaaaaatttaccaaaaatctttgacaacaggaaacaaatattttggaattcaccgact

SEQ ID NO: 844411 - DNA, 666 bp, Homo sapiens
cacatttactcaggtatttaacaaagtatatgaaattggtattggcagaaaatacaggctatatgattaccatgtctaacacaaaagttatttaatgtgggagcaagaactttacatggggaatcaggagaccaataactaaagatggaactttcgacaagtcatttaattttactgaatatcaggtacctcttttgaaaaatgttgggactgaacaaacattaagtaatttttcaaagtccatatcagatctatgattctgagtttcttttttttcagatggagtctcactctgtcgcccaggctggagtgcagtggcacgatcttggctcactgcaacctcctgggttcaagcaattatcatgcctcagcttcccaagtagctggggttacaggcgtgcaccaccacacccagctaattttcttttatttttagtagagacggagttttgccacgttggccaggctggtcttgaactcctggcctcaggtgatccacccacctcggcctcccaaagtgctgggattacaggtgtgagacaccaygcttggcctgattctgagtttctgcagaagaaaagtatatttccttctgtggaaggaaagtatacaagctgagaccataccatcattcatcagccctatttcccttagataaaatgtgtc

SEQ ID NO: 844412 - DNA, 589 bp, Homo sapiens
tttctggttttctatgcataatataatgccatttcacttgtttttttttcctgacagtgattccatgtatccatacatatattacaaggtttttttttttttttttggtgagatggagatttactcttgttgcccaggctggagtgcaatggcatgatctcggctcaccacatcctccgcctcccatgttcaagcgattctcctgcctcagcctcccgagtagctaggattacaggcatgtgccaccacgcctggctaattctgtatttttagtagagacggggtttcatcgtgttgcccaggctgatctcgaactcctgacctcaggtgatccgccttcctcggcctcccaaagtgttgggattacaggcgtgagccactgtgcccggcctacaagtttttcaaataatgatatttttgtcttccaactaataaggggaaaataaagatttgartgatagaaagtcattgaaaacctctggtcaggagatggaggataacttttcagtaaaattgacttggatttttttgaattgccacaagatggcattacaagctaagtgtaaaaagaaggttcacaggatgctga

SEQ ID NO: 844413 - DNA, 630 bp, Homo sapiens
tggaggttgcagtaagctggcaatagagtgagtctccgtctaaaaaagaaaaacaaaaaacaaaaaactacacacaagagaagayagggcatgggagctgggatttgaagccagttggatcatgagggttttgttgctcttgagagattcttctagcaatttccataccaaccaacacagatgtttctctttcttcatatgatgatcagggatccaaacatatccaaaaagctaaagaggcaccatttgtcccccattggaatagcaggttttgcagcaattgttgcagtggatatacaaattgaagaacaggagaaatattaaaatgtcccttcacctgatccacatgcatgtggcagcccaaggctttgtgatgggaacaatgactgttgatgtcaactattccatgcactgagaattatgggcaaaacctaagccttagaagaagagatgcaggcttggcacagtggctcacacctgtaatcccagcactttgggaggctgaggtgggcggatcacctgaggtcagcagtttgagatcagcttggctaatagggtgaaaccccatctctactaaaaatacaaaaattagccagctgtggtggcgcgcacctgtaatcccaagtactc

SEQ ID NO: 844414 - DNA, 333 bp, Homo sapiens
aaggccccttctcaaaaaaaaaaagaaaaaaaaagagagtcttggtcttggtgctgtcttggtctttgtcttgttgcaggagcttgctctagttagacatgtcattattgaggttaagtgttcacacagaaaacatgttatttgatggaattcagacgataacacactattttgagtattgacttcctttcttgcaggcttgatttgcttggtgaccaaattactagtcactagttcactagtgaactaggtcattcagaggagtcacattaacagaaaagaaatatgtcacctaatrcaattgactatgtaaaaatatccaccttcttaaac

SEQ ID NO: 844415 - DNA, 648 bp, Homo sapiens
ctttttccaaaacctctcacaagggaaccattgttcctcctccatctaaggacaaggccaagatagcgatggtaaaagttaaagacttaaaacaaastttggcaattgagacaagataccaagatgtaaatgcctggttggaatggatcaaatattccacccgcacattaaacaaaagcaactgttatgtttgtgcgcacggcagggaggcccaggttgtcccctttccactaaggtggtcctccagtcaaccaggcaagggctgcatggtagctctttgccaggattctacagcctggagtaataagtcttgccaagctctctctctgctatatcccaaaatccggcaccctgcgggtcagcccccgagggccatccagcctccatctcccaacactaagttcactttgtgtctctcacaacatggaggaaacttagcgttccttggagacctgaagggatgaagtgagcttaagaatttaagagcttatcaatcagtcagcccttgttcatccccgagcagatgtgtggtggtattgtggtggacctttagtggacaccctgccaaacaactgaagtggcacttgtgctttagtccaattggctatccctttcaccctgccatttcatcaaccagagaaaggaaaa

SEQ ID NO: 844416 - DNA, 575 bp, Homo sapiens
ctctatgaaaaaaccttttttaattacccaggcataatggcacacacctgtggtctcagctactcaggaggctgagatgggagcattagctccttcagcccaggtggttgagtctgcagtgagccatgttcttgccagtatacttcagtttggtgacaaagagatcctgtctccaaaaaaaaaaaaacaaaaaaaaaaaaaaaaagaaataccacaaacaatgctatctcaccacaatgtaataaaaccagaaatttaaaattgaaattataaaataaaaagccacttctgctgaaaattagaaagtcttctatgatatgtcttgggtgaaatgagaacacacttacagaatatctgaaaaatgatgatgaaaacactgtttatcaaaatctatggttatgtttaacagagtgatcaaggagaatttgtaacctttgtgggcagctgaaaaaaaaaatgrccttccaaagatacattcacttcttaatccacggaaccagtgaatattgccttgtatagcaaaatatgtgattaaattaaagatcttgagaggaagggcttatcctgaattatgc

SEQ ID NO: 844417 - DNA, 598 bp, Homo sapiens
tgattttagatgattccacaaatgagttaaatgctcctatggccaggcatagtgactcatgcctgtaatcccagcactttgggaggccaaggagggaggattgtttgaggccaggaattcaagaccagcctggacaacagagagagaccacctcttctgtacaaaacttttttaaaaaaattagccaggtgtagtggctctcagttactcaggaggcaaaggtaggagcatcacttgagtccaggagtttgaggctgcagcgagctatgattgccactgcattttagcttgggcaacaaaagggagagcctgtctcttaaaaaaaaatttttaataaaaaaaaaagctctaatatttgcactttaagctggtacaatataaagaacagtaaaatttatgctaataattaaaatttttaatatttcttaagaatgacattaaacagcaaatttttttattttgtaaagacgggtctccctatgttgcccaygctggtctcaaactcctgggctcaagtgatactcccgcctatggcctcccaaaatgctgggattacaggcatgggccaccatgcccaacctaaatagcaaatttaaaa

SEQ ID NO: 844418 - DNA, 620 bp, Homo sapiens
aaaacagtgccgtaataaagtgcatgtragtcctaagaaaagggctgctaccagtagttccaatgccaggatcgtgcaactcaaagagaagtaatgtccagcttttggaattgagcaaatgaatggatggtgttccaattaaatgaagtaaagaataaagaactagatagaattttaaggtaaatgagggtagaaattataagctttatttaggcacatttttagtttttcatgctactgggcattcaaatgcttgaaatgcagatcggcgactcagaagaaaattctgagttagggataaggcttgagaacattgtcatgtacagggtagtgaaagccaccagcttggtagattttacatagcacatagagagaagaaggaggaaaaaatctggagatagtaaacctgggagaaccaaaatgtaatgagtgaaggaaactggggaagaaaaatgagacgtggtcagtgtgggaaagagatgactaagtgatgtcatggaaaccaaaggatatttttcaagctatacatgcccttgccttcgcagacatttgaatttactttttttttctagtgggtccccacactaagaataacttattgttaatgtttggtttttatg

SEQ ID NO: 844419 - DNA, 603 bp, Homo sapiens
gaaatcgtagattccctgaggccagcatttatagtgattcttctacttgctgcagtttccaagtaggatagattttatgtgcaattatkgagaagaaaaattatatttatacagagattatattttgtggttattattactgcaaaaaagaataaaataaacttgcatcctaacaacgacaacaacaacataaaacatagtgttaagaacagggagtatgatttagaaggagggtgacaaaaaattattgttattttgtgttcagaaaatgaatacatcaatgcttaacatttatggagcaatataaaccagcttcagctatttctcttggggaaagaaatgaactggttgagagaaaaatgacacaaaacaaatagcatggctaactgacatgtagtcacccgaaccatgtttctgtggattatgtgcatcagagatctttgttttgttggtatttaccgataaactgttgaaaaatattataagctcatactcataaatatacttctaaaagaaatctgcaatgagagcaggaacccacagcatattaaatttataggacctggaaaagttaataaattattttttattaaggctggattt

SEQ ID NO: 844420 - DNA, 541 bp, Homo sapiens
aatatataagaagaaactcaactcatagcaaaaaacaaataacccaattaaaaaatgggcaaagtacctgaataaacatttctcaaaagaagacacacaagtggccaaaaggtttatgaaaaaatgctcaacaccactaatcatcatggaagtacatactaaaaccatgatgagatatcaattcacatctgttgggatgtctatgatcataaagacattggagaacaagtattggagagggcatggaaaaaagagaacacttgtccactcttggtgggaatataatttattaaggtcattatgaagaacagtatggaggcatcccactggattaaaaatagaactatcatatgattcagcaaccccctgctgagtatatatatatatccataggaattgaaattagtattccagagaaatatctgtacacccatgttcattgcagcattattcaaaagagccaagatttggagtcaacctaagtgttcaacagtggawgaatggataaaggtgatgtagtacatacatacaatgaaatact

SEQ ID NO: 844421 - DNA, 557 bp, Homo sapiens
gttcattgcagcattattcaaaagagccaagatttggagtcaacctaagtgttcaacagtggaagaatggataaaggtgatgtagtacatacatacaatgaaatactattaagccttaaagaaggaggaaatcctgtcaattgccacaacataaatgaacctggaggacattatgttacatgaaataagtcagacacacaaaaaacaaatactacatgatctcacttaagtgtgagtgtataaaaattgatctcatagaggtggatagtagaatggtgcttaccaatgactgaaatgttgcttaaaggatacaaaatttcagttatacaaaagaaatatgttcaggatatctgctaaacaatatagtgactacagttaataacaatgttttgtatacttgaaaattgctaaaagaatagatttcaaatgtcattgccrtaaaaaggtaagtatgtgagattatggatatattcattagcttaatttagccattccacagtagacatatattaaaatatcatgatgtatattacaaatatacacaatttttatttgtc

SEQ ID NO: 844422 - DNA, 543 bp, Homo sapiens
gtgggagttatatgagattcacaattyggtatctgtgaataaagttttattgacacacagctatgctcatttacaagttattgtctatagctgctcatatgttcaacagtcaacgtttatatgttttgtgcttcattggtagagcagttgcaacagagattgtatggcctgcaaagcctaaaatatatactgtctggtccttacagaaaatttgctgatttttgagttaaatcctaggagaagaggaccattgcacatatacttctgtttaatccatgcaatgccagatgggaccccttaaaaccaagaagcctacagaagcaaagatttttttaaaaaagataaaattcagcattactgtggttgtgggggaagggacactttcatacacagccaaggggagcatcggtaggccttttgttagtctgcaacaaggaccttaacaatgttcatatgctttggccggcccattctatttctagaaatgagtcttgtggaaactctcaattatatgtgcagttttatctaccaggattttattgc

SEQ ID NO: 844423 - DNA, 605 bp, Homo sapiens
ttaattccttaaaaatgagtgttaggcagcctctcatgcatggagtcaggaatctggcttccacttcagctcygcacccttgaggtgccagaagcctcgccattcagccagaggatagggaaagagcaagtagagggttacttggcactacaggccttggagtggcagctgtagctttttgcatacatttctttggcttgatctcaggtacctggccacatctctggcaaggaagctgaagactgtagcttagttatctgctggggagaaagaaaatggaatttgataattgcatagcatgagcttctacatttattgcccttcccttccccaccccaagaagttagtgttcatattaattttctgttgctatgtagcaagttgtcacaaactgggcaccttaaaccgacacacacttattattccatagtttctatgagtcagcagtccaggaatggatcaactgagctgaatcctctgctcaggtcttacaaggctatagtcaaggcattgacttgactgcattctcatatgaaggctcaactggggaagaaccggcttctgagctcattcatgttctcagcagaatttatctccctgcatct

SEQ ID NO: 844424 - DNA, 645 bp, Homo sapiens
tttctatttctgtggggtctgttgtaatgttgcctttgtcatatctggttgtacttatttggatcttctcttttatctttgttaatcttgctaacagtctgttgatctgtttatcctttcaaaaaaccaactttttgtttcattgaacatttatatggattttggaatctcaatttcaattatttctgcttttagataattattttctactactagctttgggattagttcttgttattctacttcctctagttgcaatgttagattaatttgagatctttctgtcttcttgatgtaggtatttagcactgtaaacttgcctcttaacactgcttttgctgcatcccagaaattttggtatgttgtgtttctgtttttatttatttcaaagagtttttttgtttttttttaatttcaccttctgttgtttacccaaaagtcattcaggagcaagttggtttaatttccatgtaaaattatgtggttttgaggagtactcttggtattgatttctacctttttttccacygtggtccaaaaatatgtttggcgtggtttcaatttttttacatttattgaaacttgctttgtcttcgagcatgtggttgatcttagagtatgttccacatgcagatgagaagaatg

SEQ ID NO: 844425 - DNA, 545 bp, Homo sapiens
actgtgtgtcctgaattttgcttgaacatttatgtatctaagattcattgagcaytgagctctactttgtgttatgtaacctaggaccctattatgtatactacttgctttctctgtcataataatatgccaagcatagacatttttaataaattatttctatcctctacatcaagttttttaaaaaattaaagcaaacattttcattattggtataaaaaggcatatcaaaaagacctaagatttttggcattaattctgttgacccctttcattttaaaaagttggttaataatatttgcataatatgggtaaagagtttcaggatacataatgaaaagttttggcaatctgtatcacaatatgaatatacctaacactgctgaatcgtgcacttaaaaatggttaagatgataagtttggttagtttttgccaccacaagaaaaaaagtacacatacaaaatcatatgtatttatgcttaaaattttatgtttttctcaagattataagactgtttattacagcatttttataattgtacca

SEQ ID NO: 844426 - DNA, 523 bp, Homo sapiens
tttccattcctgagttacttcacttagaataatggtctccaatwccatctaggttgctgcaaatgccattatttcattcctttttatggctgagtagtattcaattgtgtgtgtgtgtgtgtatatatatacacacatcacattttcattatccacttgttgatcgatgggcatatgggctggttccatatttttgcaattgtgaattgtactcctataaacatgcgtgtgcaagttatcttttttgtataatgacttcttttcctctgggtagatacccaggagtgggattgctggatcaaatggtagatctacctttagttctttaaggaatctccacactgttttccatagtggttgcactagtatacattcccactaacagtgtaaaagtgttccctgttcaccacatccacaccaatatctactatttttttattttttgattatggccattcttggaacagtaaggtggtatcgcgttgtggttttgatttgcagttccttgataattagtgatgtt

SEQ ID NO: 844427 - DNA, 528 bp, Homo sapiens
acagggatgaaaacatttatgatgatccatgtccccttaataaattgtaaatatattgtctctaccttatgattttcttaacaactttttcttttctctagcttagtttattgtaagactgtagtataaaataaatatacaaatatgtattaatcaactgttcatgttattggtaaggctttcagtcaacagtaggctattagtagttaagttttgggggagtcaaaagttaaacacagattactgactgcgcagggagtcggtacccctaacccctgcagtgttcaatgcaaggtcaactgtacactgacacacacacacacacacacacacacacacacacacacacacatatatatatatttaattgagacggagtctcactttgtttcccaggctagagtgcagtggcgcatcttagctcactgcaacctctgyctccctggttcaagcaattctcctgcctcagcctcctaagtatctgggattacaggtgcgtgccaccacacccagttaatttttgtattt

SEQ ID NO: 844428 - DNA, 554 bp, Homo sapiens
aaaataaaattggattctgtacagtgacactgccgaagtaccactcttaaactgggcaacatgaagagatctttgatatttctgtcttttgtttcaagttgaaaatagcttcatgatttttttctgattataaagtcaacagatgttcaagtagaccatccatgcactttagaagagtataaagaagaaagcaaacatcagcctaagtcacccaaaggcaactgttaaaatcatggtgactatcatcccaacagcactctgtgcatgtattttttttttttttttttttttgagactgagtttcactcttgtcacccagactggagtgcaatggtgcaatcttggctcactgcaacctccgcctcccgggttcaagcaattctcctgccttagcttcctgagtagctgggactacaggcgcccaccaccacaaccgactaatttttgtatttttagtagagacagggtttcactgtgttggttagrctggtcacgaactcctgacctcaggttatccacccacctcggcctcccaaattgttgggattacagac

SEQ ID NO: 844429 - DNA, 609 bp, Homo sapiens
ctgtcagttctatttttagtggttgctgctgtgatgatttctagggtgccsagtccagcctgtccctacaaatgaattcacacctgggcatttctatagtttgattttgtttgttccctccaaatctcatgttgaaatttgatacccaatgttagaggtgggggcctaatgagaggtgtttgagtcacgggggcagatccctcataagtggcttggtacagtcctcacggtaatgagtgagttcttactctattagttcctgggagacctggttgttagtggcaacttcccactctatctctcttgttttctctcttgtaatgtgatctctgcacacatcagctctccttcaccttccgtcatgagtagaagcagctgggcccctcaccagaagcagatgccagtgccatgcttcttgtacagcctgcagaacagtaggccaaataatcattctttctttataaattaccagcctcaggtattcctttatagcaacacaaatggactaagacagtcattaatatccatgtatacaacaaatcccataacctcttcttcctttgcacatagctagactctatttgccagcctctcttgaggttatagcta

SEQ ID NO: 844430 - DNA, 630 bp, Homo sapiens
attggctcttttattgttgcctgctttttatgatcaatttacagattcaaaggctgcaaactttccttcattctgttctcaactatttaaaccatgtgcaaagggagcacatgaaacaatttttatctctacytcttctgccccaatattttataattcagaggagcttgttaacaaattgtggggtagaaaagtactttttaatgtgacttcctagataaaaagaaggaaacaagcacacatggaaaatgagaaattgacttaaagtagaattctggagtaaccatttttgtttttttgtctgtttttattttttttttaaatggaaattgtaagattggagtggtaagaaccaccttgtaagcagtggcagtagaagcctccagggaggatgccatattgaggagagtgcaaagctttgctcagggcatttaaaaaaacaaaaacaaacacagaattgcccaagaatgatgatgttctgtttcacatggtggggtagcatctgataaggacaacacacacccatagagttacagtgcacaaagagctctttttctcatgttgtcctccagttgccatatgtggaagacaggcattattatttccattttacaggtgggaaagctgaat

SEQ ID NO: 844431 - DNA, 617 bp, Homo sapiens
ccataaaacttactctcattattttctctacccagaacagtcatcagttcttggcacgattttagttttcttatcctttagtctcagtttaagagtcacttcttggagaaaattcacctgaccactctacagtaggtacatgcagtttttctctaacacaaccatgttggtttccttcatatcatttatctcaatttgccattatattatctatttatttccctaccaattggccaaggctatataagaggaagactcatgactctttccccagcacttaacacaaggaatggcacagaaaaggaatttgataaatatctgttgaacaaaagagcaaacataccatagatatgcttcttgcttattgaattttttcaggagtatataattcaagataacttgttagtgtttgtaaatcttgcaattgttaccagttctttgtagttttacctggaatattttcagttaactatccagaattcagggggctttctaatacctactttcataatcaccggtatagtaagttttatttccaagtattagcaaatatgagctagttctcattttcctactgccaccaamaaacattgcccatatagcaaatgtccagccat

SEQ ID NO: 844432 - DNA, 453 bp, Homo sapiens
catctctgtgtgtgttggtagcacaaagtcacaatattgggcccagggatatggtgtgtcctttacctttacctttaaaactcccaaaaaaataaaaaataaaaaaaaaactcccttgaggtttggcaagtatatgatctgatttatattatagactgaaaatggactttattgggaaaaatgatatgttagctgcccctattttctaataattatgcagaataaatctcttaccctatttttttctttattgttgtactatggtaagcttcatcaatattgacagcctaatacatttcttttacaacaatcacttaactttatgtaaaaactaaaggacaaatagctcrgttttagcccttgaaatccactcatgtttgtgccattgcagtggccaagttgaacatttgatcagtttgtagctttcttgaatggggtgctgtttcccaaggg

SEQ ID NO: 844433 - DNA, 570 bp, Homo sapiens
atgttttggtaatatatttytttggtgaattatctattcctgtctcttgtctacttttctattggattactagatcttttctttgctaattcaaataactctatataaaaattatatttaccctccatctgcagtaaatgtgttagagattttccccagctcactttttgattttcaatgtagttgataatagtttgtgtgtagatatgagcttaatcgtaatatacttaaacctatagattttcctttgtggtttcttgtgttatatgctgtaattatctttcctccaaaacagatcagttaaatattcacctgtcttttcttggagggtttttttttcatgatttcatgcatttttaagtaaaaacatatttctttctcatgtgagaatttgagttaacacattatccttaagatgaggactctacagagggcaaagtccagactgcatatctctaatgccaagtacaatgtgatatggtttggctgtgtccccacccaaatcttatcttgaattgtagctcttataacccatgtgttgtgggagggacccagtgggagataattgaa

SEQ ID NO: 844434 - DNA, 632 bp, Homo sapiens
acatcctctgctatctctcattttaaaatttaaatgaggcctaaaggatccattccccaggcatgtcaggttttgaatggtcaaaatgggacatcttgatgggctcatagggcaggatctggagcgactgtttctgtagctcagaacaccagatggcattccctggctggaggactagctctgtggcctgcagatgtcctgtaccttcttttcatcttcccttcagccctgtgggagaaaccattcatttcctcaaggaccactcccaaagacttctatgttgatgagaacacaacagtccgggtgcccatgatgctgcaggaccaggagcatcactggtatcttcatgacagatacttgccctgctcggtgctacggatggattacaaaggagacgcaaccgtgtttttcattctccctaaccaaggcaaaatgagggagattgaagaggttctgactccagagatgctaatgaggtggaacaacttgttgcggaagaggtaatcagtgtgctwtgggggctgaatctacagtactatccatcaaatgtaactttctaatgaaagacagtgccccaaaatagagagtgaacaccaaattatgagagaattctcacttgctctgagaacttc

SEQ ID NO: 844435 - DNA, 627 bp, Homo sapiens
acctgagccctcatctcagtgaagaacgaagcataaacggatccatccagagcttgaagcagggctaccaggccctgcccagcccaaatcaaccaatctctagccaacacacagacttgtgctattacaaatagaagtggtttaagccactgagttttggggtgatttgttacccagtaaggactaactgatagacatcttattcttaaatggtgggattcaatattgtaaagaggtacactctctatgaattaatctataaagtaagtgtgactccactaaaaataccgatagatgtttatttatctgagaaattgtaaaacaaaagtagccactaaaaatttgaaagaaactaatagtgggggaaaagtcctatcagatattaagtcctatcagatattaagaggtgccatacaactaggatagtaccattacacaatatgctactggaataagaacagataaactaataaaacacaacagtaagggtaggaaagatgatagatagatagatagatakatagatagccatagaaaggtagagaaaatgctatattatgaataagtggtaggaaggtggaagattatatagtaaatagcattgaaaatcgcaatataggccagatg

SEQ ID NO: 844436 - DNA, 541 bp, Homo sapiens
taggaaggataaacgtattaacttgttttcttttttcatttagtttccttaatcctactgaatttcatctgttttgtacatactattaaagaaaaaaatatgctacccattaaattgtgtcatgccatcgtgaggtgtactatgatttcaaagatgttattaaaatacaagcaagtgcatctagaatcaatacactatatttgttttggagcttctttagtcatgtttaagctgaagaaatcttactagaataacattagcagtcacacggcttttcagcttcagttttcggtgatgctttagggtcatccaggtcaaaaccagcttaatttctctagaaagctttaaagtctgccatgattataatgaaattagcttgaataatagagattagggaaaatgaattttgctaaaattaggaaagacagggttattgcgagtgataaaatggaacacaagaaattgaaataatgtttagtgacttttggataagttatttgggtgwtcttcgcttttaaaaatatccagatttacaacctgt

SEQ ID NO: 844437 - DNA, 600 bp, Homo sapiens
tgctaaaataactaaattttccagttacaatgggtgarttttaggatatgtaaattatgcctcagttaactctaaaaaagaaaagcctgtgactcgaaaagttaaggaaaaaataaaatctagggatagggctgaaagttatactcagaatgaatacgtggctttaaattcttttattattaaaaagcaaactaaaaataagtcaactctctattcaacttaataaatgaagaaaaggttaaaataaaagacataggataattaaagataaaagtacagatgaataatactgaacacaaacagaacagtcaaaagaataaatgaacttataaggagacataaccgccactgataaggaagagattaaaaggtgcattaaacaatgaccatgtactagttaacagacccccctttctaaatggacgcactgtgctaagaagctacagacgtttcatagagaaaagcaacaggcccactgagttccaagtcaacctttcaaccctatttcatggacacattccacattttattgtttctgaaatccgggtccatctcattatccctgtcataaggtggcagtgtgagggagctgcgggaaaa

SEQ ID NO: 844438 - DNA, 587 bp, Homo sapiens
ttagccactgtgctcaactctgattcattttttctaagtaattattttttttttgagacggagtttcactcttattacccaggctggagtggaatggcacaatctcagcttsctgcaacctttgcctcccgggttcaagcgattctcctgcctcagcctcccaagtagctgggattacaggcaggtgccaccacccccagttaattttgtatttttagtatggatggggtttcactatgttggtcaggctggtctcaaactcctgacctcaggtgatccacccacctcgacctcccaaagtgctgggattacaggcgtgagccaccgcgcccagtctttaactaattttttgtacccattaaccatccccacttgccccagcccccactacccttcccagcctatggtaatcatccttctactctctatttccatggattcaactgttttaatttttaactcccacaaataaatgagaacgtttgaagtttgtctttctgttcctggctcatttcacttaacataaagacctccagttccatccatttgttgcaaatgacaggatcctgttctttttatggctgaat

SEQ ID NO: 844439 - DNA, 598 bp, Homo sapiens
cacttttgttgcccaaagctggagtgcaatggcatgatctcggctcactgcaacctccacctcccrggttcaagcgattctcctgcttcagcctcccaagtagctaggattacaggcactacaggtgtgcaccaccacacccagctaatttttagtatttttagtagaaacagtgtttcaccatgttagccaggctggtctcgaactcctgacctcaggtgatcctcacaccttggcctcccaaagtgctgggattacagatgtgagctactgcacctagcctctttgaacttcatatttagatgtctagatctctagtgagctcagggaagttttcctcaattatcatcacaaatatgtcttccaagaagatttctcttcttcgccaggaacaccaattattttaggtttggctgtttaacataatctcaaacttcttggaggctttgatcatttaaaagaaatgttttttctttgtctttgtctcattgggttactttgaaagccttttctttaagctctaaagttctttcttctacttgtttgattctattgtggaaactttccagtgcattttgtatttctctaagtgtgtctt

SEQ ID NO: 844440 - DNA, 598 bp, Homo sapiens
cacttttgttgcccaaagctggagtgcaatggcatgatctcggctcactgcaacctccacctcccaggttcaagcgattctcctgcttcagcctcccaagtagctaggattacaggcactacaggtgtgcaccaccacacccagctaatttttagtatttttagtagaaacagtgtttcaccatgttagccaggctggtctcgaactcctgacctcaggtgatcctcacaccttggcctcccaaagtgctgggattacagatgtgagctactgcacctagcctctttgaacttcatatttagatgtctagatctctagtgagctcagggaagttttcctcaattatcatcacaaatatgtcttccaagaagatttctcttcttcgccaggaacaccaattattttaggtttggctgtttaacataatctcaaacttcttggaggctttgatcatttaaaagaaatgttttttctttgtctttgtctcattgggttactttgaaagccttttctttaagctctaaagttctttcttctacttgtttgattctattktggaaactttccagtgcattttgtatttctctaagtgtgtctt

SEQ ID NO: 844441 - DNA, 669 bp, Homo sapiens
atgctaggcagagttgcataaatgtggaattgcagaagtaggctgaagagcttgatcacttaaggctttatggagaagataacttttgaccttgatcttgaaaatgaaaacatagataggaaatgaagggaaggaattgcagtattagtgaacagcatgttcaaaagcaccgggctacaaaaatgcaaggaatgttcaggaactcacaaggagggaaaggaagccagctggctggctaacaagcataccgtaaaagtagtgccagcaaaagatggaactttaatgattccaagacaggcagttgaggcaggacttggtgactaataggaaatgctggatgagggagagaaatgaattgctaatctgaggtttctagaccaaaaatatttttaaagatagaatattaaataagacaaagtgcaaaggcaggttaacaaggaaagctttgtatagttgtggacatgcttagtatatacctgtggaacatctggggggaagcgccctgtgggcttttggaaattcaagtgtagaaagtagatttggagtcgtcagcaggagatgatgagaggctgaagctaatgaaaaagtgtctatttgttrctgtgcttttataatacagacgaggtgtaccaaaatccctttgtgaaacatctccctctgcttgataaa

SEQ ID NO: 844442 - DNA, 619 bp, Homo sapiens
ttaggcttggctccatataaaagctatcccaaataacagtgtctttcaacacaataaaggtttatttttctctcatgtaaatgagttatgggtataggcattccaacactgttatgggactaactwacgcatctgtgattcaggcttctttttttccctcattactatgtttagtgtgtgatctccatccccaagtttgcctcatggttcatgatggctgcttaagctctcaccaacatgcacatttcaggcatgaggacaaagaaaagaggagttaggaaaaatgtgtgtaccttcaagtgaagccggttctcttctaatactttccaagaagtcccactctgtcactcatctcctccttaagtgtacaagaggttgctcccaacaatatagagattctgttactaaggaacaaggagagaatggattttggggagacaacttccagtcctgccacgaggaacaaaccttcaaaaaattatatcctccaaacatgttgagaagtgagaaggaaaataccaagaagaaaataggaaagtgaataaaatgagtacagttcaattagttatcatgttttagaataatttaagacaaactagtgctcagaaaaacctgagct

SEQ ID NO: 844443 - DNA, 627 bp, Homo sapiens
ataaaacaaccgcctattggtgcattacttcacagcctgttaygaatgagaatcttgagtcccaccccagacttaatgaatcagaatctgcatgttaacaaaattctcaagtgatttgaatatacagcaaaatttgagaaccacagatgactttcaattcacccataataactgagaaaagactgtaaattcctacaccttgttcttccataatttaaggagtttcttgctttgtttctaccttcattaagggatatgaggcccatgctaagaaaaatgcgtttaataactactttgagtgaaaaatctcactaaatcaggcagttgttcctaaagagaatttaaacagattttcatcatagacagcatggtatctgagacaaacctgcccctgttggtgctgtaccaggcaaactcagtgaatgtaagtgggaaatgttttgggagaacaagaaagcccaagtattgcatttaggcaaatcataagtgcatagtgtgccagagaaaacaaatgtttttcctgcactggctctgacacgttcacacatgaatgtgtttcattcagaaaaagtaaaggctctagaatggcacagtctggttttatgagaaacagatgtgccatggttc

SEQ ID NO: 844444 - DNA, 627 bp, Homo sapiens
ataaaacaaccgcctattggtgcattacttcacagcctgttatgaatgagaatcttgagtcccaccccagacttaatgaatcagaatctgcatgttaacaaaattctcaagtgatttgaatatacagcaaartttgagaaccacagatgactttcaattcacccataataactgagaaaagactgtaaattcctacaccttgttcttccataatttaaggagtttcttgctttgtttctaccttcattaagggatatgaggcccatgctaagaaaaatgcgtttaataactactttgagtgaaaaatctcactaaatcaggcagttgttcctaaagagaatttaaacagattttcatcatagacagcatggtatctgagacaaacctgcccctgttggtgctgtaccaggcaaactcagtgaatgtaagtgggaaatgttttgggagaacaagaaagcccaagtattgcatttaggcaaatcataagtgcatagtgtgccagagaaaacaaatgtttttcctgcactggctctgacacgttcacacatgaatgtgtttcattcagaaaaagtaaaggctctagaatggcacagtctggttttatgagaaacagatgtgccatggttc

SEQ ID NO: 844445 - DNA, 512 bp, Homo sapiens
gctgttgagggagttgattaaatatcgaaccagcttttgccagtgtctatgtagcacttttattttccctgattctaaacctaggtgagtttcgttagttggttggctcctagtsattatgagggacatgataagttgtgtgcacataggggagtactgcactctgttataaagccacaaactgcacctctccccatctgttaaatgtgtgccttcaatcacaaaagctaaggaggatcagctgagagagcccagatgatttggcattgtgtagtggaaggagcaaaggcttctaaagtcatatgatagctttgtcataattggctgttggattctaggtgtcttagtttgttttctgctgctgtaacagactttctgaaactaggtaatttatatggaaaaggagtttatttagcttatggttctggaggctgggaagtcttaagggcagggcactggaatcttgtgaaggccctcttgcttacatggcagaaggcatcagatggccaaag

SEQ ID NO: 844446 - DNA, 512 bp, Homo sapiens
gctgttgagggagttgattaaatatcgaaccagcttttgccagtgtctatgtagcacttttattttccctgattctaaacctaggtgagtttcgttagttggttggctcctagtgattatgaggsacatgataagttgtgtgcacataggggagtactgcactctgttataaagccacaaactgcacctctccccatctgttaaatgtgtgccttcaatcacaaaagctaaggaggatcagctgagagagcccagatgatttggcattgtgtagtggaaggagcaaaggcttctaaagtcatatgatagctttgtcataattggctgttggattctaggtgtcttagtttgttttctgctgctgtaacagactttctgaaactaggtaatttatatggaaaaggagtttatttagcttatggttctggaggctgggaagtcttaagggcagggcactggaatcttgtgaaggccctcttgcttacatggcagaaggcatcagatggccaaag

SEQ ID NO: 844447 - DNA, 505 bp, Homo sapiens
gttcttatccctgatgcatgtggcccctgctgctgtgtctttcccytattggctagggttagacagcacaggctaaactaattctgattggctaatttaaagagattgacgggttgagtggtttggcgggaaaaatggttatgacatagcaggtaatcggaatgagtcagggtggagcaggtgatcggattgagtcagggtggagcaggtgatcagaatgagtcagggtggagcaggtgattgaaatgagtcagggtggagcaggtaatcgaaaaaggttgctttatgaggaagttaagtttaaaagtagaaggcaaagaatcgagcatactgacattgattcttcaaaaagaaatttagaactcatatctaacagtagaaggtgaaggggaagcaaacacatcttcacatggtgacagagagatagagagcaaagtgctaagtcctccacactttgaaagaaccagatctcatgggaactcactcactatcacaagaacagcaa

SEQ ID NO: 844448 - DNA, 624 bp, Homo sapiens
atttaagactgggaaaagtaatgtagttagccttaaggttaagggtaagacttctgggttcagattttgcctctgccatttaatagctctgcgaccttggacaagttatttaacttctctttacttcarttttctcatctgtaaattaaggatgtacacatgttttaaggaataagtaagttcttatttagaagtcactgtaggggagacagaacttttcttctatcctctgagggtttgataattgcgtctttgaaataaatggacaatagacatattagcaggacaaaagatcccaaatttattacgtgcatgggggcatcacagaaaaagaaaagtgaataccccaaaacccagtgagatatagaagcttatatgccttcttcataagggaaagtcaatgatttggaggaaagataagggggtcgttagaagaatgggtagcagcccgtctgcgagtggtgtagacatccattttcctcacctttaatccaagttaattcttcctggagaaaggaatcatgacaattgcattcattttgtagaatctgtctataggcagataagggaaattcagaaaaatctcctccatgcgtttgctgtttcctgactgccctcagtttg

SEQ ID NO: 844449 - DNA, 624 bp, Homo sapiens
atttaagactgggaaaagtaatgtagttagccttaaggttaagggtaagacttctgggttcagattttgcctctgccatttaatagctctgcgaccttggacaagttatttaacttctctttacttcaattttctcatctgtaaattaaggatgtacacatgttttaaggaataagtaagttcttatttagaagtcactgtaggggagacagaacttttcttctatcctctgagggtttgataattgcgtctttgaaataaatggacaatagacatattagcaggacaaaagatcccaaatttattacgtgcatgggggcatcacagaaaaagaaaagtgaataccccaaaacccagtgagatatagaagcttatatgccttcttcataagggaaagtcaatgatttggaggaaagataagggggtcgttagaagaatgggtagcagcccgtctgcgagtggtgtagacatccattttcctcacctttaatccaagttaattcttcctggagaaaggaatcatgacaattgcattcattttgtagaatctgtctataggcagataagggaaattcagaaaaatctcctccatgcgyttgctgtttcctgactgccctcagtttg

SEQ ID NO: 844450 - DNA, 616 bp, Homo sapiens
ttataacaacctatgcttatrtaagtgagcaaagacattaccagaaactggaacttatattgaaaacggaagcagagtgtagaaatttggaaaatttgtagcctggccatgtattagaaaagaaaagctcatttttatatgaagagtttaggctggctgagaaattcgcataagttaaaaagccaaatacctatttccaagataatggggaggcctagaaggctttttagagaactttgtagcagcccctcccattacacgcctggaggccttaaagggtagaatggttttgtgggccaggcctagggcctgctgtcctatgcatcctcgagacaccgctccctgcattccatccactatagctctagccagggctcaaaagcgcccaggtatagctcaggctgctgcttcagacaatgcaagccctaagtcttggaggcttccatgtggtgttaagtctggttgtgccaaattcaagagttgaggcttggaagcctagattttagaggatgtatggaaaagcatggatgtccatacagatgcctgcttcagggatgtccagatagatgcctacctacttcagagaacctctactagggcagtgcgaagggaaaat

SEQ ID NO: 844451 - DNA, 669 bp, Homo sapiens
atacatagatagacaaatattggctaaaataatttttttcggagctccgaaaatagtcaaaggtctatagtggtcaaatgaatgcctaatcaagaaaaagccacattcaaaacattaggaaatgtgatgtttttactcacttttgcctcacccatttcccaacgtggcataatgcagcagtgaaaaagcaacaacccagttcccaattccttccctcaaaatagagggagcagagcagacattttttcattgttctaacttgtctgggggtggcctgaaagactgattgcaggacacaaaatcaatgcgcaaaaatcagatctctttctgtacatcgataattgacattctacaaaggaaatcaagcaaacaatcccagttataagagcatcaaaaacataaaatgctttggagtaaacaacctaagaggtaagacttgtacactgaaaactataaaattctgctgaaggaaaaagaaaaataaatagagagatctctcatgtttatggattagaatacaatttctattgttatgatgtcaatactacccaaagtgatcaacagcttcagtacaattcctatcaaattcmaatttctgatgacattttttgcagaaatagaaaaatccatgctaaaattcatatggactctcaagggatgctgagtatt

SEQ ID NO: 844452 - DNA, 581 bp, Homo sapiens
ggtgtatatgtgccacattttatttatccaatccatcactgataagcacctaagttgattctatatataggctattgtgaatagtgctgcgatgcccatgtacatgcatatgtcattgttcttccaaagtagctcaagaaccatttattgaatatggagtcctttctccattgcttatttttgtcagctttgtcaaagatcagatagttgtaggtgtgcaatcttctttctaggctctctgttctgtttcgttgttttatgtttctgtttttataccagtactatgctattttggttactgtagccctgtactatagtttgaaggcagttttgttttttgtttttttcttagaattgccttggccattctggctcttttttgattccatatgaaatttaatatatttttttctagttctgtgaagaatgttattgttagtttgataggaatagcattgaatcaatacattgctttgggcagtattgccatttaaataatattgatccttttttttccatgagcatggaatatgattccattttttgtgtcatmtctgaattctttgagcagtgatttgttg

SEQ ID NO: 844453 - DNA, 563 bp, Homo sapiens
cgtgatgcaagcactctcatgtccatcacagctagaacaacactgagtgacacttgaatcctgcatagtactgggttgtcccaaggcccatggtgactacttcctggctatcactgatgtttattcaaggcaaaagagatctttagacagcacgtagtgaatattaccaggactgagttcttccctgtgtgacagcaagttcctttgtgggtccacagcagatccaaaaatgcagtccagctgggcgtggtggctcatgcctgcaatcccaacaatttgggaggccaagatggggggatcacctgaggtcaggagttcgagaccagcctgaccaacatggagaaaccccatctctactaaaaatacaaaaaattagccgggcatggtggcacatgcctgtaatcccagctactctagaggctgaggcaggagaattgcttgatcctgggaggcagaggttgcagtgagctgaratcactccattgcactccagactgggcaacaaaagtgaaactccatcacaaacacgaaaagccgttcagtagctagggcttagcaatagg

SEQ ID NO: 844454 - DNA, 631 bp, Homo sapiens
aacttctagaaaggattcaccaatctaggtttcattaactacgtgtgtgattgatatgagkaggtcaaaatatctacattaataggagtttggaaaaatttgagaccaaatctcatgaatgactttaaagggtccataatttaagagaagtgggtagctgcagatgtggtctaaatagcaggagaaatagaattagaaatgaatccttgagatgtgatggaattactgtcatctcatgaaaaaactggaacaaatgaggagttgcttcttatgaatgagcaaaaaaaaatgtttcttgagataaagtctactcctggtgaagatgttgtgatcattgttgaaataagaacaagggatttagaatattttataaacgtggttgataaagcagcaagaaggtttgagaggattgactccacttttgaaagaacttatactgtggctaaaatgcttttacacagtattgcatgctacagagaaatgacttgccaatttatgtgacaaacttaattattgtgttatttaagaagttaccacagccaccccaaccttcagccaccatctctctgatcagtcaggggcaatcaacaaaaaaacaagaccctccacagcaaaatgattatgacttact

SEQ ID NO: 844455 - DNA, 567 bp, Homo sapiens
taaaggccaaggagtcctacaacatgmcaactgcaagatggagacacaggaaagctgctggtttaattaagtttgagtacaaaggcctaagaaccaggaaagctgatgatgtaactctcaactgaaaacaaaggacctgagaatcaaagggggcaatggtgtgagtctccagagtctcaaggccaagagattctttgtgcaagagcagaagataaatgtcccacctcaaggagagggtcagtttgcccttcttctactcttgttctattcagactttcaatggattgggtaatgcctgcccacattggtgagggtggaccttctttactcattctaccaattcaaatggtaatgtcttccagaaacaccctcatagacacaccccaaaataatggtttaccagctatctgggcatcccttagcttactgaagttgacacataaaattaaccatcataccctccccaacttttctcttagtttttaaaattgtttagttaacttatttttgcccatattaattgtgacttgtgtcttattttctagttagaggttgctacactaaagg

SEQ ID NO: 844456 - DNA, 670 bp, Homo sapiens
ttcagttgtgtatgtctttatcttcatatgcccataggttctcaataaatgctgaatgaatgattgatccagaaaatagatggagtagtgagaagtagtgagaatatgacaayaaaggagagatgatatgtaccctctcagctattactttgagttacacttacagtgagtcctacaaaacaatgcaacatataatcaagatatatatgttaataaaatatatatgttaaaaatatatttttatatttattttataaatataatcaattataaaaatataatttaaaatatattttatgacttttcattcataatctttaccaaccaaaacatttaaatacgtctccattcaaaaatatctgtgctatgcattattgtaggccctgggatttcactggagaatattacagttaaggtactcttataaaatttacattgtagtggtagtaatggattacataaaatagtaaacagataaccttagattgtgatacatgctaaacagaaacgataatgtgatagcaaggctgggcaggagcattgttaggaaagagctctccaaagagttggtatctgaactgaaacctaactgatgagaaggagccaaagagttggtatctgaacttaaacctaaatgatgagaagatacacctaaagagcatttaggcta

SEQ ID NO: 844457 - DNA, 592 bp, Homo sapiens
tgcagtggttgataaaagccagaaagcacgctggcatacatttacattggatgaaataccaattccrtttagctacagtatgagacgcttcttttatttgcatgggagatcaaccatataaggcataataacttctttcagaagttcattgctagtcccatactagcttctcccagcaggaatggctggcagctcttcatgcagtaagtggaaagccacagtctgtcaaagaatcaagcgctaatgaaataaacaaaaacttttcttacctgaggcaggtgccaaagcctgctactctaagtgcccccactggacacaatttagacttgctttcaagtgttaaaaacaaataggttctcctaagtgcaattaaaactaagccacacatcgaatctgttgatactgatggagctattttgattccaaggctcctaagagtggttcctgagactatcacataatttggtaattattgttttacgctaatatatgacaaggaatttcaaaaccagtcatgagcttccgagacttttataataaccttgaatcaacagtgagtatttctccaaagaacaaagtagttaccatgcca

SEQ ID NO: 844458 - DNA, 563 bp, Homo sapiens
tgttagtattatagcaagctaccggaggtcaggccgtaggatcaaaaactaccaatggtcattttctgatactttagaaactaatctcttaagtgaggtctaaaatgagtcataccaaactgcatttacagaaggactccattatattttgaagttagagcaaggaatgaacactttcaacaaataaaggactaataaaagggtaacagaatgggtattatcttggtaaaactcacagtaaacgtcactctaaagctacaattaacctgattttgtagtaccatagtagtttgtcacatatttatgcctgtagtccatgaaacacccttaaatgctcattgctgaaaaatttccaccaatgtgacaccagcactgataaattggagttatctttagcttttcagagtataaaaagcagtttcctttaaaaaaaaaaaaaggtttttatgttgaagcaatttcactgttggctatttatcttcctccccsctacccaaatgaggcttgctaaaaaggaaaaaaaaaaaaacaccttatgtgtacttaagagtcaactcttgtat

SEQ ID NO: 844459 - DNA, 571 bp, Homo sapiens
tggaactgggctcctcccgactccccagggcaggatgcgaggctgctttcccactccgtccagatgtcagacccctgcccgttgggcccagcagctgggccgtcactcgcggtccgcctcgagtgctccggcaacctcgccctgccccgtcggttcagggtcgcccagtccccgcgcccccccgaccccaccttccgtgggcctgctgcctctggccctgagtcacttcccccgccatgccccacctcgcccagtccgcctctccacccaggctcccgcggctcggcctccctggccccgcgccctcatcccttccccagcgaacacgcgggcgcatccttccccacccccaccttcaccccagaactgagggggtgcctgtgcttttgcacaccctggggaaagtccccgggtcacgcggttgtttgtggggagcctgtgacgctcaggcttgtccctatgcttccgcctacagagtcacaactgckaactgtggcggcggcactcagagcgcgggccgacccccgcccggccactgaggcgggcgggcgggagggcgcgcacgtacgca

SEQ ID NO: 844460 - DNA, 479 bp, Homo sapiens
cagcattggccatcaccaaagagatctaactatggcatgtgcctgccaccaaggaggttttcatatctaacttggaaaacacagagaacttttactgaacgtgttcatcaaaattctgccaaagctttcaggatgtcagggttcctcagacatttaaaggcacatccttctacttctcaagagacatgaaagcactaaattaacagcacccaaactgctggttctactaaaatctttaatcatagagatacgcagcataatgtgttgtagtcaaatattaagtgtgcacatgagacaaaacagggaccaccccccacacttagggatctgccaccccacccccacccccaaacatggaaataaagggaagccttgagttcytgtaagggaaattccaggcacctagctagccctgagaagtaaatgagcaacttgataagaagataacagtagcttaaaagacagccaaggaagttaga

SEQ ID NO: 844461 - DNA, 634 bp, Homo sapiens
aagtagatgcaacctttcgattcttttgaatttttctcatctttataggaattgagaatatattaacctcaggaagttgggtcaagtaaaaatatcgtctcttgaataccttcrtggttactgtgatggtgctatttacatttgccttatgcaaccagccttgttttatcacaccacccttctgataacataaagcaggtaagtccttatctttctcacagtcttcatctatctcaaatacgtgattaggaattttttctggtctcaaagtttaccacgtgccaatctgtgctacaggttttaatacactctttgacaaataaactctgggccctcttttcgtcttctggtacagtggattgcaccgttctgtgctgacgacccatcaccgagacagatatatcttccttgggaaacataagcagatctctgagggggttgctgtaaatctgggtttttatttgggcgataacattctcatagtccagggggtcaacaactttggacttttccagcaccaaggagccccacacggcctctgacactctgccagagttcagctgctgtgcccaatttacatcttttatatgtcatgtatctattaacaaattattgtagctattgttttttttaa

SEQ ID NO: 844462 - DNA, 508 bp, Homo sapiens
gaaacctctcacttacgagcatggtgtgaagctcgcaaaagcggtacagtcagatttgaatttcattttaaatgtatgctgagagaagagtgtgttgtatgctttggaaatgggtgtgcaacaytgggttttgctttaaagtgcaatgtgtttagaatcttctctaagctttctattctccccctctgttctagtcgggctggaaggagccatttggttagccttcttgtcagccagcattgtctgtttttcattcagaaagcaatttggtgaatttaaacagctgaagcacttatcatttgatttagcaacctctagaacatctacttgccatatttagtatgaatatagggagtcgttagatatatatttgtaaatctcactgcttattatggatgtagctcatttaaataaccccataagaggcattttgtgattttcttgggagagacttgggttagcatctggcagggttatatttgtccagtatttctcaccatataatgaa

SEQ ID NO: 844463 - DNA, 526 bp, Homo sapiens
taagaactcaccaaccatctactgccttcaggagactcacctagcacataaggactcacataaacttaaagtaaaggggaggaaaaaggcatttcatgaaaatggacaccaaaagtgagcaggagtagcaattcttatatcagaaaaacaaactttaaagccacagcagttaaaagagacaaagagggacattatataatggtaaaaggccttgtccaacaggaaaatatcacaattctaaacatatatgcacctaacactggagctcccaaatttataagacaattactaatgaacttaagaaatgagatagacagcaacacaataatagtggggacttcagtactctactaacagcactagacaggtcatcaagacagaaagttaacaaagaaacaayagatttaaactataccttggaacaaatggacttcacagatatatacagaacattaccatccaataaccacagaatacgcattctattcaacagtgcatggaactttctccaagatcgaccatatga

SEQ ID NO: 844464 - DNA, 540 bp, Homo sapiens
ataaccaccgcaaacctatgaactgttttattacctaccctttctgacaagttaaacaaattaaacatggctttccagctaagcagcgatggagcygggattcaaatttggctctggctgactgatttgcactgtatcaggctgctttagccactttgttatactgctcccgtgagaaaccttggcctaaagtgaggggatcattagatcacccttatagaaatatctgagtcctcaccagctgagcccatgcagctgatgcgtgtgaaatttcaaagcttaaagccgtgagtccataaaagagaatgttttttctgaacttatcaaaatgctcatttacccagaaccatgatttctgatctgctgaaccaaattactggatttgaacatctcaatctttagaaatatgcctgtttgccttactcagtcactgcttcttaccttaacaacactgaagagcctgcatcggagtgatttatagatagaaatttctcctacgcagagatggccctgacatttcatgaacaatgaagccagaat

SEQ ID NO: 844465 - DNA, 565 bp, Homo sapiens
tggtgggaatgtgaattaatacaaccattatggaaaatggtatggagctttctcaatgaactgaaaatagatccaccatatgatccagcaatcccacttctagattatttagctgaaggtttgaaataattaattgtgtcaaagaaatgtctgaacttccgtgttcactgcagcactattcacaatagccaaattaaacaatcaacctaaatacccatcaacagacaaagaaagaaaatgtggtacatatacacaatgaaaaaagaagaaattatatcatttgcgacaacatggacggtattggagaatattatgatacgagaaataagccagaaagacaaatagacatgttctcacttaatatggggagcctaaaacaactgagctcatagaagcagagagtagaatggtggttaacagagaggctggaggacataggaggaatggggagacaatagtcaaagggtacaaagcctgagttagataaaaggaatacgttcgatttttttggacctaatgcacagcacgrggaatataactaataattgagtaccatacatttcaa

SEQ ID NO: 844466 - DNA, 635 bp, Homo sapiens
gttttacagtctttttatcttttggtctggcttccccagggtcactcctgcatagctaaatgtcagaggaggctgtgctagttaaacacctcragcctctcggagggcttctatgcaccgcgggtggatctgagtgtaggctaagcagctcactcaatggccagtctcatgtttgtctaggcttttccgtcccatggggcgctctcaagtctcagccatggcccttctatgcctctctgtttcaggaggtcagcattaaatttctgctgaccaccacctgtcctatctggaattgcaatctcaggctagcaaaacggagttttctccgtttgtttccttccaagctcaccacttttagttgacatcatgggttctgcaccacctaacctccaccattgttcaccacctcaggcaacaaagctgctggttttcataccagctcagggctagaaaagccaggaggtttgaggggtgacagaagccccaggtaggaaggccacagactccaggttcccacccaaagctctagaagcttttcaaaaataacccaatttcttctctgcctttggtcaatttctagagaccccaaatggttggttttgacaactttagttttatacttgtttcttgcaagg

SEQ ID NO: 844467 - DNA, 635 bp, Homo sapiens
gttttacagtctttttatcttttggtctggcttccccagggtcactcctgcatagctaaatgtcagaggaggctgtgctagttaaacacctcgagcctctcggagggcttctatgcaccgcgggtggatctgagtgtaggctaagcagctcactcaatggccagtctcatgtttgtctaggcttttccgtcccatggggcgctctcaagtctcagccatggcccttctatgcctctctgtttcaggaggtcagcattaaatttctgctgaccaccacctgtcctatctggaattgcaatctcaggctagcaaaacggagttttctccgtttgtttccttccaagctcaccacttttagttgacatcatgggttctgcaccacctaacctccaccattgttcaccacctcaggcaacaaagctgctggttttcataccagctcagggctagaaaagccaggaggtttgaggggtgacagaagccccaggtaggaaggccacagactccaggttcccacccaaagctctagaagcttttcaaaaataacccaatttcttctctgcctttggtcratttctagagaccccaaatggttggttttgacaactttagttttatacttgtttcttgcaagg

SEQ ID NO: 844468 - DNA, 574 bp, Homo sapiens
cagaattcaaatgcacctttaaaaagtggctgaatctgatttactataagtctacaatatgtccttgtgtgtagctgaattgccctctgtgagatggaagaccagtagcttaacmacagttccttttaatattttattacttcccttaacaaggccttgtagccaagaacctacattttacttttagtttaaaggtctcagaaaactttggaaaagtcaggaatcaaaatatagaagataaaacccatcaaacagcaacaaatcataatgctattctaagacctacttccaacaaaaggctctttgttctttacctaggtcgacgtttatttctttctgaactttcctggaggatcatcggccatactccagcagaagggtggatttgaaaaaataacgtaagtttgacgctgtgctccttaccttggtgagaagggcgggagggtcaagagaatgtcttcctagtcagccggtgattggtcccacctggcttatttgcttcctggtctttcctactgtcagaatccaggcagctgctggtgactgtgatgaggaggtgggcaagcaaatgggt

SEQ ID NO: 844469 - DNA, 481 bp, Homo sapiens
ttcccaccctgctgactttagctttttggctgtgccgcttgatttgccaaataaaagtgagtgggagtgatatgtgttattttcaagtggaagctttcatagccamtgagtgttctgccctctccctttttccttcctgtcataagcctggtaatatcccagaaagggatttctccatcagcctagatcccagaatgaagattaggtagaatcaaagagccaagagcctcagccaacgatgaagggtacgtaatatgactgggaaatgcctaaatatgcaaatgtaaaatatgtgggtatatgtaaatgtaccataggtgtatatatgtacatatgtgtgtgcgtatatgtgcacatatgtccctgtatacatttgtatgtatctataggtacctatatttcatgatttaacactaggggtcagggatagttgttttcctttagcaggggctttgtaaatcacttaagaaacactggccta

SEQ ID NO: 844470 - DNA, 577 bp, Homo sapiens
aacatcaattttagtcttatctctaatgtttcycttctattcaaacacttccttcaattaactccatactagatttcgaaaacaagtcgtttccttgtttcattttattcccttttcttagaaagtcacctctcttcttttcccttattgaaattctatccatccttggagggagagctacaatgtcattttcctggaggcccatcccactattacacaagacaggttacctacctttgtaacattgaggtttttctgctaattagactcttagctcagatatatttaggttggtgagtcatttgtgcactttgttcttccagagaaaaacattgttgtctgcatgtctttatgtgtgcatagtgtgtgagagagccctttacaatcataaatgctcaatctaggttaatcgaaagaataaataaataacgaatgatttgtttggaaataaaacaaacactggctggggtagcagcgaagctgtaaaaggctaggctggggacctagtctggttgcctgttacatgcatggcttgggaaaataatttaacctctctgaactcagtttcttcatctgt

SEQ ID NO: 844471 - DNA, 622 bp, Homo sapiens
ttgacttctaacttaattgcattatactcagcaaatgtgatcaatatattatcagttctttgaaatttattgagacttgcttgatgttaaattttccacaatcttccatgtgtgcttgaggactcctttcccaccaacctctttcatgtctagtttatccttcccatatttcttttgcacaaatgagcagattcacatatattttcttatatctctttttcttacataaatgtctaccaccatatgtttcaagaattttcaagatgttctatttttataagctgcttttttcattacttttacgtctgattttggattaactagggacttttccctctcactgtgatgagaaaagtataacctctatatctgtatttttagtaattatgcttctatttttaactctcatacttggttcatgtctaaaggtaattcacatgtcaacttttctctaaacaattccaggaacttcataatctcaaaaaaaatgtttattgattgcctgctatttgttaaggactgttctatgcactttacttataacaagtcacttaaggtctcagaagttaasaaatttgccagggtttcaaagatatcaattcacgagactgagattcaagcc

SEQ ID NO: 844472 - DNA, 580 bp, Homo sapiens
gaccttcttatcctattcttattaatgaatatttgtgatggttaattttatgtgtcaactgtactgagttatgaggtgaccaaatacttggttaaacactattgatcttctcctgtccttggactaggacttacactcctggttctcaggccgtcagaattagactagaactcacatcatgggttctcctgattctcaggcctttggacttggacaggaagcacgtcaccagctttctgggtctccagcttgcagatggcagattataggacttctcagcctctataatcatgtgagcaattccttgtaataatctctttacatatatatatatatgaatatatatggttttgtttctctgtggttctttttctctacagaatcctgaacaatacagattaggtacaaaattaggctttattattgttttagtcaatgttagtttcagtgaaataatgtttcatttatgcttcatattttaaaaactcatttgtatctactttcctctaatatgcatgcatacagacatggtctattgatttgytgatattttctgtattaattttaaggacttttatat

SEQ ID NO: 844473 - DNA, 661 bp, Homo sapiens
ccaggtgctgtctgtcacccctttctttgactaggaaagggaactccctgaccccttgcgcttcccgatcgaggcaatgcctcgccctgctttggctggtgcacgatgcgcacacccactgacctgctcccactgtctggcactccctagtgagatgaacccggtacctcagatggaaatgcagaaatcacccgtcttctgccttgctcacgctgggagctgtataccggagctgttcctattcggccatcttggctcctcctaaaaattgttttaaagtttgtattggatttgaattttagaggcttgctaactttcctttaatagtaactctctgactatccttacccttttaccaaccaggctagcaaagttgaaccaccagttttaatgttctcacttttcatctgtggacctagacatgaaaacaatggaggctaagatgggatttttgagttaacctgctctccactgactttttgagtggacggtggaggtacttctcatgaaataccaaggtagaaagtgaactttacccttgttgcattttggcatggcttgcttacagcttttattcatgttaaaaggtaaatttatgacatggaaataaatagtcataagtttagattacggatccsagctgtcagactctccagccaga

SEQ ID NO: 844474 - DNA, 616 bp, Homo sapiens
ctagttatatttttttattttggtaaactatgcataacataaaatttactattttaactattttaagtgtacaattcagtggcattaagtacattcacttcattatacagcagttactgccaccctttttcatcttctcaaaccaaaacattgtatccattaaacaatagctctccatttcccatttctccactgaattagttatttgaaatctacccattttggtattttcttacttgtcttatttgctacttttataaatgaatatatattaggtactccttatatatatggaactgggccagatgctgagcagggttgaattacagttataaagaaggctgcacaattttccatgatattacgtggtttcctgggtgacagagtcttgttgcatcacattctttatcttacatccaaactacaatccaattaaatgtgcaaaagtacacaagctgatttttgtttcagaggttaccaggaaaataattacaccagtctgacaattttaaatcaagattgaagtattgctttggtttcttctgagattttgagtacctaaatgaacatatttgcaaaattattaaataygaaagtgggtggtagtttggttatt

SEQ ID NO: 844475 - DNA, 569 bp, Homo sapiens
aactcatactgatagtgttatttaatgtttaggttttttttttaatttgaggaacctcttttatatgaattgtaagaattcagtgtactttaagttttcttcttccaaaggtaatcctaaatattattgcaaataatgatgctcattagccaatttgctgtcaataactcatttcggtggcataatgttctatgttatctttgttgatgtcaacattcctaattaaactggcaagaaatttaattacatttcaatacagttcatataactcactcctcttcattaattgactcatcagacaaatacaagagcctgttcattacttctaatagaactttatctcttcctgttattactattttgatttatgatctaaattttaattactttgttatattgtcttgtttcattatttcttgatgtcataattatttctattaatcccattgrcctttattattttcatttcatcttgcattcgacaattgtttgatttttctctaacatgttttgttttaaagatggataaaacaagagaagataaaattcatgtatttcaaatcaggaac

SEQ ID NO: 844476 - DNA, 623 bp, Homo sapiens
atttgacgcctacttctccctatttaaatcacattatgttatcaattttcttcatgacttttcaattsttaattgtgcccttggagcttttctgagccctgtgtctgggatggagataaaatggggaaaggggaagagatttctctctctctctccctccctccctccctctctcaccctctctttcccactcgctctctccctctttttccttccctttattccattatcctcagagagtagtcaatgttacattagcagtgatgtgcacaaatagaccccataataagtgcttgcttggatgcagaggacctaaggaaaataaaagacacactgtgaatgcttaacgtttaaacagaaaggaactcccccacccaccaaaggacacttataagcattcctccctgacaggccagggcagctacaagggaaggtagctacagacctaactccccaggaaggttgaaagcagcccccagaccccaccactggagctgcaaggcagcggggccaggcacttgcctgccaccagtctaacctgttttgtcaggccagggagctcccagctgtctgtctctgttatgtgattaagtgccatcctaaagttactgggccctacatgt

SEQ ID NO: 844477 - DNA, 398 bp, Homo sapiens
agaacaatgcttttctcccaacaaataacaaaatagcatttttctctcccatttctctcaggtaaaggaaatctggaggtaggctgtccacaaatggtwtggtatcttcgggttgtcattgagcactcagtctcatgttttcatcctaccatacacagcacacagctttcattttcaaggtcacatcatgatccagattcgctggtggtgcttcagccatcaagtctgttttgcaggctggaaagaagaaaaaaaggggaaggacaaaaggtcatgcactgttaaagatcctagctgggagacctgcccagagcttccactcacatttcactgaatggatcttagtccatggccatactttgctgtaagggagtctgggaaatttagtgttttgtttt

SEQ ID NO: 844478 - DNA, 572 bp, Homo sapiens
gtgtgctgtattcaggagacccatctcaggtgcagagacacacataggctcaaaataaagggatggaggaagatctaccaagaaaatggaaaacaaaaaaaagcagggcttgcaatcctagtgtctgaaaaaaacagactttaaaccaacaaagatcaaaagagacaaaaaaggccattacataatggtaaagggatcaattcaacaagaagagctaactatcctaaatatatatgcacccaagacagaggcaccaagattcatgaagaaagtccttagagacctacaaagacacttagactcccacacaacaataatgggagactttagtaccccactgtcaatattagacagatcaatgagacagaaggttaacaaggacattcaggacttgaactcagctctgcaccaagcagacctaacagacacatacagaactctccaccccaaatcaacagaatatayattcttctcagcatcacattgcacttcttgcaaaattgaccacatagttggaagtaaagcactcctcagcaaatgtaaaagaacagaaactataacaaactatctca

SEQ ID NO: 844479 - DNA, 519 bp, Homo sapiens
  misc_feature 402, 406, 470: n = A,T,C or G
aactgcacacaccatttcacaaaagactaccccaccgaaagctcagtttcagaggaggttttagttaaatgaccgtaaagtagatatattttgagatactgcaaagtggaggtgaagatctgcrgccctaggcactagggtttgactttttcagtgcttcaaatgtacaagtcatgtttctttcttttcttttctttattggcaatttatttttggttaagcaaacattattcacaaaataaaactaaagggtttcaaatacaaattaatatgtggctgcatcatgtaaacatgccaataaaataaacacaacaattctattctgtgatttatcattaggtttctccccagctttttaaaatgagaagatcacctgagcccgggaggctgaggctgcagtgnagcncattgttactgggggtccttgttcttagagctcctaagatggtggccggccacttccaagatgngtggcaagcctcttgttctctgacctggggttcttggcctcatggattc

SEQ ID NO: 844480 - DNA, 620 bp, Homo sapiens
tcctgcatgcattactctgggcaatctaaagtgaaaagtaatttgaaatacatgagggactgtaagagtattcatattcttaaatcaagaattccccttctgagaattcattcccagawaatcaatcaagatattagggaaaaaatgaagctgttctctgtagaattatttgaatgacagctctgaaaatgtagctgtccaacagttggggaatggttaaatcaattttaatacctttactttctagaattttgtacatatattgaaacttgtgacatatacatttttaaaaatgcagattgaaaattgaagtactgatacatgttacaacatggatgaactttgaaaccatgctaagtgaaaggtggtcggcacaaacaaccatatattgtatggttacatttatatgaaataattagaataggcaaatctatgaatacataaagtgatgaatgattgcctgggactaggtgtgtggggtggggtgcaggaatgaggagtgactgctagtgggtacatggtttctttttgaggcgataaaaatgttctaacttatattgggatggtgctcgcatgactctctgaatatactaaaaaccattgaactgtacactttcaat

SEQ ID NO: 844481 - DNA, 611 bp, Homo sapiens
acttggtgataggaactagtcagtcatgttttaaagacatagcatggtccaacaactacaagattcttaggatagaaaactgatratgataggaaccaaaatattaagcaagatcagaaacttccatggtacattgaccttgctatcaattataaagagtaccacagtcttggcaaatagcattcccagagaaaattaataaaaattagcagacagcatttcaaaaatagctatacagtgcatattatctacttctgccaaacacaatatcattctttcaaatgatttaacacattccagcctccttgtgtgtccttagtcattaagtctgtccttaatactctccacaaaatcacattgactttggctcagccactttttgctaccccattgacttttacccacggggctctgcaaaggtgatgctatgcctatgtgataagagcatacttattctgtttgtttagaaagctttttgcatatttgatattactgacaacaaaaatttttgctattatgcatgaagtgaaataaaatgaaacagcctatttaatttctttcataaaattaacactaaatatcccaaagtagcccaacgagatcatcaatat

SEQ ID NO: 844482 - DNA, 638 bp, Homo sapiens
atgagagagcaactgcaggaagcagccattgagggctgagggaacaaagggaagaggttggtattattaaaagttagaaactgggaggaagagcctcaaggagctgggactcagacctctgaggaggaaatgccagctggcaagtgctggtgtcttttgggggacgtgatgagactggttctgcaagggttgaaaaactgaaaactgaagtcagtttcagttgctggaactaaatgctgctgccagggtaaagtagcacgttgagacaaagctacctggaacaggagctaaaccatgaacagagaggaagcatgaaggagcatgcctcttcctctttcagccttccagtctccctctagtgcccctgttggctaagcctgacatgaagccttctggccaagaaaaaatgtggtttacagagtctcagttctagcatcagaaagcagagcttggaagggtaggtttgaagctggtagacagtagcttaataattgacataatatgagtcagtaataatgtaatatagctataggatgtatcattagaagtatagagcctagtttgagggaggtgatagttactttttacctygaactggtcagatgtcttgtattcaggtgtatgtactagaatttaaa

SEQ ID NO: 844483 - DNA, 622 bp, Homo sapiens
aaccctttgttacagatattcattggactgagctttaaattaaraaaaaatgggaccttctcaaaaacataatgtttgttattgcctcagtatgtcccctctaaaattcagatgctgaaacttaatggccattgtgatagtattaagaggtagaacctttaagagctgattaggttatgagggctcctctctcaaagatgagattaaggcctttataaaagaggcttcatacagggtttgagcccacatcccaccatgccaggacaaagtgttccctcctctagaggaaccatcttggaagcagagagccaccctcacagacaacgaaacctgccggccccttgaacatctcagtattcagaactgtgagaaaataaattcctgttctttagaaattatcatctcatgtattctgctgtagcagtacaaatggactaagataaccaagaagtaaaaattaagtatttaagacatattttttctagaaaattctcaaaataaaaataaggaaaaaactacagaatcattgagccatgtcttgaaaacacatgcacacattaacaaatggaatatattcaattattttatttctatattctagattcaatcatattcagtgtgt

SEQ ID NO: 844484 - DNA, 568 bp, Homo sapiens
tctaggttttgcatacaagaggtttaagttatatcattctaggatgacttagggcatttggtgtagagtaccaagccaggagtccagtagaacattctcaattgcaaatggttgaatatccaactccagatggcttccttaagcaacaaaaggagtttcttagtttgagcagaggttgatccagtgagtcaataatgtcaccaagaaatgtgtgtgtgtgtgtgtgtgtgtgtgtgtgtgtgtgtgtgtgtatgtgtgtttccatgtgtcttttctgccatctatatcagtttcaccctaaggttggagagtgactcatgctcacatgatggctgccaacaattacaaagttaatctttttctcatatacatttaaaatttgacaaagagataaagagatatcttgttcttatctcagccatttagtttgctaccatgyttcaccctgttctgactgaatcctaattgatcgatcacatgcttaccctggaatcaatcactgtgacaataagagcacaatgatctgactggcttctaccaactaaggctcatccctgtaaccagtgat

SEQ ID NO: 844485 - DNA, 582 bp, Homo sapiens
caagcatcgtttcaggtattaattgtggctatttgtgtatcttcttcagagacatgtttactaaaatcttttatccattttttacttgggttggcttttgagttttaggcrtttattatatattctggacattaatcccttgtcagatatatggtttacaaatattttctcccattctgtcagttgtcttttcactctgttgatagcatactttcatgcacagaagttttaaattttgggccgcgtttagtggcttatgcctgtaatcccagcactttgggtggctgagatgggaggtcaagggttcaagaccagcttggtcaacatagcaagatgcccatctctataaaaagaaataaaaaagaatttaaaaaaaccaaaaaaataaatttttaattttgatgaatcccaattcgtctactttttcttttccttctttccttcctttctttctctttcttgcttccatttcttttctttctttctttctccttccttccttccttctttccttcctttctttctctttcttgcttccatttctttccttccttccttcctttttttctttcctgagacaga

SEQ ID NO: 844486 - DNA, 588 bp, Homo sapiens
aaaaaacttatctttctataaagagtgctggttacatcataatgyttctctatcctaaagcactgttaatagacaattaatgacagtgatgacagtcagtgtctttgatttctgaagatgattaatattgatttacgtatttccatttatgcttccaaatgtgccctttgcgtacgtgttcatgattttgctgagatgagcttttctctttccctacactttcttcttccaaaaattaccacactctcaacctctcactgtctccttctcccttattattatcaccattttttggcggggaggggcacggatttgttccaaatctttagccatgcttaagaacaaaacagatgatgccctactgaaaaggagtgggggaaaagtggcacaacttgcttttgcacatagtaaataataccaattacttattgcagtgtttcctgaatggaggatgattcccacttacggaattgataattacagattgaggagagatgggatatggctaacacatgcacaggctgctgtgactctatgtggtccctgtggtccctctgttggctgtccaagactggagcatcttaggaa

SEQ ID NO: 844487 - DNA, 552 bp, Homo sapiens
aaaaagataaaaacatggaagacaggaaagaatatataataaaattagaggaccaatctaggaggtctgatatccaaaacatgagaaagaaaatgaaggagaagaagtaagcaatgaaataattctagaacatttcccagaattgtaagtcatgattttctaaattaaaagagcctaattaatgttcagcatagtgaatgaaaataacccaaaccacagtccaaaactcacataaaatcagaactctggggacaaagaggaatagcaataaatttccaggtataaaatcccacaaaaaccaaacaagttttcatatggaggatcaaggaatacaactagacttttcaaaagcaatattgctaaaagacaatgggagaaagaaagccttccaaattttgagagaatatgatttctaaactagaatgtttctgtttggccagtgtatcaattaatcatgaagggcagaataaaggcattttggtacccrtcagctttcaaatattttacttcccttgcacaatttctcaggaagccatataaagataaaaccca

SEQ ID NO: 844488 - DNA, 570 bp, Homo sapiens
gaaattgtattttaaaagatattgttatcggggtaaaataggtgggaagaaacctcatgagttccctaagaaaatatctttcaaaagttaaaaagatactcttacttatagtaagtaagctggaaccaatacagcaaggctgtgtaaatatataatatgtggtattaaggacaggctgaatgcatggctaggcctttatttttaagaaatgtgtatttaatgcattgcacttgctccttcagctttgttacactctgttggattaagaggtaacttagcaggcaagctaatttgaaatcacatacacatgcgatataaatggtagacatggctttcagaagtattatttgctgttcacaaatccatattatgcaaatatcaaaagaatgactggtattctcttgtagtcaacattttttaaattgtactggttccacactgcctcaacagctcctgcttctttttctcggggtttcttttgtgattcacastggactgtctcactgttctgagctgataggatcctattattatttacttcttcctttcaacacacccctgaggcagttc

SEQ ID NO: 844489 - DNA, 483 bp, Homo sapiens
ccgctgctgccactgctgcttgtcaggtcacactttgaagctcaagacgggagatgacttcaacctcctgacaaacccctttcctgtcctctcccccacctccacatttcaatctwtttataccaactcctttcagcctcctctccaacctgattctattacgatattattggcttagcacagcataaggacggcgattacaggatatgcatcttcccttctcacatctgaggcagacgtcgctaatccatcctggtactattttgtgctgagcccagacatagagacataatccctcttgctgtagtgtgccaagcagctccctccagtctccccagcctgtcacatgccttccctcgggatggtgcttgggactgttgtgagctctccatggctttatcctgcctcgtgggccatgcatgccggtgaagccagacggtgtgctgccttaacccacaatccaccaactgtgacaggctgacc

SEQ ID NO: 844490 - DNA, 470 bp, Homo sapiens
gggctggcccacctgccgggcaccctgacccctggaggttacatcctaatgggggaagataggcagtaagcgccaaagaagtaaataagataaygacacactgtgctaagtacttgggggcgataggctgatgtgctggaagacagttttagacagggtggtcaggacaggcttcctaaggatgtgacatttgaactcagatgaatgacaagaaggagccaggcgaagtaagagctagggagggaaagctggtgccaagaccccgaggttaacaggaggcgacagattttgagagacagaaaggccagtgcagatagaggctgttgagcaagatggggagtggtaaggaaagtcactggtaaggtgggcaggggtccaaccactggggcctgtggccacaggaaggagtttcagttttattttaagtgcagtgaaaagcaaggggaaggtctagaccttccccttgagag

SEQ ID NO: 844491 - DNA, 470 bp, Homo sapiens
gggctggcccacctgccgggcaccctgacccctggaggttacatcctaatgggggaagataggcagtaagcgccaaagaagtaaataagataacgacacactgtgctaartacttgggggcgataggctgatgtgctggaagacagttttagacagggtggtcaggacaggcttcctaaggatgtgacatttgaactcagatgaatgacaagaaggagccaggcgaagtaagagctagggagggaaagctggtgccaagaccccgaggttaacaggaggcgacagattttgagagacagaaaggccagtgcagatagaggctgttgagcaagatggggagtggtaaggaaagtcactggtaaggtgggcaggggtccaaccactggggcctgtggccacaggaaggagtttcagttttattttaagtgcagtgaaaagcaaggggaaggtctagaccttccccttgagag

SEQ ID NO: 844492 - DNA, 529 bp, Homo sapiens
aaacaacttcccacactgactgcagctgttagtcagcttgggattgtgaacaaactggtggctatagaggtaggagcgcctgctgaaacatttgccacaggtgtagcaaaaaaagggtggcccagcctgggatgcttgaagcacccgggtcctgtccatagtcccagctggggcagatagggggcactggccggcccctctgcatgcaaggaagaccttgtcatcactagtcccctcatctctcagactgggatgttgttctcgaagctctttcttcttgccttctacagtgaatgaggaagaataacacaaaattcactgtaagaactccaacagaggcttggcatggtggctcacacctgtaatcccagcactttgggaggccgaggccagcggatcacctgaggttaggagttcgaaaccagcctgaccaacrtggtgaaaccctgtctctactacaaatacaaaaattagctgggcgtcatggcatctgcctgtaatctcagctactagggagactgaggcagga

SEQ ID NO: 844493 - DNA, 501 bp, Homo sapiens
ttttcatggctggataactcatttctttgtagcattgaataatattccattgtctggatgtatagtttttccaytcacttaatgtaggagatcttgttttattacaagttttggcaattacgaataaaactagtataaacatttgtatgcagctttttgtgtggatgtgttttcagctcctttgggtaaataccatggagcacaattgctggattgtatggtaagagtatgtttatcttataagaaacctccaaactatttttcacagaggctgagccattttgccttcctgccagcaacgaatcagagttcattttgccttcccgccagcaatgaatgagagttcctgttgctctacatctttgctagcatttggtattgtcagtattctagattttggccattctaataggtgtatagtggtatctctctgttgttttactttgcattttcctgatgacatatgtggagcatcttttcatgcttatatgccacctgtat

SEQ ID NO: 844494 - DNA, 424 bp, Homo sapiens
aaacacagccaagcccctaatctctctggtccagcctgaacttgaatctggacttccttygtctactatttccttgtgttgtaaagaagctgctggccattggatctgcttcatttctggaacttagtgtctttccacttgagaggagtcattggctagccacacctgatacccatttcagagagccgggcagaaaacaaaatgtgtcctgtagattgctggagaatgagcctgtgcggctcctgtcctagccctccctccctacctccttaagaacagtaatagtgggctgggcgtggtggctcactcctgtaatcccagcactttgggaggctgaagctggtggatcacgaggtcaagaggtccagaccatcctggccaacatagtaaaacctcgtctctactaaaaatacaaaaattagct

SEQ ID NO: 844495 - DNA, 622 bp, Homo sapiens
tcagcctccccagtagctgggactacagtcacctgccaatgcgcccagctaattttttgtatttttagtagagacggggtttcaccatattggccaggttggtcgcaaactctagacctcagacgttccgcccacctcggccccacaaagtgctgggattacaggtatgagccactgcaccccgcccaaagttcttttgaagtggcttctttgtgtggggtaaatacccagggttcatcatctcacaccaagaaaatttagcacatggacacatttgaggagtttaggagtggaggtttaataggcaaagtaaagagaaaggagaacagctctctctctagtgaaagagatgagcttctgaaagggaaagaccagctggtggtagatgccccggattttataggcaggcttgaggaggcggtatctgatttacttagggcccacagataggttcgatcaggtgtaacgtttacatagtgcagggaaggctggccgccccaccctaatcttattatgcgaatgaactttccacaygaccggcaccatcttgtttgctccttactgtacacaaggctggcagagacagaagggaagctggggccatcattttgaacatgattgg

SEQ ID NO: 844496 - DNA, 488 bp, Homo sapiens
actgtttttccctgttactgtgtctacccgtcccagctacagcctgttataaaaaggtggccatactgttccttccaaaatcgcccaatgcctcccgctgtcactcagagtgagtgaggttcccctagtggcccctaaggactgctgtgatcatggtctgtgcctctgcacctctccagcctcatctcctaccaccttgcctccctggctcacccactgcagccacactactgcctcgcgcctacttaccgtcactctccatccgccaaatatggccatgtccgaattcccagaagctgcagattactttatgtgacaaacggacttgcaaatgtgattcaactaagaattttaaaatgaggagattatcccggattatccttgtgggtccaatctaatcgcaaagttccttacaagagaaatgcmaggagagtcggaagaaggcaatgggatgatggaaacagggcgagaagaggtgatgtgatgtg

SEQ ID NO: 844497 - DNA, 552 bp, Homo sapiens
tgaggatcccagaaaggttttgtttatrtggatgatagttattgatatttaccgtgttgtaagttaaagctgaaaaacatttaaatatttagaaaaatgctataataaatgtgtctattaacatacacaacatcttaacacaaaataactatattttctaaaaacaagaaatttagtaaaagtggcaatgttttatatttttacaaaatctttaacatctgacttagtagaagtcggcttccacatttaatctcttggtatttagttggggtatatggggcttttgttgttgttgttgttgttgtttttgaaacagagtcttgctctgtcatccaggctggagtgcagtggcgcgatctcagcttattgcaacttctgcctcccaggcagtaaatactgacaaatattaagtctgagtaagcatggtgtgtcagccagttgctctttcaggtaaaaactgctttgtgagggaggcagctggttcagctggcaactcaatcatacaagtgcttttccttccacaaccatcagactttggaatgcagccaaaga

SEQ ID NO: 844498 - DNA, 575 bp, Homo sapiens
ttctataataaccctatgaggtagtgttattaatcccatttcacaaataaagaagcaaaaacttaaaaagggtaagtaacttatccaaggtcatgtggatagttataaacaacagagctggaactccctccattgctaaagcccaggatgtggttggaggaggttgggatgctactagaaatttagaaattgcttactgaattggtgggataagtaaatgactagtcttggataagaaatggctagggttggggattctggagttctcctttactctgcttaaactaagacacacccagagatgaaatgaaaaaggaaacatagggtccaagagatggcacacaaaaattaaaaaatactcagccctaggaaatggaagttatgggagccaacgggcagaagaaaagtgatctgaggtcatcttctgttgcatcaccgtgcatttttggcaggatttactgctctggtgattgtcctcacttaatggycaagctcctactttagctttggcaagatcaccttaaaaatacaactattatacaaatactttttaaaaaccttggacggagtccaag

SEQ ID NO: 844499 - DNA, 575 bp, Homo sapiens
ttctataataaccctatgaggtagtgttattaatcccatttcacaaataaagaagcaaaaacttaaaaagggtaagtaacttatccaaggtcatgtggatagttataaacaacagagctggaactccctccattgctaaagcccaggatgtggttggaggaggttgggatgctactagaaatttagaaattgcttactgaattggtgggataagtaaatgactagtcttggataagaaatggctagggttggggattctggagttctcctttactctgcttaaactaagacacacccagagatgaaatgaaaaaggaaacatagggtccaagagatggcacacaaaaattaaaaaatactcagccctaggaaatggaagttatgggagccaacgggcagaagaaaagtgatctgaggtcatcttctgttgcatcaccgtgcatttttggcaggatttactgctctggtgattgtcctcacttaatggtcaagctcctactttagctttggcaagatcaccttaaaaatacaactattayacaaatactttttaaaaaccttggacggagtccaag

SEQ ID NO: 844500 - DNA, 497 bp, Homo sapiens
ctgctatatggttcttaacacagtamtggacataatacaagtatcaataaatacttactaattaattcttttagctctttgctactgccttggcctataattataaataagctatttttacatttgactgttattctctgatgaagaggaaagcaaaggatcttaactctgcttaaaaaacaatgaagtgttttggagtctgaagtcttgcattctgaattcacctttattattcattaactgcttgaccttggtcaaatccatttttctcagcatctcttttgtcatttgtaaaacagtaataacaatatttgcttcgcagaataaggaccaatgaggtcaggcatatgacagtatttgtaagatattctatgttatacaagtggtggttatttatattatcaatgagaagttgggagaaaaaaaacttccctaatgtccagttaggagacatgcatgtaaaaggaatgtggggctgtggagagctgagttaagac

SEQ ID NO: 844501 - DNA, 497 bp, Homo sapiens
ctgctatatggttcttaacacagtactggacataatacaagtatcaataaatacttactaattaattcttttagctctytgctactgccttggcctataattataaataagctatttttacatttgactgttattctctgatgaagaggaaagcaaaggatcttaactctgcttaaaaaacaatgaagtgttttggagtctgaagtcttgcattctgaattcacctttattattcattaactgcttgaccttggtcaaatccatttttctcagcatctcttttgtcatttgtaaaacagtaataacaatatttgcttcgcagaataaggaccaatgaggtcaggcatatgacagtatttgtaagatattctatgttatacaagtggtggttatttatattatcaatgagaagttgggagaaaaaaaacttccctaatgtccagttaggagacatgcatgtaaaaggaatgtggggctgtggagagctgagttaagac

SEQ ID NO: 844502 - DNA, 556 bp, Homo sapiens
gactgacttcatttgtaccatattatccattgagataaatccatgtagcatattcccattgtrtgactataccaaaaattttcactcactcaactgctaagtggatatttttgctaagcccagttttcagctattagcaataaaatagccatcaacatcattgtacatatatttttctgtacatatggacacatttatgttagaaatatattgagaagtgaaaatgctaagttgtaggatataattataatttaccttagtaaataatttcaaggagttatccaaagtagttgtaccaatttaaactccaatcatgtattagagtttcaatttctctatgtgtttgcttatatttggtattgccagggcttttgtttctttgttaaattttagttgttccaaagagtaggtattggattctcagaatggttattatttgcatttctctgatgactgatgatgttgaagagctatttatatgcttcttggtcaacaggttgtccttttatgtaaaacacttcttgaattttttggtgattcttaattaagttgtctg

SEQ ID NO: 844503 - DNA, 408 bp, Homo sapiens
cacttcatatttcaatatagaaactgaactggaagagtcttctaaacagctcttctcctggctgctttaacactgattatgttaagacaatgtccaaatgtcgttgtaaaaatattaagtaaagtaatactcttgatagtggctttattttatgtcaagtgaaaggaaatggtaattcttgtggcaaacctaaaataaaaatattttagacagaaacattttgggaatgtgttgccttttggcttagaatagattaatatccattatgggaaaatttttttcattgtttcagttacagcagtaagtgaaacacacaaggtgtatctccacatactcttccattataacttcatgagtagtcagttcttttagcatrtgtgaaaaacagaaacatgaaaatcattattt

SEQ ID NO: 844504 - DNA, 637 bp, Homo sapiens
tctttattttaaaaagtatacttatcaaaaccactaaattaacttgctctcaaataaataatgcgaagcaaggtttttgaaagcatttcatatcargcttcagaaatgaacccaaatgtgtatggagatttactttatcatgaaggagtaatttcatatcattacgtaaaggcagaacgtttcaatggagtgtgtgtgtgctaactgatttaaaatcaggaaaaaaataaataaattcctatctttaatttcaaaacaataaaaatttaaatgtagaaatattaggcaaaagacctaagatcacttaaaggccttaaattattgatgtatttgatacataaaagtattcacttgacacaaatttgcacatattcattcagaagtgggtgtacaaagacctttgttgcagtgttgtttgcattagcaaaaagctacacatctcataaatgactaccagtcctgaagttgttaaacacatcttcataatgtaatattttgcatttattaaaaatagcgaggcaagtctgtagttagagaattgatatatttaaggagaaaaaagttacaagatggtatttataagatgacacaggatgttatctctctactaacctatcaatatgcatatataaataaa

SEQ ID NO: 844505 - DNA, 608 bp, Homo sapiens
agttaatttttttataaggtgtaaggaaggggtccagtttccgttttctgcatatggctagccagttttcccaaaaccatttattaaatatgaaatcccttccccattgcttgtttttgtcaggtttgtcaaagatctgatggttgtagatgtgtggcattatttctgaggcctctgttctgttctattggtctatatatctgttttggtatcagtaccatgctgttttggttactgtatccttgtagtatagtttgaagtcaggtaacatgatgcctccagctttgttatttttgcttatgattgtcttggctatacgggctcttttttggtttcatatgaaatttaaagtagtttttttctaattctgtgaagaaagtcaatagtaacttgatggggatagcattgaatctctaaattacttcaggcagtatgtccattttcacgatattgattattcccatccatgagcatggaatgttttttcatttgtttgtgtcctctcytatttccttgagccgtggtttggagttcttcttgaagaggtccttcacattccttgtaagttgtattcctaggtattttattctctttgtaacaattgtgaa

SEQ ID NO: 844506 - DNA, 608 bp, Homo sapiens
agttaatttttttataaggtgtaaggaaggggtccagtttccgttttctgcatatggctagccagttttcccaaaaccatttattaaatatgaaatcccttccccattgcttgtttttgtcaggtttgtcaaagatctgatggttgtagatgtgtggcattatttctgaggcctctgttctgttctattggtctatatatctgttttggtatcagtaccatgctgttttggttactgtatccttgtagtatagtttgaagtcaggtaacatgatgcctccagctttgttatttttgcttatgattgtcttggctatacgggctcttttttggtttcatatgaaatttaaagtagtttttttctaattctgtgaagaaagtcaatagtaacttgatggggatagcattgaatctctaaattacttcaggcagtatgtccattttcacgatattgattattcccatccatgagcatggaatgttttttcatttgtttgtgtcctctcttatttccttgagccgtggtttggagttctycttgaagaggtccttcacattccttgtaagttgtattcctaggtattttattctctttgtaacaattgtgaa

SEQ ID NO: 844507 - DNA, 610 bp, Homo sapiens
taacttttacaacctaattttataaatcataaaaataagtttatatgctttctgtattcccacatacaagccagaccctacattaaatagaatcctcttcaactttatcaatttctcatgarccaagcaagataaaattttctagacgtaacaaatagatttttacttactttagtgtttttacttattatgtgaaaatatttctttgtgactagttatcttaagattaattgtgagaccaatgttgtgattcttcagtcccctttgcctcatcattctaaaagtttagttgtagggctagcttaaaaaataattaaaatttatttctaagtgtgtatatatgcatgctcacatatgaatgcttatgtgccttcttacctaaaacttagcgtaagtgtagtaggttgcaactctaagtgtaagcaggttgtaactgcaaatatagtaagttgcaaatgtcatttatttgacatcttaaaatattacctactctttattttaggatcagcttctttaccccttcataatactgagcttgcccagcttacatagttctttgttgactttggagcaaatcttaaattcccaaagagcattctttccaatcttc

SEQ ID NO: 844508 - DNA, 681 bp, Homo sapiens
agtcaaactctatagtccaaacagtaattttggaagtttttcacatacctcttttccaaatctcgttagccatcctctacttttttccaaggccctaataattcagccgaaccatttttttcccactgccaataaattaggatatatatccttgcctcaggctctctctcctcccaggctgagtagacagtgagatatacaccttaaagttcacctcaccgagagtaattcccttcaccactgccttccaagaccatccctgagtggctctgtaataccacagcagtccactttcatctggtgccagcatattgtattaagttattgtaaaataggctctgattttgttcctgttcaactaattgattatagggaacagcatatgagtaagggttggttgagggttgttggtggtaggagttggtgtactagagtatgagccatctgcttatttaacttactggtgccttcataacttgcttcatttccactcttatatctaccacttgtccttgatgatgaagtgcttctgcgcatagcagtttcctggctaggcagattaacagattaacatagcacccrgttcagaagggatagttcagtttgcaggatcacagtatcccatggccaggaattcagtctgtagtagggcccagtagcaaaccaaaagttatttttcaa

SEQ ID NO: 844509 - DNA, 610 bp, Homo sapiens
cctggttgggaaaggcctcctgtgggggccccaggcctaaccacagcttcgcaaggaatgctcaggtttgctttgcccaactggagtcatcggtcctgctctgaagctgcccctggtccatcccaaaagacagacagtgagagagagatctccagccattctcaaatattttatcttgttgatgggcccctggacttgagttcctgcccaattcctccaggagttagctgcgtgacctcagacaaattgcttggcctccctgggcctcagtttcctaatctgttcagtgaggtttatcattctgatctcaatgggtggttgtaggtactaaatgatgtaatgccggttgactgctgtgtccatctcaggctttgaggatatttcacctggaccctctccctgcaggaaactgggctgattgacatccacgcgggtaggccaagtcagctcagagctttctctctgaattgcagtgctctggcatgctgcctgcttttctaggggtcaagcaccatctctttgaacctcttttctgatcgttttgtcaaactgtggtggaagagtttggcgtcgggggctctggcccyatattggagggacccatatgatg

SEQ ID NO: 844510 - DNA, 665 bp, Homo sapiens
aaattgaaacaaacaaaggcaaggatcccaggagacatttagcatcaggataaactcacctaacacattgcaaaacccctaagactcgacaggatgagattgatgtttgttttaatgaccttgatcctgggacaggttaattaacgtccagcctcctccctctaagaagtagacggatgtagactggaggcagattccagagaaaaggtgtctttatagtgtggtcatttaaaagtatagatgttcccggacttatgatgggattacgtcccaataagtccatcgtaagttcaaaatatcttaggtcgaaaatgcacttaaaacatctgatctacagaacatcatggcttagcgcctaacctagcttaaatgtgcggaaaacactttcattagcctacactcgggcaaaataatccaacacaaagcccattttgtaataaagagctgagtatctcatggaatgtattaaataccatactgaaattgaaccatggaatggttgtatggctactcaaagtctggtttctactgagtgtgtatgactttcacgctgtcttaagtaaaaaaatcgtaagttgaaccattgtgagtcggggaccttctgtatygttttgtctgtcttgttcccttatatatactcaacaccacaagcggtgcatggtaca

SEQ ID NO: 844511 - DNA, 600 bp, Homo sapiens
cctgctgttcccatgtcactgcgctctttattctgagatcagggagtggagggggacggcgtcttctcaacaaagtccccctgatgaaaagcttcccattctttaagtccttccatgacagtcggtagaccagatgtcaacctctgtgtgttctatgtaaatgaaggtgtttgtttatgctaatgtgtgctgggtggtgggagggatgggctggctcagctcactaagacgacagtgatggaaaaagaggctggcagcccaggtgtggggggacagtgagtcacaggggaaaaggagccagaagacgaagatggagcaggtagctaaaaggagagaagaaaagagcgaagctgaggttatgttgctctgcaaaagcaggtgggagagcaaagtgggaagtgtgtccaggaggctgaagggaggataagaactggattgaaagaacctccattctcaggggtggcagatgggtcacacgcccaagagcctgagcgccaaccaactgctgctcttttgtgtccccagtggggtccttgtcaggcaggttagtcaggtaagtccrtgggtatggatcccttcccatagttttctgctatgact

SEQ ID NO: 844512 - DNA, 539 bp, Homo sapiens
aacctaggccatgtgatgccagagccccagcctttagccactgtgccaacctgtccctggcaaacgtaactaataaggatttggactcaargctataaagggcatgccccttctgttcagaggctttgcacatgctcttcccctgcctgaagcactgacccttccccaattgcctgactatatcctccccaaggctcagagatgggctggaaggtcacttcctccaggaactttccaggattgtctctgtcaggtaccctggtgacgcacagcgagtctctgtgtactcactaccacggcagctaaatcactgtttccgcctgtgtcctcacccagactgtgagtgtccccagggtagagatgggtctggcctcccattgccccatccccacggcaagcacagtctctggcacacagtaggtccccaaggtttgtggactgaataagtaccaccaaggtggccagaggctgggagaagcctggagcaccaatggccatgaaaattttccagaagcttctctgtcattatacagaaatcc

SEQ ID NO: 844513 - DNA, 539 bp, Homo sapiens
aacctaggccatgtgatgccagagccccagcctttagccactgtgccaacctgtccctggcaaacgtaactaataaggatttggactcaaggctataaarggcatgccccttctgttcagaggctttgcacatgctcttcccctgcctgaagcactgacccttccccaattgcctgactatatcctccccaaggctcagagatgggctggaaggtcacttcctccaggaactttccaggattgtctctgtcaggtaccctggtgacgcacagcgagtctctgtgtactcactaccacggcagctaaatcactgtttccgcctgtgtcctcacccagactgtgagtgtccccagggtagagatgggtctggcctcccattgccccatccccacggcaagcacagtctctggcacacagtaggtccccaaggtttgtggactgaataagtaccaccaaggtggccagaggctgggagaagcctggagcaccaatggccatgaaaattttccagaagcttctctgtcattatacagaaatcc

SEQ ID NO: 844514 - DNA, 575 bp, Homo sapiens
caacctccacctcctgggtttaagcaattctcctgcctcagcctcctgagtagctgagattacaggcatgcaccaycatgcccagctaattttgtatttttaggagagctggggtttcaccatgttggccaggctggtcatgaattcctgacctcaagtgatccacccaccttggcctcccaaagtgctaggattacaggtgtgagtgagccacctcgcctggcaacccgtctcttaaaaaaataaataaataaaaaaggatacaattagaattgaataacaattagacatttctgctaccacatgttgggtgcttgacacagtgagcgcatagctgtggtaggccctcagcaatggatggtgttaactgtagttaatcattcatttagtttttcattcattcaacaaacgtccattgagaacctcctctgtgtccaggagatattgtagttatggtgataaataagacacatgtccttcccttaggggactcacagtctggtgttgataagaaaactgttatatgataggtgtgccagaggaaggaactatagccgctggctttagaaaaactt

SEQ ID NO: 844515 - DNA, 563 bp, Homo sapiens
ttacatttttattgcccactgtctttgtcagcttgagctgctattcaaaaaataccacaatctggtcagcttaaacaacagaaatgtatttcttacagctcttgaggctaggaagtccaacattaatgtgacagcaaggtaggttttattccagggctttctctcttgacttgtaggtggctgccatctcactgtgtgctcacaggaccatttctttgtatgcacagatgtggagagacagcaagctctctggtgtgtctctcatcataagggcactaatcccatacaagggccccacccttaggacctcatctaactctaattacctccaaaagacccatcttccaatatcatcacattgatggtgggtagggcttcaacatacgaattttcagatcatgacatctacatatgtatgactgtatcagtcaatgtctagtcaggaaaacagaaaccactggagataattcaaacagagaggaatttcaygcacagttagttataaaagtgtaggaaagactggtggaacaaaatgcagaagttacctagggatcagaaagccg

SEQ ID NO: 844516 - DNA, 637 bp, Homo sapiens
tgatcttagttatttcttgccttctgctaggttttcatttagtttgctcttgcctctctagctctcttaattgtgatgttagtgtattgatttcagacctttctagctttctgatgtgggcatttagtgctataaatttccctcttaacactgctttagctgtgtcccagagattctggtacgttgtctctttgttctgattggtttcagagaacttcttgattttttccttaatttcattattcacccaggagtcattcaggagcaggttgttcaatttccatgaaattgtgtggttttgagtgagtttctgaatcctgagttctaatttgattgcaccatggtctgagagactgtttgttattatttctgttcttttgcatttgctgaggagtgttttacttccaattatgtggtcaattttagaataagtgccatgtggcactgagaagaatgtatattctgttgatttgtggtagagagttctgtagacgtctactaggtccacttgacccagagctgagttcaagtcctaaatatccttgttaattttctgtctggttgatctgtytaatattgacagtagggtgttaaagtctcccactattattgtgtgggagtctaagtctctttgtag

SEQ ID NO: 844517 - DNA, 506 bp, Homo sapiens
ctgttaggcgctggcttaaggctatcctttgaggtttcccaacaataacaaaggaatatttgatggctttaaatgggattaaaacagccttttttggtggacttaaaaattaatgatagaacttcacactgaaagacttatgattttgccttcatgtagcattctactcttaagaatttaatgtgacaaaataactatgaatgcacacagacttgattcattcctcactctttaattcaacaactatttattgagcatatactacatgccagatactgttctaggcaccaggattatagcaataatcaatggaaacaaagtccctgacctcgtggagcttacattctagttggggaagacatcataaacaaggcattatgttaccaaatctcagagtcagtttccagtccacatcttattagacctctcagtstgttccttctagaaatactctcttcatttggtttctggaacaccacattctcttaccttactgcttacctatc

SEQ ID NO: 844518 - DNA, 626 bp, Homo sapiens
gaagatgctgaggtcaagtgggtataaggaccttgccccaaaaggtaggggagccagaactgaacctggggccaaccgactctcaagcctgggatctgatcactaacctattctgcctccttggaggacctgacccagagattcagtctacacgttcctgttacccagatactgcagtggaagggctgggagggcatcctcctggcttcctggagcacgtgtctgtccagcgctggagtcagctgttgcagccaagaccttctccaggggctgtgtcctgcaccaggcaccacacttccggccaatgtgaggcttccgacctgggcaggggatgcttctggtagccacataggtatgcatgagtctcaacatttgagtatgtgtgagcatgcgagtgtgaacacgtgggcgtgtacgcaagtgtgagtgtgggattgtatgtgaacgtgtgaacatgtggctaagcatgtgagcgggtgtgagtgtgtttgcatgtgaaggcgaatgtgtgaacataagcatgtaagtgtgtgtaagtctgtgtrgagcgtgcatgtttgtaggagtatgtgtggatgtgcatgcacagggatgcattttggggatgctgcttttcctgtcattat

SEQ ID NO: 844519 - DNA, 678 bp, Homo sapiens
atttctgggatgttatttttcttgtccttcccagaatctctccccaaatccacaatcctgcaaagatcttgaccacccaaccccccagacgtcacccgattcakagctaaaaggatctttctgttcctggtcggtctgtttgtcatagctttgagggggcgctcctggggtgtcactgcacactacctcattgatttcgattttattttaacagccttggtgtaattatgaaagcctgctgtaattatcaaaacacaactccaagtatttcattgttaaaatacccctatggtctattattaattcattagataaatttggattatatcactcaataattaatgtgcagacctgaatccggggaatttggccactgtgagtcacatggtaactgtgggaagcaatgggagcctgagagattaggaggcagaggtggagagaatggaaacagggaagaaaacaggtggtcatgaaaggttgatgaccagctgctctgtgacattcatttaaccattaattcaataaacacttattgctggcctactacatgctaggaattttgagcaccttaacatccaaatattaactactcaaggtggttcctggggttctctcttatctatctatatgttcatcattcatcacccatctgtctacccatccatatagccatacagc

SEQ ID NO: 844520 - DNA, 587 bp, Homo sapiens
aagtgctgggattacaggcgtgagccaccgcgcccgcctcttttttcttttaaaaacagtgtttcactctgttcctcagtctggagcgaaatggccagatcatagctcaccgcagccttgaactcctgggctcaattgttcctcccacttcagcctcccatgtagctgggaccacaggtgtacaccaccacacctggctaattttttaatttttttgtagagatgagcatctcgctatgttgcccaggctggtctcaaactcctgggctcaagtgatcctcacgcctcagcctcccaaagtgctgtgagccactgtgactggcaggaagatgtttttaaatccataaagtaaaatacgtaacaatgcaagggaaaccaaccactgtgcggaaatacaatcctatccatgaatcctctgagagtctgtggccctgagataaagaatcccaaccagtttctaggcttttttctactacaaactgctgcaacraacatttttgtacatatatccactagtttctataggataattttctagaaatgtaattactggggcagaaatcatatgcatgttatgtttggatcaa

SEQ ID NO: 844521 - DNA, 587 bp, Homo sapiens
aagtgctgggattacaggcgtgagccaccgcgcccgcctcttttttcttttaaaaacagtgtttcactctgttcctcagtctggagcgaaatggccagatcatagctcaccgcagccttgaactcctgggctcaattgttcctcccacttcagcctcccatgtagctgggaccacaggtgtacaccaccacacctggctaattttttaatttttttgtagagatgagcatctcgctatgttgcccaggctggtctcaaactcctgggctcaagtgatcctcacgcctcagcctcccaaagtgctgtgagccactgtgactggcaggaagatgtttttaaatccataaagtaaaatacgtaacaatgcaagggaaaccaaccactgtgcggaaatacaatcctatccatgaatcctctgagagtctgtggccctgagataaagaatcccaaccagtttctaggcttttttctactacaaactgctgcaacaaacatttttgtrcatatatccactagtttctataggataattttctagaaatgtaattactggggcagaaatcatatgcatgttatgtttggatcaa

SEQ ID NO: 844522 - DNA, 604 bp, Homo sapiens
aagggacaatgttggcatttgagcttctaggaatgttcttttggagagcaggagcactgcctccaggcctgctccctcccactgctgcttrggaaggatggctccaggactgggcggctcagccatggtggaactgggtcagctgtggctttggcaagtttctcatcctatctgggccgcctctgtgaaataggaataatgattgtacctacagagctggatattacctgtttgttcccccgacccattctctaccctgagagaccgactttagggattgcatcactcaagggccctgccttccggcttcggccctgcctttggccttctggttcagtttgcaacgggagataccagcagcagatgggtgctgggaaatttactccctgttctctccctgctctgggctgcagctgtgagtttctctctgactgcagctcctgaccaggcagatgcctcaacagtgccaggcttgacggtgtgtgtcagctatcaatttattgcctctcagctccaaagtcacccttcaatatctgctttgcgtaatgggcggagttccttttaagcgtcattcctttacagtgagtgcagtgttaagttttct

SEQ ID NO: 844523 - DNA, 333 bp, Homo sapiens
gtacatcataccaagaggcttttcaaaatcagtaatcaagtggcactatcaggagaacctttataggaaaaaaaaaaagtcttaattgcccaatcaaaaggaaatacttgtattccttatgtcatttaccttaggaacaaggtaaatgattcagttacgctctgtattcatgctcttttactaaaaccttcttggggactaaaccaactgtaggaaaatatccaacaatttgacgtcatgttttcagaagacaaaaaaaaaaaaaaaaacccacgataaaaccctgttyactgaaatcccattcatacatttatttttttaccaaagtaatac

SEQ ID NO: 844524 - DNA, 633 bp, Homo sapiens
ctactcacctatgagtccagttccagaacccaagtagaggatgggggagcaaagctcctagctttttccctactgtctgcatctctttcacatatcttatcttcttgaagaagttaaacaggctcaactaaaataactaaatgatgaagccctatacagacaatcaccagagattcacaaaactgcattcaacacagttacacagacaactttgaggatgacttgatgtaccagcgatttaccacatttgggaccattcaaaattcctgtcaaggatctgcctatatcaacatgggaatcaagaaccaaccattcaaatgggccctgctgccaagcctctttataatgccatctcttcatattgttccatttaacaaaactgcagcctatcatctaaccttaaatccctttgccaatgatacagagccagagtatgctactccctagagcaggaactcaacatgatgacctactaaacaccattcagaagatgctgagactcatgaattgcaataggaaaaaaaagacagagaagtagtcagccaggtacacgctgtgtcaaaagtgcactacaacccccmaccccattctgcttaatcctagctgggctgacaccaacctgacgagacaggc

SEQ ID NO: 844525 - DNA, 501 bp, Homo sapiens
gtctgtcaagagaagcagcacagagtctcatgtcaagagaagtctgcagcggcagaaagacaactaaaaagagagacttcagtggaatttgagtcacctgacattagtcttaaaaaagatatttaaaatacagagaatcccactgatggaggagagaaaaataaccctctttttttctttaaagacaggcattgatatgagcgaaaggaaaagaactggggaagtctttgtatattgagagctcagtttatttttactctctgccaatagaggcaaggtaattctataagcaccatttaactttctcactacaaacaaaatagagtaagtcgtattaacgacttacttgcgttctaaacttccagctccagaacacttttttccccctgaaaattaaattgattcttacagaatggtacccaaatgtgtgatttcaaaggcagaycccaaaactgatgggatcctcaatgagaggatgaggaggcattttcagtttcaact

SEQ ID NO: 844526 - DNA, 549 bp, Homo sapiens
taattatctcaaaataaaatattaaaaaaaagaaaaaaaaaaaggccggatatcatcctgccctgtgttgtacaattctgaggttaaatgagataaagtatggcaaggcactttgactgccttgtgccctgtaaatactaggtaacatcatcatcttcctctatcaaccagtctcatcagcattactcactgttagactattccttatccacagagccttcgatatctctctactatgaccctatcactgtacttgtgtaatccgatcacccctcttgctattgtttgaatgtcccctccaaaactcatgttgaaacttaatccccatggtggggccttcaagaggtgactggatcatgaaggcatgtcatcatgaatggattaatagattaatgggttatcttggcagtgaaactagtggctttttaagaagaggaagagggacccgagctggcaagtttacacactcagctccctctctatgtgatatcctacgccaccttgggactctgtggagagttcscatcagcaagaaggccctcaccagat

SEQ ID NO: 844527 - DNA, 693 bp, Homo sapiens
aggaaccttccctttaataaagctggatcccacactagcccctacaccctctcatcaccaaatattcctgcttcctctcacctgcacttgctgttctctcctctgccacacaaatctacctctcaagcctaggtcccacctgcttcatgacaactttccagactattccagaacctttaaccatctctgacctctcatcagatctatgttgtacataacaccaattaatgagatcattactgctttatgctctaattgcttcctgtattcaaaatcttctctccaaccacataatgactccctaaacttctcttgtattttccaatgccttgtacaagcacagaactggtcaatcaataaatactcactggttatttgaggaaaaaatgttgccaagcaccatctttatcagaaaataaatcaattcttctaaacttggagaaatcaccctattcctagtatgtgatcttaattagaacaattcagattgagaggtgacagcatgctggcagtcctcagagccctcgcttgctctcggcacctcccctgcctgggctcccactttggtggcatttgaggagcccttcagcmtcccccctgcactgtgggagcccctttctgggctggccaaggctggagcccactccctcagcttgcagggaggtgtggagggagaggcacgagcgggaaccg

SEQ ID NO: 844528 - DNA, 603 bp, Homo sapiens
gccaatattcacccaccttccacttacttattccccgtgccctgggaaattgaaagccctgaacaaaaaagcctaaagtctaaactggccataggatgtgaggcacctccaaaaatgccaaccctttttacaccattaaagaacattgtgaaccaggaatctgctgaatcacttatgagaagctgcttattaaaaataataacattcctatctaccatttatattactatgtttctagtggcacagagccagaatctgggttgtcttctggcagagggcccaaatgaattatcaccccaaccatcctatgaggcaggtactacctcatccccattttaaaaatgagaaaacagagtcttgaagaagtcaaacttttaagtggtgaagctgggattcaaaccccaagagactgactttagagaccatgctcctactttttgcatttttccccatcatttcaaaatgttgtttaccatcttcatgaagtaggatgaaggtcaggatattttaacggagataggaagaaaatctcccaaggtcaaatggtagcaatcaaaacaaaasaagcacaagaacttctgggcaggcaaaccattcactgtc

SEQ ID NO: 844529 - DNA, 521 bp, Homo sapiens
aggaagaaaatctcccaaggtcaaatggtagcaatcaaaacaaaagaagcacaagaacttctgggcaggcaaaccattcactgtcaatcagatttcacagtttccaacatcacagaatgaaaatcattttttaagaagacttggaaagagatttttttcactaacaaatatcactcatatctgtgttgcttaatcttcatagatgctgtagtgcctctatagtgtcatagctagaaatacttctggttaagctctagcatgcagatttctggctggtcagggtccttgtatggagctagcaaacactctctctggaactgctgcaaaggcagctatagatgcaaacagatctgcctcaaatgcagcactgcatttgttactgacaagagacctggcactcataggaagcagtatgacaaagccagactgattttcagctcagagaaggcttgcagtgtrtatcctgctgaagttatgtcccaatccccatctgagtcagaatggagccatttctttcatct

SEQ ID NO: 844530 - DNA, 603 bp, Homo sapiens
ttttctatctctccttgcttcctatcagatcccattccattctatgtctggtgattcccaaatctgtatctacagtctagatctctcagtcaactccagcctccaactgacttaccattycctcatagccatctaacaggtacctagaacttaacatgcctgaacctgaactcttgacaccccatcctgaccacaccccagcacgttccctaccccagtaacggtaccaccattcacctgccaggccacaaatcttcagagttattattgactcttctcttacaaattcccaatccaattcatgagcaaatcctatcagctctaccttcaaaatgagtctagaattcaacccttcctatcccttccaccttttgaacagtgcaactcagcctcattttgttctgaattgctgtggtagctcctaactggtcttgctgcctcctcccttgcttccctgcagtctactctccacactgcagccctgctcatcatctttcaatggcttcccagtggagaaaagctaacggctttccaaaaccttacatggcccagttcacccttactcactggcccccagctacactggcctctctggtcatagaa

SEQ ID NO: 844531 - DNA, 577 bp, Homo sapiens
attctatgtctggtgattcccaaatctgtatctacagtctagatctctcagtcaactccagcctccaactgacttaccattccctcatagccatctaacaggtacctagaacttaacatgcctgaacctgaactcttgacaccccatcctgaccacaccccagcacgttccctaccccagtaacggtaccaccattcacctgccaggccacaaatcttcagagttattattgactcttctcttacaaattcccaatccaattcatgagcaaatcctatcagctctaccttcaaaatgagtctagaattcaacccttcctatcccttccaccttttgaacagtgcaactcagcctcattttgttctgaattgctgtggtagctcctaactggtcttgctgcctcctcccttgcttccctgcagtctactctccacactgcagccctgctcatcatctttcaatggcttcccagtggagaaaagstaacggctttccaaaaccttacatggcccagttcacccttactcactggcccccagctacactggcctctctggtcatagaacatggcaagcaa

SEQ ID NO: 844532 - DNA, 600 bp, Homo sapiens
ccagtggagaaaagctaacggctttccaaaaccttacatggcccagttcacccttactcactggcccccagctacactggcctctctggtcatagaacatggcaagcaaacacccacctcagggcctttgcatatgcttcccttcgctagaagcacacttccccacagtcacgtggttagctctctcacttcattgagctctctgctcacagcagcctttgtgaccactccatctgaaagtgccccgacactctctatgctcttacctcattttaatttttcttcatgccacttgtaaatctatttaggtgtttatcattttctcctcccactagagtgtaagttccatgatggtagggacttcactttgttccctgctgatccccgatgccacagtgcctcacatagagtaagcactcaataaaggcacattgaatgaatgaatcaagagctgttttttgggtgatgggatttggaacaatttattgctggcttctttttactttwcagttttgcttgaattttttataacgagtatttacttttttaaaaaaataagcaagagttattcctttaaaaattaaaaaaggaaacccatca

SEQ ID NO: 844533 - DNA, 546 bp, Homo sapiens
cacccttactcactggcccccagctacactggcctctctggtcatagaacatggcaagcaaacacccacctcagggcctttgcatatgcttcccttcgctagaagcacacttccccacagtcacgtggttagctctctcacttcattgagctctctgctcacagcagcctttgtgaccactccatctgaaagtgccccgacactctctatgctcttacctcattttaatttttcttcatgccacttgtaaatctatttaggtgtttatcattttctcctcccactagagtgtaagttccatgatggtagggacttcactttgttccctgctgatccccgatgccacagtgcctcacatagagtaagcactcaataaaggcacattgaatgaatgaatcaagagctgttttttgggtgatgggatttggaacaatttattgctggcttctttttacttttcagttttgcttgaattttttataaygagtatttacttttttaaaaaaataagcaagagttattcctttaaaaattaaaaaaggaaac

SEQ ID NO: 844534 - DNA, 512 bp, Homo sapiens
tttttgactttttgttgactgtgtgaacactttataaaggaaattagccccttctcatgtgttgcaaatatttttcccagtycatcttttggttttatgatattatttttaaccatgtagaacttttaaaatttgtcaatcttttcttacatagctcctgaattttcagtcaggcttacattatattccatggtttaaaaatatatacctctatattttcttttaatatttttatggtttcattttgtacatgtatattttaatcaatataaaatttacttccatataaggaggaagacagggatccaatttaattttttcccaaatggctacccagttgtctcaaaaccagttattgaaaaatccattcctctctcccatcccaccaatttgaaataccatggtttactctatgccaaatgcctttgtgtattcggctgtacttctgcattctctaccctgtttttctagactctatttttaatttggagatggcaaaaacaaatctaggg

SEQ ID NO: 844535 - DNA, 444 bp, Homo sapiens
accttctgccatatttggaaactcatttctcagtctagaagttctccactgtaagtagcatttgttttgtgatggtgaaaaattgagactttttttgtgtcaaccatactcttcaatacaaaaggacaaaatattttttaaatgatttaggtcagagttgaagaagtggctatgattatatgtggcatgaattgatagttattgttacatccagtcctaatcttttcttcaaatgtgaactggatcgaatgattccttaagtccagcaaggcaacaggaaattaaacctctggtctgcacacttgcaatgcaaaacatttaatggattttgatagagtcaactttgkatttgatggaaattttttacaagtttttttttttggatgcatacaaacaataagctttttattctaacatgagcaaagaccctcaaaaagtgagacc

SEQ ID NO: 844536 - DNA, 419 bp, Homo sapiens
actcactgcaacctctgccgcctggtttcaagcgattctcctgcctcagcctcccaagtagctgggatcataggygtctgccaccatggccggctaattttttgggttttttagtagagacggaatttcaccctgctggccaggctggtctcgatctcctgaccttgtgatccacccgcctcggcctcccaaagttctgcgatgacaggtgtgagcaactgtgcccagccttcctctccttttttttttccccaaaagaaacgcggagttggagacagacttattagcattgaagggagagatctgatgaagagaaatggggccacattgaggcagtgtcctgggaggagctgtggtttttacgtctgtcgctgttagggggaaagatgtggaccagggtggtagccagtgggctaagg

SEQ ID NO: 844537 - DNA, 419 bp, Homo sapiens
actcactgcaacctctgccgcctggtttcaagcgattctcctgcctcagcctcccaagtagctgggatcataggcgtctgccaccatggccggctaattttttgggttttttagtagagrcggaatttcaccctgctggccaggctggtctcgatctcctgaccttgtgatccacccgcctcggcctcccaaagttctgcgatgacaggtgtgagcaactgtgcccagccttcctctccttttttttttccccaaaagaaacgcggagttggagacagacttattagcattgaagggagagatctgatgaagagaaatggggccacattgaggcagtgtcctgggaggagctgtggtttttacgtctgtcgctgttagggggaaagatgtggaccagggtggtagccagtgggctaagg

SEQ ID NO: 844538 - DNA, 574 bp, Homo sapiens
aagttctgggggagaatcagtttccttgccatttcctgcttctaggggaatgtttctagagtattccttggctcctggacccttccttgaacttcagagccagtagtgcagcatcttctaatttctctgtgactctgacctttgcttttgtcctaacatcacctcctctggctctggcactcctgcctccctcttacaaagatcctgtgatgatcttagacccagctggataatccagggtcatttcatctcatgattcttaaactaatcacatctgcaaaatctttttagccatgacaggtttttacagatttctagaattaggatgtggatatttttttgagggggggaagggggtgcttactctgtcaacccacatggggattaggatgtagacatccttggggccattattctgtctgctacctagtattaggccatggacatctttgggaccattattctctgtatcacatgaggaktaggacatgggtatctttgggaccattattctgtctcccacatggggattaggatgtggacatctttggggccattattctgtctgccacgt

SEQ ID NO: 844539 - DNA, 643 bp, Homo sapiens
ttctttttcctgagactttacttgatacaggaatgtcagtctccaatgagaaagataatgcctctcaagttttcttgggatatcctcaataccataataccttgtaaaattttgcagaacaattttgcagttgccatttcatgttatttggccaggattcaggtatcattgcatcattttgctgtaatccatgggtaaaaaaaatttagcttcatgcatgaaatataaaaaacagtaaattagcacagatttggtggggggatgaaggtgtgtctggttatatattcaaagtcatttatcattacactgtcccctaaataaaaatatgaaaggcaatgcaaacatcttgacacttagtattcttgtctaataaacacaagtgactgaggtaaaaaatattgctctaaaaccaccagatatgtttgattttataaaggaaatatcatctaggtgattaaatggttattactctctctacaaaactttagtaagtgaatccatttatcataaatgtcagaatcaaacaatgaaaagttcccaccaacatgcatctgcaccatcagcatggttgagttctgctgtcaagttgaaatcagaaaaaaaaaaaaaraaaaaaaaaaaacaaggggaggcaccaagatgg

SEQ ID NO: 844540 - DNA, 543 bp, Homo sapiens
caagaaagtttataaaaagcacaaaagtggtctaaatggtaaaaaaaaaaaaaaaggttattaatgtggcttttgtgtagaattagtatttcatttcaraattacttaatttttttctgggtcttttgttgcttaatggtagggtttatttcagaaaaagaagaagatgaagtaaggtcaaaagaggaaaatgaatttgtttgcaggtccttcctgatggaggcatccccttgatcagttcttatttaaaccatgcagacaaagatgtctagtttattctagcaaacatgctcttatataaacagaatagcttttccttttttccttttgatacatatttatatttcattttttatttgacaatgaaatacattttcattatattgaattttgtttcatttttattaaaaaattggcacacatggaaaaacttctctaacccaagggtacaggaaagcagataaaaagtcataatattcccccagaaatcttgctggtaaaatataggattttatttcaagatacctgccaaaaagtggcctg

SEQ ID NO: 844541 - DNA, 631 bp, Homo sapiens
agatatatttaatacatggtgttttctatgtctcacatacccaaatgcaaaggatgatacaattgaatgcacaattttcttaatcttgctgctgcaaaaagaagtaaaaataaaattaatcagatttcttctaacatatattgtaaatttaaccaaaaaacaaaggcccttataaatataatttcaaaagaaaattattcagaagttgtataacaaaatgctttttactaatagctaaaattttattcttcctgctccatgagtattttacttgtttactatgctatccagaagacagtaaagtttggatgtttagtaacatttccattgcatgcaaagccccaaccccaactttatggcaatactaaacttaaactggtggtcatcatctcaaggagtatagcatgaagacagaaaagggtggtagaagagaactgtattttaatgccagcctgggcaaatcatcaaactttggccagatctcagtttccactgcaataaaataaggtgtttcaggaatgagcatagggagtaaatgatgctcttgtcatctcctcgaactagacacctagtgarcagatgagtcacatatgaggttgcaaacgaacttcagaggtaagacattttagta

SEQ ID NO: 844542 - DNA, 576 bp, Homo sapiens
atggagaaaatacggatccagtgaagtcaaatgagttagcttaaatcacgttaagaggatcctggcatatcaatatcttcttatttccagtaggggctttgaccagtaacccacatcatcttatctcacaaaaactgtatacctgtttcccacagtttgccttattattattttttgtcagttctctaacacttagtgaaattattagatgctctagtgtagatgcctgtgtaggcctcagcaggatgaacctcaggcagatttatggtcaatagaatatcactgtggccagcactcacatttgacttctgatttaagtaggtggttgcaggctccagccagcctgatgctggacccccacctgcaggtctaagacggatgtagaacccatcagtggtgactgcacccagggtttcggggagcagcctctacacctggtgaccacacacactagttgtcatctaccctacttggtaccaggttcaaagccatgcctctccagcatctgcrtgtgtgggagctggtggcacggggagcctgtggtgcctgtgctttgattactcagggacacatttt

SEQ ID NO: 844543 - DNA, 541 bp, Homo sapiens
ccaaactattattttggaggaatgcagatagaatctttccaaatggtaatagtggttcagtgagttaaacgggatgtaatatgtgatacgctggatgtaatgcagagtgttctgaaacttgagcccacttcttcttgatcagccttatgtaactagccagaaatcgcatcctgccctgaacagcgattgctttttgagtgccatctcgccctggcttctgtgtttcctgccatgtttatggagtcatctggtatggtcatggctttgttctaggcagttttgctttacagtccaaggccctgccactcagtagctctgtaatcttgctgggcttcacttaccacagttttcaaatgggaataataacagagcctacttcaaagggttagtgtaaggttttattgagttaatatatttcaggcacatacagcatygaatgccataatgtgaagctcaaaaatgtgatcatattagatcttataattcttttcgtacttatttctatccacactttatttcccttgttaaagctgctttaaag

SEQ ID NO: 844544 - DNA, 538 bp, Homo sapiens
cttgctccgtctacctcattgggaggtcacagcagtgctggcttcgtgctaccacttcacagacaaggaaaccaaggcttgcagcagtcagtggtttaccttgggctgcatggcracggagaagccgacactcagttctagctcatcagagtccgcatttctatttgtgatatcatacagtgtcatgtgacatcatgtgataccatgcaaggcatcagtgagtaactgcatctctcgcaatgccacttcccccatcttcacccccctcaccaaacacttctccaaggctaagatttcattgtagagaactattgattctcttctatatcactcctacttttccagatcggaaaatagataatccacttgtatcacccctgtttcctggataactcacctagaaatggtctaatctgtttacatctttttatccaggtgaaaatgccttagtgaaaggcatctggggcattttatgacttggaaaatcacaagaattgatgtaaaatagagcagaggagccaaagcaaatatatattca

SEQ ID NO: 844545 - DNA, 587 bp, Homo sapiens
agtgaaaaaccaatattccacaataaaagtaaaaaaaagctattggccaggcatggtggctcacgcctgtagtcccagcactttgaaaggctgaggcgggtggatcacgaggtcaggakatcgagaccatcctggctaacatggtgaaaccccatctctactaaaaacacaaaaaattagcctggcctggtggcagacacctgtagtctcagctacttgggaggctgaggcaggagaatggcatgaacccgggaagccaagatcgtgccactgcactccagcctgggtgactgagtgagactccatctaaaaaaaataaaataaaataaaataaaaacctatccgtgaaaatactttgtgatgtgtggatgtatctcaaaaagttaaacgttgttttgattcagcaggttaaaacactctttttgtacaatctacagaggaatctttcaaagcccattgaagcctatagtgaaaaatcaatatcccgatataaaaactagaaacaagctatcggggaaaatgctttgcaatgtgaagatttatctcacagaggtaaacctttatttacatacagcaggttgggggac

SEQ ID NO: 844546 - DNA, 597 bp, Homo sapiens
tgcataatgttaagcagtaaaataaaataaatgagtgtgtatttgtttcctggggctgttgtaacaacttatcacaaacttagtgattttaaacaagataaatttattctctctcagttagagagaccagaacaatatttgtttcactgacctaaagtcaagatggcagaagggctatattctcaacggagactccaaaagataatccattcatggcctcttccatcctgtgggccttcctctattttcaaatccagcatcacagcatcttcaaacttctctgtttctattgtcccattgccttctgctccctctgtctcctttttccaaggacacttctgatggcatttagggctcactcagataacccaggatgatctcctctcaaatttcttttttctttcttctatttttttttttttttttgagacagagtcttgctctgccacccaggctggagtgcaatggtgcgatcttggcttactgcaacctccgcctcctgtgttcaagtkattctccctgcctcaggctctcgagtagctgggattacaggcgctgccactaccacacccagctaacttttgtatttttggtaga

SEQ ID NO: 844547 - DNA, 444 bp, Homo sapiens
aaagagatcaaattgacagagagtgggaagagagatgatttgttcttgaagacagacatgaaaggtcaagatacgaattttagatagacrgtctaagaacttgaaaagtgaaaagataatcaactttgtgatcgaggtcaggagatcgcgaccatcctggctaacacggtgaaaccccgtctctactgaaaaatagaaaaaattagctgggcgtggtggcgggcgcctgtagtcccagctactcaggaggctgagacaggaggatggcgtgaagccgggagggagagcttgcagtgacgatcgtgccactgcactccagcctgggtgacagagcgagactccgtctcaaaaaaaaaaaaaaagaaaaagaaaaagaaaaaaaatctttgtgatgttatatacttgcaatgtcagaaaaaataagatattatgcttcaacttcaa

SEQ ID NO: 844548 - DNA, 625 bp, Homo sapiens
ctacatccatattcaagctcacatgaaatcttccactcttgtttacaaatataaacccagaatcaagtaaaattggtatatcagtaatgaagcttcatcttcttcatttttctatatccaggaaaaaataatggcatttaagaaaaataattttgtattagattatattgctgttctcaattattcatgcctccttggcctgtaagaatatgtaccatcatctgttgctatgtgatttctgtgcttttccaagggaggaatgtgctttgctgcccccttcattttgaaccttgtcatgacttgctttgttcaatggaatataaaccgtcttgatgtgtaaatagaagcattagaggatactgcacaaatggctttcatcttttttccttttccaagagaatagcaaagccaaaagagcacttctccttgaccgtcagtgccggaatgagaagaaatacaatgggacagtcccaagttagttgacatgaaatgtgagcaaggcataaatatttgtgatttaagccactaaaatatgaggatcatttgatatctcagmgatgctgactaatacaacttctcatttatctataaaatggtaaatgattgagaacagttcacaaatcca

SEQ ID NO: 844549 - DNA, 554 bp, Homo sapiens
tcttcactcttactgtaattaattatatgcrtaattagttgcctgcctcagtgtaagctccctgagaacaggcactgtgtcagtttacttcacatctaaatatacggccgttcctggcatgtaaggttcctgcattgtgtaaatacaattcctggcatgtaagattatgataattattcaatgaatttttactaagcccattcacagttccagaaatcttactatgcttagcttgagtcacatttgctttttagtttgatgttctactccttgctttccaggtgtaggatgttggacatcatgctaagaataatagaaaggtatctgtattggtttgctattacaaagttcaacaaaatgggcagcttgaacaatagaaattaattgtctcacagttcttcaggctagaagtgtgaaatcaaggtgcctacagggttggctcctaagcactgtgggggaagaatctgttcctggctctctccttggcttgtagatggccatctttatgttcacatggtgttcttcgtatatgtatgtttgtgtccaactttctt

SEQ ID NO: 844550 - DNA, 607 bp, Homo sapiens
tgattgttttgtagggagaaattcagagagttcttytctagtgtttttatctttcttgatgctctttctttgctaagtcacatttatggaaaataagaatgtaagaataatatttgatattcacagatcaagaaacagtattttctgtaccaaaaagagaaaaatattattcaaaaagagggaaacttttattttaaattcatttatataaaaattcttatagtagtataaaaattaaggcatactaagtttttgtgttttgtttttgtttttctctttttaaaaacaggactgtgccctgtcacccaggctgagtgcagtagcatgatcatatctactgcagcttcaaactgctgagctcaggtgatcctcccaccttagcctcctaggccaccaggactgcaggcgtgtgccatcacgcccagctaatttttcattttttcatttttgtagacccttgtccaacataaggtctcactatgttgcccaggttcacactgacttttataggtaactaacaattatctaattgtcttaattaaaattaagaaagttacctaatattggcactgtcctggaaaatcagaatgtgtgggaactcttggtt

SEQ ID NO: 844551 - DNA, 614 bp, Homo sapiens
caggacctcatgctttattctacctgcagtgagaagccctgaggggccttgaaagggggatttgggtctacgytgtcattaacgcatagccgactaaatatgctgtaattcattgttaatgctttcttctgcaagaagcaagatatgtgactaaaagggccctagagagaagcaattccagattggctcagtcattcagtgactcctgggccctggggcagcctcttcgtggtccttggtgctgctcccacaggttcacaagactgtggttgcgatgccaagtatcacgtgctccctcgaacgaaggcagggaccggaagaaacctctctttgaaaattggggaagaaaacctgttttccagaaaccttcacattcctttgcccaggattgggtgccattcctctgctgagctacaaacacaccaggaatgtgattatctgagattttcagattctacagtgggaggcaaccagtgccgagaaagcgtggctttcgatagggaaccacagcaaatgccagagctgtattttatcacagccataaactccacacacactcatgtcatccacacagagcgagcacagcctcggaaaacacccagaacaagaccaaa

SEQ ID NO: 844552 - DNA, 639 bp, Homo sapiens
tgaggttaaaaggcttgtgtatgagccccatgtttgtcatttaaccctcatcctgtttagagaaagaaagtgcacctcgctgccagtgctgatttaattttacataaacacgctctttgaggctgaagcaaatctgacagattttcaatgtgaaaataaaatagaggccgattgcagtggctcacgcctgtagttccagcactttgggaggccgaagtggggagattgcttgagcctaggagtttgagaccagcctggccaacattgcgaaatccatctccacaaaagatacaaaaaattagccaggcatgatggcgcacacctgtaggcccagccactcaggaggctgaggtgggagaattgtttgaacccaggaggcagaggttgcagtgagctgagatcacgccactgcactccaacctgaatgacacagtgagaccctgtctcaaataaataaaaataaataaatgaatataaaaactgttcttggagttgtttctaaatagaacatcaaaatcatctattttggaaaaatcagattcatcgaacgattttttggccaacaactgtttgagaatgatgttaacatcacacatagaaakgctgtgttttctaggatttgacattttcagcaataga

SEQ ID NO: 844553 - DNA, 589 bp, Homo sapiens
ccaggtgcttacaagctatctcattaagaacctgtctcgctccctcttttgagtctgtatttcctcyctgttggcttttgttgttgttgtggttgttaacttcagttctcctcttgcggaggcaaggtggccactagccactcttgctcatatttgtctggttttaacagctccagaagaaagagaaagccttgctttcctattgttccagcaaattttttgggcctggatcttatttctgcaacttgagcatgtgtccctctctgaaccagtcaccagtgccagggagaaactgggctctgattggataagcccaggagcccaagagccttgtgcccagggatgaggttagccttctacaaataacatggactaagagagggggaatgtggcttcccaaaggaaaaatgtcaggaaggccatttctaaaagaagtagaagaggatgctagacatgcctttcctccttccccccaaaaagacacttaggtccccaatatctactctgtgcgatatattattttgggcattatgggaatgacatgataaacacgacatccctcagaaggcttagactagaatcatgtgat

SEQ ID NO: 844554 - DNA, 538 bp, Homo sapiens
aaggactcatctctcaaatttgttctgttattcagaacatattattaattggcatgtattttaaacattctgtgatcacccataatggcagccaattcaaacaagaatggcttccagtggcaatcaactaaaaacccagactgtggaaaatttttcctataaaaatagatcttctcttatttaagatgagatttcacactgtggaaaacagtatggtggttcttcaaaaaattaaacatagaattaccatgtgatccagcaattctacttccatgtatatagccaaaataattgaaagcaggcacttgaatttgtacaccagtgctcaaagcagtattattcacaatagccaaaaggtgaaaacatacagatgtgtattgattggtgaatggataaacaaaatgtgttatatacatagagtggaatatcattcagccttaaaaaggargcagattctcacacatgctacgacatgaatgaaggaaccttgaagacattatgctaagtgaagtatgttacatacaaaaagacaaacatt

SEQ ID NO: 844555 - DNA, 640 bp, Homo sapiens
ttaggaatttggattgaacagctagatggatggaggtgccattawctggaatgggaaaactagaaaaacaacagttttgagagagtatctcaagaatttaatacgttaagtttgagatgcttacaagacaaccactaaatacacaattgggtatgtgtaaatctggattgaaaacaggttctggactgagatggaaatttcagagttgttggcctcagccatgggaaaggatgacatcatataggcagggcatataaagtgaaaaaagaacagaactaaagaatgggaacagaattaggaaatttcaacatttggtggtctagtacagaaagagaagtaggatgaaactcagaagagatagaatcactgcagctgagagaagagagaatttcaaggagcgaatgatcagcaggtttgcaagtagctgagaggtaaattaagatgaggactgcaaagtatccattaagattgacacttggaggtcactgataattgattggataaaagcagtttcagcacagtggtgggagaagccagtttgatgtgaataggaggtaagggagtggagaccaagcttctagctaattcttttgggaaatcggctgggaagggaagccaaatattcaggccttggcaggag

SEQ ID NO: 844556 - DNA, 640 bp, Homo sapiens
ttaggaatttggattgaacagctagatggatggaggtgccattatctggaatgggaaaactagaaaaacaacagttttgagagagtatctcaagaatttaataygttaagtttgagatgcttacaagacaaccactaaatacacaattgggtatgtgtaaatctggattgaaaacaggttctggactgagatggaaatttcagagttgttggcctcagccatgggaaaggatgacatcatataggcagggcatataaagtgaaaaaagaacagaactaaagaatgggaacagaattaggaaatttcaacatttggtggtctagtacagaaagagaagtaggatgaaactcagaagagatagaatcactgcagctgagagaagagagaatttcaaggagcgaatgatcagcaggtttgcaagtagctgagaggtaaattaagatgaggactgcaaagtatccattaagattgacacttggaggtcactgataattgattggataaaagcagtttcagcacagtggtgggagaagccagtttgatgtgaataggaggtaagggagtggagaccaagcttctagctaattcttttgggaaatcggctgggaagggaagccaaatattcaggccttggcaggag

SEQ ID NO: 844557 - DNA, 583 bp, Homo sapiens
caacaattttttaaatattaaatcatactagagtaagttatatttccattttctttacagaatatataattgatatttagcaaagaggcaataaaagagtatacagccaaaarcagtataaaaatagtatagaggtgtggcagatggttaattaatgaaaaaataaattttctagattttttttggatttgtagctttgtgaggttttataaatttgtttttgtgattttttttgtacctacctttgcattatttttttttgaaagagggcctctcaaattgcataggctttaggatgctatgaagcccagattcaccctgatagtgagcataattttagtgttcttttgacacttgcctatagcagcttcattaatccctgcagtttacagacttcccttcccatttctcctcctccccctcatccttgaatgcaatatacacagaaacctttgcaaggtacctagtcagaattagtggttctcttttcaatttccacaacagccaatatttacctctgtctatcatatttatcagaatctgccctagattaacttatctatcaaatatatattgaggatcc

SEQ ID NO: 844558 - DNA, 588 bp, Homo sapiens
tctgggacctaaataaatttgaaagacagaactgcaatttctggacaagttcttgtgctgtgttaggatcagagccaatggacttggggctcatgtgaccaagtgagacgctagctagaatggcaaatgaggtgctggcataaccccttccccaaaaccaggcagtgcagcttgcaacttgagaaggagagagaagaataaagaagatattgtcttgcaacttggatactagctcagccacagtaaaacaaagcaccaagaagagtcctagacccctcatttcagaccatagctcccatatgacatttctggacccaccttgggccagaaaggaacccactcttctgaaggaaaggacccagttctggcaaaattctccaccttctgacaaaagagtcttgtaccttgaataaacatcaatggtagcaaggaaatagctgctacagcccttgggtgagacccagtattgtgctggccttagatgtgaaccagtaaagtcccaatggtgatagttacargagtacttgcatcaccactccccaactccaagtagcacagcatggagagagaggctccatttgcttgcgg

SEQ ID NO: 844559 - DNA, 637 bp, Homo sapiens
caaaaagtcaaccacagacaataggatttttttcccmaaacaactgtacttggtccatcacctcccctttacccactaatattgctttggtttttgtttacctggttctaatgatcttctctatctctattcagcttagtctctacttttggccacgttgctgttttgtatacttgctaattgaatacttggctgttggttctgctaaatatcccatgttctttgtatcttatataacatatgtgttgaattttcctttcttagtctcagaacctgataataacctcattagtccatttgctcagcccccaagagacaggaagtcagagttatccacaacaggtattctaataactattgttcgcttattaatttttgctattaaggaaacatttttaaatggtggcgaaataaagagacaggcacacaaacacacacacatgcacacacacacaaacacagtattttacatacacaattattctagaacttagctgaaacataataacctgtatatcccatcattggatggttaagtcatatagattacttgctattatcaagcccagtaacatgatgtatattttattatcaccattacagaaatggagaaagcaagtcaattaaagatgtacaa

SEQ ID NO: 844560 - DNA, 593 bp, Homo sapiens
gactaatacatctgtcaatacacttgcctttgaggaaatgaccttgcagaagcaatcaaagatttggaaatgtatgaaattacatatagaagcaaagtgaaaagaggggaaggacgaagttttgaagactattagatttaaaggaaatttgatgttaaagatgacttgacctacccagaaaacaaattttgtaatgtaagtgtaaaacttggagattactttgtgaaaaattaagcacaaaatattttgaggataaaagaatactaattgctatagaaagatggaaggaagtgaggtttgaaacacgttcacttatttttagcatttaagccatcattgttgaccatgataattgcaatttcagtagaagctgaggcaaaaaacagccagccatgaactacattatgagtaacaggtgtgaaagttcagagaaaaactgagacccagtcttgcaaaaaacttaaacayccaggggaagggtttctgaaatgattaggatactcagatcctcactagaaacttcctcaactaaaatgatgcttatccactttgtctatgagcatcatctttcttttcttcctaggtctagtttt

SEQ ID NO: 844561 - DNA, 599 bp, Homo sapiens
ggaaagaatcttaagagctgtgagacaaaagcaccaggtgacctataaaggaaaacctatcagattaacagcagatttctcagcagaaactctacaacctagagtagattgaggccctatcttcagtttcctcaaacaaaatgattatcagccaataatttttgtatccagcaaaactaagtatcatgtatgaagaaacaatacagtatttttcagacaaacaaatgaggagacaattcatcactaccaagccaccactacaagaactgctaaaatgagctctatgtcttgaaacaaatcctggaaacacatcaaaatagaaattctttaaagcataaatcacacatgacgtataaaatgagaatacaagtgaaacagaaaaaaaataggtacacaggcaacaaatagcaggatgaatgcaaaggtacctcacatctcaatactaacattgaatgtaaatggcctaaatgttccacttaaaagatgcagaactgcagaagggatagaactcaccaaacaactacctgctgccttcaggagactcacctaacacaaaargactcacataaacttaaaggtgtaggaaaaggaatttcatg

SEQ ID NO: 844562 - DNA, 497 bp, Homo sapiens
acttaaaatgagatcttaatcatttattattattcaagtactgtttttctaggacatttaactcaaaggagttttcatggtatgaactacattgttttggcatatattgagatgttgctatctgttatacttttcttattgggcctactaatgggatatatacctaatattaggttattttgttttttttttttctttttctggagtgtagttgcatcttggctaaccacaaccaccacttcccagggtcaagggctcctcccacctcttcctcctgagtagctgggactacaggtgtgcaccacacgcatggctaattttcatatattttgtagagaaggttttttgccatgctgcctgggcttgtctcaacctctgagctcaagmaatttgctcgccttggactccaaaagtgctgggattacaggcaggagccactgtgccaggctactgtattcttgattacttgtataagtcccatttagatgagataaaat

SEQ ID NO: 844563 - DNA, 497 bp, Homo sapiens
acttaaaatgagatcttaatcatttattattattcaagtactgtttttctaggacatttaactcaaaggagttttcatggtatgaactacattgttttggcatatattgagatgttgctatctgttatacttttcttattgggcctactaatgggatatatacctaatattaggttattttgttttttttttttctttttctggagtgtagttgcatcttggctaaccacaaccaccacttcccagggtcaagggctcctcccacctcttcctcctgagtagctgggactacaggtgtgcaccacacgcatggctaattttcatatattttgtagagaaggttttttgccatgctgcctgggcttgtctcaacctctgagctcaagcaatttgctcgccttggactccaaaagtgctgggattacaggcakgagccactgtgccaggctactgtattcttgattacttgtataagtcccatttagatgagataaaat

SEQ ID NO: 844564 - DNA, 625 bp, Homo sapiens
tttgctctttttaaagacttgaaataagatagaaagtgatttgtatcattcagggatcattgacatacctagctgaagaaatagatatgggcttaaagatgatctttccaataagagattatagtctttctcacttggaaaattggtttgttgatctggaggggaatggggggctatttcatggtttctgaaggccaagattccctctgagtggatttatcgtttgagccacctgtgtacttagactcccactcactttcttcaaggagaatcctgctgtctatggatttagccaggtttaaaatatatttatagtaggaactaccaaacattatctcaagctgagctataagaaagcccatcaaagttaacttccaaggcattctgatagttatgccttgattctggatcttgattttcccacacttctgttttcctttttatgtggaaaaaaaaatcagaggaaaactcagtattcagaaagaaaaaatgtacaggaaaataccagcctggacaatgataggtaaaggaatgccaggaactctgccaactgctaccaggatgacagaatctagcttcagaatccagttgctggaggctttctmttaaaagagcttaatagaac

SEQ ID NO: 844565 - DNA, 617 bp, Homo sapiens
acagaactaagagatgaaatatagtaattattctgaaaacaacattgtaccacatggtatagaacagaatgaaggtaagaacagcaagcataggcaagactataaagaggatattcatggaaggtkaattattatcttttgtgattttttagcttgaggtccccaatatcttcccattggtacttttggctgctcttctgggttgacagaggtaattctgttggtttcccaggcctttactcaggcatagtgaattcaagaatctattccagtggccttcattgccgtaggagtataaagaagtacagtgtaagttccctcccagtctggcttatagagggagaaagggaagggactacttttaccagtactaggtctcctgggttgaatagagatggtcgtagttcatggggttgggcatctgacagttgtttcagttcctgttggaaataggccaaagaagttatatgtttaatcaaatcagaggtttcttggtctagtaagaaatcattggtgtgaaaatgctatccatacatcacttcaaagggactcaaacctagccttgaaggcatatttctactatgtagtagggttatggggagacaggtagtctaggg

SEQ ID NO: 844566 - DNA, 600 bp, Homo sapiens
cctcctgtcctttggattcctgagggaagaagccattggttgagggtattatttttaaggcaagtctcrcaagcattaacaacctgtttaaccatttgtatcaggtttgtacctgagaacaatctctgggacaattgataggttttctccttacctaggtggaaggcctggtgaagtcttttaagaactttcctttagttggcagccagtagatgaagcttgtcatcctctgattgtagccatcctgaggactgaaagatgtatccctaagaagtggcccattctgtttccacaggagaatattgaggttctatttctcttatggggccctcccagattaatcaggcttcaagtggaccagaaatctggaaccttctcactgctgatttagctgcttggtctgccaacctatttcccttggccacttcatccatcccttttggtggcctttacaatgtattactgccacttcctgtgggaggaaaactgagaatagtagtctattaatttcctggaggtatttaatggaagacctgttagctgtggggaagttctttctttccagttagtggcagggtcatggaggactaggaaagcata

SEQ ID NO: 844567 - DNA, 559 bp, Homo sapiens
ctcacctaagatgcttagattattgcacatgagctgtggtctgatgcagtgtttcccacatcaccccaggctctggtatgagtgccaggcaccagttccagctttttctcttccagaagggttcccctaagtgtcttctgtggttcttactgccaacaggtcttaaactaggacacctcagcaaccagacattgtagtgacattgaaactcaaagcctcaggttctccttcccatttctccccaaagtctccttggcctttatgcaaatttgagcaacttattcatcaccagaaaccttcaagagtaatatttttaaggcagaaaaccaggcaccacctgccttcagagctaaagttccatgccttataagcctaagagggaaatgataccttaacacctttccttcacaaaaaaatgatccccatttcattcatataattgaaatgarccgttaaatttttttccagaacaaaaaaaggcagcttccataatatatttttctagatagaggtacatatgttttgcaacctttaaatagcctcatctcattctcttcat

SEQ ID NO: 844568 - DNA, 511 bp, Homo sapiens
gccattaccagttaaatgattctaacaacaccaacataagatatcaaaactaaaaatcttttccctagaaataatgtttcacttcatcctgcatttgaaaatcctttattttatcctgtaagaaattctctcagaaacctaatttatctagaatttcaagggccaagcttaatttctgtaaccatatagtttcgttctgccataattatatgtcttttaagaaacattccatgagttgtccttgtagcccaaatgtatccgtttttgttaactctggaaagtgcaagtctagggtatttcacttttggaaacaggacttgatacaatgagccatgaagatttgacatgctggggttgtgtctcctaagagaaaatcaactctgtaatgtggttccagaccgagaygggaatcacagcgtgtccccttgagctgacagcattgtgagggggagtgtggggagtcaggaagggttcaccattaggctaggaggggtgggttgttctcctgaga

SEQ ID NO: 844569 - DNA, 619 bp, Homo sapiens
aaaaacgtggcccccaatttctgcatcattattctaacraggttggcaaaagtcctaggcctttgttacagagcgacagcttttctctttatatgatatttttgaggtttatttatggaaagccttaaacgttatttttttcatgattatcctttaaacctagtgcattattacctgggaaaactcagggaagatttcttgttcagagctaagcaaaatagtatttactgtaagatgtaatgacgcagcccaagtgggtttttatttctaggctggtcatggtcataatagtgactttgccgagttttgaaaacgtatctgtacagaagattcaagctagaagaaaacactagttattggaggaagtcttttactgtgggcagcacggaggtcaccttgtctgtatgcctgggagttttctccttgcccagcctatgaaattaatggtttaatagagagggaaagttcaacctcaaaatgtaaatctttagcccagttaatagacacactggggcactgtattaacttgcatttatattcaagcggcgcggtcactctgaaatcctcctctgtgccggaaagcagcctctgcaggaacttgaaagggcctaaagcatgt

SEQ ID NO: 844570 - DNA, 632 bp, Homo sapiens
aatgacccctttgcctggcgcctggcatgcagtagtgtgttagtgtagctaaggcattttatcaagtccagttgcttggggagaacaacactaaaacttgtttaagcacgtgattggatgtcgtcttatcatctggatattttgagggacagaagttcttccaacaccacatgaatgaactaatgtatggctaaagagattaatgcgcacgctggtctatttttatgttccctggcctcttttggcccaacatttacatacttccctccccacaattcttttttcttttttctttttttgagacggagtctcgctctgtgcccaggctggagtgcagtggtgcgatctctgctcactgcaacctctgcctcctgggttcaagcaattctcctgcctcagcctcccgagtggctggaattacaggtgtgtgccactacacctggctaatttttgtatttttagtagagacaggatttcaccatattgaccaggctggtctcgacctcctgacctcaggtgatctgcctgcctcagcctcccaaagtgctgggattacaggtgtgarctactgcacccggcccttcctcacatttaaagtatcatcagtctataagttcttaaattgtgttggc

SEQ ID NO: 844571 - DNA, 632 bp, Homo sapiens
aagtcaaactatgtaactttttcattacaggaaagaacccccaaaggattaattctaaaatatgtaaataatctacaggaaatgtggagactgattaagaaatcccccccccccttttttttttctcttctaaggacagaaaggcagtgaattcagaaaacaaaaagttgcatatgactaactggatcaagaacagaggccgtcatgagtgggcaatggtgctttccacaaaaggaagatggtctaagcaaagagaaaacaaacatgaaggaaatatagtgcgttctttaggttgagggggaggaaattaacatgattttgagcacagttatgtttcaaagactgcactaggggctttagatctattttaaaattttgattctcaacagttactgttgtctatactgaacccagaatttgaatgtaggtctatcagatttcaaagccctctcttttcaggatgccaaactgactcccagccacttgttgggcctctggggcctctgctaaatgccaggttcttcacaggcaagttcgcagtcccagaaaaacaattacagtattttttttagacaagtgtgtttcatttataatataatatcccygttttaatttacgaaagttcttttctg

SEQ ID NO: 844572 - DNA, 534 bp, Homo sapiens
gaggctttttgatctttattttcttttgactgtgactaaccttgatctacccttcacttttgtccattcccagtgaaatatatttttataaaattagcatctattttttggtcatttgtaaagaagcaagtaccgagagagctgtcatgacatttttgatacagttaaaaaagagttaaaagaaattgccttcaaaaagaccagtacaaaagtactcctacatgtactaggctttcagatgcctcaaatattttcatgaatgaaagcccttttggttattttcattatagaagaaattcttttatggaaaattcaaactaacaaaggaagctcagattgcaattctaacattttttagcagagttgaccaaacatgagtcctaaattgacgtattatgaaacacaataaataagktttcaaaggctggcttaacactgcaaagcttttttgaaacagatctctcctttatgtatctatctttctcaagttcatggatcataagaggacatggaatttggaggcctctggttatt

SEQ ID NO: 844573 - DNA, 267 bp, Homo sapiens
ctgttgggggaggtaactgcaggaagagggattcttaaaggagtggtattttcaatgaggaaatgtcatcatcgatacagtgggtgaaagcctggcaagttgcactgaaggtactgaagccttcctttcgcacacacctgtttcagtggcccagataagaatggaccactggcatgatcttatctatgcaagmgccatctgaagagctgatctcagatgcccccacatatcaaaagccaaaccattaacttgactttgattccatca

SEQ ID NO: 844574 - DNA, 363 bp, Homo sapiens
taatcatcaaaccttggccaaggcatctgcctcatcattgccagcggtggccaaaggcttacrgtctgacacatgataaatagttacctctttctgatgacccatttcccagaggtcttgccacatggcttggctccaaatgggtcagtggccaactagccacttctgtattttccaggtagttaaccacaaggttaagccttgctagaccaccctgctattggtacaggttaccacaggtgtcacctcgttggtgatcaccattcatactactctaagttcagctcatcggctactttgtccatacccagtttcaaaccatgtggtgtcagtactaggttggactgtaacagcagtccaggc

SEQ ID NO: 844575 - DNA, 568 bp, Homo sapiens
tgcatgttattaaatgaaagaagccaatatgaaaagactgcatactgtatgattctaactatatgacgttctgtaaaagataaaactacggaaagagtaaaaagatgagtagttgccagaggttggragagagaagaattaatagccagagcacagatgatttttacggcagtgaagttattttgtatgataccatattggtgtatccatgtcattacatatttgtccaaactcatagagtgttgatacggtttggatgtttgtcccctccaaatctcatgttggaatgtaatccccaatattggaggtagggtgtggtaggaggtaattgggtcatggggacagatcccttgtgaacatcttggtgccatcttcatggtaaacagtgagtcctcactctgttagttcatgcaagatctggttatataagagtgtggcccctcctcgctctctctgtctcttgattccactctttccatgtgacatgctggctcccctttgccttctgccataaatataaagcttcctgaggccctcatcagaagcagatgccggcaccatgcttcct

SEQ ID NO: 844576 - DNA, 568 bp, Homo sapiens
tgcatgttattaaatgaaagaagccaatatgaaaagactgcatactgtatgattctaactatatgacgttctgtaaaagataaaactacggaaagagtaaaaagatgagtagttgccagaggttgggagagagaagaattaatagccagagcacagatgatttttacggcagtgaagttattttgtatgataccatattggtgtatccatgtcattacatatttgtccaaactcatagagtgttgatacggtttggatgtttgtcccctccaaatctcatgttggaatgtaatccccaatattggaggtagggtgtggtaggaggtaattgggtcatggggacagatcccttgtgaacatcttggtgccatcttcatggtaaacagtgagtcctcactctgttagttcatgcaagatctggttatataagagtgtggcccctcctcgctctctctgtctcttgattccactctttccatgtgacatgctggcycccctttgccttctgccataaatataaagcttcctgaggccctcatcagaagcagatgccggcaccatgcttcct

SEQ ID NO: 844577 - DNA, 588 bp, Homo sapiens
tataatgcccacgaagcactccatctgcatggattcaaattttgctttttggaactttgggaaatttttttttaatcagaaaaggtctttggaatttttatctctgagtattttcaacttgcakttggttgaatctgcagatgtggaacccaggaatatagaggactggctgtatgcctgtaaataaaacacagcaagaaacaataagagaatacacttacttttcaagtatacagtgaaaagccataaaaatttaccatatagtgggctacaaagcaagtctcaacaattttaaaagattaaaaataggatatgtgatgggaccgcagttcaataacaaaaatataactggaaaatccccctaggtttaaaaactaaaaaagaaaaaagaaaaaagaaaaaactatataaatatatatactttctaatatatacattctctatatataaatctctataaatatatatttctaaaacataattttatattatatacatgttatatatatatttgaaaatatatgtatattttcaaagtatctgggattaaaaaaaaacactgaatgaaataagtattcatcttttagt

SEQ ID NO: 844578 - DNA, 613 bp, Homo sapiens
tccttttctttgctttcatttctttttgtatctcattctttccatctgggataatatccctttttcctgaagtacatccttaagaatttcctttagtgaggctctgctgctataaactctctcagtctttgcgtttcttaaaaggcttgtatttttccctggtcttgaaagatgtttttgatgaataccatcttctttccttatgccattatttatctttctgttagattaaatttgtttataacagatgagcatttagaatctaccttagtgtggcagcctcatatggagacaagctggacccttccatagctggtgggcttaaagaaaactgcaacaattcctccctgtccattgcaaaaaatggctctgttagcaccagtagctcgcctttgaattctttctgggcaacaccaagaaccttcctgggctaagcctcaattttgggggcttgcctgtcctgcatcaggatggtaatgtasatctaattctaatttactttcttttcccatggaaacatctttctctgttgctgtgttccttctgtccttgcagggtcttcctttccctcaaaaacattaaaagtctacacttcctgtctacgcttcctcca

SEQ ID NO: 844579 - DNA, 491 bp, Homo sapiens
ggctactctcaggtctcctacccaggtgtataggagacatgtaagcagaattttgccattattgtgctggaaagtgtragacaagaataaataggaaatctgatcaccctagtatctgaagtacccagcactctacctggtatagtgtaggtgctcaaaaaaagtccccttttcttttcccagaggagatgtatactgcttattaaaaaatcatattttggtcttttggccggaaccgccatcttccggtaattcgccaaaatgacgaacacaaagggaaagaggagaggcacctgacatatgttctctaggccttttagaaaacatggagttgctcctttggccacgtatatgcgaatctataagaaaggtgataatgtagacatcaagggaatgggtactgttcaaaaaggaatgccccacaagtgtcaccatggcaaaactgggagtctacgatgttccccagcatgctgttggcattgttgtaaaca

SEQ ID NO: 844580 - DNA, 555 bp, Homo sapiens
atctgcgcagccgaatccagggaactctgtagccaaataaattgcaaggaaaaaacaagaaaatggtgagggggaacccatagatacaaagagacacggacatatcaatccatcgcagcgtctggatctggttcctgtttcaaacagtttaaaaattttatgaacccactggagacatgtaagcgctgactgggatatccacatgattttaaagtgcacctgctaaatagtttagatgtgatgtgttattactgttcagtttaaaaagagaccttatcttttagagaaaattctgaaatatttatggatgaaacaatacgaggcctgggactgattcggagccccccgccgcgggcacggtggcacggggagtcccacgagcactgctgggggtcgctgcagctgggagtggcccatgggggcgctcacttcygtgttctttcctctttcgtacacgtttgaaacttcccataagcaaaagcattaagccggaccatacagtgaatacacgcacacgcaaacacgacagtttccgggtgtgtatggaccgccgtg

SEQ ID NO: 844581 - DNA, 473 bp, Homo sapiens
tctgtcttattgtgttgagttataagaattctttattccgaatgtaagtcttttatcacacatatgaatttcaaatattttctctgatgctgtggattatctccacattttttatactgttcttggaagcacaaaagttgttaattttaatgatgtccaatttatctattggtttttttctctttggaggcttgggtgaggtttctatgaaccaactgtgcaacccaaagtcacaaagccttacttctatattttcttctaagagttctacaatgtaagttttagtacttaagtttaggtctataatttatttatttattttttactttttatttttttttagatggagtctcactctgttgcccaggctggagtgcagtggcctgatctcagctcactgcaacctccacctyctgggttcagttgattcttatgcctcagcctcctgagtagctggtactataggtgcacac

SEQ ID NO: 844582 - DNA, 693 bp, Homo sapiens
tgtctggaaatcagattccaactctttcctagagtttgttattattatttgttgttattttcagtggtgctccttgttgagtaattttctggactaattttgaaaactctgtattctctgttgtttgtagccacttaagtttctgttcaattcatttagaattcagttactgaggccagcacagtggctcacacctgtaatcccagcactttgggaggccaaggtgggcagatcatttgaggtcaggagttcaaaaccagcctggccaatatggtgaaaccccgtttctactaaaaatgcaacaattaaccgggtgtggtggtgggtgcctgtaatcccagctacttgggcggctgaggcaggagaattgctagagcctgggagatggaggttgcagtgagcagagacggcaccattgcactccagcctggcagacaaagcaagactccgtctcagaaaaaaaaaaaaaaaatcagttactgagtggacagtctaaccttaaaaatcttaacccttttcccatttagaaaacaaatgtgcagctctctgccagtgctcatttaattttacataaacacgctctttgaggctgaagtaaatctgactgatttgcaatgtgaaaataaaatataraaaccgttcttggagttatttctaaacagaactaccatcagaattatctgagtcatcaga

SEQ ID NO: 844583 - DNA, 572 bp, Homo sapiens
gctcattcattcactcccaggttacctagagcttattaccaactgtgcacagcactcactgctgagcatacagtgaccagcaaataagggttcacctgtcaaaagttcacggaagggaggcacgcagtgagtgagggttcggtccaggacaaagcattgagctgcgcaggagaagacggcctctgtgtgctgctctaagggagccactgtctggtgggggaggcaggcagaagccaggcagtgacatccaggaagccccgaggcccaggaagcacagcctgaggcagggtggtcagggaagcctgcctggaggaggtggcagcctagctgaggatgagtccctccagggaagaactgggggaagcagacacacagagggggccctgccatgagaagggctccctgccacaactctcctggtgctcaggcacatggttggagtccttcagagggtcyagctcaccagaggacgcccagagtcccagagtaggtcaggcctcttaccgccagtagcgcctccgctgtgccatgctggtctaagtaatttcgggcttactgtgtaggtggcacta

SEQ ID NO: 844584 - DNA, 443 bp, Homo sapiens
aatttgtcaactttgttaaaacaaaagagagtttgtgtatgtgtgtgwgtgtgtgtgtgtgtgtgtgtggtttatttttatttttatttatttatgtatttatttattttagctcatcagctatttttagtgtattttatgtgtggctcaagaaaattcttcttccaatgctgtccagggaagccaaaaggttggacattcctgtgctaagctattcataaggcatccaccccatgatccaatacctctcactgggccccacctccaacattggggatcatattttagcatgagatttggaggggacacacatccaaactatatcagggatatgtacccatcatcgagacaggttgtagagtatgcatactttcaaatgggtcctgtcatgttattttctgaaatggttaaaaccatttaatttcccatccattgcccataaa

SEQ ID NO: 844585 - DNA, 540 bp, Homo sapiens
tttttgaaaaatggtctcactctgtctcccaggctggagtrcagtggcatgatcagagctcactgcagccttgaactcctgggctcatgtgatctcccagctcagactcctaagtaggtaggactgcaggcataacaggtgtgcaccgccacacccagcttttgttttgttttgtttttgtagagactgggtctcgttatgttgcctggactggtttcaaattcctgtgctcaagtgattctcccaccttggcctcccaaatagctggaattacaggcatgagccaccatgcctggccctggttaacatctttaaatgagtttcccagtttttctcgtaactgtagtgagcgaatcttatagtcctggccaatgtgaaatgcagaattcactgctttggatttctgaaaatctgtttggaaaggggagagttattgttcctcttttttgttgaccaatttccctttgctttctctgcttgctgctctctggaaataggatgaaatgccctgagttgggtttagcaacttgaagaccattg

SEQ ID NO: 844586 - DNA, 523 bp, Homo sapiens
ctgataaggaaggagtctcatgggagaggagcaagcctccaccttggggccagacatctcatgatcaaagttgaactctaccactgttcagctgggtgactttgggcaagtgactttccctctctgatcctcatgttcctttttgataaaaacagcaaaatgtcaggcctatggggattcaaggagccaaaagaaaaatgtgtgtcttagtctgaatttcctggaagtagatcctgaggcaaagattcaaatacaaaaattttgtttggagataacgctaggatattaattcaactgccagttcttccttagggtgctaatcccaggaaacatcagtggaggagtggggaactgagacaggaaaggaatgcagcagttaaacggaccttcatcaagaaagtttccactgtggcagccaggactcagccctgccaggtacctctgagagmcagcacagaacatgtgcttcagagtcatcatacccagagcaagggaccaggggtatttatccaccaatacccac

SEQ ID NO: 844587 - DNA, 433 bp, Homo sapiens
ggaaacttcaagaaggcttcagatatttgcattaaaaagaagcccagtgctgacagccaagacaatggggaaaagtccttgaagatatttcatagctccactttgcagtacttattttctgtgtggtcataatgaaaaggggattcattggctcatgggtcttcaggctgtaaagaaagcatggtggcttctgcttctgggaagactcaggaagcctcccaatcataccagaaggaaagcagcaatgaaatgtttcatacggcaggagtaggagcaagactcacagaggaaagaggtgccacmgcctgttatacaaccagatctcatgagaactcactatcactaagtcagcatcaagaagatggtgcttaaccattggtgaaggatccacccccccaacacacctccaccccctactgtttccagacagaag

SEQ ID NO: 844588 - DNA, 434 bp, Homo sapiens
ctcaatctcagctcactgcaacctccgccttccgggttcaagcgattctcctgcctcagcctcctgagtagctgggactacaagagcccatcaccatgcccgcctaattttggtatttttagtagaaayggggtttcaccatattggccaggctgttctcttactcctgaccttgtgatccccccacctcggcctcccaaaatgctgggattacaggcatgagccactacgcccagccaagaaatgagatctttaaaagtgattaggccgtgagggttgggtggaattaatgtcattataaaagggcaagttacaccccattttgtcttttttcctcctaccttccaccatgtgaaaacatggtgtggtgttcctcccctcctgaggatgcagtgttcaaggtaccatcttaaaatcagaatcaccaaaccaat

SEQ ID NO: 844589 - DNA, 313 bp, Homo sapiens
attcacattctccacactttgaggcacatatttattagttgagaaaacaccagtaacatcaggaaaaatcaatgatgtaattaatagtctgttggtggagatggttgaatcaattacctcctctgtctctctacagcaatggtattgttttgtccaaatttgggggtgtaaaaataataatgaaagttgatcttaatgattactaaatgtcacccactgattaagcacatatatwttaattcaatattcatataaatatttttgtaacatgttgttattctatatgtacaaataaggaaatgcagcacagaga

SEQ ID NO: 844590 - DNA, 628 bp, Homo sapiens
aaagtgagatttgagatgatttggcagccaacttaccgtgactgtgaccaggtgattccctggacaaggccctttaattcataccaagaggaccttcggaaactttgagayctggtacctctaggattaagcctgctgtgtcctgtatacacgctcacttatcgtattgtcctatacagctaggtatcacttgccaaaaagatacactcattcagccattcccctaaccgtgtaatgatccggaattacggggcaaatactgagggtgctgggaaaacaaattgacgagacatccttttatcttcctaacagggagaacttaaaattacaatgtttacgataatctataaaaagagaagggacatagatagaaaagtggttccgcgtgcgaactctgaggtcagcagtgtgactctgagcctgtcaatgaattcctcagtgcttcagtttccttatatgtcaaaagagagtagtagtatctgcagtataatgtggctatcggaatatgtggcctaatggtaaaatggctacagctgagtctagcactcgctgtttgctaccgctactactgctaatggtactgctgttattattagtaataatactaacatcaagagaaatcaatagt

SEQ ID NO: 844591 - DNA, 547 bp, Homo sapiens
ccttctttatagcacccctcaccacctgctgtattatttgtttatcrttcagctttctctctaaaatggaagatctatgagaacaagaacctgtctgctcattgaggtgttcctctagaaaaatgtctggcccatagcaggtgcttaatcaacaatttgtgaaggaaaagtggaggaaaaaaagataggagaaagcaaactcatgaagaagagtgcttgggtggggtgggaggagaagagggcaatggatccaggccctacagggattcactgttcaagcagaaagtccagggaaagccacatggcctccttcaatcggatgagctggagctgctgacatcccctgcaacctgggagccagtgcatgcaatgctccagctgggtctaaggacagaaggaggctaatgaacagccaccttcggagcaacagggtcacttcagtcctccctgtttacttccaagctgctgagagtcttatgcacatttcctcttctcacttgcctcttcacatccctagctgccgcaggaatttatggcttaattaaag

SEQ ID NO: 844592 - DNA, 598 bp, Homo sapiens
ccagaccctctgtagctgaacaagccatccaggtggttttgatgcagctaaagttctggaacaactaatgtagccccatttggaaaacttggctgtacaggcctccctagctggtaagctgctagcattttttgtttgtttgtttgtttgttttgatacagggtcttgctctgttgaccagaccgtgacctcctgggttcaagcgaggactcagcctcctgagtagccgggactacaggtatgtgccaccaccatgcccaactactttttgtattttttttttgtagggatggggttttagcccgggctagtctcaaactcctggactcaagcaatctgcccactttggcctcacgaagtgctgggattataggcatgagccactgtgcccggccctgccagctttgtataagctgaggagttctaaaaaatacctagactcagggcaaaccccagacacttaaatcagattctctgggaggtgaakcccaggcactggtatttttaaagtctctacagatggttctaatgtgctgctaagttagagaactgctgatctagaccaggccttttcaaacttaatgtgcacgtgaattac

SEQ ID NO: 844593 - DNA, 597 bp, Homo sapiens
ccaaagccagaccctatggtgtgggacgttcagcggggagcaacagaatgccatggcttggtcctccctgggctgtggtctggatttcactcaggaatgaaagtcagatattgcctgcttcaatgctgtaaacataactaaggataattatgtaagtagaccatcttttccttgcaaggtagcggtctgctgcattgacagagggtagtatttctaggactttttcagagagtaaaatggtactttaagggataatctgctatctaaagatgaattttaaatgttggagggggttgtgggattcggggaagacaatagaataatttgtgtcatggttaatttaacaaagagtttttgtttatagaatctgatcttcggtggattttaacaaccctcttcttccttggcttttcagataaagacgcagagcctcagagaagttaaacgattgatcctatgtcagggggtagagtcaagactcatacctatgccttttaacttcaagktgagtgctttttctttatacaaaagggcttccaaaagttatatttctttttatcaatgactagatcttgaaagccataccttttctgatgg

SEQ ID NO: 844594 - DNA, 684 bp, Homo sapiens
agacgactcgggagaacagatgccccgcttggcacctcgcttggcagcctgtgttctcccaggctctgagcctgtccaggctgtggggagcgcagagagtggaagccaggaggggcctcccaaagacctcacccctagggattctctgtctctgccagcagtgccgtgcacagggttggcagaacattcaggccagaggaagaggcacctggggttggcaccatggggttggcagaacattcaggccagaggaagaggccccggctcccgacccccacggcagtggcagaggccctgccctactccacactcgtgctgcacagctgagaagggttcaaacacgttgacatgacccagcctggagtgggaaggctgtgcaggtgctcctggaatccttgcagggagccaggatctgctgctctcggccaggccctggctttgccgctctctgttcctgtgtaacagatccagcaaaccctcctgagtgtggcctctggatggggcaaggcatagagggaaacacaggggagggccttggcctggttccccccagccacagccttggtgtggagaaagaggagggggaggagaggagcccctgagggccagagcctgcaccgggcagagtggccaccatgggctctgttctggtaagrgatccactgcagggtggccagggaagag

SEQ ID NO: 844595 - DNA, 496 bp, Homo sapiens
ggggtcccctgaagaggtaggaattctgcctccagactgcctttggactcaagactgcaacgtcgactcttgctggaatttccagtctgccacccctccctacagtttatgaacttaccrggccccacaagcatataagccagttctttaaaataaatctctctctatacatgtacactctatcagctccatttctctgaaaagctgtgactaatacacctttgcataagaaagaaaactaaaataatattttattgacctgattgggctctagtaggaacaggaacagacctgagaggacaggtggctgtcagtgcccacagccagtgtacagcttctgcatacagaaactcttaaaaatgcatgagtttggcacagaactctgggagcagccaattgctctgtgaccctgagcaagtcacttcccttatctaagcctcagtcttctcatctatacgatgaagataatatctgttttataaagaaatatgttctt

SEQ ID NO: 844596 - DNA, 632 bp, Homo sapiens
gtgtctcctcgtcctctctgagggccacttttaaggtcacctggaaacccattagactaaaatgggatgctctgagcctagaaccagccatgtctttgtttttctgcgtgggtccagggtgcagcttgctcrtggctgtgtaacatgctctacggtgcctgagaacctgaacgctcctgagctggggagcttggaggcagcaggaaggtggcaaaggggccactgcttatgatacaggtgttatctgtgagctgggtttttaaaagaactttgtatccagtttctgagagcagagccattcatcccagaagggtggcccacagggagaacccgggtctgctggccgcacttcacccgaccaattgggtcagccacctcgttccatcacctgatggggcccaagtctccccaaattccaccagcctaagtgtgtgctccagacctggacatgatgcagaggtgacttgggcagaagagtcaacaggattcttagagcatcagaaaagaaaattttaaaggtttgcatgtttatttataattacaatttacattactccaacagaggagcccccttgctatgttctaattcttagccattaagtcctacaaaaataaacccaagcttttacagt

SEQ ID NO: 844597 - DNA, 469 bp, Homo sapiens
tttcattcaagcatttaaaaatgttactatagatcagagtcagcaaaccatccagcctgctgcctatttttgtaaataaaatttttctagaacgcagccatcctcacttgttacatgtatctctggctgctttcttgctaccatagcagagtttagcccctgtgacagagacgtacgatccacgaggcctaaaatatttactagttggccttttgctttaaaaagtgtgctgacccctgctatagatgatacactccaggaccttgactatttcaaatcaatagttgctatggacctttcacatgtacaacaggagcatgaatatgacaacattaatgtaggsaatggggtagattttaaaatcgtggactattacgataaaaagaaaagttgtggcagtatgatgtgtgcagtactacctagaaagggatgacacagaaggatgggagctccaaggagagggctgcta

SEQ ID NO: 844598 - DNA, 622 bp, Homo sapiens
agacaaaatattgttcaagtacaatgaacagtttgagtgatttattttaaaaagaagtatataaacatgttaccactatatttttacctttttcaggacatctcatgaaactataagagattgtgggaggaaaggtttttctggttaggaatttttggctttcttttttataagatacaattcttcatcttgacagtgctttacatccaaggtgtttggagaaggtaaatcgaatgtggagctgaaaggaggaacatttgtaactaagaaagtccataatgacctagcacatcttcccttttgctgacaatgttttaaatcttcccgaagtaacagctatgttccttttgatatgctaagtatgttattaattgtttttagcagaaaaaggggcacattttggactccttgggacatgagcattttcttctggttttgtaaccttacaattaaggaagccctttggccatcgacaagaaatctatgaactaggggctgaggkgccaaaagcccagttatttgaagccaggagggtggctgtggccctgtggccctctgcctaagtaacggttccctttcttggggctggtaaagtcagacggttagatataaagaaggcact

SEQ ID NO: 844599 - DNA, 578 bp, Homo sapiens
tttccgtcatcttaagacagttttaatgtaaacgttacggtgttccttgcaaatgtgaacatttgcagaatagcacaagtttaaattatgggcccccctggaattttgtaaagcctttcctgccycagctcatctccaagaaccgggccctcccgatccttacactgaagaagcaagagcttctgggatggtagctttgcctttacaaactcatgttcatgtttgcttaagaagaatacgtattaagcaggcatttgccttttatgtggtgagactatagtgttttcccatttttggttacataaggttccgatcaagtctttaccttcagtctttaaaaatgcttatttaacatttttaagggcaaatataatctttatgcaacaggaaattggtcagataggccatgatttgtgcaaaccacctcacgataagtacatagtctaagactatcatatagattctgtaaccatatatggtttttgaaattctaggctaccattcccatatttaattttcagaaaaggaaaatatttttttcagccaagtctagatttttgagtgaaactaagaaaaat

SEQ ID NO: 844600 - DNA, 560 bp, Homo sapiens
gcaagggcaagagcaaaagattgaacttgcagcttcaagcccttttataattgtcatgactccattcgtgagggtggggagctcatgacccaaacaccttcctttaggctccacctcccaacattgttgcattggggattaagtttccaacagatgctttttgggagacacattcaaaccatagcaacctcctatatccatacccccattttctaaatagttatattatcatcttaaaatcaatattatctttgcaaacattttgattatgtaaatattgtacatggctgagccatattttgtactgacttttaaagtactttacatagagttaataattcccttgtttcctatttctttgctttatttatatagaactcattagattttccctaaattttatagcagatagttaaaacccctttttgcaatcaaacatatcaggtattctatcagctccttctcttttttcttccacacttcctcccatctwctcatgccctcttcctctcacattccttgctccaatctggactaatcgctctctaaaccagttccac

SEQ ID NO: 844601 - DNA, 669 bp, Homo sapiens
cataacgcagctccatgacagaattttcacatgctccagaatgtgaatgacagctactcattttaagggaaaacagcttagtttagtgtaaaaaacatggatattggagtctggagcttggacgctagctgtgtgactttggacatgccacatgtcatctttgagcttctgctttttcaaatacaaggatgttgtaaggccaaaatatgatcaggttgtaaagggtttgccacatactgagtgctcacatcaaaacatattagttccatttccttgaccttactccctttctcctttgataatgcttcattcaagggtagatcgaagacctcaggaccaaggaggaaatgaaatgttaagaagatttgactgtaacaaaagggttagtgttaacacatccattctgtacctatacaatagaagtgcaatagtaatcttagaagctgtgaaagagcactgctgcttcctctctctgggcctctgaattaatcaatgatgtaatatatataacacatataatatatatactatattatatatttattatatatactatattatatatttattatatataaatatatatttatcacataataaatatatatactatataatatatttattatatataataaatmtataataaatatacatactatataatat

SEQ ID NO: 844602 - DNA, 677 bp, Homo sapiens
acaagatacaggtcacaaagaccttgctgataaaacagcatgtggtaaagaagccggccagaactcaccaaaaccaatatggcgatgaaagtgacctctggtcgtcctcactgctcattgtatgctaattataatgcccaccaagcacctggatttaaaaattggtaactatttagccaggtgtggtggctcacgcctataatcacagctacttcggaggctgaggcagttgcagtgagccaagatcacgccactgcactccagcctgggcgacagagtgagactccatctcaaaacaacaacataaaaattgttaacatttttccataaaataaattactgataacattgtatatctatttgcttcagttcctccctcgacaaaacatatatttatttatgttaccacagttccattactgcacccaatagaatcaacagcagtggccgaatgtcatctaacagcctactcatgctccgattccctcagttcttccaaaactatgagtgactatttatttattaattattagtgaagcgttatcagaagatctgagatccgagaacttggtactgttgttcacttgatatgagtcrtagtatggattggtagacgaacaaaacttaagacaacaaaatagatagtaattatttatttgaaaacattttcctctcaa

SEQ ID NO: 844603 - DNA, 615 bp, Homo sapiens
attcagctaatccctccccacttattgaagagcctccccttttcttcctggactgcaatcttggctttctttcaaatatatatatatatttttaatgaaactcaaggttacagacaagttttcccattaatgtcctcattctattccaggatctcatccacagccctacatcagatttacttgtcaaaacaatctggttcctctggtctgcaagaggttctacatctctccttgtttgtcatgaccttgacggtcccaagcagtacgggccacgcgtcctgtgaactgtccctgagcctgggtttacctgctgtttcttggaaatcacaccacagaaaggaaatgcctatctcagcacaccgccccgggggtgcgtgatttccacctgccattgctgggggtgccgaccttcatcatgtggttaaggaggcatctgccgggattctccactgtgagcttcctgtggttcctttttgagcctattgtttgcaaacyagtcattgagtctgaccctgctcccctgtttggagaagagaggagcttattaatctccacctcctggataacgaggagtagctacatagaatcagaattctacagcaaagtttagtgtct

SEQ ID NO: 844604 - DNA, 615 bp, Homo sapiens
attcagctaatccctccccacttattgaagagcctccccttttcttcctggactgcaatcttggctttctttcaaatatatatatatatttttaatgaaactcaaggttacagacaagttttcccattaatgtcctcattctattccaggatctcatccacagccctacatcagatttacttgtcaaaacaatctggttcctctggtctgcaagaggttctacatctctccttgtttgtcatgaccttgacggtcccaagcagtacgggccacgcgtcctgtgaactgtccctgagcctgggtttacctgctgtttcttggaaatcacaccacagaaaggaaatgcctatctcagcacaccgccccgggggtgcgtgatttccacctgccattgctgggggtgccgaccttcatcatgtggttaaggaggcatctgccgggattctccactgtgagcttcctgtggttcctttttgagcctattgtttgcaaactagtcattgagtctgaccctgctccsctgtttggagaagagaggagcttattaatctccacctcctggataacgaggagtagctacatagaatcagaattctacagcaaagtttagtgtct

SEQ ID NO: 844605 - DNA, 583 bp, Homo sapiens
agtttagaaaggaaccagcccagattgaaacaagtggacaaaagagaagagtgaaaaaaaaaaaaaagwaaagaaaaaacaagttacaagttacattattgggttttaaagtatcaagagaagaaatataattttgtcaaataactcagagatggattacatagaattcgtgacaaaaacccaaataattttatttctaaaaaattataaattataaaaaatgagttgtaaacaatgtggttataattattatcatataatatttgactaaataaaattattatatattagtatttgacataatgagaaaaaaggaattgtgtatgtttgtgtgtgaagagatgtagaattctatagtaggcaatgcataaaaagaaaaagttctcaataaatagaagtacattactatcctttggtaaagagacatgtcagtagaaaaaattaaatgcattaaaagtggttacatctgaaaagggagaattaggtggtaagaagagtgaaatgggagattgacatttatcattataagtcctacaaatatttctgaaaatttaaaccatatgcatgtttaaatttgacaaaa

SEQ ID NO: 844606 - DNA, 545 bp, Homo sapiens
tataaaggcatatatgaaatggtcctcttctacctctcagacctcatcctgtataatttccatctttctcactttatcttctttttattactcaacattctcagtagctgtcatctcacagcatttgtgtgtgctgttccctctgtctaaaatgttcttcaggtggcttgctgttctcctaactatggtatcccttcaaaagccatctctcagaagcctgactacaccaacatatccctctcttagcccatacacctctattacatcttattacttctattttatatcataatttaatattagcttattcattggtatatgtattcatttagacaaatattaatatagataattgatttttggtttctctcttcaatattcctagaatgtcaccactgtgtgagcaggagtacagagttggcatttgactgtaacarccttagtacttaaaaccattcctgcgtagagaaggtgctcactaaatatttataggatgattcactaaataattcattgaatgtactatggtggttcctgctgctcca

SEQ ID NO: 844607 - DNA, 531 bp, Homo sapiens
aaaatttaactcataatttgccccgcctgtcttctcactttcagtgatgttgcctccatccatccagttcttgaaactgcccttgaccattccctttgccccacatccattaggkgggcccttttgcttctctccctagttagtctcagcagccagcaatacctttactaaagttacagcacagtctctactgctttcctcttctgtaggtccttccttctaaccgaagtgacttcaaacttcagacatatgtgcatatacagaatcaagttccctgcaaactatacttaccctcacaacttgcaggatattctgatgttgtctaatgtttcttttaaaaaaaaaaaaagctagttggtaacctcttgcattgatgagggatggcctgcaatttaaaaacactgcctattccattttataaaaaacaaccaggatagtgtctataaaccctgggcagaccatgtcgctctcttgcttaaaaccttcaataatttcatactcattactcttagcagatgaagtatgagatgc

SEQ ID NO: 844608 - DNA, 584 bp, Homo sapiens
gacggggtttcaccgtgttagccaggatggtcttgatctcctgacctcrtgatctgcccgcctcggcctcccaaagtgctgggattacaggcgtgagcctccgcgcccggccatgtcatgactttctctgattcttgggagcacttccagcatcattggtggcatttgtatgggtcccttggtgttattcaagtttgaggtatttccctaagcatggtgaaaaataggcaagaactgtgagagatactttttacttcagttctactggaaagaaaaatggctcacgtggagataattagcatcacacagtgttttaagcagatactcacaacacttgaactcatcgcaacagcaacaggaggtggccacaaaattattacagcagtatagtatttgctgcagttaattttgtgtagttataattgaatactgcatttctatgtttgtttacatttctctcaactgcaaatgagaccatgaatggtctgtgtgcataagttttgataaattttaactttttataatagatttgtatatattttgtgatggtagataatcaaatagactagtatctacgtacattt

SEQ ID NO: 844609 - DNA, 582 bp, Homo sapiens
ccccaagcctcagaccctggaccagtaccagtcggtggcctgttagaaaccaggccacacggcaggaggtgagyggcaggcgggtgagagaccgaagcttcatctgtatttgcatctgctcctcatcgctcacattaccacctgagctccgccttctgtcagatcagcagtggcatgagattctcataggagaacaagccctatcgtgaactgtgcaagtgagggatctaggttgcatgctccttatgagattcttaactaatgtctgatgatctgggtgaaacagtttcattccaaagctccacccctttgccacttcaccctggtctgtgaaaaaaattatcttccatgaaaccagttcctggtgtcaaaaaggttggggaccactgtattaaagtattagaagaaattatgtgagaatatgtttacaacctaagcaaagggagggaaagcaaaagctatgaagaaaaagctttctttcattacattgaaattaaatattttggtaaagcagaataactataaaaagtagtttatggatgggcaaaatcctgggaggaaacttttatgataaataaaaga

SEQ ID NO: 844610 - DNA, 319 bp, Homo sapiens
tgttaccttctttacccagacccttgggccagagcagccttgtgcccccattttttttcttttggtgaaactcactttctggctttactytcaggagcggggcaaggagttgggggaggaggactggaggtggggtgggaggcgtaactaaatcagaagttccgagtgaggaaggctcccctccaacacagaggcattcttctgacttagctaaacaagcttctggcaggaaaaataatttccctggcacaatatggtgccttatgccaattacctctgcgaggatccgcccactggccctccaggccatctggacaaa

SEQ ID NO: 844611 - DNA, 590 bp, Homo sapiens
tcatcctctttaatttatatagatttggcctttttaagaatgtaaagtatttattgaaaaagatggacatgcagagtttctatcccctcttgaccagtaactctrtggccttgtttccttgatgttcttcttaatgttctcaactgtgggaatgcttacctcatatagttgttatgaggattgaatgataacaattaatacagataacagcaataatagtaatggctggcatctattgggctcttaccacatggcaggacttgtgcctggcatttcatctgcactaactcagttaatgtccacaggccttagtcaggtgtctggctcttgggaggggtgctgtcaatgagagctattatttttgttgttattgtgtttatgattacaagagaccataagagacaaggaatcaaaagctgtgtttctccattatcagattatcaagggaacatcagtgaagaatatacataagacctcatgtaaggaacaaattaagcatgattgtgtctgtattctagcagtttatcatctacaacatacaattatttgagagaggaggcgtaggaagagggagcgagggagcgagaaca

SEQ ID NO: 844612 - DNA, 529 bp, Homo sapiens
atgtgaaaacacaaaaaggtaaaaaaaaaaaaaaaaaaaagaagaactttaaaaaaatcataatacatgcaacagaatccatacattttatatctatgtatactaatagaaaaaaarttttaatacaaagagttcataccagatgaattagagaggttttagctatggcttctcttctcctagcaaaccccctgacccctgctaagagaccccccaaccccttaatacagtgtaggcgcctgactaaagctaggctaaccagtgtttccctgggatgcttgtaattgatacaaataggaagaccctcttgcctgttgggccacagaggtggaaggattgaatctggggttgccaggaggtcatgaaaaaaaaatgaaaccaaggtgacaagcaaaaatgggagacggggacagagggcattgcttgactccctgaatccagtcaggcccaagcctgatcagcttcattcctgttaggtaaaccaacatatcacttttctgcagaggtaaatcaagttgagtttctgtca

SEQ ID NO: 844613 - DNA, 454 bp, Homo sapiens
ttttgtttgacctaatgtcctagaagtaaactgaaattctacctactccttttggagaggmatcacgggagaagtaccctcttaaaattctaagtcttctgttagcagaaaacatcatcttttggttagtggaaatttccactcccagcacacctaggcatttttacctctatacagcttcctcttggtttttgtgattgagttaactttcagcaagttaccttgtttctcccgtttcttatttaactatgctatatcttttacttctctttctccattaactaattcccacagcccttttcttaaacttttcctacgctgaaagatactttaaatattttgatcttcctctttacaaaaaggggtggcagggcgaagacctggtttgtccagaaatcgggtatcagatctgcccccaaatcttgattcacagtcatgacacaattcaaattta

SEQ ID NO: 844614 - DNA, 651 bp, Homo sapiens
tgttggaaatgaataaaagcactcctcagtccccaattaatcctttgctttccctggaaggcraaaaattttgtgacattgaaatcacaagtccaagccaaagccgcctccttaaatgaaatttccttcttagtagtgtggaatgctttccaaactcctagacatgtccatgtgcaatgtagaagtattcctaatgagaatgtcacaagaagcttttggtggagagcttatttattgtttataagatagaaggtttgattggcaggagagcaatgaaagatgatggtatggccaccatgtctcctatgaagggcttatttcttttataaagagtttggtttctagagtccccacaggctgagtgcaaagcacaatttctcttcattgcaggtgtgagtgtgagaacaattctttgtcagtccaaagggagaatcacgtcatatcttataggtagggtcacaagttggaggtgggtaactggatgctgttgtatttgtcagaaacagcagaattaaagattgcaccagaagtgagctctttgtttttctgcttatgaaataaggtcatatttgtcccatgtaacatgaggcaaagtggcaagaagagggcgtaaccaccacgttgattgtttgcatgtaggagggccacaat

SEQ ID NO: 844615 - DNA, 491 bp, Homo sapiens
taaagataggaaataactatgatataattccatatctcaagtttatttttagctaacgggccttgtcttgctcttcattctgaggcgtaaagtctcttaggaagagaaggaatcagaagcatgatgyagagtttgacaatgactaatttgaaacggagccatcttcattctttgtaactttaatctcaatttctcagtttttctcaaattttctactgtaagcaaaccttcacagaaataactcctcttagagatcacagtgagctatgtgctgtgtaaggttttattagaacaagcacataaacaaaaacaagtggctgtaaagcccagtgagcccagtttatagagaagccattgacttgcctgcagaacctggttacatttggattctgccacagagtaaccatgctacagggtgacctctgtgggctctggtttctgcgtcttgggagtgagtgggtggaactgtgtgattgctatgggagtgttga

SEQ ID NO: 844616 - DNA, 548 bp, Homo sapiens
gtccagacctgagtgcttttgagaatgaaaggggaaatgttaataattacatggagacagtagttagtatccagaacatttgtcctgttttgtgcctgaaaccaagaaagactactacactcggcttctctataaccagaggatcacagagccagcgtcacccgcagcaccaaatgataaaagctcagagtagccggtgcctgcatgtgaagggcggtttgtgttcctcgctactggaagtaggattatggttgtaataattatgtcgacttcagtattttttccttaagaaagttttattgtgccaacatctgcaacaatagacgctgtatactcttaggtaccaagcacccaccaggatttcgccatgcttattttgtcttttcctgtttatgcctgtgtgtgtgtggtggggagttaggggtggtagtggtgtgttttaaagcaaatctcggatgttatttttcttcttgtgatgcttacttcaaagtaagtaccactaaccttgtgccagtgttctyatgtggggtgaggattaattaaagact

SEQ ID NO: 844617 - DNA, 478 bp, Homo sapiens
gtccgaatgccaccagagatgagtatatgtgcagaaaaggcccttttgaagtgcagctggaattgccacttgagatgtttgacgccgctctcctgtccccacttctgatctgaattccccttctagaacaggccatcttgccagctgggatcaaggactgagcatcctccaggtctgtcacgtaaccctgacagcagcagggtgggttttcggatgcgccaaatgtgcccagtgccgtgcatgtgtgttatctcctccagccctctccagacacccagctctcagcaggtggccaaatgggtgtggctggggatagaggtgagattagggtgcttgtgagttggaaataragtgaaagaatttttaaattcatgatctcttttccttgggggctggtagagtcaagcttacctgctgggcaatgtggctggcgaagaaggaatcagggccatttctcttgctggcttctcttttggaa

SEQ ID NO: 844618 - DNA, 520 bp, Homo sapiens
tgggcaatccgggaaggcctcatggacaatgacccaggatttgaaagacaggtggtatctgacaagtgggcattccagaaggagcaaaggtacagagaggtgtgaaagcacaaggaagtttccaggccctcaaagccatccctataagctcatgtattatcggacaagtggggaagtcagggagagaaggtgagaaaggtgggctggggctccattgcaaagagtgggatgacgtcaaccccggagagctctctgggtctgaccaggctgagaagggccagaccgtgagtggcatgggcagcagaacccagccctcaaatcttgggcatctagtacccaggtacacaggtcctttgctggaagacaggacacccaaagcctcctgcttctctggacttgtgaagccccagctgccattccccgatccctccacccagacacctggacaacagggagaaggggtgcaggaaggttggagcaaattcattcyagacagaacacacggatcccctgccatggg

SEQ ID NO: 844619 - DNA, 662 bp, Homo sapiens
ggatttgagcccagagagatctaaactaccacactcttctattaatacttctctacatcagggtaaccaattacatgcttaacttatgcccatttcacagaaaaaactaagactctaacctgacaatatcaagtagcttggagagaagggctacttgacatgagacaaagcaaggttttctggagaccaaatctcagcagtgttgcaaaagtgggagtagtgggcactcgatgccagtggtattctctgatgcaagagccttggaaccaacaattcctcctccctcccccaacctttgccttaaaaattccccattcagtgcaggcagatgcctataaattttcagatgcccctacctggtaatggatgacatgctggactttaggaatatccagaccccgagctgccacatctgttgccaagagaacacagctggggtagagagagaaagcttattaataataactaacagctatctttaatcaaattcttaccaactgctgagcatcctaaacattacagtccttaccaatactctgtaagatatcacttgtatacccttttacagaaaaactgaggctcrgagagattaacttcccaagctatctacatggctattcagctgtggagtctggatccaaatttgggactcattgacccca

SEQ ID NO: 844620 - DNA, 588 bp, Homo sapiens
agccatgggttggtagcagatacctacgagtttgggtaaattcctctccttaagaggtttcaagataacttggggctcttgggcctgtcagaaagtgacattctttggtcaggaaccctgtacagtgactgtgtaggcaagatacgaggctagttttcccaaggggcttttattggctctataagtcaagtttgattccttaagggaaagcacatcattacagtcaaagccttggtaaaataaccgatgtctccaattgcatccaattgcaaaatgaaatggattcttattgtacttatgcagataactatattgccataaattaagaatatgcagtttccaaattctggagaaatcaggtagagagaagcaaatatactccaaattttgttcacagtagtatactttactcaattatcaaaagttgtaaatagctcaaaataaaaatttttttggctctgtaaaagatcaggaaaaagtcagaaagattggttcagacttctgttagtttagttcatgcrcttaattcctgttctgtctgatgctcatgaacatttcagctctccatgaaagtcctgaaagattttt

SEQ ID NO: 844621 - DNA, 514 bp, Homo sapiens
aaaacaaggtaacagttgcctgtggatgacaaaaagttttaggacagccgctattatagccacaattggctagaaattgtggttacttctatggcatacaacaattttacataacaattataactattagtagcatacactaagtcatatcatgattataggagtttcccataattttagaacacataccaataacttagttatacaaatacagccaagaaagccaaacacccaaccatttcatatttaaccatgcttcctatatgatttttataccaaataaggcaaatatgtcatttttggacttgaggagacctagtatctaaaagattaattaggaggtcagaagaagacataatttataatttgattttggaaattttgycaaatatcagaggtttaaaacacttgatattataaaatcaaatcccaggtcaccataagtcatttacttagctgaaacaataactcagaattttttaaaaggcaaaaaacctttactcattaatagagg

SEQ ID NO: 844622 - DNA, 514 bp, Homo sapiens
aaaacaaggtaacagttgcctgtggatgacaaaaagttttaggacagccgctattatagccacaattggctagaaattgtggttacttctatggcatacaacaattttacataacaattataactattagtagcatacactaagtcatatcatgattataggagtttcccataattttagaacacataccaataacttagttatacaaatacagccaagaaagccaaacacccaaccatttcatatttaaccatgcttcctatatgatttttataccaaataaggcaaatatgtcatttttggacttgaggagacctagtatctaaaagattaattaggaggtcagaagaagacataatttataatttgattttggaaattttgccaaatatcagaggyttaaaacacttgatattataaaatcaaatcccaggtcaccataagtcatttacttagctgaaacaataactcagaattttttaaaaggcaaaaaacctttactcattaatagagg

SEQ ID NO: 844623 - DNA, 560 bp, Homo sapiens
ctttcacagggccattttagcttcctggtcgtacacgtccaagctcagatgccacgtcctctgagaagccttccctaatggagcccctccctcttcgaatactcctgtccttycctcgaactcacaccagccattgctggaaacccactgttacatgccatggtttcttggagtgtcgggggccgtgtggggtctgtgctgcttcagggcagaggtgacacctgcctgcaggagttgcccttctgaacctggctcagtaggaagacagggctcagagaggaggcacggctgtcccgcggtcccacagcaggtgggggatagccttggccgggcacaggcacagctgcagtatttttcacaccaaatcagcccctgggacattctggaacaagttggcagtggttcttctaaaagtcagccctccctcattccttttctaggaattaggctctcctgtccttggaggcctggagaggtggcagcagggggtggggacaactcatttcccctctcgtaactccatgactaactgacaaatgaaagtgacagccttgcctgcc

SEQ ID NO: 844624 - DNA, 632 bp, Homo sapiens
ggatccttcacctgcagctgccacagctaatgccacgtggagcagagacaaaccacccacaacttcctgacccataaaccacaagctatgataaaaggrttgtttcgtgccactggggattgaggtagtttgatatgtagtaataatcaacccagacactcaccaaatattcactgcggtctcagctgcatgctcctcagctctcgtgtgctacccgtgaacttttttctgactttccacttgtctttgtttccatttaaaagaagaaaaacagattcaaactaaatttttttttacctcactctttacaaaagaatgtagtcccaagtcatttcccagttcttgggtttatcagaccagaagctccttttggctgagattctgtcttacaggggaattgtggtccctctaactggagggactcttggctatcctggtgttcagagccctcatttactagttcaggccccaagaggttctgtgccttctctgagatcacctggcaatttgggggcagaataattcacacattgaaagccatgccagtgggaaccatgccccatgggatcagacgctgatgtcctaaagcacagacactctcctgacaaaggcagggacagcgttcaagcatc

SEQ ID NO: 844625 - DNA, 522 bp, Homo sapiens
gctgggattacaggcatgagccactgtgcccagtgagtagtgtagtttttaaaaggagagccaggagggagccgctgttccgagtttcttgtctcatagaccttcacaggraagagggcacctcaggtagggtttgagtgggatctcagaaggaagaggctgcactaaagaaaagggacagaaacgccggagtagggacttgcattttggctggagcatgcggaaccccctgagcagtctgagaaggtggctgggggaccacgtggggccccaaacaccaggctgaggtttagactccatcaagggcggtgcaaggggagcctcacacactcatgcctctctgttctctgtctttcccactctttccaaagcaagctaaagtatcccattaatcttccccagtgcagaggattaagctggtggctctcaggtttgaacacgcatcaggaggccctgtatcaatgcagagtgtggacccacctccagagcttccaggccctagaatctgcatttctaacaagt

SEQ ID NO: 844626 - DNA, 522 bp, Homo sapiens
gctgggattacaggcatgagccactgtgcccagtgagtagtgtagtttttaaaaggagagccaggagggagccgctgttccgagtttcttgtctcatagaccttcacaggaaagagggcacctcaggtagggyttgagtgggatctcagaaggaagaggctgcactaaagaaaagggacagaaacgccggagtagggacttgcattttggctggagcatgcggaaccccctgagcagtctgagaaggtggctgggggaccacgtggggccccaaacaccaggctgaggtttagactccatcaagggcggtgcaaggggagcctcacacactcatgcctctctgttctctgtctttcccactctttccaaagcaagctaaagtatcccattaatcttccccagtgcagaggattaagctggtggctctcaggtttgaacacgcatcaggaggccctgtatcaatgcagagtgtggacccacctccagagcttccaggccctagaatctgcatttctaacaagt

SEQ ID NO: 844627 - DNA, 595 bp, Homo sapiens
ttcccactctttccaaagcaagctaaagtatcccattaatcttccccagtgcagaggattaagctggtggctctcaggtttgaacacgcatcaggaggccctgtatcaatgcagagtgtggacccacctccagagcttccaggccctagaatctgcatttctaacaagtccccagatgtggcagatgctgctggtcctggggttacattttgaaaaccactgctttagagtaatggcaaatcctacatgctgaagccaggcactgctccactgtaaccaccaactacccctgcctggacttcggaattccctctgcacgatggggctggaccgggcattccaggagggctgccctaatcctgtctgacctcccgggaggtgctggagagagcaccaccttctacgcccagggtgaagttctgtggcttgttgactgtgccttcgagggctctatgtcattctgtcccctatcacctgcctgctgtgcacctgtcgtgyttgatctagctcagacattttgtcacactccttggggaggagcgggattggaacagttgcttggcgtggcaatggcctggccaccagtcgacatttg

SEQ ID NO: 844628 - DNA, 572 bp, Homo sapiens
tgcactccacaagtgtcagcagttcacagaatccaaatgaaagagtggggtttcatggctctgtgatttgaattatgtagaatctataatctcaagttcacaaaattgcatgcatcttggggccattttcattgaggcaaaagagggagggaaaaccacatatcttttagagggaggaaaaacagttcaaaagagagcaagtgacacagattcttcttttaaaagcagcaaataaatttcaaggaagtgcacataagctttagctaacattctaacataaaactaacaaaagttttgcctacccaactcatatcaggtcttcaggcaatgacaatatagttttcattattcattactgagaattaattcaattaagtttctgcatatggtctttggattgatttgttaccccaaaccataccactttcattatacgctgtatggaggaattctttcaagttttcctgaacacacttttcaaactgwatgtttagtatgattttaccacaacaatgaaatttttttgggtgcaactgaaataaactacaactttgattttctaaaatacaaaa

SEQ ID NO: 844629 - DNA, 565 bp, Homo sapiens
gtagctcatcccggggagctsggatcctcttttccgcacttggggaagacgaatgccgaccattggctcagacaccataccacacaggcatttctggaggcatttcgcggcgttattatgggaagttgcgcggaccggggccttcgcgctacagccgaggagtctcagcgcctgccaggcgggagccgcacttccggcgaggtgtcttcgggagggggcgccacagcccgtggcagtgccggcctcccgccttaaccagcccgactcccgccgcgccagcaccgtggggagcgagtgggtcccgcccggccgcggcctggacctggcagccgggcttcgtgggcgctctgagccgtggcccgtggcgcggggtgatccttgtgcctggcgccggcctcagaaccccgtttacggctttccgcgcatacggaggttgctggggaccccgacacctgcgcgccctcgactggggcccgctccagcagtgaagacccaggcccttccctgggccgtggctgctcttggtgcctcatgggagcgcccggggtagggactcggctagtga

SEQ ID NO: 844630 - DNA, 606 bp, Homo sapiens
catccctgcaaataaagcagtaaaatttacattttattctttaatgttccgttattgcagaaaagttaatagtgtgtaaatgttattgtagaaaagataataacagctatgttttagttccaactgcccatttttagcacataacctgtgtttaattttggatggagactttttcctctttggaagatttgtaagatatatttaacaattattaaagaatatttgctccccgagctatgcaatagaagtctaagaagcaaatggccacatgttgtcatgtgacctgaagagttgttcaaaatattcaattagtatttacagctattgagaggttagatgactaatcactacctcttgccaccctcagtcatgagcttaaagaaaggcagctgccctgagattggcacgtacaactatactacagaaaataacccaaactgatgttccaagaaagctccaggagataaactggagtttgtcaaaatcatcatttstggtccaactgtatgagtggacttaaaccatggatcagagaacagccacagaacactgataactttgagtggcttctcatcgctccaaactccactttggattggctgaagc

SEQ ID NO: 844631 - DNA, 585 bp, Homo sapiens
gtcttcattgtttaaggcaacatgggtgaggttctgtttttcttgtacccaagagaattctgatatatttacatgcagktttcctgcctgctccatgacatttacacaccacacacacacacacacgcacatacggggagagagagagagaattccttgaattatcttttgtccatcttttttaaatgctctacttcctgctatcatgactgatgtatatatagcaactattgataaatatattgaattcaattcaagggggaacatcttccatggatgtaaaataataaacagtgtaccacattaaccagagcaagattagctaagatggctgctatcatattgctgcccactgatgaaaacaaagttctcattatattcaccttaagtataaagtgtttcaaggataaaatgttaatacatccaatcaagaacgattttttagtttatcaaataaaattacaaatataacataatctttctcctgctcaccccacaatgcagaataatttatgaatactttttctttagtatccttaactccagtttctctggattaggataatgaatagaactgaatgttac

SEQ ID NO: 844632 - DNA, 640 bp, Homo sapiens
gtttatggagcacatactcttgagacattcccttgcttgattagatgaggcaaaaatacaatgtggatgtgaattctaaacagatggggaaaataaccatagaaaaggaactgctggctttggccaaattgttaaaggttctcctaatgggctagcagaatatgcttcgtggagaaagaagttagaggggatctggccactacaaacaaaaagccaaagttaaatgccccaccactgggaaggagggagaagatgataatcagagagaaaaacaaggggtgtttcagagttgctggtaatctatttcttgactagtgatgactaaacacgtttgcacacttttaataattcagcaaactctacacttataatttgtgcacctttccatatatatgttacatttaaatttttttaaaggaaaggaagttaaatgccggactccctaactgagattcatatagactaacctcagaatctgtgggtttctgtgaaagaagtaacaaaaaggaatttgttcaatgttaacactaaggcatatyattgagtgagacacatgttgttgtggtgacatttcatcttatcgggtccgtttgtgaacattctggtgtggcattagtccaaactcattgctgcatactaa

SEQ ID NO: 844633 - DNA, 647 bp, Homo sapiens
tagaaaaaaaaataattcacaaatttgaaagctcatgtcaattatttagtcatactttaataaaatattggggcaggaaaagctctcaattttattttatcactaagccatatatatccagggcacatatttgcatatggttacaacgtgctagcacagattcgaaacatcatacatttgtttaactactgcttcttttaaataattaggacttaaaagagtctagcaattatagtttaaattgcaaatggaaaaacatagaggttctatttatctgaatctgtattgtcttaaacatcagtgctggtagaattactttgcatttagcagtatttttccttatcatataaataatacattaaggtataaaactgcccacctgtgctgtacatggttattgttcattatgttgtccttgggaagtctggttcctaaatatttattactatgaactcatccagttgctttaattcataaggaatatgtggaaatcctaatcttgttcttttgaaatgcagygaaccctggaattaatgtggtagctgaagtagggggaagtttaaaccacaattcttttgcacaggatcaatggatcagttccagtgtaaacaaaggttggtttagtcaaattagccatctgtctctga

SEQ ID NO: 844634 - DNA, 404 bp, Homo sapiens
gcctgcagcagctggtgagctgtggggctggagatgaaagtgaccaaacaccaggaccctctgcagaaacacaagtggcagcatgtggtctgaacccagcaacagctcccagctgggaggacacrgagagaaccaaggggacatgaggctcccaaaggcaggagcaggttgcctcttgccagccaccaaggaagagacttccagagcggaagtccctcagctacctcccacccaagagtcagcccctagtgtccctggggaactctgatatgacccctacagaccatattctagcaactctacatatgccaaggctggctcaggggcggggagctggaatctgagcccacccactcccatgggactctgtactgcctgggactcctactccacacctgtttccc

SEQ ID NO: 844635 - DNA, 646 bp, Homo sapiens
atttagatcatgggaggtaacatctcttacacaagatcacacccagagcactagagtcatttttggaaatcattttttttaacttttaaatgactgattttcttatttataaaacaggccaggtcgggcacgatggctcacgcctgtaatcccagcactttgggaggccaaggccggcagatcacgatgtcaggagtttgagaccagcctggccaacatggtgaaaccccatctctactaaaaatataagaattagccgggcgtggtggtgcacgcctgtaatcccagctattcaggaggctgaggcaggagaattgcttgaacccaggaggcggaggttgcagtgagctgagatcatgccactgcactccagcctgggtaacagagcgagactctgtctcagaaaaaaataaaataaaataaaataaaataaagcactggcagggcacagtggctcacccctgtaaccccagcactctgagaggctgaggcaggaggatcacttgagcccaggagttgaagaccagcctgggcaacacagtaagacctcatctctacaaaawaaaaataataataataataataataacaacaataataataatgtattacatccaaataggccgtgactttaaaaatggctatc

SEQ ID NO: 844636 - DNA, 646 bp, Homo sapiens
atttagatcatgggaggtaacatctcttacacaagatcacacccagagcactagagtcatttttggaaatcattttttttaacttttaaatgactgattttcttatttataaaacaggccaggtcgggcacgatggctcacgcctgtaatcccagcactttgggaggccaaggccggcagatcacgatgtcaggagtttgagaccagcctggccaacatggtgaaaccccatctctactaaaaatataagaattagccgggcgtggtggtgcacgcctgtaatcccagctattcaggaggctgaggcaggagaattgcttgaacccaggaggcggaggttgcagtgagctgagatcatgccactgcactccagcctgggtaacagagcgagactctgtctcagaaaaaaataaaataaaataaaataaaataaagcactggcagggcacagtggctcacccctgtaaccccagcactctgagaggctgaggcaggaggatcacttgagcccaggagttgaagaccagcctgggcaacacagtaagacctcatctctacaaaaaaawaataataataataataataataacaacaataataataatgtattacatccaaataggccgtgactttaaaaatggctatc

SEQ ID NO: 844637 - DNA, 636 bp, Homo sapiens
gcagtgcaaaacggggagcctggatcccacagccaggggcctgcaggtgtggccgtgcccttcccagcaggtgtgagccccaaaccaaggccctgcctgacctgccccgctgagcgtcccatgttgagctaaaccacaagccctgagccaagcagagtcctggggatctctgacacttcgcccttccctgctgaccgtggtcaagagcatcctggggccccagtggctggtgtgagcgggcgcccaggcagactcttcaagcccaagtcctactcccaggtgtatcaggtacagccatgaggtcacagtacagaagtgttaggaggatgcaacatgcgctgcacacacaccaaggcataactggcagctggcagacgcctgactgggctggctggggatggtggctgaggtccaagagggactggggtggatttgcctccgagcactgctctgcatcctgtgttcatggctgtaagcggcggcaccttctggggctgatgctgcctctgccaggctccctgggtgtcagggagcaatgtgagaggcctcacaccgcctcggagcccgggcagaggtggaaagctgggacaaggcagtcmgctgtcctccgagccacaggtcatgtctccctgactc

SEQ ID NO: 844638 - DNA, 621 bp, Homo sapiens
cataaaatgaaacaaggcagagggagtaaaaaagaaaagaaaggagaaaaaagcagaccccactcaaatctcacagacattttataactaktttagacactgcaggcctttccttctgggtagtgcataaatacggcttctgagaagtcgccggtagaatccccgaaggccccctaagtatagaagtgaaataaccgtcaacaccgtaatgagcaaacataggggcacttctagcagaaggggattaggaaatagctcagttggtggctaccataactttctgaaacatgttgacaaaaaaaacagaacaattcagatctgattatctacctgggttcaactgctgtgggaccagagacagtggattatcctttctgagtctctgtgttgttccctctgaaatgagagaaaagggcaaagttttcttagaagtgaaaacatttacctttcacaacttcaaatggaataggtaacttgaaatgtggcaattatccatcgttttgtgtaaatgatgtacacataagtgtctctcccacccaaggctgacactcagcctgtggtgtagatggctcccatagaatggtacacatggtggtcctgctcccaccgctgagaaagaat

SEQ ID NO: 844639 - DNA, 561 bp, Homo sapiens
tcaaaaacaaacaaacaaacaaaaamcaaatattactttaagaagtttggcattattctagatccatttgtaaaaaccactcacctttttagtcatttcaaactgtacagtactcacgaaacttatacatgggctgaaaggcattatgccaattaacttacagaaaattaaagacgaaacagcctggtcatacaaagtaaaacaggttcagtaaatttcattttcaaatatcaccctgatggtagaaaaaaatcaggggacatctggtattacaggaaatagggtgtacagaggtatttgtataatgtgaacaatgttttgcctcataaactgagaaaaacgtgttaaaacaaaatgctgtaaaaaacttacaagaaccttaagaagaatacttaagattaaattaaaagtgttattttcaattatagaaggattttgttttaatctgctattattttattagagtaggcttaactatgagttctagaaattattataatagattttcctaacgcaatgactatattgtcagcttggcctgacacaacaaaataccataga

SEQ ID NO: 844640 - DNA, 561 bp, Homo sapiens
tcaaaaacaaacaaacaaacaaaaaacaaatattactttaagaagtttggcattattctagatccatttgtaaaaaccactcacctttttagtcatttcaaactgtmcagtactcacgaaacttatacatgggctgaaaggcattatgccaattaacttacagaaaattaaagacgaaacagcctggtcatacaaagtaaaacaggttcagtaaatttcattttcaaatatcaccctgatggtagaaaaaaatcaggggacatctggtattacaggaaatagggtgtacagaggtatttgtataatgtgaacaatgttttgcctcataaactgagaaaaacgtgttaaaacaaaatgctgtaaaaaacttacaagaaccttaagaagaatacttaagattaaattaaaagtgttattttcaattatagaaggattttgttttaatctgctattattttattagagtaggcttaactatgagttctagaaattattataatagattttcctaacgcaatgactatattgtcagcttggcctgacacaacaaaataccataga

SEQ ID NO: 844641 - DNA, 504 bp, Homo sapiens
gtccttaaatgctctttgaaaacagaaacactgggattaatttaggaaagaggaaactggttctagtgattttttttccataaaaaaaaaaaaaaacaaaaaaacacgtgactaagagcacttataaaacacagacagcctctccctcccctagagcaaactgttatgtgtggggatagcgcccagcaccagggcggagagagatcttggttagtattcctaggatggctgcctggcagtctttattgccttctttatagaggctttgcatctgcagcctcttgggggatgcaggtgctgagataacctggcttcacctgcattggatgagtcagggaggaagcctggcatgcagttcgtccctgaagtaaccgatgggacgagagagaaagctctggttccactgctcacaggccacaagcaggtcacagtccccccagtgacagatcacgcagggaactgacactactcasagtgcgctggaggttgtgcatcctacagcca

SEQ ID NO: 844642 - DNA, 580 bp, Homo sapiens
tagttaagtgttggaccaaattggaacactcagttaagttattgcagaacctgcactmttctgtgcacgtgtgtgttgtttttatggttgtgattgtgactgaagtatttaaggcaaatcccaatccttatgtcacttcactcctaaatacttcattatgcatttctagaaaatatgaatattttcttatataatgtttatgtgccattatgatgcctaactaaatacttcattatgcatttctagaaaatatggatattttcttatacaacttttatgtgccattatgatacctaacaaaactagcagtaattcttcgatgttacatgtaatccagtcatattcacatttctctgattatcccaaaaatgtctttaaaaaatcttaattcatacacatcaggctgcaaataatgatctgtacattgcaacgtttgctacatcacttaaccttattttaatctagagcagacttacctttttaaaaaatgtcattaacttgtcgaggaaacttggtcagttgtcccactgaagtccccaatttatatttgcctgtttgcttctccatggtctcatttaac

SEQ ID NO: 844643 - DNA, 538 bp, Homo sapiens
taggaatagcattgaatctataaaaactttgggcagtacagccattctaacaacattgattcttcctatccatgagcatggaatgtttttytatttgtgtcatctctgacttttttgagcagtgttttgtaattctgattgtagagatctttcacctccctggttagttgtattcctaagtattttattttttttatggctattgtgaatgggattacgttcctgatttggcactcagcttgaatgctgttggtgtgtagaaatgctgatgatttttgtacactgattttatatcttgaaactttgctgaagttgtttatcagatctaggaacttttgagcagagactgtggtattttttaggtataaaatcatataatctgaaacagtttgactcctctttttctatttggatgtcttttatttctttctctttattgattgctctggctaggacttccaatactatgttgagtaggagtggtgatactggacatctttgtcctgttttgattctcaaggggaatgcttccagcttt

SEQ ID NO: 844644 - DNA, 657 bp, Homo sapiens
ggaagagtcacccatgtggatatctgtgcgaagagcctttgtagattggtaacaaggacaagaaagaaggcttgtacaggtagaacatggtgagtcaggggaggggcaggagatgagactggacaggtcagattatgttaaggccttttaggtaagagtttagatttttattttaagacaatgtgaagtcattagaaggtttaatcggggaagtgatatgatctggttcacattttaatggagttagagaaataaaacagaaagtagttcacaaactcgtttgctttcagtggccaggtagtacaaaagtattaaacagatccttataagcaaaataagattgcattgataatagcaactttctttgggcctaagttttaggaggcaatagagagcatagaccctgtgttaagaggtgtagcctctcctgagtcccgcccaggttagggcaagtggaatcatatgcttagttttgccagcttttttaattttccaagagaagtaaggaatctagagtgttttgttaaagtcttaaatttataaatatyatcaattaatatttatagtttatagtaagtagtttataaaaatactatgggccagatggaacagccttaccggtcagataggatctcatgggtggcactttgcaatctc

SEQ ID NO: 844645 - DNA, 389 bp, Homo sapiens
ttttccccatcagggagagaatattgggcccaggccgtagtgcagaaaaaaataagctgctgctttttcaggttttgcgggtcaaattggtcccagtggcttaggatgcatttcaagggtgagcttgttgatacctgagtgtttcccatctgaaaggaaaaaccgtccgtggttttggtctgtatttttccccatccaagaacccacaatggtccctggaccctgctgtttggaatagttgcgctcactgaagcagcagtggaaatacttgttttcctcctagaccacaaagaggaccraggaaggtcagatttagtggctcttaaccaccacattctcaaaaacctgcacccttgcctttcctcttagaccacaaagaggaccgagaa

SEQ ID NO: 844646 - DNA, 624 bp, Homo sapiens
atgtggcacaaagcataagggaaggagagggtcaaaaagagttaattggctaagttatacttgtcctgtaagcttttactgattggtcatgcagtggttgaacttcatataactggaattttacctttttatccttttcagacagcacttttaaacatcgtgttaagagactcatttgcagctcccgaaaaagatattttcctagccttattaaactggtgtaagcacaattcaaaggagaatcatgctgaaatcatgcaggctgtgcgtttacctctcatgagcctcacagagcttctgaatgttgtgaggccttcaggactgctgtctcctgatgccatcctggatgccattaaagtgcgatctgagagccgggatatggacctcaattatagaggcatgctcagtaagtacctgtctatcctaaactcaaccaagaagcttggtatgcctctcatgccattaaaaccgcaaagctactacagaaccgtgtagtgcaggtgtacatgaaatatgtacgtttataaacagctagcctatggmatgtctttccctttcattttcctgttaattcctcctgagattgattagcttttgtagacccccaaataggtatttcttgcc

SEQ ID NO: 844647 - DNA, 609 bp, Homo sapiens
attcctggtgggagaagtctataaacagctgctctgggagtgtctgtcttatgcagttgagataaggactaaaatatgccctggtctcctgcagtaccctcaggcttactaggattgggaaaccctgccctggtaaatttgaggtcagactggttctctgctcttgaatcctgttttctgttgtttaagatatttatcaagacaatatgtgcacagctgaacatagaaccttatcaggagtttttgattttgccctttgccttgtggtctttgctttgccctttgcctcgtgatatttattggcctagaagcatatgatctttgttctcctttttgccctttgaagcatgtgatctttgtgacctactccctgttcatacaccccctccccttttgaagtccttaataaaaacctgctggttttgcggctcaggtgggcatcatggacctaccggtatgtgatgtcgcccctggyggcccagctgtaaaattcctctctttgtactctttctctttatttctcagactggccgacacttagggaaaatagaaagcaccttcattgaaatactgggggtgggttcccccgatactccaaattttgttcac

SEQ ID NO: 844648 - DNA, 380 bp, Homo sapiens
ggggaaaaagatggtgtacaaaatagcagttgcccccctttcccccaatgccaggttctctacctttgaggaatgtagtcacattcaggaggagaatcctgatttgactgtgggctatcttgaatgggagctcaaaaactaaattatgcacagttatagagaagtaaagtctacactcttgctcacacatgtatacataaatgaattggaggtaatgaagtaaagataggagtatgtgtattaaactttttaaaaagtttggttatgaagaggagtaaaaatgaagcataagttgggggataagggagagtttaggrcttatttaaatgctgatggaaatgagccagcagatgtctgagatgctgaagatgttgggggtg

SEQ ID NO: 844649 - DNA, 525 bp, Homo sapiens
gctgggtgcagtggctcatgcctccgaaagtgcctgtaattgcagcactttgggaggccgaggtgggccgatcacttgaggtcaggagttcaagaccagcctggccgacactggtcacagccagtgccagggaaaggcagtctctcaatagatagaaaaaacctgaagccaatagatagatgaaactctgtctctactaaaaatacaaaaattagccagttgtgcacctgtagtcccggctgttcaggaggctgaggcaggaacattgcttaaacccgggaggtggagattgcggtgagctgagatcacgccactgcactgcagcctgggtgacagagtgagactccgtctcaaaaaagaaaacataaataaataaaactttagagcaggaatgaaaggaagtgaagtacacttggaagggggccaagagagtgacttgagaaatcaagtgccyggtttgacattttgacttggggttttataagttggcatgcttcgggattcttgccgtcttccctggttctt

SEQ ID NO: 844650 - DNA, 571 bp, Homo sapiens
tagataaaagaaatatatatatacaccatggaatactactcagccataaacaaraacaaaataataccttttgcaactacttgaatggaactggaggccatttttttttaaattttattttttattacttatttaaaatttctttttcattttttaaaatagagatggagtttcgtcatgttgcccaggctggtctgaaactcctgggcccaagtgatccgcccacctcggcctcccaaagtgctgggattagaggcgtgaggtaccacgcccagtggaggcaattattctaagtgaagtaactcaggaatggaaaactaaatactgtatattctcacttataagtgggagctaatctgtggggacacaaatgcatacagtgtggtataatgggcattggagactcagaaggggggacggtgggagggcagcgagggatgaaaaactacatatcgggtacaatgtacaccattcaggtgatgggtacactaaaatctcagacttcaccactgaacaattcgtgcatgtaaccaaaagccacctgaactccaaaagctattgaaataaacta

SEQ ID NO: 844651 - DNA, 446 bp, Homo sapiens
catttcattatatttataacatctcatttattatttcttcaattcacttcattttcctatatacagtattttttaatgaaggagctatcctataaaaatgattgtttccatctttaaatgtgaaaagatacatttaaaaaattatattctaccaattcctatgtctatttttgatctctggccttacttagctctagctaagaacatcacaaacggtgatgtgacaatgtactaatttattacaccacaatgatggcataagagtgaactatgataaatatttctattatttacacatagaggaattgcaacgtcaagtaatcttatgaatccacaaaatcttayggttaaaatggaaaggtccacaacaaaaagtcatagctcttgagtattattagggtgaccatataataatctaagttaggacaattttgagggtattaaca

SEQ ID NO: 844652 - DNA, 577 bp, Homo sapiens
taagcaagatatatattagttgcaaggagagtacataaaaatattcaayatatttggtttgctactgtaaaaagaaaaatacacatgaattcagtgtactgggaaaataaatcaaatatatttaaagacaggcataagtttctgtaatgaaggtagacatcagctgcaaagtagaaatgattagctcaaataacatatatgtcaagtagatggacagcaaatttgctgcttttcgttagcttgtgacattagcttgaattctgtgttcatatgtgatgtgtgcttttctacattaccacaattaaccagttgatgattgccatataaaataattttagaagtttttacctctactcaccatagttctttgcccttacttattttaaaattatgacattgtttctttgggaaatttgtaattacaattcatagctttaaatgatttctatgcatctgatgaaaatttcactataagaaattaaactggtaagagttgctttggacttactcaattttaaacaacattaaggcaataatttttgcttttgctaagtgatatgagaaacaatagtctaaa

SEQ ID NO: 844653 - DNA, 529 bp, Homo sapiens
tatgcaccagtgttgatgttattgattaattaacttaaattttcacttgctctgagatattgggcaagttacttaagcctccatttcctcatttgtgaaatgcgggcgtaataatttttaacttttaggccttgtacatgtacatgagagtttaaacagaataactaaacagaaaagcatagcatacagtacaatgtctggcatttttattaagtatccaaatataaaatataatttctttacttccttggggttcccaattgctctttttcagagataattctccttgtcagagaaagcaaaactaacaaaataagtgggaatcctttcatttaatcattaattttctgccttggtaccctgaggtaaacccagccttccatgttgtgcttcaatttttccttcaaagttttgtaaatctctgcttattttaatcttttttttttttttttttttttggagacatttttcgctccgtcsccaagctggagtgcagtgggcgcgatctctgctcactgcaacctccgcc

SEQ ID NO: 844654 - DNA, 529 bp, Homo sapiens
tatgcaccagtgttgatgttattgattaattaacttaaattttcacttgctctgagatattgggcaagttacttaagcctccatttcctcatttgtgaaatgcgggcgtaataatttttaacttttaggccttgtacatgtacatgagagtttaaacagaataactaaacagaaaagcatagcatacagtacaatgtctggcatttttattaagtatccaaatataaaatataatttctttacttccttggggttcccaattgctctttttcagagataattctccttgtcagagaaagcaaaactaacaaaataagtgggaatcctttcatttaatcattaattttctgccttggtaccctgaggtaaacccagccttccatgttgtgcttcaatttttccttcaaagttttgtaaatctctgcttattttaatcttttttttttttttttttttttggagacatttttcgctccgtccccargctggagtgcagtgggcgcgatctctgctcactgcaacctccgcc

SEQ ID NO: 844655 - DNA, 566 bp, Homo sapiens
tgcacttgtaacatatatgtgtgtatatattcatacatgtgtgtatatatacatatgtgtgtatatatacacatgtgtacatgtacacatgtgtatatatacatatrtgtgtacatgtacacacgtgtatatatacatatatgtgtacatgtacacacgtgtatatatacatatatgtgtacatgtacacacgtgtatatatacatatatgtgtacatgtacacacgtgtatatatacatatatgtgtacatgtacacacgtgtatatatacatatatgtgtacatgtacacatgtgtatatacatatatgtgtatatgtacacatgtgtatataattggtcagtcacagacacatggtgctaaaccagatccgtttccctttgaagctctccttttaactatgacatcaaccttctccacacatacttttggaattgttttgtagctagatcttttcctttttatgttctggctcaggtgataagcttagaaaagccttttttttttttcctttttaggcaggaaagtgtatcatctgtttagatgaaagtgcaggtaataaggt

SEQ ID NO: 844656 - DNA, 532 bp, Homo sapiens
tgctctcttcatcatgttaactgttaacaagatagtttttttttcattatattattgkttagtaggccctgtgagttttaagctttcaagcatttgtattttggcatatattgaacttttgcttcaatatttagaacttcttttagcattatttgtagtgctgatttgggagtgacaaattccctaagcatttgtttgtatgaaaatgattttatttctctttcatttatgaaacagctttactggatacaaaacttttagctgacaattattctgtttaagaaggctgaaaattggacctccatttcttctggcttttaaagtttctgccaagaagtctgctgttagtctgataggttttcctttacaggttactttgtacttttgtcttattgctctttgaattatttccttcatgttgaaattagatagcctgatgactgtgtgccttgtgaagatctatttgtaatgaatttcccaggagttcctttagcttcttgtatttgaatatctaaatctttagccaggccag

SEQ ID NO: 844657 - DNA, 608 bp, Homo sapiens
ccaggttttggttctggcggatctcttgactcttggccttgggggagtcacttaatctttcacatttgactccccactgttatagttagtgcctcattattatcacttgctggatttattgcaaatgtcatcytaatgaattttctttttctggcctcttttttccccctctaatccttccaagtaattacttaaaaaaacacatgtctagcctagggaacatggcaaaacctcatctctaccaaaaaaacaaaaattagccaggtgcactggtgcacacctatagtctcagctgtgtgggaggctgaggtgggagaattgattgaacccagtaggttgaggctgcagtgagctgtgatagtgccgttacactccagcctgagtgacagagcaataccctgtatcaaacaaagcaaaaaaacaaactcccaaacaaaaaaaatgcatatctgttcatattactcaccttcttaaagccctaccctgtttcttccttgtctagtaaatgttctccaaagttggataagcataaactgggctggggtgagaggggatggttgcaggaaaatgactgcatatgggaaaatctgagaacttatgtttttatg

SEQ ID NO: 844658 - DNA, 587 bp, Homo sapiens
cccagattccctcatgcaggctttcccacaaatgataataaaatggcgtgtgtgcagtgggacacaccaagggcagtttcccmtgatgccccatcaggccaggacctttgccaaaagtgatgagcagaagttaattaaaaaatagaaaaaaaatactgcataaacctgaaaaagaagatcttgattgtgtattgaaagaatggatccatcagcactgcagtgaactcaagttacttaatagtatgctgactatgaaacaagcaaagatctatcacagtaaactgaaaattaaatggaactataagaattcagcctgctggctggagaaatttgaaaaacatcattgataccgacagaaggcagccaagcatcccccggtgaaagcctgccttcaagccttaaacagcctgaaggctgaaaaaccagactgccagtcccagatgaagctcgcccttttctcaacttattctttctcaataatgcccacctgcacaccgggacgatggggtggagtcttgggaagtttgtgccatttgcagggaggaggagtctgacctctgctgttcctggatggtgacccgggattc

SEQ ID NO: 844659 - DNA, 586 bp, Homo sapiens
cttccatttgtttgtgccctcttttatttcattgagcagtggtttgtagctctccttgaagaggtccttcacatcccttgtaagttggattcctaggtattttattccctttgaagcaattgtgaatgggagttcactcatgatttggctctctgtttgtctgttatgcttatttttttaatacaaatgattttagtatgtgtctggagtcccacctgaaatttactattcacaagggtacaactggttcttatcaaacttggaaaggtgcgaagcacctattgaagtgtgccatgtgagacagggcattggtattctgaacaactgaacacttcacagattcaaatacgaaaattctgtaggagctacacagcatgttccaggtcacacagctgtgagaagggagccttaattccaagtctcctgaattgtccctcacagctttgccttacaccagctgcctcaagttgacccacaggtttcagcccatcccatgggtctctttttacttttcaaccaatgagaaaatgtgttktctcccagactgtggtgaaaaacacaaatgcacgttctttttctgtttcac

SEQ ID NO: 844660 - DNA, 564 bp, Homo sapiens
gctgggtgcatttaaaatgcaacacaattctttgaaaggagactatgacatttgagcataaagcctataagaaaaagaaatgtcttccctccccccatgcttcacagagactataygaatgttccatactcttcatatttagcaacaggagttccttagagatcaaacagcagaaaacaggaggaacttaggccatcaatggacttgtaaaacagataaaactccaaatgtattttaagattccatcttctccacagatgagaaagtgctgaaagggctcttcaacttttctttagcgacatcctctgtgccccagttagaaaaagagttgcaggatggtagtcctccttaaacagcacagactcaatctggaaagagtggcagaaacccctctcccccaacaatgtatccccgaaaataaactgccaagtgcaagagggacaatcttcagaataaataatattctgaaggactgacaaaacagactatttttagacaaagaacacaccaaatactccgaaatttcaggataaccatacatcaagtacttcgtgcaagtaatat

SEQ ID NO: 844661 - DNA, 688 bp, Homo sapiens
tttctggaatattagtacttaagtcaaaacacttacctgcagaataaaaacagcctgagtatttccaaagctgaagtaattttctgaatgttaaatatcacaagaatgaaaacagtctccattaagcayttacatgtggtttacagttgaggcagaagatgaaggtctgccaagcagttttcccatatcacctgaattctttcttcccttataaagtataagcttcaagggaaatgattacatataaaaacattccaagtgagttggggttcctgactgcaacattcaaccaaacggaaagaggaattttttaattctcctaagcaggacctacccaaccactgcagacatgagcattaattcttatgccagacaaggtaagcgtgtcctttgaaatcaaagctaagcttgacaaataactgtactggataaactggatacatgaaccacctcaacaaagatggtactttaagcatttatacacatgaaaatgatgaagtgtattatttagatatggtctttcttcatctttctctgaatcctgaaaggttagcaagtcattatactcatacatcttgtaatccctttctccacaaaatacatacacatatacagcttcatatgtcaatataatatcatcaacacagcataaagatttaagcagtagacacaagtcacatgaaagagg

SEQ ID NO: 844662 - DNA, 713 bp, Homo sapiens
cttccaataatgcatccccaatagcttcttgcttatccatttctgtttgcattgtctcatacaacagccactaggcacacagggctactgagtctttcatatgtggttggtccaaatgagtatgttctataagtgtacaatacacatcagatatcaaagacttagtataaaaaattagaatatgaagtatctcaacttttatatagtattatatgccgaaataacagtatcttggatatactgttacataaaacatattgctaaaattaatttcacttgtttcttttcatagttttaaatatgactattagaaaatttaaaattaccaggccaggcgcagtggctcacgcctgtaatcccagcaacttgggaggccgaagtgggcggatcacgaggtcaggaatacaagaccagcctgaccaatatggtgaaaccccgtctctactaaaaatacaaaaaaaatagccaggcgtggttgcgggcgcctgtaatcccagttacaggggaagctgaggcaagagaaatgcttgaacccagggagcagaggttgcagtgagccgacgtcgcgccactgcactccagcctgggcracagaatgacgctccatctcaaaaaaagaaaaaggaaaaaaaaaaaaagacagaaaatgtaaaattacctacaggacttgtatttatagctcacattatatttctatcagatagtgctgctct

SEQ ID NO: 844663 - DNA, 306 bp, Homo sapiens
cctgcctcagcctcgcagtgctgggattacaggtatgagccaccgtgcccggccaataaagctgctttaaaaagagaggagagaaaaaaaataagaaaaaataaataaawaaataaaaagaaaggagatagtgatgcccatctttcaaggttgttggggggattaagtgagaaatcatgtggatggtgcctgagtgcctggaacacagtaggagcttgtagcaggtgcagtgggtgcctccactgtccctcaccctcattggcaacagcacacaccccatttccagctgccagccccttccacctt

SEQ ID NO: 844664 - DNA, 306 bp, Homo sapiens
cctgcctcagcctcgcagtgctgggattacaggtatgagccaccgtgcccggccaataaagctgctttaaaaagagaggagagaaaaaaaataagaaaaaataaataaataaataaaaagaaaggagatagtgatgcccatctttcaaggttgttggggggattaagtgagaaatcatgtggatggtgcctgagtgcctggaacacagtaggagcttgtagcaggtgcagtgggtgcctccactgtccctcaccctcattggcmacagcacacaccccatttccagctgccagccccttccacctt

SEQ ID NO: 844665 - DNA, 604 bp, Homo sapiens
  misc_feature 105: n = A,T,C or G
ctgctcttctcggtgagaggtggctgggaccggactcctagccttgctcctgatatactgggtgatgtgagcaaatggcttgaccactcggcttcagttgccccncatctgtacaatgagggaaggttcagtgagatggtcctggctggattaggcccttaggttccctcctgccccatctgagctttctctgtggccctccagccctggaagaaatcccagccccttgccctccaggtccgggcccgggagcccacgcagatctcagcctaacagctaatgctggggctggggaaagcctggaataaagggggagagggagagagtgtgtgtcctccaggagccctggctgggctgtctcctgtgggagagaggaggaattttcctctgtgtgtgcaaacagtatccgttttctcttgtttccaaaagccggtgacgtaaccggctctccacccctccctcccctctggcctatttttagctggccctgacagcatcctaaaagggttccagactgccctgctccgaggccatgtagggagggtagcagtggggtgaggaaggaragaaactcctctgtctgtcccaggatggacagacatcc

SEQ ID NO: 844666 - DNA, 491 bp, Homo sapiens
acactgtgctggcccagccgtttctgtaagaagattctagaactctaattttgagtcttatttattttacaaatattagagagaataaaagatagttagctggtttctcattaaggaaatagaattcattatggcaatgaacagaggcaagaacaatctagggttagaatgttgtttctcagctccccaaaatgaatgcttgttaattaagtccaatcactcttttctcaatgatatcgtagcacattgtgtgttccttaataaagtctcttgttttgattctgtgacatacagctaatttttactaattgtcagaggtctttatcttcatcatctttatagatgctccacaacgactaacktcttggtttgcccaaagtaagctctcagtaaatgtcagtctgttgactgactcacatagtgattggctgaatatccttttcatgctcctgttgtgggagggtataactctcttattcatcaagtcaatc

SEQ ID NO: 844667 - DNA, 529 bp, Homo sapiens
aggctggttcaacttatgtaaatcaataaatataatccatccatcaaataagcagaacaaatgacaaaaaccacatgatgatctcaayagatgcagaaaaggacttcgatagaattcacacccttcatgctaaaaactctctataaactaggtattgacagaatgtatctcaaaataataagagctatttatgacaaacccacagccgacatcacactgaatggttaaaagctgtaagtattccctttgaaaactggcacaaaacaaagatgccttctctcaccactcctatttaaccatagtattagaagttctggccagggcagtcaggcaagggaaagaaataaaaggtattcaaatagggagagaggagttcaaattgtctctgtttgaagatgacatgattgtatatttagaaaaccccatcttctcagccccaaatctccttaagctgataagcaacttcagcaacgtctcaggatacaaaatcaatgtgcaaatatcgcaagcattcctatacaccaataat

SEQ ID NO: 844668 - DNA, 484 bp, Homo sapiens
caatgttttaatatttatctttactgcttacaagtactaaacaaagcatttatggggctaatcagttgacatcagtaacacatctaagactacttttaaagactgttagcaatttgatggttagtattattgaaagactctccattagattttataggtcatctcaaaattactgtatgtgcattcaaatttattaggtaaatgatgagcataaaactacataagcatcctcacagataagttctaaagcctagtcatggtctttccaactcttttcctaaacactttacctgaaacaaaatgaatagtttactgacctagttcacttggaaaatattccagggtttcaaaatgccatcttttaaatgcagcatattgctgatacatatcaaatatctstgatgtaaacaacattgcctcctgacctccaactcctgcagttacttccaggatcaaatcattttcatctgtttcttctgaggga

SEQ ID NO: 844669 - DNA, 515 bp, Homo sapiens
ccacctccgccttggattcaagaaaaacattttgatgattcacgcacagtgtaaggataatatgacaataaaatgacttcaggctatgtaagcccataaataaagggaaatcaaacctttcatacaagtaaatccacgcaagaaatcaatttgtaaaattgaaaaaacttcttctaaatgggcatgatgggtataagtctctaaaaagaataaacacatccatttgcagtttcattttttaacacattctctcagagtttcactcaacccctccccaaaaaatattttggagttttatggtgcccagcataaatttccttctaatttcttgcttttgaaacattctcaatgtgatgtgatttattagttgataggaatcaatcatttgttttccacagttaaccatatcggctagagcagagtttccccaaccttaatatgcatataaattacctggggacmttattaaaatgccaattctgatgcaatagccatgggatgggattccatttctg

SEQ ID NO: 844670 - DNA, 501 bp, Homo sapiens
ctcagagtttcactcaacccctccccaaaaaatattttggagttttatggtgcccagcataaatttccttctaatttcttgcttttgaaacattctcaatgtgatgtgatttattagttgataggaatcaatcatttgttttccacagttaaccatatcggctagagcagagtttccccaaccttaatatgcatataaattacctggggacattattaaaatgccaattctgatgcaatagccatgggatgggattccatttctggtaagtttccaggtgacaccgaagctgctggtcagcagcctgctcatcatatactgaaggactagaagattttggctatagttatttgttttctttccctctcatacacaggcattcaacaaacatgctgagcatgaactgtgaatcagccattgagctctcagaaaatgtgaatttaaatgtaagcagctttatraagattttttttcctttatattttgcttattccattcggt

SEQ ID NO: 844671 - DNA, 627 bp, Homo sapiens
aattcaacatgagagtcatcagcagatgtcaaacagaccttcaacctcatttagaaatcttgaaattcaatattcagactcatgcagcaaatgggcacatggggtttggggsggattaggaaagaggtctacacaccctatttaatgatgtagagctgctcttccaggcagtggtgctcaaagaggcccccactgcttgtatttaaatgagattctggcacagcagcgaggtgaatggtggatcaacgcctaaagcagcaatctactaaacatctccgtgactggggaaaccccaaagggctacatccaaaccttcgtacctgcagccattaatgacttctagaggagcagagctcagggagggacaacaataggtgagaagtcaatttaattttcattccctgccagaccatattcttaacataacccaatgagaatttatgtcagatgcacattgtatatctgtccctgatttaaatggcagatctcgtctccatttcagattcattcttgggcctttagctgcatttattgaaaagtggctgtattcactatgaaccaatttttcccttgggttttattactgaaatcatcaaaataaatcacctagaatgctccatcctacct

SEQ ID NO: 844672 - DNA, 598 bp, Homo sapiens
gagtcaactggtctaaggtttatgataatggtcacaaacggcagggcatccccatcagccttacaascttatctcgttggattgcactagttgtgcccaggggtggtgaaaggaaagggtactgaggagctgaggtaggaggaaattttccctgcatcctcctctctcatcatgtcccagcacatgggcctcctgaacaatctcttgtatctacagcttgataatgccaaactaactggtctatgagaatcccgtctatgctcttgctgtgtcacccaggctggagtgtagtggcgtgatcatggctcactgatgccttgacctcctggactcaagcgatcctcacacctcagccttctcatgccagattctttttctttactttttctctctcccttttttgtttgcttgtttgtttattgtttgtttgttagagacagggtctccttatgtttcccagactggtctcaaactcctgagctcaagccatcctcctgcctccacctcccaaagtgttcacattacaggcagagccaccacacccagctactatcactatttacttactcctgaattattcccaaactatctcccaaat

SEQ ID NO: 844673 - DNA, 598 bp, Homo sapiens
gagtcaactggtctaaggtttatgataatggtcacaaacggcagggcatccccatcagccttacaagcttatctcgttggattgcactagttgtgcccaggggtggtgaaaggaaagggtactgaggagctgaggtaggaggaaattttccctgcatcctcctctctcatcatgtcccagcacatgggcctcctgaacaatctcttgtatctacagcttgataatgccaaactaactggtctatgagaatcccgtctatgctcttgctgtgtcacccaggctggagtgtagtggcgtgatcatggctcactgatgccttgacctcctggactcaagcgatcctcacacctcagccttctcatgccagattctttttctttactttttctctctcccttttttgtttgcttgtttgtttattgtttgtttgttagagacagggtctccttatgtttcccagactggtctcaaactcctgagctcaagccatcctcctgcctcyacctcccaaagtgttcacattacaggcagagccaccacacccagctactatcactatttacttactcctgaattattcccaaactatctcccaaat

SEQ ID NO: 844674 - DNA, 523 bp, Homo sapiens
ctgcaaatttgatggaatttatcatgggaaagagaagcttttctgaaacaatgcttaaggtttagaattaaaggcatacaaataaatcttatttttagaaatatgaagccagaaaatataactatttctcaaagagaatttcccttaggcgttaaaagttgatgatatagaaatgacaaagcattataaaaatcttagacattagaagcaggaagagactataaaggttcctgattataaggatgattaaccttcagtaagtactcatcatgggcttgacgtgttgaaagtgctttcatatgaatatctcctttaatatttataagaagggtattaagaaagtagtactattgtccccattgtacagatgaggaaagtaaggcttacagaggrtaagaaacttgcccaagttcacacagccatcttgaaaggtgctcgcaatggcgcccagagttccagagcccaagttccaggcactttttttggactggctttctaacacaaccccttatttttatcaagt

SEQ ID NO: 844675 - DNA, 625 bp, Homo sapiens
ataaaaacaagtaaaataaaataatcataatacattttaamatattaggtggatttcaaaatacctttttagtgataaagaggttgttatagactggaacagtcagagatactttatgtggacttaccatgaagaaattaaattggactaaatagagtgaactttatatatatatcatatatatctcatatatgatatatgagatatatatgatatatatatgatatatctcatatatatatatatatatatatatatatatatagcttcttgattattaaagtgagagaattttatcaggtggactatattgcaatttcagagtgagctaatatattaaataactgctgctacctttgacatttttaagccaggcatcatggtaaaagatagttgggtgtttcttgatcaatcatcttagtcactttaaaatactaattatcccttgtaaatgttaataatataagcaataaagaacagatggccaaatgatcagaaaacagctgctgttttcccgtcaaacccaaagatgtgagcaatgtttctaaacaagggcccagcagagaaatcatggtgatgaaattttctgctgcaggcctatgccatatatcttctatctaaagct

SEQ ID NO: 844676 - DNA, 625 bp, Homo sapiens
ataaaaacaagtaaaataaaataatcataatacattttaacatattaggyggatttcaaaatacctttttagtgataaagaggttgttatagactggaacagtcagagatactttatgtggacttaccatgaagaaattaaattggactaaatagagtgaactttatatatatatcatatatatctcatatatgatatatgagatatatatgatatatatatgatatatctcatatatatatatatatatatatatatatatatagcttcttgattattaaagtgagagaattttatcaggtggactatattgcaatttcagagtgagctaatatattaaataactgctgctacctttgacatttttaagccaggcatcatggtaaaagatagttgggtgtttcttgatcaatcatcttagtcactttaaaatactaattatcccttgtaaatgttaataatataagcaataaagaacagatggccaaatgatcagaaaacagctgctgttttcccgtcaaacccaaagatgtgagcaatgtttctaaacaagggcccagcagagaaatcatggtgatgaaattttctgctgcaggcctatgccatatatcttctatctaaagct

SEQ ID NO: 844677 - DNA, 625 bp, Homo sapiens
ataaaaacaagtaaaataaaataatcataatacattttaacatattaggtggatttcaaaatacctttttagtgataaagaggttgttayagactggaacagtcagagatactttatgtggacttaccatgaagaaattaaattggactaaatagagtgaactttatatatatatcatatatatctcatatatgatatatgagatatatatgatatatatatgatatatctcatatatatatatatatatatatatatatatatagcttcttgattattaaagtgagagaattttatcaggtggactatattgcaatttcagagtgagctaatatattaaataactgctgctacctttgacatttttaagccaggcatcatggtaaaagatagttgggtgtttcttgatcaatcatcttagtcactttaaaatactaattatcccttgtaaatgttaataatataagcaataaagaacagatggccaaatgatcagaaaacagctgctgttttcccgtcaaacccaaagatgtgagcaatgtttctaaacaagggcccagcagagaaatcatggtgatgaaattttctgctgcaggcctatgccatatatcttctatctaaagct

SEQ ID NO: 844678 - DNA, 602 bp, Homo sapiens
attgtactatggcacctcatagtttgttctaagtaaatacwttaaaaaatattagaaaatgatctttcataggctagctttcttctcacagaaattcatggtgataatcattgcatttacacaaaaagaatccctatgataaagtgtcttgtaataacctaaatttgcctatgacacagcttgtaattgaatcttattctcaacagcaggtttatcccgatcagttctttaatcttacattaataacaccaaattttacatgattagatttttcaaaccccagtattatggtgaagtttacaatagttttattgctgtggcactactagtatatttgctcaatgtgttagtcaaataatgagttattaccatgttagagatgagaagacagcagggagatggtcaatatttcatccaagaatagacaggcagatgataagtgaccagcagaaggggattggtctacccaaggaaaattttgaaacagtttgtcttcagagcacacctatccactctccttcctttccagtctaatacgtagagcatctttttaaaactgcctcaggctttaaacttccttcatcctttatccataccttgaa

SEQ ID NO: 844679 - DNA, 212 bp, Homo sapiens
ctttgctttagatctgtacctgcaaagaggagcctgcttgccccgcctgggggcagccgtcactgggaatctgtcctaatggcctttccccttggtgtctgtgggtctttggtggctcagggtcctgacatgcttcttggtgccctgggaatgcctycactgcaagcttgtggtccctctgggctgcagcctcctgtggtttggccttcttg

SEQ ID NO: 844680 - DNA, 645 bp, Homo sapiens
caaatctttccttcctgccatccccatctcaggaaacgtcacctagatgttcaggcaaaaaaccttggacttatctttttcctctctttctctcacattctatatagcwctacctcagtagctctttttggcttgaacttcaaaatgcatctcaaatctgagacccttccattactcccaccactggttaaagctcctgtcactattcaccttgaaccttgcaatagctttctagctccgaaccaactgcgttcacgcctcatccctcctgccgtctgtttttccttcagaatccagtgagcctttaaaacttttagccccctcgtgattgttcaaaaccctccactggcttcctaacacaacttagaacaaagccctagacccctgtcgtagtgcacaggacactatctgatatggcctctaccgcctctcttgcttgctccactctgaccacccaggccttctcgctgtcacttgaacatgccaaggaccctcctgtgtcaggggccacttcctttcccagtgccagaattgcttctccctacacatttccccatctcttcatcaatctcagctcaaaatcatccccctagagagctctcccatagctgtctgatctaagatagctcgctccctgctgctgct

SEQ ID NO: 844681 - DNA, 624 bp, Homo sapiens
tctaaccgtgattttcctctgcactcacaccactacaatcatcagcacagaagacttccgtgaccagatgcatgggtttttttcccccacaaacaaagcagcagacaccagctgtgtgtcctctaattcagttctgacaccatctaccaggagatgctgtaagatcccacagattgagggctcagtccccaaaactgccccccaaaaaggcgcaagtgtggccctctctggtacttctgatggactggcttcaggttggggttcccatgaccccctttttggatttgattaatttgctggagtggctcaaaggccctagaaacactattacatctaccggtccattatagaagagagagcaaaagaaatggatgaggagatgcatagggcaaggcatgggagaaggggggcggagcttccatgccctccctgggacgccaccctccaggaaccttcccgtgttcagctctccagaagttccccgaaacctgtcctcttggrtttttctggaagcttcatgaagtcaccattcctttccctaggatataaggtgagaccctctcatggaagggtcttaagacccacagtcagaaaggtgggggaacatagcatgaaaggagggca

SEQ ID NO: 844682 - DNA, 567 bp, Homo sapiens
tatttttatcctctcattggtaaggatcctaagttgtctttagtgatcaacctttgttcttcctggcagagaggggagaagggacactgttgtctatataaatggatgtcctgcttttaggcaaatgggggaggcggagagcttttcgtctgcttcttctcaattactttcaggccaaaataatccttatgccaaagaggcatcttttggagtgatcttgtctcctacagaacataacaatggcttagaattcccccaccatctctccaggacctaatttctaggagaaatatcaaggatgggaaaatcagccttttgtaaacagatagaacctgaagtatgcatccatcaggaagggttccggctttggctgaaacagcacactgggatcacagataaatgggaaagaaaggaatacaagggaggaggagtgtgagggtgagaaacagaaacagagaaaggaaggtggggagagaaacagagagagagagagagagaaaaccaatgctttctatgctggarcttgctttttaaagtaccttattttaattatgttaatccttttaa

SEQ ID NO: 844683 - DNA, 631 bp, Homo sapiens
tatggacatgtagtcagtaaatcaccaagaagagagaaatgcctttcttcaagtttctaggaaaacaaaacaaaacaaaataaaacttttgggcctggcccctatcttaaacaaactataccaactggagtaggttttgaaaaactgtctgcggctcatgctaaagtaaactgaatgtataaaaatacagatttaccaaacagaaatatgtcacatccatttttttattctctctttataaaaatacaagctgcctactacattgaaagaaggattcaacttgcagttccttgatttgtttattgttttccaagggaagcatatagtttgtaattaagtatacctctagattttggatgtgggcatgtctcttacagaattgaatattactaataatgacaaaggtaaagtgtctgcaaatgacaaatgaatcggggcagagaaacaagcacaatagattaagtagtatatcattgggagaacctagggcctaggatgagaaacacaagtcaacaccttaaactttcaaaatgggtctcaggattcatttgtctagaaacaggattgaaataaggaactcagatgcaytgatgaagtgctggagatgagaaggacctagacatgatacggc

SEQ ID NO: 844684 - DNA, 595 bp, Homo sapiens
aacttccttccattttaagggtaagataaatgagagtacagatggtggatttttttcctccttccttctggaaacyctatgctaactgcttcaaaagcaaaagtcctagtgtgtgcagtgtactctcccaaaatgaggctggggtccctgaagccacacacatgttgatgttggtcctagtgccgccaggcgctctatggccatgggatccccaatctggctgggcaatggtggcagctggcagtgaagttcagatagcacgaaaccaatttggaaacagttgtttccaagggctggcattaggcatagtcaaaatcttagtgctcaatatagtatgttttgaggagtatctaaaagtctactcttggaattgagtccttctatgttaaacactgttctagaggggtcttattttacaattaaaataacttaccacactttactgcgacttcatttatcagattgtagaggcagaagagacaattcagtccaactaacaatgaccggttttaccagagtataaacttctaagggcagagactgttagaaaactgtcttctcagtacctcctgaatgccagcgcatgagagtctct

SEQ ID NO: 844685 - DNA, 581 bp, Homo sapiens
ttaaagtagttttcttctaattctgtgaagaaagtcaatgatagtttgatgggaatagcatcraatctataaattactttgggcagtatggccattttcatgatattgattcttcctatccataagcacaaaatgtttttccattcgtttgtgtcttttatttccttgagcaatggtgtgtagttctccttgaagatgtccttcacgtcccttgtaagctgtattcctaggtattttattctctttgtggcaattgtgaatgggagttcattcatgatttggctctctgtttgtctattgttggtgtataggaatgtttgtgatttttgcacattgattttgtatcctcagactttgcttaagttgcttatcagcttaaggagtttttgggctgagacgatggggttttctaaatatagaatcatatcatttgcaaacagagtgaataggcaacttacagaatgggagaaaatttttgcaatctactcatctgacaaaggtctaatatccagaatctacaaggaacttaaacaaatttacaagaaaaaaaccaaccccatcaaaaagtgggcaaaggatat

SEQ ID NO: 844686 - DNA, 561 bp, Homo sapiens
ttcaatcaacaaatacaaaattcagttggttatagtgcctctgagaagtaatcastacataattctgtatcattcagggtttgatcaaagatgcagaaccagtgtaagtgatatagaataatggatggcagagtcctagttttgccatgagggagctggggggaggcgatctatgcccatcattgcccctgtggtgtctactgttgacctgaagtcctatgggtcagatagagagacagttggaatgggagctgggtgtggataagaagaaggacaaacacgacaccacaaagacgaaatggaacccacgaagataattagaaaccacgaagacagaccaactggaaccaggtatccctctcccatccactccagcctcaattctgcatgacctgctggagaagctggagcccttcgccatggagctgcactatcacctggcccaggactcagagaaacagatggaggagatctggcaggagctggaggagctgtgggtctgggcacacacaccacatcagtgacaacgtttgccagctgccacagcacctgctgccctgc

SEQ ID NO: 844687 - DNA, 633 bp, Homo sapiens
atagtttgttaataaaacatccaagcttgtgctgatgggtgaatttgctataatgtaataaaggctgacactactcatagtgagaattyaaccttttcctcagaataccttattcatttaaatgaactcacaggtttaatgtaaaatatttcatatatatttgatacgatcctgtacaaattgtttcctagcataataaattgaatacagtgtgaaataaattgtgactttgttttttttacttagtatctcaagtttgaagaatataagttctttatgtttttgcttaagtttgatttactttatcattaatcataataataggatttgtgctggatgatggaaatccaaacggtgttactcagtataataagaaaagtgaactacatatggaatgtttaaaataaagaactaatcttaaaccaatcagattgtttcatgatgcagacaggaatctcaggaaataggcttagtggaattttctggcaattaagtataaaattttacatgctttaagtaaatatttcttaaacaagtgtctatttctggtctcattccactctccaaagagtttcatctgagcttaataatgttggtttgaaggcatacttgcaaatagagggcagaaatgtt

SEQ ID NO: 844688 - DNA, 604 bp, Homo sapiens
tgctgagattatgattgagactgcattgaatctataatcaattttggaagaggtgacatcttgacaatattgagtcttcctaaccatgaacatgcaacatatttctgtttatttagttctttgrtttctttcatctgagttttgtagtttccttcatataattctatttatattttgatagatttttacctatttttttcttttacctattttcttttcttcaaccccactataatctcttattagttacagtttttttttgttgttgactcttgaattgtatacatagacaatcatgtctgcaaacaaagacaactgaatttttttttcttctcagtctatatacccttttttttgtttgttttattgcattagctaggacttccagtatgacattgaaaaagagtggtgagagaagatatttttgccttttgacaatctaggtgtttggtggatattctgcatccagttgaagaagttcccctctagtcctagtttgcttacatctgtgggtttttaatatggagtatttgattatagattccatggattatagattacagattatagattccatggatgtgcttgaaatatttgttagctc

SEQ ID NO: 844689 - DNA, 551 bp, Homo sapiens
attttaatatggtttccattattaacttttaaaacaaaatgatttccagtttaaaaaacaatgcactgaccacataattccttttttattttacacagttatacaaatattctaaatacacattttgtgttcaagatgatggcaaataagattaactgtacagtacataaggaaagaaaatattttaagtatatttagaagcaatagaaatgtctatacaaaacaagcaaatggaataaaattttttatttttaaagtattgcaacaggcccacaggtttgtaacaaaaatgtctttgcacagttcctcacaatgccccattaatagctaaagcaagacagcattttttaaaaaaaaataatgtttcaaaatgctacacgtggtactactgtttgcacagtttgatcaaaataacgatctactttgagtcaagcaaaacctagaggaaatataccaaacaacttgaaaatcatttgtataaaaatcattgcacattattttrctcgtttgaaaagtaaaaaagtgtatttacaaaatattttgcagtcaaa

SEQ ID NO: 844690 - DNA, 620 bp, Homo sapiens
cagagcgccggtcataagtcagcattttcctattcgaattcaaagaaaaaaaccacacccaaatactgttatggaagccatctttctcacaaattaagtcagaattaaacaataataaaacaatgaaaaaactacaaaagacaatttcaaaacagaattactatttctttgagaataatatatatacattttgcttagttgacaccaagtgtagatatcctacaagagtttaaaaattactctgtaaatcactgttacctggaaaataatgagttggcagatatcaactagcttaagatgtattttaggtgggagtggtggctcatgcctgtaattccagcactttgggaggccaaggatcacctgagcccaggagtttgagaccagcttgggcaacatagcgagacccccatctccacaaaaaaattagccaccataatggtgcacacctgttatcccagctacttgggaggctgatgtgggaggttcgcttgagcctgggaggtcaaggctgcagtgagctgtgattgcaccactgctttccagtctgggcgacagagtgagaccctgcctccaggggcaggaaaaaratgtattttatcccctaagaatgagaacta

SEQ ID NO: 844691 - DNA, 631 bp, Homo sapiens
tcccatcaggagatgtcgtctcatttccctcccctttaatgtgggtgagccttcttgctttgcttcagtgaagcagcagtgatgtcccataattttccatactggatctttgcctggtgctttctccccttctgtgaacacacacagatggctacaccctttccccatatcgattctgttcttttctgactctggctttcttagtattggggttctcaagtagcttcagccctgtcttgatggatcatctttcggggtatgtgctgattcagtctgagtgtccaggtgtccacctccatcttctcacagggaaaagccagcagtactgttggctctgccttgttcaggctacgctcctttcctgctctgccttctcagaaactccctgaagcctttttcttcttttcttacaagtgtccagaacttctgaaaagcaaagcacatagaggctagtgccatccactaggacttgtggaatgataaaattgttctctgtctgtgcagtccatatagtagtgtaggggggcatctcaggctcctggtggagtctgaaaattaaacttayataagacaagttaatagcaggaaagcacacaggtgtatttgatacaagttttacatggcatgggag

SEQ ID NO: 844692 - DNA, 641 bp, Homo sapiens
agtcaacagctctatttcactatccttgtcctctggactgcctttttcagctaataccagagacttttctacttcaaggacactaaaagaaaaattgaagaacagtgaaaagggcttatrcaatctttctgttttacaatcttcaatgctctttaaaagaaaaaaaaaagttatcttctttctactgaatttttactttagttaatggtttcctatcacaaattttaaaatgactcactatcccaatttctgtgtaataatggctatttctgatcaagaaaaaaaaacttttcaacttataaactattaaggcattggtcttaaaaatgaataacttacaagaaaacaaataaattgcatgcattatcataatagccaactactagaaagaactcaaatatcattgactggtgaatggataaacaaaatgtggtatatccaatactattcgggacaaaaaggaacaaactaataatacgtgctgaaataggaatgaacctcaaaacatcaatgcaaagtaagagaagagaacttttatctgaaatacccagaaaagaaatctgcagagacaaaaaagagattaatcagaaatttagtgtaatgcacacaaaggattctattgaatgatggaaatgttgtaa

SEQ ID NO: 844693 - DNA, 641 bp, Homo sapiens
agtcaacagctctatttcactatccttgtcctctggactgcctttttcagctaataccagagacttttctacttcaaggacactaaaagaaaaattgaagaacagtgaaaagggcttatacaatctttctgttttacaatcttcaatgctctttaaaagaaaaaaaaaagttatcttctttctactgaatttttactttagttaatggtttcctatcacaaattttaaaatgactcactatcccaatttctgtgtaataatggctatttctgatcaagaaaaaaaaacttttcaacttataaactattaaggcattggtcttaaaaatgaataacttacaagaaaacaaataaattgcatgcattatcataatagccaactactagaaagaactcaaatatcattgactggtgaatggataaacaaaatgtggtatatccaatactattcgggacaaaaaggaacaaactaataatacgtgctgaaataggaatgaacctcaaaacatcaatgcaaagtaagagaagagaacttttatctgaaatacccagaaaagaaatctgcagagacaaaaaagagattaatcagaaatttagtgtaatgyacacaaaggattctattgaatgatggaaatgttgtaa

SEQ ID NO: 844694 - DNA, 398 bp, Homo sapiens
gtggggaataattagctttagactaaatactgytctcattccatataattcaccttattaacaaaccaaaaaaatcatatgagtatcgcagtaaacatagatgttgaataaaatccaacatccatttctgatcaaacttctcagcaaactagaaacagaaggaaaattccttaacctaataaagggcatatatgaaaaacctacagctctggccagtataatcagttaagaggaagaaataaagacatccagatttgaacagaagaagaaaaattatctctatgtgcagatgacatgatctgatggactgtacaaaagagctaccagaactaataagctagtttagcaagtttgcaggatataagatcaatatataaaaatcagttttacttcaatat

SEQ ID NO: 844695 - DNA, 398 bp, Homo sapiens
gtggggaataattagctttagactaaatactgttctcattccatataattcaccttattaacaaaccaaaaaaatcatatgagtatcgcagtaaacatagatgttgaataaaatccaacatccatttctgatcaaacttctcagcaaactagaaacagaaggaaaattccttaacctaataaagggcatatatgaaaaacctacagctctggccagtataatcagttaagaggaagaaataaagacatccagatttgaacagaagaagaaaaattatctctatgtgmagatgacatgatctgatggactgtacaaaagagctaccagaactaataagctagtttagcaagtttgcaggatataagatcaatatataaaaatcagttttacttcaatat

SEQ ID NO: 844696 - DNA, 459 bp, Homo sapiens
ccttaataaagctagaataccaatgggatgtggggaggattatggttcccttcgtgggaacttcatattttctatagtggaggggggtcttttttttttttttttttttgagatggggtcttgctctgttgcacaggctggagagtagtggcacgatcacagctcactgtagtctctacctcctgggctcaggtgatcctcctgccttagcctccagagtatctgggaccacaggtgcacaccaccatgcctggataattttttaattttttgtagagactgagtctcgctaaattgcacagcctggacttaaactgctgacctcaagtgatcctcctgccttggcctcccaaagtgctaggattacagtagtgagccactgtgtccagcaccatgcctagttctttttctagtgatttttttttwaaaggatagtctttgcaagtctcttactgctta

SEQ ID NO: 844697 - DNA, 607 bp, Homo sapiens
taatcctgtggtttttgtctttggttctgttatgtgatttggttctttttatgtctttgtttccrtttgagttgatttgcgcatgttgaaccagctttgcatcccaaggatgaagccgagtggaccttggtggataaattttttgatgtgctcctggatttggtttgctagtattttcttgaggattttcattttgatgttcatcagggatactgacctgaagttttctttttttgttgcgtctcttcccggttttggtatcaagatgatgctggcttcataaaatgagttagggaaaattccctctttttcattttttaaaaatagtttcagaaagaatggtaccagctcatctttgtatttctggtagaaatcaactatgaatccatctccagagttttttttaggttggtaggctattaattactgcctcaattttagaccttgttactattggtctattcagtgatttgacttcttcctggtttagtcttgggagggtatatgcatctaggaatttatacattttttttttttagattttctagtttatttgtgtagaggtgtttataatattctctcatggtaatttgtatttctgtggggt

SEQ ID NO: 844698 - DNA, 462 bp, Homo sapiens
tgcagtccatatttttgaattcaatatatttttctggaaccaaaatccrcattagcattaaacttctctgcttggagaaactctgatcccagtataagggacttttttcctttctggcatttggagaccatgcatttagagccactggtaagcctagtgtcagtgccctttgcaaacctaatcaaatataatttttaatttaactgaagaattaattaggcagatgagactgtaattttttcttagtgttctgttgagagcacatgactggatggctgccatttgtcttacaatctgtctcttaaccacatagttccccagtttcaaatcagtgttcaatacagttatttaattttgggactgaaatggttttcaaagatagccagtccttcattttagaatgaggacactgagatctggtattattcaaatagcgagtggtaaagctggcaacgaaaatca

SEQ ID NO: 844699 - DNA, 597 bp, Homo sapiens
ctaatgggctgcaggtggggatagaattagcatttcctattgtttcaaactctaaacatgatcagtcaaaatatatttatattatctatgctgcagctagaaccagatctcagaaaacggaaaccagacagaaccaggagaacttctgcaagtggagattccctaatccttccctaatatcaagttgtccccaaaaccaggacccttacaacgtaggtcaaactagggcttcctttcagaagtcaagccagagggaaagagataagaatccagtcacttgtatcaaagttacccaaaaagacatcttccaggccagaaactatttctctgttgcaaaaatgtgaagtatacaccaaaggccagtggtgaatgctggaggatcctgagaagatgtctttaaaaatagccccaagcagctgcctgaatgtacctgtaagattccagcagcagcacagggcaactgaaccaccagcaaaaggtatggactaaaactcctggstagactgctgtattgttactgactaagtccaggtccattctgcctgcatgcaataaatcaatcactgtgacatggaatttacaagagagaaaagattt

SEQ ID NO: 844700 - DNA, 584 bp, Homo sapiens
aaaggcagattacatttattcttctttaataaaagcaaattctatgtcttactcagtaatcattttaaaagaatcaaaatacagtcaataaaaataaattaatcatttttgccatttacttttccacaaattaatgttaattatacttagatggaaatgtctttgctgtcaaattcctcccagaaaacatattatgtctgattttttttaattctggctttatttggatactcagagggtataaaaaatctactagaccttttagtataattataatagtgacaatatatttaatctgagattttggttttaccaaggcaataagaaacaatcatagtttatttccaaccatcgaatctataatccctcattgtcaattgcccttagatcctatgggaactttttccctgaaggggaaaaagaagaccttgagagcttgtagcctaggaaaatgacatactgaaaaggaaatattgagtaaggaaataactgaaaagyaagccaaagagaaaaactaacactcaccaacaatctgaaagtctggtatattttatttataaaatttttgtttttcagtgttgcat

SEQ ID NO: 844701 - DNA, 537 bp, Homo sapiens
atcaacctaaatatccaacaatggataaacagaataagaaaatggggtatatatacacaatggaatactatgcrgccacagaaaaaagaatgaaatcctgtcatttatgacaaaatagatgaacctggaggactttatgttaagtgatataagccagacacagaaagaaaataccacatatactcattcatatacagaatctaaaaatgttgatcttatagatgtagtaaagagtggttaccagagactgggtagggtggtggggagaacggaatgagaagaggttggtcagcgggcacaaagttataattagatacaaggaataagttctggtgtcctattatacagtaggatgattatagccaacaaaaaggtattgtagatctcaaaatagctagaagaaagtatttaatgttcccactacaaagaaatgataaatgtttgaggtgatggatatgctaattaccctgatttgattattatacaatgtgtacatgtattgaaacatcacattgtaccccataaatatgtataatt

SEQ ID NO: 844702 - DNA, 580 bp, Homo sapiens
atcatgctactgttaattccagcctgggtgacagagtgatattcctactttcttaaaataaataaataaataaataaataaaaatttaaaaaaataaatttcataattacagaatgttytagtagacagcactgctggagagggcaggaacaaaggacaagaggagacaagagtagaagtgtccaaagattttgagcctaggtaattagcggaatttactttttcttttttttttttttttttggttgggggggcagcgtctcactctgttgcccaggctggagtgcactggtacagtcttggctcactgaagccttgacctcacaagctcaggtgatcctcccacctgagcctcccaattagctagaaccacaggtgcatgccaccatgcccagctaatttttttgtattttttgtagagccagggttttgccacattgcacaggctggtctcaaactcctgggctcaagcaatcctcccacctcggccgtccaaagtgctgggattacaggaatgagccaaggctcccagccaattagtggcatttattaaaaaaaaaaaaaaaaaaaaaaaaagtga

SEQ ID NO: 844703 - DNA, 573 bp, Homo sapiens
attcattttaacgagttagttactgcagcagtattataygcaccataaaatattttttctattgctaatctttaaaagacaagtacctacttaaacaccaaaatatataaaaatgtgacacacattttcaactaaaaaacagcaaagaaatatatttcataaaattttcatactctacattcctatttcaaatgcccatgaaacagttacacaaaaaaaggacagagaaagaataagtagcactcttacctctgtaccaattgatctgcctggtagtattttccatcaataagaatctgtacatcaattacatgctggcgtaaaaggttctcacattcaagtatatacccagcaatttctgcttcattctgaaactgcactcctgattctaatcttttagaatcctgtattttaaaagaactcagtattaattctgtgaaacaagtttcaaaacaacctgaaatataaaacatcaaatattggaacagaagcctacttgggctttctttagttttccttgttggttcaaaaatatgttttccctcttcttgtctctcaagagagcaaacacca

SEQ ID NO: 844704 - DNA, 504 bp, Homo sapiens
gtgaaacaactcagaagcagaaagtcaaatattgcatgttctcatttataagtggaagctaaatagtatgtgcacrtggacatagagtgtgaagggacaggcatttaagacttggaagggtaaggagcagaaaggggaaggtgatgatgagaaattacctaatgagtacaagatacattatttgggtgatggatgctaaaagtcaagacttcaccactaggcaatgtatccatgtaacaaaattgcacttgtgccccttaaatttatacaagagaatgtagtttaggtgctgtgctagggggcaaaaaggacaaatataggtgagatagttgcaggaaaggggaagatatcaaagaagatttttgcaacatttcatgacaacgtgaggtgggaaattaaagaaaaaattgaaagagaaataagcttttctgtattaggctgacttgacccagaggcggcaacaagcacaggccagacccaggaaaagtcttaataatattatct

SEQ ID NO: 844705 - DNA, 541 bp, Homo sapiens
tcctgccactctctctaatgaagacccctgttccactgtggctcactatcgtcctccctgwccttggcaactactggtcacagctctcattcttttttttaggccaacaggttatagtaatttacttcacataagaacagcatatttcagccctacgatttccatttaatatcaacaaaaataatctgtatggaaaacccagaagcaatcatagaacataatatgcaaagtgtgcaaatgtactttaaagtgcaagttattctatagcattagcaaggtagaatgtcatagatattaaggaatccatttcattgtagctaataatctttttgcatgtatagccaatgcaaatgtacaaattacaagttagtgttgatattaaaatgtgtaactcatcctcagatcatttgtttgaagatactaaaataatgtcatgtttatatttcattatttatgaaagtcatcagctcatttctaaagcttcataaagcattgcactgataacgtatgtgtagccaggagaaactgttccctgaactta

SEQ ID NO: 844706 - DNA, 588 bp, Homo sapiens
ttcctgactcgctcgttaaatgacacctgagtgtttcctctgcagactggcagtgtgaggaagactggaagtgtccccctrccccccaaaccagagaagaagcagggacaggcttggggcattgtttcaccaggagtgctggatgctgggccggcctctagagcctgtcactgccctggtcgggctaggtatgtccttccagcttctccgtctctctagaccttggccgggtccgagacctgtgggagtttcccaatgcagcgaccagctgcctcagccatgcctgtggggcgaggcggccaaggccccaggaggaaaggagcagtttccccagcatcctcggtactcagacgggacatgcttggtttccaaggccagtgggttccagggtttgattgtgtgttggggtttttctcaagtgctagggctgtaacagaccggcgccagcaggaacaggcccagcactggaggccaatgtgaaggggtcacaggacagtgggggcaccgagttaggtggatggggcctcatatgccttgaggggaactgggggcttcatcttccttgacgggagatggggagcctctgac

SEQ ID NO: 844707 - DNA, 474 bp, Homo sapiens
atatcataaaaaaaaaacctagctcatcaaacctrtactacaaagccacagtagcaacatatttaagattcttgaaatgagtggatttaaaaaaaaaataatagggcagagcctcctctttccggtggtgtggtgaatgtggtgtccgaaagaccctcctgtttttggtatgaatacaccaaataatgctggtgtgcttttaagaaacataaccacaaaggtgagactatcagagaccagaaatctcgagaaaatacaaatctagagagttaggggagcaacatcaaagctggtctttacccaggggtatctgccagttgattttaatgagccactggcaggagtcaaaacctggggactgttttgttcagggactgaacagttgtttgtgtttgtctttcttagccttggccaggttaaaggagaaagaaagaaccctccccttcctcagaatttccaactacaatcctacat

SEQ ID NO: 844708 - DNA, 474 bp, Homo sapiens
atatcataaaaaaaaaacctagctcatcaaacctatactacaaagccacagtagcaacatatttaagattcttgaaatgagtggattwaaaaaaaaaataatagggcagagcctcctctttccggtggtgtggtgaatgtggtgtccgaaagaccctcctgtttttggtatgaatacaccaaataatgctggtgtgcttttaagaaacataaccacaaaggtgagactatcagagaccagaaatctcgagaaaatacaaatctagagagttaggggagcaacatcaaagctggtctttacccaggggtatctgccagttgattttaatgagccactggcaggagtcaaaacctggggactgttttgttcagggactgaacagttgtttgtgtttgtctttcttagccttggccaggttaaaggagaaagaaagaaccctccccttcctcagaatttccaactacaatcctacat

SEQ ID NO: 844709 - DNA, 315 bp, Homo sapiens
cacatctcaggaagatagcatcattggtgtcaccatcctgcctcagccagaggcacctgcacagggtcccgcagccaccagccagggcaggacctgcgtccagaaaggaggcaaggcaggcgcaggtcccctccccaggccacacacacacacaccacagttaccacataaatacacatcacatgcactcaccatgtayacacacacacaccatgtatacacagacaccacacacaacacacaccatgtatgcacacagataacacctcaccatatatacacacacacacaccatgtatacacacacaccatgta

SEQ ID NO: 844710 - DNA, 632 bp, Homo sapiens
acaggaggaccatggccatcgaaggmttgggaggcccaccctgagcaaacagcccctctttgtctggcatccagggcagaggccatgggtcccctcccaatgcctgcactcatcctcatcctctctggggaccccatttgtcttgcttgccctctccccataattcctgctcacaatagtctctgaacctttaaatgccattcttaggaggctgaaaccaaaggtccctggttgcagtgtcgagacaggcagggcctcctggagcacaggtgcatctgaaggtggtagggtcggtgtgtgcgattcagtcctcacggagtcttgaaaggtgacctggagttacacagaaggcagacgggtgaggttgcaatgggaaagggacagccatggttgctgtgggagcctgaacagccaggagagggcagagggtaggagggaagggcggtggagggaagcaaggaaagcacaggcctctgtgcaggagcctgggacaggcactgcctctgaggggtgggcacagcacggtgctgccagtgctaccagtgcctgcatgcagccggggctcatggcatctggatctcaagccacccggtcctgacacctgcaccacggggtcgtttcctcatgcacac

SEQ ID NO: 844711 - DNA, 492 bp, Homo sapiens
ccaagatcttcctcacacatcttcggacagagaggggccaccagaatgatccaagcatctcttttgcaaamattcatctgctgctgagatgctctgtgtgagccaaggcctctctctctctccttcctgggccttcagcacacactggctggcctcgctgtttggtgggggccttcttaggggcccacagaccccctccactgcaactcctcaaaatagagttctgaggaggtctgttttctgcctggctggttcgccgggtctgagcccttggagggctagtttcgtgtctgggtcctgtggctcccagaacaggatctggcccagagcaggagcagcagtgggtgcgttggggctgaccagtgccctgcagtgtccagatgggggtggtggtgaagaatttgcctagaaaaacgtgtcaagggtgggttgtagtggacgtgtccagccacaactccctgggaagtcaaagcctcagagtcttactcggtg

SEQ ID NO: 844712 - DNA, 629 bp, Homo sapiens
gttagctacattaatctcatttgtttttcaatagggttaataggctaataaatgaggacaatgccataaacatcacatatatccaaattttttagcaaagcatgtgtcaaggttaaaaggcttccgtacccaaaggactaattaattaatggatcagcggtagcctggaaaaaggtttttgtggtatgtcactggattcagtatcccactctatcctgctaacattttattaaccaaaaatgagttctggaaaaaatgtttgtcccaactactcacaacagcaaagctgggagggataattaccacactggaagacaaatacagcgcttgcatagctttcaacaggtggcaacaaggagcctaaattggctggtgtttcccaaaatgtgttctctggaacactagtcataaaagaagtttcttgggggaaaaggttctagttgcgcaaatgggaaatgctaccctccgcagctagtcaccacttggggatttaagattgcacacaagcatattcagggttytgaaaaatcccacagaaaagataagtggagcctccttttgctgattgaaatgttacagatgcagccgtgttggtggaacgcataaatgagggaggtggcagcgcatag

SEQ ID NO: 844713 - DNA, 688 bp, Homo sapiens
atgaggtcagcaaaatcaacttccacttaccaaggctgacctggctacagccaccaytgggtattcaatttgccagtagcaaagaacaacattgagtcttcaatatggcactattccccagggaattagcctgctacctggtggcaagttgattacattagaatgctcccatcatggaaggggcagtgttttgcgtttatttggatagacatttactctggatacaaatttctcttccctacatgcaatacttctgccaaaactaccgtctatgaattttcagactgtctttttcactgatacattgtcttattccacacagcattgcttctaatcaatacacccacttcactgcaaatgaagtgtggcaatgggcccatactcatggaattcactggttttaccatgttccccaccatcatgaagcagctggattggtaaatctgtagaatgatcttttgaagactcagttacagtactaggtacatgacaatgccttgctgggctggggcaagttctccagaaggctatatatctggtctcaatcagcatccaatatatggtgtggtttctcccatagccagtgttcatgagtccagggttgcaagtgggaatggcatcactcactatgacccttaatgacccacttgcaaaatttttgctttctgttttcatgactttatgatct

SEQ ID NO: 844714 - DNA, 661 bp, Homo sapiens
tttctcccatagccagtgttcatgagtccagggttgcaagtgggaatggcatcactcactatgacccttaatgacccacttgcaaaatttttgctttctgttttcatgactttatgatctgctagcctaaatattttagttccaaagggaggagacatttccaccaggagacaaaacagtgactctattgaagtggaagttaagactcctgtccagggactttggtttcctgctgcctctaaatcaacaggcaaagaagggagttactctgctggctgagacgattgatcctgactaccaaggagaaactgactacacaatggaggcatggaagaatatttctggaatacagtagattcttctggatgcctcttagtattaccatgccctatgattaaggtcaatgggaaactatagcattgaaatcaaggcaggattattaatgtctcaggcccttgaggacacccttcatctggagtttgggtaactccaccagataaagaactagataaaggattttctgaaggcaaaggaaatacagagtggctagtagaggaaggctgttataaataacagctgtgactgtgtgaccagttacagaaaggagggctgtagttgttgarcatatccctcttaccttgttgtcaatatgttgcatgta

SEQ ID NO: 844715 - DNA, 309 bp, Homo sapiens
atttttgtatactgttattagaaatgttatttagtacagccattatggagctccacatctgtaaccagcactcattattgcytaaattttggatagaagttgttttaactgtgatgaaattaattctcactgtagttttgatttgcatttctctgatgatcagtgatgttgagcactttttcatacacttgtcatttgtatgtattttttgagaaatgtctattcagatgtttgcccatttttaattggattattacctttttttcctattgagtgtttgagcttttaatatattctggttattaaccc

SEQ ID NO: 844716 - DNA, 688 bp, Homo sapiens
tcgttatgaacgacttcatgcccaagaatttggcaatttaaataaaattttaaaattacttaaaccaaaagtaacttaccaaaattgacagtagaagaaagacaatttcaatagtttgatatttatataggaaagtgtagttcttattcaaaatttttccagaaaggaaacaccaagtccagattttactggtgaattctaccaaataattaaggaagaaataataacttacacaaatactttcaaaacaatgaaaaaggagcacttctatatttcttttataaggttagcacaactttgataccaacactttaaaaagaactcaacagaggccaggcgcggtggctcacggctgtaatcccagcactttgggaggccgaggagggcggatcacgaggtcaggagatctagaccatcctggctaacatggtgaaacaccgtctctactaaaaatacaaaaaattagcctggtgtggtggcaggagcctgtagtcccagctacccgggaggctgaggcaggagaatggcttgaacccgggaggaggagcttgcagtgagctgaggtcgcgccactgcactccagcctgggcgayagagcgagactccatctcaaaaaaaaaaaaaaaacaaaaaaacttaacagaaaggaactgcagactaacctgtcttgtgactatagatgcaaaaa

SEQ ID NO: 844717 - DNA, 554 bp, Homo sapiens
tataaatagaatagagaagaaaaattatatgatcgtattaattgaggcaaaaaacaaatttgataaaatccaacacccrtttatgataaaaactctcagcaagctaggaatagagagaaattgtgtcaactcaataaagatcatccataaaaatcttccaggtaaatgctttccttctaagattaggaataaagcgtggatgtctgctctcaccacttgtagtaggcaagaaaaagaaataaatgacacatatattgaaaagtaataaatacaaatgtacttattttcagatgtcattatctatgtagaaaactccctggattccacataaaaattcctatagctaatacatgagttcagcaaagtgacaggatacaagattaacacaaaaaattaaatatttttaataaactatgaatatgtgaaaaccaaaattaaaacacaatttaatttataatctctcaaaatatggaaatatctggctgtaaatctaaaaaaaatgtttaggagttgtatgctaaaaacttcaagcacagatgaaagaaataacaaaa

SEQ ID NO: 844718 - DNA, 622 bp, Homo sapiens
agcagtcctacagagcatcatgtgtgtaatgattttgaccagtttaccttcaccatacctgtctttattttgaaggagcaccatttctatgtgaaagcagatttgaggttccttcccacactgacccagcacacctcccgaataaatgcttctctagacctcagagaggagaagtagaaagaagagcaaaaaggggaaagaataaagaattgtagaggttttggaatcacagggcagatttaaaagatatttagaaggcaccagtacttaggtgcatccccaaatattccaatttaattgatttgggtagggtccagcctttgttttttcaggcaattctgtttatcggttcaagtccagtccagttattttgctgctgagggccccaaggccccaggaggtgacatagcctgttgttgacctgctcagatggttgcatacctggccccaagaccagttcagccacttgccagcttccatcctgccaactgtaccacagggcgcaatccacttgcttcattttttggtaatctaatgtttggccaaaccaagatctcattttttaaaaattcmagggctatacatttacttgtcatgagtacaacttattctcaaaattcct

SEQ ID NO: 844719 - DNA, 537 bp, Homo sapiens
ttccttttaacagttacctagcgttttagtttgtyttttcttttataaccttacctccacattagtcactgctaactaatattttttaaaactaatggtcaaaaaatattttttaaatgatcaattcttgagtgttcaatttgttctttcttaaataggttcatgtactgcacatgaataaaattcagagggatccagaaacttgcatggtaaaaaatatgcctactaaatcacattatgttttaactgtatttcaatataattattttcattcgttatcttatatattctgttttgtgcatttacaaacattattctaagaaggcttgcatagccttcaccaaatgtacaaagaggtttatggcaaaaattaaattgattctgttttagtctttttgttttatttttattttttgagatggagtcttactttgtcacccaggctggagcgcaatggcaagatctcagctcactgcaacctctgcctcccaggttcaagcgattcttctgcctcagcctcccgagtagctgggatta

SEQ ID NO: 844720 - DNA, 487 bp, Homo sapiens
gtgtcccaatcccaagagaaaggggaaaaaaagaaatactgattatcctttgcatgagctgccactttctgggttgaactaaatatgaatagatgataagtcatggmtgttttttaattataacgtttccctacagccttttccccactgacatttcttgatatagttcaagttagtatctctcgtcagtgcaatgtttgtctccttgatagagaggactaccgggcctgttcagtatttatctcagtttccccaggacctacgagtttctgcacagagtaggtgctctaataaggatggttgagttaaatatacatattagctaagggcacaccatgattcacaagttacttaccagctcaacatttcaaatcacatggtgtgactctggtcatgatggttaaaataactggaatcttcccggcttcctaaaaggtaatcgccaacgtgaaatctttaaaattacagcctagtagaatcacctact

SEQ ID NO: 844721 - DNA, 365 bp, Homo sapiens
tctggacacaggaactgttccatggacagctcccatgaatccagccagtcatttaaaaagttaattcaagatcagaagaactggacacaataaaaaattcgggtaattccatgccctccattarcacattggaccagcagggtagtgtcatgtctgaatataaaggataggacatatgtatcaatcatttcatctgggctgacctcctttgagaacattatgtctgttcttattctacatagtaaagatagataactcagtatttaaaaataggattccaaaagaccatttccttggggacacttaaattagagatcataatgagaacctggggaggtgacaggaagtggtgataccctgagttc

SEQ ID NO: 844722 - DNA, 566 bp, Homo sapiens
gaactggggatcctcccttttaggggattatgagcaagggtaggtgttgtataatcagtagatgatttcactagataagggctgtgatagggacaagcacaratatatccacataaggggtcagggaacatttctggacttggatgaaacaccaatttgtttggtgtggaggtctgctttcctacgttgcctgtagaagattcttatgaatagggcaagcgttagttctgagcattttagataaggctgtaggggactgattcagttgagcccagaaagatgggcccaaatgagtgggtgtgggacagttcaacataaaaaggggtaaagcaagagagggaggctatggaacacaaaaacgaacagatggccagatggagaagcaaagccaagttttgtcgggcctgaagcttatcacattttgaggacttcattaagaaaaagaacacaaaattaagtatagaaaattaggcagaaaaataaacatccttggaggaggtgacacctaagcggagaaagagcaagttcatggaagaaggaggaaggggttacagacctgtagttcg

SEQ ID NO: 844723 - DNA, 651 bp, Homo sapiens
tattatttaacctccatgttttattttatcttcttttttagagatttcttttatcatatattacaccttccagataggtaatattttatctctttttggtcatattctttctctctctctcttttacacacacacatgcacacactcacacacacacgcacacactcaagcatgatacatgatagagggcagcagccctctatttcagaaaatcaaaaacttctaaaacttacaaacttcttattaggaccctcacatggtaatcctagcagacatttagaagagaaaagtgaaaattggttgaggccaattgtaatgccttagttgtaaaatcacatcattgatccattcagaatgtgagttttgagtactaaataagaaattccaaagccccacacaccctctctttctactatgaacaagaatttctctggaggtttcagccagtgtaatatggcaagaaataatatatagagctttgaatggaaggagagggacacgtttttattgtttctaggtgattaaattatctactcaagtaatgcatggaaattaattggaaatggagaaaactattataacaagctaggaatttgagttgagtggcctcagataggagcaggatatawacatcattgtaaaaaatattgc

SEQ ID NO: 844724 - DNA, 651 bp, Homo sapiens
tattatttaacctccatgttttattttatcttcttttttagagatttcttttatcatatattacaccttccagataggtaatattttatctctttttggtcatattctttctctctctctcttttacacacacacatgcacacactcacacacacacgcacacactcaagcatgatacatgatagagggcagcagccctctatttcagaaaatcaaaaacttctaaaacttacaaacttcttattaggaccctcacatggtaatcctagcagacatttagaagagaaaagtgaaaattggttgaggccaattgtaatgccttagttgtaaaatcacatcattgatccattcagaatgtgagttttgagtactaaataagaaattccaaagccccacacaccctctctttctactatgaacaagaatttctctggaggtttcagccagtgtaatatggcaagaaataatatatagagctttgaatggaaggagagggacacgtttttattgtttctaggtgattaaattatctactcaagtaatgcatggaaattaattggaaatggagaaaactattataacaagctaggaatttgagttgagtggcctcagataggagcaggatataamcatcattgtaaaaaatattgc

SEQ ID NO: 844725 - DNA, 597 bp, Homo sapiens
atctcaacatcaccagctcccagagaaaaacaagtgtaccttttgtgcgggaggaaaaatgttttagtagtggttatgaaggtgatgctttctgccagaactcagactgttcttgagtgctcaccatctcagcctactcaggcttctaaagaggtataagacaaaaccagcacatgtacaccaaaatccatctgatcttcagcatccccagcctctaggttgctggggctgtcatggagccaacctaggtttcctttctgtaataaactgggtcaccactggagataagaccaaagaaccagtgggtgaggcttgaagcaccccaagctgcctaaccatcccttcaaatagatgagcctcttggccttgtttttaagaactagagaaatctgagggtcctgcagaaatttttttacattcagataggaagggaaaagcctctcaggtaaactgcctgcctcagatcttctcttgaaatgaagacctggaaataaaaatgtccagtggtataggaaatatatcaggaaaaaaaaaaaaaaaaaaawatatatatatatatatatatatatacacacacacacacagtaactgcacata

SEQ ID NO: 844726 - DNA, 580 bp, Homo sapiens
catggtgtcatttgtaaaaactaattggtctgtgttttggaaagatgatcatcagaacatttacaatgattctttgtgtataatgattctttgtgtrtaatgatgtttctgctttgtattttctattttctttatattaaagatgagtaataaaactattttcagtgacaaaaatctgcctacttctttgaatagggagagtttatcccatttacatttgttttcacaaataatgtgttctgattcattcttcattttttatttctttattttttatattatataaattttcttcctttgaaatagttttttatatagctaatttgtaatttggcatcattcacctttaaaagcttcaagaacatcattgaatatatatgtctaccaattccaagaatacaacatcccaagattaagaactctattgaatatctttgaactagacgacacaataggctcattttatttcctgtcacctaccctttcttcctctctgtttatgttagattttggacaatatttattttcaagttactattttatgttattgtgaagtaggttcactgtgcactggttccca

SEQ ID NO: 844727 - DNA, 591 bp, Homo sapiens
ttatatcatatcacaagtcctctgcccggcttctgtagctccctctacttttgcaaacttgtctctgacattgcataactctgctccagacaggcttgctttcctattgtccctgccacatgttgtrtcatttccaactctcttcctttgctcatgctgtgctttctgcttgaaatgctctcctctctgctttcaaaatcctatccattatacatggcagacagcaatagtggttggtacaggaggagaggtaggattggagtgggccaggagtaaagacacacagagacatatatatatatatatatatatatatatatatatatatatatatatatatgtatctatctatatatatgtatatatacatatacatacacacacacacacacacacacacacacacatatatatatatacacattgacccttgaacgatgtgggagttaggggcattgacccccacacactcgaaagtccatgtataacttttgactccccaaaatgtaactactaatagcctaatattgatcagaagccttacagttaacataaacagtcaaataacacacattttgtaggttacatgtg

SEQ ID NO: 844728 - DNA, 620 bp, Homo sapiens
ttttacctcagacctcagaatccacctttggaggaaatcagtgagggctcactattactgaccacagtttctcacctgtagttggaaagactttgcatatgctaactacaagtataaccttggaaaaacttgaatgtacagagtcagagttcacccattaagcgcaaagcctcagaagacctggaacaagattctgcttctctgtgatcccaagatgtcagcccttgccccagcaatgttgaattttcttctacttggtcatcaaaaaaggagtgtaaaagaagcgaggtgcactctccatcttcttcctgaagaagagcctcctattcttctctgtcctcataaatgggcattagtgccttggacagttgaggaccactccatcctctccacagcatcccctccactccagagttgggtggcacggattttcaactggctaaccttggtttccacaactgaatttttttcagacccccattcttcatgctggaaatgagattactggacttggcagttttctttcccctcatctttcaccaggaactggactcttmatttcctcaggacagactagctgccacattatccccaccttagttctttctctctgatccctg

SEQ ID NO: 844729 - DNA, 530 bp, Homo sapiens
ccatcaggctaccttggtgatgtttagattgctaaggatyataaagatgcctcttcataggagtatctaccaatccacattcaaggggcccaaaaaactctcacactaccccaaaacatgttttgctgaaatagatattcattcttcttttttttttttgagacggagtcttgctctgttgccaggctggagtgcaatggcacgatctgggctcactgcaacctccgcctcccaggttcaagcaattctcctgcctcagcctcccaagtaactggggctacaggcatgtaccaccacgcctggctaattttttgtatttttagtagagacggggtttcaccatgttagccaggatggtctcaatctcctgacctcgtgatctgcctgcctcggcctcccaaagtgctgggattataggcgtgagccaccgcacctggccaatattcattctttctaaaagtttgcatttcttatctggaaagtctgaaacagaagtcccaaattctctttaggagtaaaaggaaaacaat

SEQ ID NO: 844730 - DNA, 616 bp, Homo sapiens
gtgaaggatggaagattttacctacttgcaagttaacagattattcagtcacaatttcaagggtactaaccaaagacatgagactctggagccagagccaaaggactgtattatctgtggctgagcargctcaagcagcacgggggcagtaaggagtgggcctcagtgagtgtggcatacacagagagcttgcatcacagctcatggatttaggaaatcctagtcttttgtatttttctgcaagcaaagatgcccatatttgcctgggagggggacatctttattttatgcgacagcaaataatggatcccctctcaaaggagtccctatattccaagaagataccatgtacaaaaatccttgaaaatacattccagaacaaaagactatcagtgcctctgctttcatgatgtgcaaaaatgtgtggaatccctggagaattatctctcaagggaaggataaaaataattacaacacaaactattatctattcaacatatattttgtgccgtacactatactaattatcttttctctaattaacatgtcaaaacaactctattaggtaagttcttttattattttcattttatggataaaataaaataaaatacta

SEQ ID NO: 844731 - DNA, 578 bp, Homo sapiens
tatattcatttgggtatacactctgtaatgagatggctgggtcaaatggtatttctgcttctagatttttgtgagaaatcgccacactgtcttccacaatggttgaactgatttacacccccactaacagtgtaaaagcattcctttttctctgcaacctcaccagcatctgttgttccttgactttttaataatagccattctgactggcatgagatggtatctcattgtggttttgatttgcatttctctaatgatcagtgatgttgagctttttttcctatgtttgttggctgcatgtatgtcttcttttgagaagtgtctgtttatgtcctttgcccactttttaatggggttgtttgtttttttcttgtaaatttgtttaagttccatgtagactctggatattagacctttgtcagatgaatagattgcaaaaattttctcctattctgcagattgtcttttcactctgatgatagtttcttttgctgtgcagaagcyctttagtttaattagatcccatgtgtcaatttttgcttttttgccattgcttttggcatttttgtcatgaaata

SEQ ID NO: 844732 - DNA, 582 bp, Homo sapiens
gttgatttttgtatattatgtaaggaaggggcccagtttcgattttctgtatatggctagccagttctcccagcaccrtttattaaatagaaaataatttccccattgcttgtttttgtcaggtttgttgaagatcagatggttgctggtgtgcagtcttatttctgagttctcaattctgttccgttggtctgtatgtctgttcttgtaccagtaccatgctgttttggttactatagccttgtagtaaggtaatgtgatggctccaactgtgttctttttacttaggattgtcttggttatttgggctcttttttggttccatatgaattttaaaatagttttttctaattttgtgaagaatgtcaatggtagtttaatgggaatagcattgaatctgtaaattactttgggcagtatggccattttcacagtattgattcttcctatccatgatcatgaaattttttttccatttgtttcctctctgatttctttgagcagtggtttatagttcttcttgaagaggtccttcacttgttagctgttgatgtggtttggttgtgtcccacccaaatctta

SEQ ID NO: 844733 - DNA, 418 bp, Homo sapiens
tccctctgtgggagttgtgtgcacacatgcacgtgtgcttgagggtaagtgtgcatgtgtgtgcatgctctttggaggaacactgtgaggcggcccctccgccctgtctccgtgcgggtgtgtaactaccacacggcaacactgtggtgactttagtcagcttaaaggactaggaagcagaagctgcctgtgcctccagaccctgacagttcttctctggagcagtcctagctgaggaggcctccagtcctgggagacacacagtggcatctgccgcgtcgcccacgaaggccccagacagggctcagatctggtcggcctgctctgtctctgaatgagccacccctgcaggggctttgggcagctgaggagcccccactggttytgcggggaaggggctgggttggggcccgcacgt

SEQ ID NO: 844734 - DNA, 682 bp, Homo sapiens
ttagcctcctgagtattggggatcacaggcatttaccaccacacctggcaaaacatcccatccttatcttgctagtaggattataaatctcttgaagaagctatgtttgtttgttktcccttactggggtactccctaaaaacagatatggtgattcttactgttttaaatttggtaaaatttaaatcccaagggataccccaaatttgcacctaagaatgctcctgtccacatcacacagccccccacatgtgacacatacatcacagagaatgcatctccaaccaccccacatgcatcaccttcttctctacattcggccccgaagcactctttcctgttcaaagtcaaaggtcacctctgtgatgctgcctctgagtcagacgcctgtaggtgtcttctacagaaatctattcataacttctcttagcatattttattataatgatgtttgtctgtgtgtctcaccattagcctatgagttcctagaggatgaaaactgtcttctttgtacatctaacatctagcattagtacatagtaggcgctcagtaaatgcttgttgaagggaggcgtcaatcaatgaaatgcaaagcgcacaagtaggctccagggtcccccagggcagaatggatgtgtgattgcagcactgggattgaagctgcagccactggatctgcagg

SEQ ID NO: 844735 - DNA, 451 bp, Homo sapiens
tttattcctctgtcactacccttcctgtgaccaagctatcctgttcaccttcaaatccccacaccacgtttcaggtaccagctgtacattttactagggactgtcctcaccgtgacagcaccaccaaaggatgaagcatctgtaggcaatcatccatcctgcgtgtgtgtcaggctggatctattctgctcccccaggcttcagcggtcaggggaatccatttcctctcccccagcctcacagccctccagcctctaggcactgtgagagaacccctaggtacagggttagtggaagttgagctcctgccctcttacaaaagaagtctcctttgctcaaatcatgatgtatttcctctgtgttttgttttgttttttgttttttgagatggagtttcgctcttgttacccaggctgaartgcaaggatgcaatctcagctcactgcaatcc

SEQ ID NO: 844736 - DNA, 617 bp, Homo sapiens
actcagaggttgcgatgagccaagatcacgccatgggcaacaagagtgaaactccrtctcaaaaaaaagaaaaaaaatagaatgaaccagaaggcaggtaggaagtgagatgatcttttttctttttcttttttttttttttttttgtagagacagagtcttgttctgttgcccaggctggagtgcagtggtacgatcaaagctcactacacaatcgaacttatgggctcaagggatcttcccaccacagcctcccaagtagctgagactaaatgtgtgcaccaccacactcagctcatttttttattttttggagtcagggtcctgctctgtcgcccaggctggagtgcagtggcatgaacacagctcactgcagccttgacctcctgggctcagatgatcctcctgcctcagcctcccaggtagttggaaccacaggcatgtaccatgatacatggctaattttttaatctttttgtagagatgggggtctcactttgttgccaaggctggtctcaaattcctgacctcaagtgattcttcggccttggcctcccaaaatactgagattacaggcatcagccatcatgcccagcctatattttcttcatattaaa

SEQ ID NO: 844737 - DNA, 691 bp, Homo sapiens
agacagaagtaggcagggactagatcgtgtaatgcatcrtaggcatggggaggagtgtggattttattctcagcaaatggaaagctaaaggagggtttgagcaggagagtggcaggatctgctgtatgctactgtggctgctgggtgaaagaggagtgacgagagggcagggagaccagttagggatctgctgcggtggaccaggtgagatgatgctggtctgggcgagaatgtcaggaatggaggtgaggagaagtggtttgatttagagtatagtttgcaggaagagctgatgaaatgacctactagtagattgaagtgaaatctaaaggaaagagcattcaaggataattcctgggttttcacctaagcgtaaatagcagtgccattactgaggtggagaagagataaggtgggactcgggaaggaaatcagtaatttggttttggccttgctaagtttgcaatctgagtatagatgtccagtaggcagttgaatacatgcatctggagttcctgggagaggtccaggctgaagatacaaatttggaacctgccagcctgtaaatggtgtgtaatggcatgggaatgaatgagatcatctagggagcaagtgtgggtaaacaaaggaagagtactaaagacaagcctggaaagctcccagcttttagagatttggttaaaagcaagag

SEQ ID NO: 844738 - DNA, 691 bp, Homo sapiens
agacagaagtaggcagggactagatcgtgtaatgcatcataggcatggggaggagtgtggattttattctcagcaaatggaaagctaaaggagggtttgagcaggagagtggcaggatctgctgtatgctactgtggctgctgggtgaaagaggagtgacgagagggcagggagaccagttagggatctgctgcggtggaccaggtgagatgatgctggtctgggcgagaatgtcaggaatggaggtgaggagaagtggtttgatttagagtatagtttgcaggaagagctgatgaaatgacctactagtagattgaagtgaaatctaaaggaaagagcattcaaggataattcctgggttttcacctaagcgtaaatagcagtgccattactgaggtggagaagagataaggtgggactcgggaaggaaatcagtaatttggttttggccttgctaagtttgcaatctgagtatagatgtccagtaggcagttgaatacatgcatctggagttcctgggagaggtccaggctgaagatacaaatttggaacctgccagcctgtaaatggtgtgtaatgscatgggaatgaatgagatcatctagggagcaagtgtgggtaaacaaaggaagagtactaaagacaagcctggaaagctcccagcttttagagatttggttaaaagcaagag

SEQ ID NO: 844739 - DNA, 691 bp, Homo sapiens
agacagaagtaggcagggactagatcgtgtaatgcatcataggcatggggaggagtgtggattttattctcagcaaatggaaagctaaaggagggtttgagcaggagagtggcaggatctgctgtatgctactgtggctgctgggtgaaagaggagtgacgagagggcagggagaccagttagggatctgctgcggtggaccaggtgagatgatgctggtctgggcgagaatgtcaggaatggaggtgaggagaagtggtttgatttagagtatagtttgcaggaagagctgatgaaatgacctactagtagattgaagtgaaatctaaaggaaagagcattcaaggataattcctgggttttcacctaagcgtaaatagcagtgccattactgaggtggagaagagataaggtgggactcgggaaggaaatcagtaatttggttttggccttgctaagtttgcaatctgagtatagatgtccagtaggcagttgaatacatgcatctggagttcctgggagaggtccaggctgaagatacaaatttggaacctgccagcctgtaaatggtgtgtaatggcatgggaatgaatgagatcatctagggagcragtgtgggtaaacaaaggaagagtactaaagacaagcctggaaagctcccagcttttagagatttggttaaaagcaagag

SEQ ID NO: 844740 - DNA, 598 bp, Homo sapiens
aaagataaacagagaaagagagttagcaaatataaagtgcattactggttgggtgtggtggctcacatctgcaatcccagcactttgggaggctgaggcgggcagatcacttgaggccaggagtttgagaccagcccggccaacatggagaaaccccgtttctactaaaaatacaaaaattagctgggtgtggtggcacacgcctgtaatcccagctacttgggaggctgaggcatgagaatcacttgaacccaggaggcagaggttgcagtgagtcaagattgtaccactgcactccagcctaggagacagagcgagaccctgtctcaaaaaaaataaataaagtgcattaccaagctggccacagcttaatgagaaactgattcagtcctgcaggatgtcttcagagagaccatatgggactacccactctcaaatagtacctctcaggagaggcagacagaaggattttcctctaattcccatctccaactggtcatagtttgctagttgccattcctggatttgtgtgtgtatgaataccagatggatccmatagtatcttgaatctccatagtaaaaggaaagtcccatgcca

SEQ ID NO: 844741 - DNA, 598 bp, Homo sapiens
aaagataaacagagaaagagagttagcaaatataaagtgcattactggttgggtgtggtggctcacatctgcaatcccagcactttgggaggctgaggcgggcagatcacttgaggccaggagtttgagaccagcccggccaacatggagaaaccccgtttctactaaaaatacaaaaattagctgggtgtggtggcacacgcctgtaatcccagctacttgggaggctgaggcatgagaatcacttgaacccaggaggcagaggttgcagtgagtcaagattgtaccactgcactccagcctaggagacagagcgagaccctgtctcaaaaaaaataaataaagtgcattaccaagctggccacagcttaatgagaaactgattcagtcctgcaggatgtcttcagagagaccatatgggactacccactctcaaatagtacctctcaggagaggcagacagaaggattttcctctaattcccatctccaactggtcatagtttgctagttgccattcctggatttgtgtgtgtatgaataccagatggatcccmtagtatcttgaatctccatagtaaaaggaaagtcccatgcca

SEQ ID NO: 844742 - DNA, 601 bp, Homo sapiens
ataggactcagtggcctgggttcagytgacatatgcatgtaagagttaggtttcattctcactttacaaatggaatcccgtccttatcaagaaaatttggtgacattctgccaatgaggcaaccagctctatttagtaggtggcccagctcatgggttcactggacatttcaccactgccctgcaacctcatgatcacacatttaggtgtcccaagttaatctcttctccctccccccatcctcctcttctccaatagggtgatttacggagatgagcatgataataaagtgtaattggagagacaatatttcatgacaggttggagactgagctctcccctcaagtaagtgacccggggcttggcactcacatgctgtggctcagtttcctcggctgtaaaatgggaatgatgctactgaacaactcagcatcagagctgctggctcagaatgttgatagcgtgaccacaccgtgtgcaatataaaacacacacggtaaaatcatgactataattacaactctcccctctgccttgtcagaagtaaggagaggtgcactggctggtgtggaggagcgcccggcggacatacaaacctttt

SEQ ID NO: 844743 - DNA, 647 bp, Homo sapiens
aggggtttcccttataaaaccctcagatcttgtgagacttattcactaccatgagaatagtatgggggaaacggcccccatgattcaattatccctcccacwacatgtgggaattaatgggaactacaattcaagatgagatttgggtggggacacagccaaaccacactagcaacagaatgagaccctgtctcaaaaaaataaaaataaagcttgcatattttagctttaggggccttatttccactgacatcatgtagacactatttggcaaaaattaggttcatttacagattgaggatttagacactctgctacttctaataaaattttatttgtgcttggctgggatcacttagaaaaggaaggaaaaaaaagcactgccatttgttgtctgctaatagtaagccagacagcatgtgaatgctccacctgcattattcaacctctgcatcacagccaccagataaaggcattcaggcacttgagggtagtattctgcctggttccattttctgccactctgtttgaaaattgcagaaccaactatttccaactgagtttaaattgcaggattgaaaattattcttttttctctagttagttctaaatagaaacacttttatattgagttgaataaagttaaa

SEQ ID NO: 844744 - DNA, 647 bp, Homo sapiens
aggggtttcccttataaaaccctcagatcttgtgagacttattcactaccatgagaatagtatgggggaaacggcccccatgattcaattatccctcccacaacatgtgggaattaatgggaacyacaattcaagatgagatttgggtggggacacagccaaaccacactagcaacagaatgagaccctgtctcaaaaaaataaaaataaagcttgcatattttagctttaggggccttatttccactgacatcatgtagacactatttggcaaaaattaggttcatttacagattgaggatttagacactctgctacttctaataaaattttatttgtgcttggctgggatcacttagaaaaggaaggaaaaaaaagcactgccatttgttgtctgctaatagtaagccagacagcatgtgaatgctccacctgcattattcaacctctgcatcacagccaccagataaaggcattcaggcacttgagggtagtattctgcctggttccattttctgccactctgtttgaaaattgcagaaccaactatttccaactgagtttaaattgcaggattgaaaattattcttttttctctagttagttctaaatagaaacacttttatattgagttgaataaagttaaa

SEQ ID NO: 844745 - DNA, 556 bp, Homo sapiens
cctctgatcttctaccaaagaaacaatagaatgttctaccactggagaaaactagaagggacagggtgagagatgacttatcagcctcaatatggtggcctccaaagggatttcaagaygtcattgccttgttcaaccttcactttccgtgatggctttggaccccacccctgtaagtggtatgcatgatggccaacattgacagggatcaccatggtcactgtggtcatttgttcacttagttatgcattcagcaagtgtttatagagcatcgtctctgttgcaggcagtgaccaggagatgctgagatgcagtgaagattggacagtgaggggctttgtctgcttagcacttgcattctgatgagggagacggacactaaaccagaacacaaatcaataagtattgtaattccaggtagagatcagagtcatggagaatgaggaagtgccttaagataatagggtaggggtgtagttttggatattagggacaggggggccaatgagggtaagcaggcacccagatgatgtgaagagggaagtcatgcacagat

SEQ ID NO: 844746 - DNA, 519 bp, Homo sapiens
gaaaatcacacaaaaagcttatgatttccagctctgtcttaaagcaaatcgtaagaactgtcttcaaaaagttatattggaaaagattcatattagcaatagagaatatagggtaaaaactgaattatactgttgaaatttaaaatctgtagcctctagcatgtaggaaaaaagaaaaaagaaaactggtgtattacccctctctacatatttagatggtgacaattcttgccatcaatgacatcaaaacacattttcaccaaatacatcagaacactgtacaaatacacactggctccttgtcacaagttgcaatatgctgatcaatatcaaatgggctagactgacctgtgaaaacaaaaactactgtaatctactgtgctaaacccaaagaagcagtttacaggaaaattagaattgtttcttcattgggagaattaatttcaaattaagcattcttaatttatgtygaagtgatccactggggtaaagaaagagcaaatttgattttcaagcatt

SEQ ID NO: 844747 - DNA, 574 bp, Homo sapiens
tgaaactttggaagacttccagcttgcttgcttccagtaagttccatgcacaagaaccacagcccaaagtctgtagacactgcgctgaatgaaacctgtggcgccatagcctgaaagaccctctttgtgtggcggcaaataactcctgtcttcccacgtactgacctctgctctgcctgttcctggctatctcttcagaaggcagcctccttggggccatctggagccatcagcgggggtaggaagaccacagcctgaaccagatccttcctgctggtcgcttgagaactctttttctttttaatttttgagacagggtctgtcgcttaggctagagtacagtggtgcaatctcggctcactgcaacgtccttgcaaattcaagtgattctcatgcctcagcctcccgcgtagctgggattacaggcgcctgccaccatgcccggctaatttttgtatttttaatagagaaggggtttctycatgttggccaggctggtctcaaactcctggcctcaagtaatccacctgccttgacttcccaaagtgctgggattacaggcatgagccactgc

SEQ ID NO: 844748 - DNA, 468 bp, Homo sapiens
cgggcgcggtggctcatgcctgtaatcccagcactttgggaggcccaggtgggcagattatctgaggtcgggagttcgagactagcctgaccaacatggtgaaaccctgcctctactaaaaatacaaaattaagctgggtgtggtggcagatgcctgtaatcccagctactcaggaggctgaggcaggagaatcgcttgaacctgggaggcagaggttgcagtgagccgagattgcgccattgcactccagcctggacaacaagagcaaaactccgtctcaaaaaaaataaaaataaataaataaataaataaaataaaatagggataataattgtgcaatcacacagaattgctgcaagggctaagcaagctgacatgcgaagttygtaaaaggtgcctggtgcacaggacgcatctagttgcttctaactgttgtcatcttcacttccatccctgtcactgttaat

SEQ ID NO: 844749 - DNA, 620 bp, Homo sapiens
agacgcagttcagtcactggcattgattcgccgttgttgctgctcttctttcctcaaaggcgactgaagggcagcaggcccatgctcgcttctgtctgcccgatgagtcacttcaccctaggcctggccctctagagaacactcctctaagattacagaatgcaaatctggattccagagctggcagaggccccagggtcaggctctaggacaaccggcgaaaaagcgggaacctctactccacgcccttggtttttcgccccttgacagcttgaggctccgccccgctttgccccgcccccccagctccggccgacgcccaccggaactacagcccccatgatgcagtgggagtccgagcctctgcgtcgtccgcttgggacgcgccggcggaggagtggcgcgcggaggagtggcgcgctgagacgccgctcgaagcgccgagtcgcggggcagcagaggcgtaaggagtaggcggggcgagccggctgggctcagggtccacyagctcacccgggtcgaggggcaatctgaggcgactggtgacgcgcttatccacttccctcctcccgcctccccctggggtggcgctcgctggtgacgtagtgagtgtgatggcc

SEQ ID NO: 844750 - DNA, 620 bp, Homo sapiens
agacgcagttcagtcactggcattgattcgccgttgttgctgctcttctttcctcaaaggcgactgaagggcagcaggcccatgctcgcttctgtctgcccgatgagtcacttcaccctaggcctggccctctagagaacactcctctaagattacagaatgcaaatctggattccagagctggcagaggccccagggtcaggctctaggacaaccggcgaaaaagcgggaacctctactccacgcccttggtttttcgccccttgacagcttgaggctccgccccgctttgccccgcccccccagctccggccgacgcccaccggaactacagcccccatgatgcagtgggagtccgagcctctgcgtcgtccgcttgggacgcgccggcggaggagtggcgcgcggaggagtggcgcgctgagacgccgctcgaagcgccgagtcgcggggcagcagaggcgtaaggagtaggcggggcgagccggctgggctcagggtccaccagctcacccgggtcgaggggcaatctgaggcgactggwgacgcgcttatccacttccctcctcccgcctccccctggggtggcgctcgctggtgacgtagtgagtgtgatggcc

SEQ ID NO: 844751 - DNA, 620 bp, Homo sapiens
agacgcagttcagtcactggcattgattcgccgttgttgctgctcttctttcctcaaaggcgactgaagggcagcaggcccatgctcgcttctgtctgcccgatgagtcacttcaccctaggcctggccctctagagaacactcctctaagattacagaatgcaaatctggattccagagctggcagaggccccagggtcaggctctaggacaaccggcgaaaaagcgggaacctctactccacgcccttggtttttcgccccttgacagcttgaggctccgccccgctttgccccgcccccccagctccggccgacgcccaccggaactacagcccccatgatgcagtgggagtccgagcctctgcgtcgtccgcttgggacgcgccggcggaggagtggcgcgcggaggagtggcgcgctgagacgccgctcgaagcgccgagtcgcggggcagcagaggcgtaaggagtaggcggggcgagccggctgggctcagggtccaccagctcacccgggtcgaggggcaatctgaggcgactggtgacgcgcttatccacttccctcctcccgcctcccccyggggtggcgctcgctggtgacgtagtgagtgtgatggcc

SEQ ID NO: 844752 - DNA, 551 bp, Homo sapiens
taaatacttttacacaaatgttcatagcagcactatttgcaagagccaaaggctggagacaacccaaatgtctatcaatggatgaggataaacaaatggtggtatatccatacaatgaaatattattcagccttaaaaaggaatgaaatactgatacattctacaacacaaatgaaccttgaaacatgatgctaagtgaaggaagccagacatagaaggttacacactgtataagtccgtttatatgaaatatcccggagaggtgaataggtaaatccaaaaataggaaaagagagacagcagatttgtggttgccaggggctggggcaagggggtctagacagcgactgctttaagggttttccttttggggtgatacatgtagtggaactaggtagaggtggtggctgtgcaacgctgtgactgtactacatgccrcaaaatggtacacttttaaatggttacttctacgttatatattaatcttacctcattaaagaagaaaaaaataacaagaaaatgaagcattacatttgtgagacgcagactca

SEQ ID NO: 844753 - DNA, 483 bp, Homo sapiens
gactgtaaagtacataatagatatagcatgttagatagtgataaatgccaaggagaaaatgcaaagaaagggaatagcaagggatascaaggttaggtgaataaattacatttttaaatagggtggacagggaaggactcaccaaggtgatatttgagtaaagatctaaagcaaataagggagtgactgacccatatgtatatctgtgggaagaggattcttcatagaggaagtagtctagtgccctagcaggggtggagagcaatgaggccagaatggctgagtttttggagtaaggggagtgttgtaggagatgagatcagagagaatgcgaggtgagcgttttgccttccaggttattgtaaggatttctttctttcttttttttttttttttgagatggagtctcagtctgtcacccaggctggagtgtggtggctagatcatagccccttgcatttgctggagcttctgctccagcag

SEQ ID NO: 844754 - DNA, 612 bp, Homo sapiens
gggaggaaaaggcccaccctggccctcccagcactggcatgaagcgagccacatgcagtccatccacttggcacgtagagtggggtgcctggctctcaccagcgagtgcagtggggatatgtgacttcatccgttctcctagagcctcggacccaaactttcaaacttctttttcatgtaagatgcaaagttctccctaatctcccgccatagggttgaagtcggtggtagaatcctgtgtatataagtgtgcatgtttataacttaaccttgaactaaaatactgccgggcaggtgtttggtatctgatctgaatgcctacgtttttcaactggatggcaacccctgtttgtaggtccaatttttataaaagtaattatgtgtgcattaggaaggacatattttttcccagtttgagaaatgactaatcgttcttttgagattcccgcagcgaaggttatgttaatacaatcagcttttrctccgccatgaagtccttctcgtgctttctggtggagagtaatctccagtctgcctaacacctacagccacaaaatagggtgggcctccagggaagagagaaaatgcaattctctctggcatgggaggagt

SEQ ID NO: 844755 - DNA, 612 bp, Homo sapiens
gggaggaaaaggcccaccctggccctcccagcactggcatgaagcgagccacatgcagtccatccacttggcacgtagagtggggtgcctggctctcaccagcgagtgcagtggggatatgtgacttcatccgttctcctagagcctcggacccaaactttcaaacttctttttcatgtaagatgcaaagttctccctaatctcccgccatagggttgaagtcggtggtagaatcctgtgtatataagtgtgcatgtttataacttaaccttgaactaaaatactgccgggcaggtgtttggtatctgatctgaatgcctacgtttttcaactggatggcaacccctgtttgtaggtccaatttttataaaagtaattatgtgtgcattaggaaggacatattttttcccagtttgagaaatgactaatcgttcttttgagattcccgcagcgaaggttatgttaatacaatcagcttttactccgccatgaagtccttctygtgctttctggtggagagtaatctccagtctgcctaacacctacagccacaaaatagggtgggcctccagggaagagagaaaatgcaattctctctggcatgggaggagt

SEQ ID NO: 844756 - DNA, 615 bp, Homo sapiens
aatactgtctgggtcaaatattcatcacaaaatagaccaataaatcagaatgttttctaacattcctataggtgcttctaaaccaatttgattgtcccatctctcacaaaagggttgaaagataaatacamtagagaatatcaaaaagatatttttagttctgaaatactatagagaaccaccttcctccttaccatttaagatttatacttatgtcatgtgagcttttatatcagttatttactcattcaggatttgtgataattgaagtgttttattcctaagagaaaatgttaaatttgctatgctccagtcaaaatcgaatcagctactctgattacagtgatataatcacatacatatacatgtaatgtgcacacaccttattgcatattaaagtatatcttccattttaagaaattgtaagtcaagcatataaaagtgaaaggagaagaaataaatacatcagtgttgtagtgaacagaagtaaaggaagaaaaatgaattatgatgttattgtatatcattcatgtttaagagaactttttgtaacatgaatattcaatttacaaagccttgttataaatccgccatcatcagtgagagatttatctt

SEQ ID NO: 844757 - DNA, 615 bp, Homo sapiens
aatactgtctgggtcaaatattcatcacaaaatagaccaataaatcagaatgttttctaacattcctataggtgcttctaaaccaatttgattgtcccatctctcacaaaagggttgaaagataaatacactagagaatatcaaaaagatatttttagttctgaaatactatagagaaccaccttcctccttaccatttaagatttatacttatgtcatgtgagcttttatatcagttatttactcattcaggatttgtgataattgaagtgttttattcctaagagaaaatgttaaatttgctatgctccagtcaaaatcgaatcagctactctgattacagtgatataatcacatacatatacatgtaatgtgcacacaccttattgcatattaaagtatatcttccattttaagaaattgtaagtcaagcatataaaagtgaaaggagaagaaataaatacatcagtgttgtagtgaacagaagtaaaggaagaaaaatgaattatgatgttattgtatatcrttcatgtttaagagaactttttgtaacatgaatattcaatttacaaagccttgttataaatccgccatcatcagtgagagatttatctt

SEQ ID NO: 844758 - DNA, 618 bp, Homo sapiens
tcttgtgatacttattcactatctgagaacagcacaggaaagatttgcccccatgattcaattacctcccacaactcgtgggaattcaagatgagatttgggtggggacacagccaaaccgtttcatctgcctcctccctacctttcccattctgtagtatccattattgtattctctacaagcatacttcagagatattgcaggttttgttccagaccactgcaataaagtgcgtcactcaaactttttggttttccagtaaatgtgaaagttatatttatactatactgtagtctattaagtgtgcaataacatttctaagaagtgtactttattgctataaaatggtaataataatctaagctctcagcgagttgtaatattttggctgatggagggtcttgccttgatattggtggctaatgactgattggtgtagcagttgatgaaggttggggtggctgtggcaatttcttaaaataagacaacratgaagtttgtcacattgacggactctttctttcataaaagatttctccatagaatgcaatggtgtttgatagcattttacctacagtagaacattttttcaaaattagagtcaatcctctcaaacc

SEQ ID NO: 844759 - DNA, 534 bp, Homo sapiens
gatccatcacttacaaactttgtggactctgtgcctcagtttccaaacactgtagaggcactgggattaacaagatgcataagacatgatcattgaccttatgactaggagtgctcagtctagtacagggattggcaaactatgggcccatgggccaagttcctcccatcacctgtttttgtaaataagtttttattggcatacagccatatacattcatttacatattgttggtgtttgttttcaagcaatagggacagagttgagtagtttacagacaactgtatggcccgaaaggcccaaaacatttattatctgaccctttatagaaaatgccaacccctgctcctgtgcaatggcttcaggtagttaaaatccaaggcatactggtgaagaatatggtctttcgtgtcagatttgggttcaaatgctagctcactaacttactgacctgtgtgatcttgaactagttagtccctgtactwcaatgtcctcatctgcaaaatgaagatgatgataatacctatcacactg

SEQ ID NO: 844760 - DNA, 670 bp, Homo sapiens
atgcttatttcccatccctatatcctctctgctgacatacctattcaaatcttttgctcatttttttcatagggctgttgrttttcttactgataagttttggggattctttctatgtttcaaatgtaagttccttattagatatatgttttgtaaatattttcctctcagcctattgtttatctttgaattcacttagcaatatattttgaagtacataagtttttagttttgaatacgttcaactgacaatttttaaactgaactttccttttgatgtcataactaaaaaatatttgcctaagccaaggtcatacttattttctcctagatattctatagttttaagttttgcatttaggtctataattcattctgaattaaattttatgtaggatgtataatataaatctaaattatttctttcatttttatgtatatctaattatttgagcactgtttgcttaataaactatcttttctctactgaattgtctttgtgcctctgctgaaaatcatttggtcatctatgcgtgggtctatttttgaattttctcttctggtccattgtaatattagtctacctatataccagtaacatactgtgttgattactgtagcttaagaataagctttgaaataaatgtcttcttttgagaagtgtctgttc

SEQ ID NO: 844761 - DNA, 558 bp, Homo sapiens
tcattgctctcaataaaacatccacaattcattgcttggcccttgttcctgtccggcttcattctgcagcatttgcacatcacaatgtatacctctccccaactgaactactgttttagtttttcaaataattctgctttgtctcactggaaacgtcccacatgttgcctcggcatgactttcttgctccttctccaccattccccacatactggaaatacagacttcaaatcacccctgccaggaagcttttcctgattgtattgtccaggtcagacgcacctcctatatacgttcccatggcaagcagagtatcttctattaaagaatatatcaccctaaataagaactgcctcttcagttgtctgtagtgcctagatttagggttttgatgtgtccaactttttcatttttgttctcaaggcctgaggcaaagtagaatgaccttccatgtttccttagraaaaaacaccaaaaacttgtgagatgactaaaggaaggagaagggaaaaaaatcaaaataaaaaaacttgtgatggaactactcaatatgaccta

SEQ ID NO: 844762 - DNA, 537 bp, Homo sapiens
ttaaatttacaagaaaagaaacctcattaaaaggtgggcaaaggacaggaacacttttctaaatacacacgtggcaaacgagcataaaagacttaatattactgattagagaaatgcaaatcaaaaccacaatgagataccatctcacaccagtcaaaatggctattaatttaaaaagtcaaaaaataacagatgcttttgaggttgcagagaaaagggaacacttatataatgttggtgggagtgtaaattagttcaaacgttgttgaaagcagtatggtgattcttcaaagagctagaagctgaactgccattccacctagcaatcctactactggttatatgcccagaggaatgtaagtcattctatcataaagacacacgcatacacatgttaactgcagcactattcgcaataccgaagacatgtgatatggttaggctgtgtgtccccacccaaatcccaagttataatccccatrattctcatgtgtcaagggagagaccaggtggaggtaactggatcatggggggcag

SEQ ID NO: 844763 - DNA, 635 bp, Homo sapiens
tagactttgaaatacacatagactcaagatttgacacagagcttaggctggggcaggctacactgtcagctgcctctgaagaccaacagcccctcccatcataggcccagaggcctgggagtactgaatggttttctgggccagacctagggccctgtcaccctgcacagttctcagacactgctccctgtgtcccagctgctccagccccagccatggttcaaagggtcccaggtacagtttgtactgctgcttcacaggctgtagccttaatccttggtggcttccatgtactgttaagcctgcaggtgaacaaactacaagagttgaggcttgaaatcctcctcctagatttcagaggatgtatggaaatgtctgggtgtccaggcagaagcctgttgcaggagcagagacctcatgaatatctgactaggacactgtggaggggaaatgtggggttggagccctgcctccccccaggtacccactggggtactgcctaatggagttgtaaaaagagggccactgtcctccagatcccrgaatgatagatccacactgaaagcttgcaccatgagcttggaaaaaccataaatactcaacagcagcctatgagagcagctatagagatcaaa

SEQ ID NO: 844764 - DNA, 656 bp, Homo sapiens
tctgactgtgtattttcaaatagctcgtcttcaagcttactaattctttcttccacttgatcaattcaacaattaaaaggctatgatacattcttcagtgtaccagttgcatttttcagctgcagaatttccttgtgcaagggaagcagggatcggtggagccctctattctgccatcttgctccacctctccctcctgttttttaccttcttcccttagttgcttcccagcatgagtggaaattccctaaagccctcaccagaagcaaatgctagtaacatgcttcttgtacagcctgcaaaactgtgacccaaataaacttctattctttataaatcacccagcctcaggtagtccattatagcaatgcaaatggactaaaataccattcaatgaagaaacaatagtctttttataaatggtgcttagacaactgaatattcatacgcaaaagatgaagttggatctttacctcatagtgtatacaacaattcactcaaaatggatcaatgacgtaagtgtaatgcctaaaactatgaaacagaagaaaacatagggataaatcttcataaccttgaatttggcartgggttcttagatatgacaccagtggcataaacaacaaaagaaaaaatgggtaagttgaactttatta

SEQ ID NO: 844765 - DNA, 629 bp, Homo sapiens
tacaattgtatactatttgacccagataggaacaatatttatgtcaccataaaaatataaaaattgaatattaatttgaccaaatatgtgatgtaattacaatagratgacagaaggagaaaggggtgtggagggggttagtggaattagagggctcaatcctattcttccacagtacaaagtaagcagattatgtataaaatacaaaaccaaaaaagaccagcatagactgtgtagaactgtagaagcaaaagccaaaaaaaaaaaaaaaaaaaagaggaaaataattgcctcctaggagtagtactcagagtgcagaaaaaggtaagagactgtttggtaagagactgttctatttttcagcacaaatcactcatttaattggtttttttaaatcatggataggcattaccatggattatgtgcaacttacataattttttcaacaataaaaaatattaccttcattattctgaatataaaaaatgagaaaaattggccgggtacagtggctcatacctgtaatcccagcactttgcgaggctgaggcaggcggattgcttgagctcaggagctttagaccagcctcggcaacaaggcaaaaccccgtatctacgaaaaatacaaaa

SEQ ID NO: 844766 - DNA, 629 bp, Homo sapiens
tacaattgtatactatttgacccagataggaacaatatttatgtcaccataaaaatataaaaattgaatattaatttgaccaaatatgtgatgtaattacaatagaatgacagaaggagaaaggggtgtggagggggttagtggaattagagggctcaatcctattcttccacagtacaaagtaagcagattatgtataaaatacaaaaccaaaaaagaccagcatagactgtgtagaactgtagaagcaaaagccaaaaaaaaaaaaaaaaaaaagaggaaaataattgcctcctaggagtagtactcagagtgcagaaaaaggtaagagactgtttggtaagagactgttctatttttcagcacaaatcactcatttaattggtttttttaaatcatggataggcattaccatggattatgtgcaacttacataattttttcaacaataaaaaatattaccttcattattctgaatataaaaaatgagaaaaattggcygggtacagtggctcatacctgtaatcccagcactttgcgaggctgaggcaggcggattgcttgagctcaggagctttagaccagcctcggcaacaaggcaaaaccccgtatctacgaaaaatacaaaa

SEQ ID NO: 844767 - DNA, 525 bp, Homo sapiens
gtcccacagtcctgggggttggctggttctctctgggagcctctcctgccatcacggcggctggggccagagttgttctgaagatgtcttcatgcccatgtctggcggctgagyctcagctggggcagttggctggagcatccacgtgcagcctctgtgtggcttcggcttcctcacaccatggtgccagccttccttcattctaaggaactgggcagaaccggtgttgtctttcatgacccagtctcggaagtcacataaatttacctctgacatagtcagagtcctgccaaaactcaagggaagggaacaaagactccacttctcaaagggacgggtattggcgccatgctgtaagaagcacagtggcttgggaggtattgtggtcagctctggaaaagacaaccgccatattagtaaatatttattgcaaacctactgtgagccaggcactaaacactgggaatccagacgtgaaccacagacaccagtccctgcctcatggagctgacattctagtagggg

SEQ ID NO: 844768 - DNA, 579 bp, Homo sapiens
gttatcccaggatccagtgtagggcttgatggagttgatgaggtcctgtacatcccacaggagaagaatgaccaagggctagaattccagtagctgtacccagcctagcatttgccactcatccaccaygcatgtgatgtgtttgactcttgctcccagtagctcacatttatgacgcatgcttcctatgctaggttatactctggtgtgttgtttattcatagccagtatttccacttgatgagatcctatgggattttgcaacttatgtaacaaactcttagggagcatttgctgtgagctgaatacttttttaggtgtttatctagtcctcataatggtcctatgaagtaagtataatcattatccacattttatggaaagctgaagcacagagagatgaagtaaacctgccaggaagtgaggaggtgggattcaaacccaggctccctggctcctgagcctgtgccatcgccctcagctaagctgcctctcctgggttttctcatttccaaccattctctcttttttggatgttgtatgcctgccttgatcatcataaagtagtctccaaacttt

SEQ ID NO: 844769 - DNA, 569 bp, Homo sapiens
  misc_feature 555: n = A,T,C or G
cccctggagtgcacaggcccccaattacagactatttctttgtccttctcatgtttattagcataatttctatgggtttcaggggttgttacatgtgattcaaacattttcacacaggttaaacccttgggtaaccaaacatttttaaatatccacagaaaattatttgattaaaataaatacatgctcaggaacacaaacaattctcagaagcacttttatgtgcagtgttaagttccaaacaagtgatccatgtttagcattacacatggtacaaattctaagcttgattttaacagattgaataaacaaatgctccaaagggcttaacgattccttcaagcaattcccacttccctgtggcttggtggatcatttacaaggtaacaggcctgggtcttaggtgagcttggatgctcgagtgatcatccgctggagcaatcatgtgattagtgggaccagctggacttgtatctcccaaataarcattttaagcagagagatttaataggggaagtgccgagtctcagagagactaaagcccatactgatagntaatggtggattaa

SEQ ID NO: 844770 - DNA, 635 bp, Homo sapiens
gaactcacctgtgtcatgagcactgtcatgcatgtgtaatgagcattccatttgtgtcactgtgtcaggggaactgggagagtgagtggagcacttaggaaacatccactcccaggagacacaacacaggctgccaaggtggggcctgctagccgaggcacctgaggccatgaccaggcgtgtccccctgccctggagaggcacagagagctgccaagccggtcctactcctgggcactctgtttctggatggaggagttctgagaactcaggggatgcagctgctgttgagtcaccatcacagaaggttcccttgcaaaatgggacaagctcactttcctgtttctgagtctcctgtttctggcattgcagatggggcctcctgggtgctggaaccagtgtcgcagagggtatggcttcctgcactggtaccagatgagaaggcatgtaggcaggcggaatgagcactagacttggttccagagattctgcctgaactgtcgctccaccctcccatgagctacgtggacttgggcaggctcctcccaagctgacagtgtcatctstccagggaacggggaagcccaagggctccaagcactaccataacttcaatcctgacactcagagcttaa

SEQ ID NO: 844771 - DNA, 408 bp, Homo sapiens
ctgatcaagccctttggcttctggccaggctgccagcaccctaggtgctggcgtttactgcctgacagcccattactctgcactgctaattgcagaataagctcctccagaatattccagatcatcctggaagaaagcagctttaagagattctgccagtcagacgctttaaaaagaagacaaaagtcaaagccgtgctcatattttcctggggcttaacggagccttcatctggacccacagccaggtctccttcgaggagctatgttaagcagcagaattcagggaggtggggagagtgggcgggaggtctgaatccgccatkcctccaaggccccagagagggagcgtgcgctgttctggaagctttcttcctatcctgaaggcccatcaagtggaaagagaacg

SEQ ID NO: 844772 - DNA, 464 bp, Homo sapiens
aggcagccagtgctactgcattcttgggtggccacagagacagcccatgccttacaagcaaacatctaagatattcagagaagagatttgctgcgtgcaaatctgggcctctctctccagcagaggagtcataatttccagtctcaggcccactctggcccttgtgtctaacacttctaagtgcacccagagcccccaccccttcccaggtcctaatgcatctgctcccaccaccagaaacttccctaccccaccaacagagagggtaagaggaaagtgtgacagcttaaatagagactaatgacagcagagaagcagtgtgaatgcctagaagagaccagcctgagcrgcctggcccagccccagtctcctctaaggatatggacccaaacatggctgtgagatgcatgtcacatggagatgcctctttctagaacaactgcccaagggttgtgaggtatcaa

SEQ ID NO: 844773 - DNA, 547 bp, Homo sapiens
gagaggccctctcaggctaccaagctgttgtcgctgctatcactacaccaccaccttcatcacttttattttttgaaaagaaagggaagagacatggggtgttgccagctccttctttctgygccatcctattgtttcctctcagagagagccaaggcttcagtgtttggggcagaattcagggtgaaggctgagcttttgtttaccttctggtttggggtgggggctgggactgggtctagattccaagcaggaatagggcttgggctcaggttctggctctggtaagctacagagcagctgtgagtttctccagctggaagcatcatacaattttttcccatgacccctgcaccttccacatgttccccctgccctggcccccattcaccatagctggggaggctcaagggctccacgttcccaggaatgggccagggtgtccttgctccgtcctgcctgaacaacactatcggtccccatgagtagcattctacggttgaagtacctttgagaatacttgataccatttgatcctcacagagtc

SEQ ID NO: 844774 - DNA, 423 bp, Homo sapiens
atcaggatccatcctctccttacacccttcctggacacastctcacctctcattttccaaagccctgccatgctgccatcccacttccccacactctgccccgggttcccttttcctaaagctgcagcttatggcttctccagtaggtggcagcacacacagagccactcataaactgcagcttctcagagcctgagagccagaaaccgtccccagaaattccctccatagaaataaaaaaacaccagaagtcacatttcatccttttacatggttcccatctaccctcacaacacatgtcatcaccaaagacacacatacaagctccaatggcttttgccaggcaattcttcctccaggaccccatctggcccctccctcatccctccccttggactttgcccttcttactggccaggcagg

SEQ ID NO: 844775 - DNA, 607 bp, Homo sapiens
cggagaaaagatgatgtgtgaccttcatagaagaaccaccacaccttgagtgctgtggttggtactaattagaaacagaagtcacggaagactaacaccaccatctctgcgcttcccatatcacygtataatgatctgcttatgtgtttgtttcccacctctgactgtgaattccttgagagcaggggccataaccttcccatctatccttgagttcccagaacctggcatagtgcttcatacagagaaagtccccagtgaagactatccaatgagtgaatgaatgaaagactaggcagaagcaaagcaaagagacatttttgcattttaatagcaggggcaagataaaagacaccgccaatgggcctgaggtgtttttgttttgtgtttaattatgatacagtaaaattaacttgagcagggaggtatgtacttctgtgaatgttaacgattgtatagattactgtgaccaccacaatcaggatacagaatggttctatcaccccaacattttccccgtgctacacctttatagtcacatcccctgagcattgtcttttgaaaaaaaattaagggaggagacaagggagctaggatttatagatga

SEQ ID NO: 844776 - DNA, 607 bp, Homo sapiens
cggagaaaagatgatgtgtgaccttcatagaagaaccaccacaccttgagtgctgtggttggtactaattagaaacagaagtcacggaagactaacaccaccatctctgcgcttcccatatcaccgtataatgwtctgcttatgtgtttgtttcccacctctgactgtgaattccttgagagcaggggccataaccttcccatctatccttgagttcccagaacctggcatagtgcttcatacagagaaagtccccagtgaagactatccaatgagtgaatgaatgaaagactaggcagaagcaaagcaaagagacatttttgcattttaatagcaggggcaagataaaagacaccgccaatgggcctgaggtgtttttgttttgtgtttaattatgatacagtaaaattaacttgagcagggaggtatgtacttctgtgaatgttaacgattgtatagattactgtgaccaccacaatcaggatacagaatggttctatcaccccaacattttccccgtgctacacctttatagtcacatcccctgagcattgtcttttgaaaaaaaattaagggaggagacaagggagctaggatttatagatga

SEQ ID NO: 844777 - DNA, 607 bp, Homo sapiens
cggagaaaagatgatgtgtgaccttcatagaagaaccaccacaccttgagtgctgtggttggtactaattagaaacagaagtcacggaagactaacaccaccatctctgcgcttcccatatcaccgtataatgatctgcttatgtgtttgtttcccacctctgactgtgaattccttgagagcaggggccataaccttcccatctatccttgagttcccagaacctggcatagtgcttcatacagagaaagtccccagtgaagactatccaatgagtgaatgaatgaaagactaggcagaagcaaagcaaagagacatttttgcattttaatagcaggggcaagataaaagacaccgccaatgggcctgaggtgtttttgttttgtgtttaattatgatacagtaaaattaacttgagcagggaggtatgtacttctgtgaatgttaacgattgtatagattactgtgaccaccacaatcaggatrcagaatggttctatcaccccaacattttccccgtgctacacctttatagtcacatcccctgagcattgtcttttgaaaaaaaattaagggaggagacaagggagctaggatttatagatga

SEQ ID NO: 844778 - DNA, 592 bp, Homo sapiens
attcaaccaacgacaacagttcacatttagtccccaatcaaaattcggttgaaggagattctgctgtcccaggcttttacatttaagcttaataattctacagaggcagtctcactcccccatcaacatttacttatatatttagtacttatatatttagtattgctcctcaaagactacctcgtctgacgatcagaatgctgtgctttcttgccagcaaccttgcctttgcgttatttctgagtgggctgagagtccataagtgaatgctttagaataagccaagcaaatgaatgtacaagcaaaaagaaaagaggcaccatattgatttgttgtctagacagaaatgtatctgctaacacatcaccagacattagtcaaagctgcctgttctggcgcagatatgcagaatcaggtatttctgcaagtgaaaaaaatcggtgacaggatggtgtgacatactatcctaaattggccagtaataattatggctagtctgtgacttcatgcacagttattagtagaaaaggaaaatcaaatttggctttatgctggtcrttgtttattattattggccttgagatacagcttt

SEQ ID NO: 844779 - DNA, 600 bp, Homo sapiens
cataagggtaaatagaacataaaaatggcttgggttgtcaactactatgtatcttgcttcttcagaaattcaaaaccacactatataacaccattataccccacctaaagctgagaaatctatcttaatggtccatagccctaatttataaatcatgcatgaatcaggcctgccattgatgaaagctgagaagtttggagttaagggatttattttaacagagatacaggaaagaagaattggcaatgcttttcaaacctttaagaggtgatgccttttctaaataacaaagcttttgactcgaggtgagccaaggtttttcaaaacatatggtacatatcttttaacatcacgaagatgcacgtgaaaggacccagatatgtcaattgagagaaatatatgacatggcttgacagcttgcaaaacaccagtgtttttgtattactgctaccagacaaagtaactttatgccacggttagtttccaagatggttgatagagtctattccatttgaattsaggggattttctaagagatcaaattctaatgtcttttggaaaaacagaaagaaaaagaaagacccacacaagaaaacagaa

SEQ ID NO: 844780 - DNA, 589 bp, Homo sapiens
tcactcctacatcgggtatttattgagtggttactatcaatcagatagtatttgaatcactgsgaagtcagtggtggccaaaacacacacattcactattgttctcatggtacttacatattagtaacattaaagcacctaaatttctacatcataatttcaatatatattgtatcatatataagaaagtaaggtccttttcaatgttaattaaattacacaactttattttcttaaaagtgctgatgaaaaccagatataaaaatattattgacaattcacatgtacatcacaaatataaagcacacacatacggtttcacaaaacataggttgctataaaaaagcatcataagacaagtgtcataactttggaagacagctatgttcacaattataccaccaacaccactccaacaccacttgatgtcttaattttgctttgtagttttcctagaaatatatgtctttgtatgtatgtggccatgtattcaaatatatgtacgtgtgtgtatatacgtatacacgtatatataatagtttacattatgtatctctgctttaatttgtttagtcataaatctgaacta

SEQ ID NO: 844781 - DNA, 584 bp, Homo sapiens
aatatcaactaactactttctatcatttctattccaagtttctttttgggggtgagaataattaaagtaattataccactaaaatgcagcttgaattatgaaaatatattatcgaataagaatacctcatatttttcacacataaatatatgtatttattttaagatatttgttaaaaagaaaaatatttccccattcatgatatgactacgatgtatctgaaggactctgtttttcattgatattatggagtagatgtagaaacaatacttaaaatatcaagtactaaatagacttgttttccctttaataacattctgtgttttcattttatgtgacttcccactctaatggccgatagtacatgtagagttataataatacttatgttactcgagtagatgcaatcatacctcagctttgttttcagaggaatcatctcagttggtgagtttccaataacagcaacataggacwccgttcaatattataaagtttaaatcagatttatactttaggctatttgtacctttccatgccttttaattcggtgttgtcttgaggcatttcactgtatatccagt

SEQ ID NO: 844782 - DNA, 599 bp, Homo sapiens
gcttgttttgttacacagaatcttgcaaaacatggtagaggggagatggctattataacaaaatggacctatcaattatgcagtgttmaacaattttgagtccttccaaattcctagatttcattgtttatgctgggagttggaagattaatataacatagtcatggtcctccaagaaccatatggtctcattaggaagaaaactaattgcacaaatagtatctgtgttatacagtcaagtgcaggatactattgggatatagagaaaggatacctggcgaggttagtgtggaagaagatttggaaaagggacctttctaaaataaagtgatgtctaaaccaagtagtgagggacaagcaaaatttacccttccaaaggaaggctgtaccaacagaggaataacatgaacaaagaaaggaggaagatacatgaaagtaaatgacaatggttcaaagattggcaacagctgtccaaaaatttttcgaagtaatatttatcagtagcaggcctccactgattacttcactcattcaacaagtattcactgaggacttaatgtatgccaagcctagcagtagggatccaaaatatatagctc

SEQ ID NO: 844783 - DNA, 599 bp, Homo sapiens
gcttgttttgttacacagaatcttgcaaaacatggtagaggggagatggctattataacaaaatggacctatcaattatgcagtgttaaacaattttgagtccttccaaattcctagatttcattgtttatgctgggagttggaagattaatataacatagtcatggtcctccaagaaccatatggtctcattaggaagaaaactaattgcacaaatagtatctgtgttatacagtcaagtgcaggatactattgggatatagagaaaggatacctggcgaggttagtgtggaagaagatttggaaaagggacctttctaaaataaagtgatgtctaaaccaagtagtgagggacaagcaaaatttacccttccaaaggaaggctgtaccaacagaggaataacatgaacaaagaaaggaggaagatacatgaaagtaaatgacaatggttcaaagattggcaacagctgtccaaaaatttttcgaagtaatatttatcagtagcaggcctccactgattacttcactcattcaacaagtattcactgaggacttaatgtatgccaagcctascagtagggatccaaaatatatagctc

SEQ ID NO: 844784 - DNA, 410 bp, Homo sapiens
attattttgaataccttggaaatcaagagaacaagcttgattattgaagtatagaaaaaaattcagccaaataaaatgtaaatataatgagaatgaaatgtgtacatgttaaaaatttgacacattgacaacacatattaagaaccataaaaagtatacatatttaaaatgtaagccatataactcacaattttaaatatctattgtgagagaatgaatagttttaaatttaatgactatgaaattatagacattaaagttcctgtaaaatttaagagtaatggtgtgacatcaaaacacagtgaaaataataatggaatatttcaacagttgcttgtatsttgtagtaaagacatacacaatcctaagagaaaatatactgtaaataatacactacaaataataaaata

SEQ ID NO: 844785 - DNA, 609 bp, Homo sapiens
cccagctacttgggaagctgagggaggagaattgcttgaaccgaggaagtggaggttgcaatgagycaagatcatgccactgcactccagccagggcaacacagtgagactctgtctcaaaacaacaacaacaacaacaacaacaaaaaaaaaacggagtttccctgcacaagctctcttctcttgtctgctgccatgtgagatgtgcctttcaccttccaccatgattgtgaggcctccccagccatatggaactgtaagttcaataaacctttttcttttgtaaattgcccagtctcgggtatgtctttatcagcagcacgaaaacagactaacacaatgtgtgtttctgcgtatatcaacagtccactcctaggctggaagcagtggctcacacatgtaatcccagcactttgggaggccaaggcaggaggaaggccagagttcgagaccagcccaagcacacagggagaccccatctctacaaaaaataaacaagttagctgggtgtggtagtgagtgcctggagtcctagctactcagtgaggtgggaggatcacccgagaccagaagtttgaggttacagtgagctatgattgcaccactgaa

SEQ ID NO: 844786 - DNA, 541 bp, Homo sapiens
caaatgttgtatggtcatagaaggctgggacagtcagaatgataaaatatatgagcgaggagggcatgaataatgtaatcttgccctaagaaacagaagtcgttagccacctaaaatgccactctcaaagggtggatcccagccagcttccaaaggagagctggagacagggaagggaaaagagacactggggtaacctacatggaggtagtttacgcaggggcattaggaaaatccctttgtggtcccagggaaagtcagttatgaaaataatgaaaacaaccccctgtcttactaatgtaactgcttagtaggtctccccataccccataccttatcactcttccagccttggaagcagaatggagaggaaggggagttggcctggacagctgttctgccaaaagccccaggatccacccgcccacccgggaaaagggagtaggctcatttgtcatgaagacyaccagtttttaaatgggcttgaatcagaaaacctgggttcaaatgctgggtgattctggacaagttacttaaccta

SEQ ID NO: 844787 - DNA, 625 bp, Homo sapiens
caggaagcgtccctgtgggcccccagaaataactgtcagaggcatgactggcrggggagatgggcaagggtcctgccattatgaagtgggttccaagagtcagcagagttgaggcattaaagttttcaggacattatttggggctgttggctgccaaggcctgaggaaatattggttatgcttccaagggctcacagtgacctccagataaagcccaaagcctccttcataagtcaagtaatgcctttttccacctggccacaagctaacttgctaacatgttctgacgcagggtccaattgcaggaaccttccatggctccctgaacaaaacatccctcatgtcctgcctccatgcctttgtcttgtggtccagcagacagtgacacatctgtagaggtacacggcctggcaggagtccaggatgggaactggggaacagccaggggaaagtcagacaaggtaggtggggaccttgaaggccaagcagagaccatgccttatttacctttggctcccagagcctggcccagtgcctggcacacagcgagtgcccagtagacagtgactggctggaaccatgctcacttgcttgccctctgtctagcaggttccttgtcacattg

SEQ ID NO: 844788 - DNA, 634 bp, Homo sapiens
cattcaaaagatcttcattgaacatctactctgttccagagactttagtaggccctggagatactggagagcaaaaaaatggcatctttagggagctcatagtctagtaagggtgaagatattcatcaaatgatctgtcttcaaagacaaaggtttctgaagagaaggaactcagttctgtgcgcgtgtatagcagagggactcagttcagcttggggcacttaggagggcttcccataggaggagacttttgagtgaaggtatgaagggtaagagttcactggtgaaagaagggagataattaggataggaaggagagatgtgtggctctcttcttgcttgcttttggaagtcctgctaaaaaatgtgagagagcatctctaaggcagggagtattgccttagagctgttgtcggtcatttacccttgagtataaatgacattttagttttttttccctgcaagtagtttgttgaaggggaatgaagaaaaaagcctgaggggcactgaatgctttggagaaaagccataaaatggcccaaaataagagttggggagacaagsgctttgagacaaacttgctgattttgaatcttgcagccaccgctcctccctctgtcagggcctctctccc

SEQ ID NO: 844789 - DNA, 646 bp, Homo sapiens
aagaaattagatgcatgaaatgcctggcacagaggtctcagtaaaggttagtcccctctcctacacccactccccttgagtaaatctgggatatttgaaacttcctagaggaggtgatcttagcactggggctgccagatgaaaaccagtgatccaggtcccagagcccaccccacttctcggggatgctgtccccaaggtcctcatgtgccaggcaggcagccagcagccccctctccctccctcccagccgtgggctggcgggcaggagtgaagacagtgaggaccataaacaaggccaatgagaaagcggtaattccgcggcgccaccatttcccatcacgctgctacttttagtgccgaggcagggaggttggatggttcctcccctgggccattttttctgagcctgttagacaccaggcagggaggtaaggagagtgagggtaagggagagtaggggaggagggagtgggacttcaccttggcctcacccaccctccacccagccactctgcgactctgtcctttcacccgctgsctggagagcgcctcctcttcaatcaccttccccggtggaccccagaataggaccttcaccctctactgtgaactgcacctgaggaccccaaaataggaccttcgc

SEQ ID NO: 844790 - DNA, 594 bp, Homo sapiens
tttccaaccctgtcttattggaattctctgcagggtttgatattgttgatcactctcgccttctcgaaatgctgggctctcttggtttccatgacaacaccctctccttgtttttaacccrtctctatgacgacttttccttcccagtctcattaatcagaacctctgactcaaccacccttaaaatgttagggtcctgaacatttgatattgtaaagatgtcaattctctcaaaattaatttagaaattcaatgtcttcccatcaaaatcccactaggatgttttaatggaacttaataagctgattctaaaagtcatatggtacaggagatgggcaagaatagccaagataattttgagaaagaaaaacaagtggtggaacacagtaggggaaaaaggactggatttgccctactaggtagcatacgacaaagcaacaaaaggattaaacagtgtggcaatggcacagggatagacacactgacctacagaactgaggagctcaggatttgacctgtgtccagagggaatttgccatatactagaaagggcatttcaaatgatggacattggtcaccaggagcctgaagctc

SEQ ID NO: 844791 - DNA, 570 bp, Homo sapiens
gcacgggttacatagttagtacccttaattacctattgttacaaatatgtaaaattatcctggggactggaggcactgtgggagccctggcagggagggcctctccccaccatggcttttaaggtgtcaggacaactgggtttaaatccctgacctactttcctgaccttgggaaatgttcccaactctaaggcccttttgttccacacttctcagggctttctcagatgggaagcaagtatgctattttagccaggtctgtggtgacacctaatggtaaaatggggaactgcctgatcttactaaacttccatcaacctattaatagtacaagcaataactatatatcacgctcttaccatgtgccagaaactgaaagctgtgtgaactgtcttagttcacagcttaggctgactgatttaaccaatcagcaagtcctgacagccctgcctccaaaataagtcacaacctagcccatyttcttatatcaccactgcctccatgcttgaccaagccaccaccacccagacaccagcctccacctccccatcacctcttcccacttcttct

SEQ ID NO: 844792 - DNA, 570 bp, Homo sapiens
gcacgggttacatagttagtacccttaattacctattgttacaaatatgtaaaattatcctggggactggaggcactgtgggagccctggcagggagggcctctccccaccatggcttttaaggtgtcaggacaactgggtttaaatccctgacctactttcctgaccttgggaaatgttcccaactctaaggcccttttgttccacacttctcagggctttctcagatgggaagcaagtatgctattttagccaggtctgtggtgacacctaatggtaaaatggggaactgcctgatcttactaaacttccatcaacctattaatagtacaagcaataactatatatcacgctcttaccatgtgccagaaactgaaagctgtgtgaactgtcttagttcacagcttaggctgactgatttaaccaatcagcaagtcctgacagccctgcctccaaaataagtcacaacctagcccatcttyttatatcaccactgcctccatgcttgaccaagccaccaccacccagacaccagcctccacctccccatcacctcttcccacttcttct

SEQ ID NO: 844793 - DNA, 289 bp, Homo sapiens
tgcagtgtaggatcccttgagggaggagggaaagtcctgggggcaggggcaggggaatgccagggcacaaaacttaatmtagtcacagggcaggccgaggaggatgttgtctcctattacacctgccacctggcccccatcacatgatcagctcttgctggcgagtcatgggcagagtgaggagcacctactcctggacattgcaggaggccgcactccactctgccccctccacaaatggagcccttctcccagctgatcctcctgggaagggcagggtccagccagc

SEQ ID NO: 844794 - DNA, 502 bp, Homo sapiens
atgagaatagtaagtacactaattaaaaataaattaaataatccacttgtatgttwccattaaaactcctacattatcttttaaaaatgagttttagacaagcagttttgcagaacaataaaaacaaaactagtgtcctaactttatgaagattgccttaaataaattattgatgtaccttgaaataagtttaacacctttatatgttcatggtaaaatgcacttttgtattttcacttatcactatgggttgttaagcccgtattgtgcataaataatcttgataaaaattttaagagaaaatcacattgtgtgctagtgaatcaacagagaggagattactttagtcatgccctgtaataacaactttatctttgtcaagggagaagccttgaaagttattcttcaggaaattgctctcgtatctgtatgttaataacaaaaagaagaaacataaaaattgaatgtggaaatataaacccccaaaattataacagaatta

SEQ ID NO: 844795 - DNA, 570 bp, Homo sapiens
acagaatgtgaagtgaaaggagattattcttcagtttaacacttactattgatttccctatttggctttgcacttatttgggaccagtggctcctytttcatattattttccttttgaaatgggaatgtctatcctatgcctgtctccctattgtattttggaaaaacatgacttaatttcactgattcacaactagggatgaatttgccttaggatgaattgcattttgaatctcattcatctgattcagttaagatcctggactttgaacttttaaattggtactgaaatgagtttatactttggggtgttgggagggaatgaatgtattttgcatgtgagaagaccacacattttgagaaccaggggtggaatgccatggttttaatgtgtcccacaaaattcatgtccgggaaagttagtcttcattgcaacagtgctgtcagacttttgggaggtaattagatcatgagggctttgtggttattgcgggagtggattcattatcattagtgtgagtttgttataaaagcaagtacagccctttttagttctgtctctgcggtgtg

SEQ ID NO: 844796 - DNA, 620 bp, Homo sapiens
cagtgttaatctatttttggcaacaccctcacagacacacccaggatcaatactttgcatccttcaatccaatcaagttgacactcagtattaaccatcacagcctcccaragtgctgggattacaggtgtgagccaccgcactcatcccctgcttccccaacagtaattcattttgtccagggcatctaagaccatgggacagtccaggacctgagtgttaaacatgttcacagcatccctactggcaaaggtgctggcttgtctaatatacagactcaatccatgcttagggcatatggctctgagccccacccagtctcatatctggaaggtcaactcctgggcttgtcactttcccatggaccctgagtggctcgcattcccctttggaggccatgaaatttggcgccacagcagttctgtggtctcacgatatgtcctgccaatgccttcttgtgatgctcctgagatcagataagagtggattccccaactgatgatcgagagctttctgccaccttttactggtctggtctcacaggtcttgtctgagtttaatggtagctttttttttttttttcaacaaagtcttgctctattgcccaggctggagtgcag

SEQ ID NO: 844797 - DNA, 619 bp, Homo sapiens
cttaataggaacatgatatattatttgaatttgttgttaatatccaaatgttcttttttaaaaagacaagcattttagatataacttggatgraaatctcctgcattttatatggtaaattatttgtcaattgaagtataaatgataacctttatcatttaaaggttaaaatgctgcaataattagtgatgcttgtgaaaatttttaattttacatacacaacggttatcaggtacaagatatgtggggaaatagtgacagtaaaaacatttagcagagtatgttggcacataactttactataacttaatagagagaagtttatttttttgagccttcaactctttgtattgtttacataacaataaaaaacagaataacagagattagattatatgatctttctaatcaggctggaattatttggtgaactaacggttgcagacatacactaaggtgaccctcggtgagtcacatccttgtataatcccctctccttgagtgcagtggaaactgtcttgcctttgtccaaaagaattgacaaagtaagatgccactccttggtaaggttattttatgtgccaaaggctatgctatgtcattcccttgatggcactat

SEQ ID NO: 844798 - DNA, 629 bp, Homo sapiens
ttagtaaattcaaagtatattctggaaccctcatttctcaatraagatttttactaacccaaataaaaccacaaaataagttcctttacattgaaagtctctgtgacttggctttgccaagtatcctatcagaggaaagtaacctctatttaggggagcttcttatggtttggactcattgcttctgtgacgcagctaccaccctttctgagaagcaagtattggcttgttcctggggtcttgccaaaaccgaactcccggcccatggacgacttgtaacgctactgctgagcgtttccatttgagtgtatgtcaactcagactcaataactaccaggatgggaggttactgagttaccaaccagccttgcttgtccaatgccaatgatatttttaacaacatccctgacctcagaggtatcttggctttacaagaatagctgacagttatccctctgtgggaagctttatctccactctttttatgtacagaaaagctggctccaaggggtccttgattcacagatgttccctaaaagctttgactgggttcattgacagtttagctaagctgaagcttaatgttgtccattggactaccacagccatttaacctcagtatctgcaat

SEQ ID NO: 844799 - DNA, 625 bp, Homo sapiens
tcaacagaaagatgaaactttgaaggagagctcaataaaaatattatacagagaaaatacaataacagagaagaaaaaatgccttcaaaaggctsataagtagacttgaaacagctaaagaatcagtaaacatgaagataggttcataaaaaaataagccaaaaaaactgcaagtagaaaagaaagtgttcttgtttttgttttaaaaggaacagagcatgcatgagctgtgggataatatgaaatcacttaatataagtgtagtggcaatttccacagatgaaagaaaaccaagagaaagaatgatggagaagagatagtccaagaattttcaacttgaaaaaatgcacaagtgattcatgacactcagagaacagcaatcaagacaaataacaaaataaaacaataaaaacagaaatacttagacgtctaatattgcaacttctgaacacaaaaaaataaaaacacattgcttaaaagtagctagataaaaatggcacacctatacaaaggaaaagagaactacagcatatttctctacagaaaatatgcaatctgaaagaaaaatggaattaggttgttaaattctgaaacaaattgtcaacccggaattcaattccttaaa

SEQ ID NO: 844800 - DNA, 548 bp, Homo sapiens
tgtggtgtttgcttttctattcctgtcttagtttgctgaggataatggcttccaaytccatctgtgtccctgcaaaggacatgatctggttccattttttttttttttcgagaaggagcctcgccttgtcgcccaggctggagtgcagtggcacgatctcggctcactgcaacctcctcctccaggttcaagcaatcctcctgtctcagcctcccaagtagctgggataacaggtgtgtgccaccacacccaggtgattttttttttgtatttttagtagagacgggatttcaccatgttggtcaggctggtctcgaactcctggccttaagtgatctgcctgccttggcctcccgagtactgggattacaggtatgaaccaccacgcccggctagtcttgttccttcttatggctgcatagtatttcatggtgtatatgtaccacattttctttatccagtctattattgatgggcatttaggttgattccatgactttgtctcacacctcaatttcaaaaattgccacattatttgacatgtttgt

SEQ ID NO: 844801 - DNA, 650 bp, Homo sapiens
atcctccacacggcctatttgctgtttgcatagtagactaaaataaaagcaactttgaactacttgaagtctctaggcttgcttatcctcaaaaccaaagcagtttgctgtggtctagcctagctattcaactacatatgcacagcctttgttattgttagagttttataatttttgctaggctaactggtgtgaaacggtatttcattatttgatcctgatttatttaagttttaatcttttatctaaaaaagttctcatatctggattcctgatgtgaatccagtagtcttctatgagtactttctatctgcttcctaattagattcaacagaagtttgtctcttttatcagttctttcaaagaaccatctttgggggtaatacatcagttttaatatttttctattttcttatttattactttcttcttttcctattcattaattccttcctcgtgcttacccttgactggttttattgcttttatttgtttgtttttagaaacagatcttgcagagtttcccagcctggagtgccatgactattcacaggcacagtcatggagccctacascttcaaactccttcaaactcctgggctcacgtcatcctcctgagtagctaggactataggcatgcaccattgcac

SEQ ID NO: 844802 - DNA, 605 bp, Homo sapiens
atatatatgtatatgtatatgctgggtgtggtggtatgtgtctgtagtcctagctacttgggaggctgaagatgggagaaacacttgagccaggagttcaatgctgcrgggagctatgattctaccattgcactgcagcatgggcaatagaacgagaccctgtctcaaaaaaaacaccaaaagtattttcttgtttgtgcatctgcttgtcttttgtctgttttttctagaatgtaaactccatgagagcagttctctttttcttgtatcaccagcgcctaaaatagtggttggtacttattaggcattcagtaaatatatttttgacctgaataaatgttttctaggtctgagtgtagatgttactgaagtcacttgaagaaaaaaataggattattttaattttattgatatttgctgtatatatgtgtgcatatatatatttttgagatggtttcactctgtcacttagattggagggcagtgttgtgattgtggctcactgtatctttgaccacctgggctcagatgatcctctcacctaagcctcctaagtaactgggagtgcaggcatgtgccaccacgcctggatgattctttgtatt

SEQ ID NO: 844803 - DNA, 514 bp, Homo sapiens
taaatgttttctaggtctgagtgtagatgttactgaagtcacttgaagaaaaaaataggattattttaattttattgatatttgctgtatatatgtgtgcatatatatatttttgagatggtttcactctgtcacttagattggagggcagtgttgtgattgtggctcactgtatctttgaccacctgggctcagatgatcctctcacctaagcctcctaagtaactgggagtgcaggcatgtgccaccacgcctggatgattctttgtattttttgtgaagactgggtttcaccatattgcccaagctggtcttgaactcctggactcaagccatctgccgcctcaggcctcccaaagtgctgagattacaggcgtgacctactgcacccagccaatatttactatatgttaaaagttatattcaccatttaggtaaacttgtatatgttaaaagtrtgaattagatattggcagtatctaaaactacatggcttttaaaagttactttgact

SEQ ID NO: 844804 - DNA, 613 bp, Homo sapiens
aacagagtaaagagacaacctacagaatgggcaaacatttttgcaaactatgcgtcttacaaaagtctaatactatccagcacctataagaaacttaaacaaatttacaagaaaaaaaacccgctccattaaaaagtgggcaaaatatatgaacagatccttttcaaaagaagacacacatgcagccaacaagcatatgaaaaaacctcaatatcactgatcatgagagaaatgcaaatcaaaaccacaatgagatacaatctcacaccagtcaggatggttattattaaaaagtcaaaaactaatagatgctggcgaggttgtggagaaagggaatgcttatacactgttgctgtgagtgtaaattagttcacccattctggaaagcagtggctcttccttaaagaacttgaaacagaactaccatttgacccagcaatcccattgctgattaaatacccaaagtaatataaatcattctaccataaagacacatgcccacatatgttygctgcagtaccattcacaatagcaaagacgtgaagtcaacctaaatgcccatgagtgacagattggataaagaaaatgtggtacatatacaccatgaaatact

SEQ ID NO: 844805 - DNA, 509 bp, Homo sapiens
ggagtggccaggtgaagtagaagcccctgctcagccacattttgtgtgcagcatgagtgaaaaacaaccttttgatgtgttaagccactgagatttgttttcatttttaccatagaatgactgaggctatcctgatgaattcattcattcattcattcatcaatatgttcacacagtttttttgaggggctaattttagaaagtagtaggcatgcctgttcttctagacaaaaggaaaagatgatgaagccctggataggattggaggtggcgggagtcaaattgttgagaaaatctctatctcatggtgtctattttcctaatggtgctggagatctggagaggaagtattgtaaactaacacctggttcctactaggggcaggagaccaaagttacttggaaataagtacggatctagmcttcaagtgcctcagagcctaaaaggagtgataaaatagagacataaaaactatgatacaaagttgaataagataagagtttaggccg

SEQ ID NO: 844806 - DNA, 375 bp, Homo sapiens
aggattgcagggatttctccacttggctcttcaaagtgccaagaaaagaccaataatattcacatgaatggattttatttcatttcaccagatactagatgttgaaaggaactgacttacagtggttcagagtacaggtactgtaggcaaactgtgtaattttggttccccggtcagccactaattaactctgtgtattgtgataagttacataccttctctgttctatagtgtttataacagggctaacaataatctctagtgtaaaataatacatgttttctgtaacaaatattattaragttgttttgtgctaagtgaaagctatagctgaaagactcaatgaggatgatgaaaagatttagctttacaagg

SEQ ID NO: 844807 - DNA, 540 bp, Homo sapiens
ttcaaaagctattgatgcttcaccctcctcacaaccacctctatcatttagatgcagtccaatatttggggctcatggcactgccrgatatcacctacatcatagtctcttatttgcttaactagcactgagtcaaatgtcctctttaattatagtcagtttgtgattctgtgataaatagacaacataatgtggcatgggttaggggtataagttttatttccaaagatacggtttgaaggtggtttactttttgccattttatgaaacaggagaaacgtctggccacacatcccagagcactgaagtagaaattccctcccagctttgagtatcaagctttgtattgatggaagaagagaatatgaatagatatcacacatgtttatttttttggctctcacctttctccatgatgttaacaagtctttaaattagatggtggtcttaaatatcattggtatatgcctacagtgtgcaaactggtagccactagccatatgtagctatttaaattgaaattaattaaaattaacttaa

SEQ ID NO: 844808 - DNA, 613 bp, Homo sapiens
tgactagtgaagtagtagtgaataagaggagaggtgggtggatcccatttgtaggtaaaatacataagaattatgatgattggagatgataatgagggtggtagaagcaacagtgacaactcctgkatttctggcttatatagcaagatagacagtggtactcttaatgagagagtgaacagtgggggaaaaatgaaatccttttgggtaggaagtttattagctcaattttagacattttggtcctgaggtgcctttgaaacattgaagaaatttcaaataaacaattggaaatacagagctgatacttagaaaagtggtctacatggtctgcttggaaccatctgtatataggtggtgatttaagccatgagtgtgggtgacttcacctgggaatgatgaaataagtgagcttagaaccaagtcatgatgtactccaatatttattgaccaggtagaagagtattcatttgaagtaaaaatggagaaaaaagaagagaaggagagaaaaggataatgcgtcgtgttagccaagaaaggaatgtgtctcccaaaaaacaggtgtgggcaatgatatgaaaagttgttgcagtaaagtaagatgaaaactgca

SEQ ID NO: 844809 - DNA, 613 bp, Homo sapiens
tgactagtgaagtagtagtgaataagaggagaggtgggtggatcccatttgtaggtaaaatacataagaattatgatgattggagatgataatgagggtggtagaagcaacagtgacaactcctgtatttctggcttatatagcaagatagacagtggtactcttaatgagagagtgaacagtgggggaaaaatgaaatccttttgggtaggaagtttattagctcaattttagacattttggtcctgaggtgcctttgaaacattgaagaaatttcaaataaacaattggaaatacagagctgatacttagaaaagtggtctacatggtctgcttggaaccatctgtatataggtggtgatttaagccatgagtgtgggtgacttcacctgggaatgatgaaataagtgagcttagaaccaagtcatgatgtactccaatatttattgaccaggtagaagagtattcatttgaagtaaaaatggagaaaaaagaagagaaggagagraaaggataatgcgtcgtgttagccaagaaaggaatgtgtctcccaaaaaacaggtgtgggcaatgatatgaaaagttgttgcagtaaagtaagatgaaaactgca

SEQ ID NO: 844810 - DNA, 561 bp, Homo sapiens
ctgaggtgggaggatcacttgagcccaggaggtcaaggttgcagtgagctgtgttctcaccactgcactccagcctgggtgacagaccgagaccctgtctcaaaaatgataataattatttgggarggaaatatactgatgtctgcaacttttgaatgttgtttttttttttacaggtagactgttggatggatagatggataggtatggggtagatacagtgttgtaaactgttaatcatccagtctaggcggcggtgggtgtgggtgtatgtatgttcagtgtggaattctttcaccttttctatacattagaaattcttcataatcttgaaaaggaaaaaacgaaagagctatgagaaggacacccaaggctggctctctgaggtcaaacaagtgcaacgaatgaatccttggctgtccaggactgagtaccctaccacaccctcactcatggtgaggatggagcccacctagggacctgccccctccttgaccaaagcctctctctggctcttgtccctgaagtcccctctagaatagcaaggcctggatcctctcc

SEQ ID NO: 844811 - DNA, 369 bp, Homo sapiens
cgggcctgtagtcccagatatttgggaggctgaggcagaagaatcgcttgaaccygggaggtggaggttgcagtgagccaagatcatgccactgtactctggcctgggtgacagagcaagattccatctcaaaaaaaaaaaatcctttttggtaatacatacacacatataatgatataaaacataaatgtacacccaaacaactgtggctaaatgaacacctgcatgaccaccaccctctgtggtcaagaaatagaatactgctgccaccctagaagcctccagtatgatccatcttccctcattaaaatccactccttcctccttagaagagaccattgtactgatgtcagtggtattctatttcat

SEQ ID NO: 844812 - DNA, 522 bp, Homo sapiens
tctgattacagattatagatgtgagccacygtgcctggctggtattacagatgtgtaattgttgggattacagatgtgagccaccgtgcctggctggtatcagcttttctttgtgcccctggtagaattcagctgtgaatccatctggtcctgggctttttgttgttgttgttgttgataggctgtttattactgtctcagtttcagaactcgttattggtctattcagtgttttgatttcttcctggttcagtcttgggagggtgtatgtgtccaggaatttatcagtttcttctggattttctattttatgtgcatagagatgtttatagtattctcaaatggtagtttgtatttctgtgggatcagtggtgatgtctcccttatcatttctaattgtgtttatttgattcttctcttttttcttctttattagtctatcttgcagtctatcaattttattgatttttttttcaaaaatcagctcctggacttgttcattttttgaaggggtttttttgt

SEQ ID NO: 844813 - DNA, 516 bp, Homo sapiens
gtaaaagcaaacaaagtccacgtttcttgtaatagttttayaggttcatttatttattacatttaaatctttgcttgtgtgaaatctctttcaatgaaacttgtgagatagggatttgaatttattttttccagtgggctaccctatactacaatacaattctggataacctaccattgcccctttttgttttttagagtcaggatctcactccatcacccaggctggagtgcagtggtgcgatcatagtgcactacaccctcaagctcctgggctcaagtaattctcctacctcagcctcccaagtattaataggtaggactgcaggcatgtgccatcatgcccagctaattttttaaatttttgtagagacgggtttcaaactcctgacctcaagcaattttcccacctttgcctcaaagtgttgggatgacaggcgcgaactaccacaccctcccttctccattgatttgaaatgccaccttatgtatttgggtcatttctggatgctctatg

SEQ ID NO: 844814 - DNA, 516 bp, Homo sapiens
gtaaaagcaaacaaagtccacgtttcttgtaatagttttacaggttcatttatttattacatttaaatctttgcttgtgtgaaatctctttcaatgaaacttgtgagatagggatttgaatttattttttccagtgggctaccctatactacaatacaattctggataacctaccattgcccctttttgttttttagagtcaggatctcactccatcacccaggctggagtgcagtggtgcgatcatagtgcactacaccctcaagctcctgggctcaagtaattctcctacctcagcctcccaagtattaataggtaggactgcaggcatgtgccatcatgcccagctaattttttaaatttttgtagagacgggtttcaaactcctgacctcaagcaattttcccacctttgcctcaaagtgttgggatgacaggcgcgaactaccacaccctccyttctccattgatttgaaatgccaccttatgtatttgggtcatttctggatgctctatg

SEQ ID NO: 844815 - DNA, 529 bp, Homo sapiens
atacagacatggccaacacttacaaggtagcttgcatccatgggccaaagaaaattagaccagaaggttaacagctcagctgttagtcttcgtgtcaactgaaacaaattccacccactaaggtgaaaagaaggcagtaagaatggctggggtggaagacactctttattctcattttatgaagaaacgtgatctagtaaaagtagcacacatttagtgagcatttacatgccaggttgttctgagcattctacatacgttaatttgtttaatcctcaagaactctatgctattagtactcttatcatctcattttatagttgatacagaagcactgaggattaaaaaaaaatttgttcaagtttacacaactggtaaagagaggagccaggttccatccctgctagtgtgcttaggccctcactcttaagcgcttccagtacagcccggagtcaggaactgtggagtcagtccaggttgcwacttttcctttctttcaagttgtttcctaatctgtgaaatgggggta

SEQ ID NO: 844816 - DNA, 589 bp, Homo sapiens
gggatcctgggaaacaccattatcagacagtgcctgctcaccaaaagtcctcctgcccaacagcttcctgagccatattgaaacccaggtttgcctgactccaaagcctgtgcttgaaaccactgtgccccacagcctccagcaccgtcagcaatgagaatccccagataagatgaaaacagcgcttccagccaggagagcaaggcccacggctgcagcaggaagagccacaggaggaactgggctcggtttcatgaggaggcaattatggttgtcagaggcacctcagaggctggatgatacatgtgtgaacattccttcattcattcctagaaatgagacattacagaatatggttgaagcaaagggtctagcatcagacagagctgggtttaaatcttggctctgccactcaaatgccaggtaaccttagtcaagccatctgaactgcctcactttcactcaactgtaaattgagaatgatcgtatccctattttaaaggttgttgtgaagattaaatgagataatgtrtataacagttattagaccctcacaaaagtcttacaaggtagatattttattcccatt

SEQ ID NO: 844817 - DNA, 546 bp, Homo sapiens
tgattgtaaaacctcaaaactggagataacctmatagatctctttgtatgggctgttccctctgcctgaaaaccttcccttcagcacccacttcctgtggccagcagcagggctaagacttgatactagacaggagagcttctctccctgtgggtaagactttatggtcaaaatcctccagactttgcccttttccctctccacaaagcccaacttcaaagcctgatttcctgttaaaaaactgtctttggtttctcggaagcagcacatgaaaccaggtgccagcggtttatttcagaggagatcccaggaaacacctccaaggaaatggggaaatgagacagggaagggaagggagctatgcagggtgtgttaatggacatattaacacggtgggtagctgcgcctcattgtccctctgaaagatattttagagcaaggctccaagttgtcccacttcagggcaaggggctgacagtgcttatcctcaaactcttttttgtcgctggttcagggctgctcccaggtgtgttaactccaagcact

SEQ ID NO: 844818 - DNA, 634 bp, Homo sapiens
agatcagagaagaactgaatgagaragagacatgaaaaacccttcaaaaaaatgaatgactccaggaactggattattgaaaagatcagctaaatagacagaaggctggccagactaatatagaagaaaaaagagaagaatcaaacagacacaataaaaaatgataaagtggatgtcaccactgatctcacagaaatacaaataccatcagagaataatactataaacacctctatgcaaataaactagaaaatgtagaagaaatggataaattcctggacacagacaccttcccaagactaaatcagaaagaagtcgaatccctgaatagaccaataataagttctgaaattgaggcagcaattaatagcctaccaataaaaaaaaagcccaggaccagactgattcacagctgaattctaccagaggtacaaagaggagctggtaccattacctctgaaacgattccaaacaatagaaaaagagggactcctccataactcattttatgagtccagcatcatcctgataccaaaacctggcagaggcacaacaaaaaaagaaaatttcaggccaatatcctaaataaactgctaaatcaaatccagcagcacatcaaaaagcttatctgcca

SEQ ID NO: 844819 - DNA, 620 bp, Homo sapiens
gcaaactttattcctttttttttctttttttttttagatagactcttgctcccaaacccaggctggatgcagtggtgtgatcttggctcayagcaacctccacctcctgggttcaagcaattctcctgcctcagtctcctaagtagctgggattgcaggtgcccaccactacgcccagctaatttttttttttttttttttgtatttttagtagagatgggattttgccatgttggccagccttgtctcaaactcctgacctcaggtgatctgcctgcctcccaaagtgctgggattacaggcatgagccactgcatatatggggatctttataagaggacaaagacctgaaggagtgactggaacagaaagcttttatatcatttaaataaagaaatgatactgtagggaaagctcactgaaaaatcaccgacatgagacagcttaataggataaaatgcacacaaatttaagaagtgaactgccttcatgcaacatgcacagaaagtgcacatggagggaattacagggtgactactcacttgcaatggggttaagaagcttatgtaacatcctgacaacaggttatgggagtggtgagaagaggaattccattgagg

SEQ ID NO: 844820 - DNA, 629 bp, Homo sapiens
tcaatgtcaaggcacttcagaaagttgctaaattaatacataatgtaagaagtatttattattactttacacctgaatgtttgtgtccccyccattcatatgttaaaatcgaaacctcaaagttgatagtattaggagatggggcctttgggaggttattaggttatggggtggggctctcatgaatgggatgagtgcccacatgagagaggtctgaaagaaaaccccttccccttctaccatgtgaggacacagaaggcactatccatgaaccagaaagcgggccctcaccagacatcgaatctgccagcaccttgatctcgcactttccagcctccaggacttcgagaaataaatttctgttgtttaaaagctatacagtttacggtattttgttgtgagccggagtgtactgagaggatacctttctgatattcatcataagatttggtttctggtaggcactctccaaatgctatatagtgctttattgtagctgcccttacttcagatagtgagtgaaataagatgtgctactagttacgctgagtacgtaccaagagccaggcacggagctaagggcttcgcatgtgatgcttccgtggatccttgcaatattataaaactga

SEQ ID NO: 844821 - DNA, 597 bp, Homo sapiens
tctttcaagtccttgatggtggcaataatctccacaatccctccagggatgtgatattgtttttgatttactatcttcctaggtagaagcagctctaatggcttccatttggcccttaccaccataatagctttcaccctaccagtcagggagccaatgtggaggttctgccaggtgctaagtatatctatgccaattatgcatactgacactgagaaaatgaccacaggatgagcccagggatgcactgcacccactgtaagtcagacctgagctaaaactccattaactgcttcaagttttaaatttatataagcagaaatctggagaacagacaaaggaatggatattaagggtttgggataatgataaaaggaacataggattgaatcaggctgaatttattgatttgggcccactaagtagggactctgcatttaatgttgcagcttggggagctgaaaaaggttctaatagtttatttgcttggttagctaaaatacrgattaaaagaaagcccactgtgtgcaagctggaaaagcctgatctcttttggttgaatgtagaggatccaaacgcttagggagattgggatgc

SEQ ID NO: 844822 - DNA, 522 bp, Homo sapiens
atctcaatatttgataatttttaatagtattttttccaggctcagaataatgtcccttctcagctcttttccagaaaactttattttggcatatttaaatatgaaatatttataatractgaaaataaatatttgattcccagtctgaatctagaagaaaataggatttttaaaataaatgagcaattaggcatgtgtttcataattggatagaatttgaaacaacatgactcttcttttataactgaaggatgaggggccatcaagagattaatttgtgtgagcttatgcagacaatttgtgtaattggcttatcttcttctgggctataacttcaaaattttaaagtactttggggactattttatagttttacaggtaaaatttcttggttttctttcccagtttatttctttgattatcgttggtttctatactgccatttgctcctatggacagattgttattattatcatcatgattatggtttagtattttagtgaataatattgtgctattatt

SEQ ID NO: 844823 - DNA, 624 bp, Homo sapiens
tctgtcatcggatttgtatttgtgtgccttaaagacactttttatcttagkaatgggcatattacaaataatacataattttattcttgtagataaaattaatttagtagttactttctaaaaatacaaaatcaataaaagttttttcaaaaataaaaaaataaatttaaacacaaaatgttctttatattttgtgaattcaaaaatctgagtaattctttgaataaaaaagtttttctaatcacctcttaaagattgatattacaattttattaaaaacatcattttgcttaatgataatagtaatgttattgtagagaatacagaaaattagcaggaaatatatgtcattcataaacttgttattcagatattaccagcattaaaatattgctgccatgtgttttaataagcttagtgcatgtgaatacgcatggtagataagcaaataagttgaaattatattttacatagagtttcagatttttaatgtaagtgaatttttcagacagttcctctatattagtcttccaaaatgtgcttttaaaaagcctgggtaatgttttgttatttatgtataccttaacaaatgaatactttgctgtattttttatagttttatgt

SEQ ID NO: 844824 - DNA, 427 bp, Homo sapiens
gacaatgcctgtgtcttgagcctgtataattatatgttatatgttaagaagcataaagaaagtggagggagggaggaagaagaggaagtagagggaaggaaggaaggaaggaaggaaggaaggaaggaaggaattgagggagggagggagagaggaaggacctatgagattacttctggaaatagtatacccaattgtggccagacaaggaaggaagggagggaggaaggaaggaagggagggatgaaggaaggaaggaaggaaggaagggaaagaaggaaggaaggaaaggaagaaaggaagaaaggaaggaaggaaggaaggaagaatcgagggagggagggaggacctatragattagttctggaaaaagtatacccaattgtggccagacaaggaaggaagggaggaaggaagggagggatgg

SEQ ID NO: 844825 - DNA, 580 bp, Homo sapiens
ttaaactgagttgaaagataaaggaggtgctgtcactaggaacaggtaaaattttaccttccaccttcctcaaatctgtcttctctcattgctatggatgtgttctctgattctatgtggattccaaatggatcttgactctggaattctgtttcctgagtcttagtcctggtttcctgtcttggtccatttgtgcagctatttttaaaagcctgagactaggtgatttataagcaatagaaatttattcctcatagttttggaggctggaagtccatgatcaatgtgccggtaggttcagtgtctgtgagggcccactctttgttcccaacatggctctttgctgctgtgtcctcacacagaaaagcagagggcaaagatggccccagctacttccctccagcccttttatgggtcacttatccattctcaaagagtaccacctcttgataacaccaaaatggagattaaggttccaacatgaattytggaggaaacacattcaaaccattgcgcttcctctcccagctcccacacattcctattggttcagccaacttgctgcatctgctctgtcagg

SEQ ID NO: 844826 - DNA, 536 bp, Homo sapiens
cagacagtgaatctgtgggcaccttgatcttgaacttcccaccctccagaactgtgagaaataaatttttattgtttactagccacgcagcctctggtattcttttataggatctcaaatagaccaatgcaataactgtaatggtttgctatggctgcccaaacaaactgccacgaactgggcatctgaaacagcaggaatttattatctcacagtgcaggaggctagacattcaagatcaaggtgctggcaaaattgattccttctctaggctctgaggaagaccttgttccaggtctctctccttttctggcaatctggggttcctttgcttggagatgcctcaccctgatctctgctttgatgatcacatggtgctctccctgtgtgcatgtctctctgcaaaatctcttttataggaggacaccagttgatatggtttggatrttttgtcccctccaaatctcatgttaaaatgtgatcttcacactgtagaaggtggaaccaggtgggaggtgattggatcatgggggtgg

SEQ ID NO: 844827 - DNA, 520 bp, Homo sapiens
tattgggtgatggggggctaggggagggatagcattagaagaaatacctaatgtagatgacaggttgatgggtgcagcaaaccaccatggcacatgtatacctatgtaacaaacctgcatgttctgcacatgtatcccagaatttaaagtataataaaaacaatatatatataaaataaggaattatgcccatatgtgttattaaaatgggtattatttgaaatttaaaaaagaaataatcttctatcagaagcttcaattctatttttgtgtttcacagagcaggccagttgtcacaattcacattcaatgactaatctttcccttgagttgaaacatacacatttaatttgcatgtctgtctatgtacttaacatacgcacatatttgagtgtrttttttgattcttcattatttgtctgctctgttgttttgaaaatcgtgccctgcatctcttgcgttgataagcttttcaattactgtgactcgtttctcaagtctatcaatatctgctttgatt

SEQ ID NO: 844828 - DNA, 495 bp, Homo sapiens
tattgaaggtatttctaactctaaacaccgagaattctatacctaggattataacagctccaatatcattgtattattgggaaagtgaaatgaaatcaatccaggatgcataaatatttgtatttttcctatccacccttttgtttctgttaatacgttttcttttcttgctccctgccccaaactcactccaggcatctatgggttttggtggcctagtacacttttattcttttactgataaaactgccctctccccaactctcagtctacatggggttaagctcactcatgggatagaccctgattgacatattccaggcctctatcttttctggtgattcagggatggggctgtggttcttagagccagtggcctagaacttttgatcaaccatgaggaaaasaagttctcttttctgctgagtgccagtccagatggaaaccatctcaccactaggaagggggacttgagatggctttgcatggtagaga

SEQ ID NO: 844829 - DNA, 576 bp, Homo sapiens
agctagaaagccacttaccagataaggtagagggtggggtgtagggggagggaggggggcatcacacagaactataccgagacaaggcctgaccctctgagggagctgagagggtctcagagatcccttagttaatatctcttattctaagatgtgcagaccaaactcagagaagccaagtggcttgtcctgtgtcacacagtgactcagaagcagggtgaggcccagaacccaatccccgtacttctccttggccataatattccccaaaggtcagctctgcatcctgtccagtccctcccacccctcacttttccacttccctgagattctccagagttagtcctgtggccacagccccacagcatgtcctgaagtctctgagaccttgccccactgggctccctagctcttctccaagtgccatcccttcttccatcacagcaagccctccagggtgagtgccatggggacctgctaggacttgggggcctccttctgagctgggctctgaactcrggctctgtgccttttctcccatctcagggatgccctgcttcacccccagtcaggatc

SEQ ID NO: 844830 - DNA, 594 bp, Homo sapiens
caaattgagcaatgcctaaaacggataatatattattaccaagtagagcttatcttaggaatgcaagcttagttcaaggtcttcttcaaaccaatcaatgaaactcacacatcaargagaaaaagagaaaactatgatagttatattcaatatatgcagaaaaagcatttgacaaaataaaacatcaattcatgattagaaaccttcactaaaggaagaatagaatagaaagaaaatgctttaatttcataaagggcatctatgagaaacttacagataatgttatgctctttattgttatgtagtttttatttcatagttataaacttaactctgcaatccagctaggcatagaaagggaataaggaaaagagagaacacaaagggaactgcaatgagagtacaaagattataggatactgaagcatatggggtggaggggtgctctcctgagctacagaaggattggtctggtggttaagttaaaacacaagtcaagcttattagagttgcccacagtcagcaatgataatcttcttgttggtcttgccattcctggacccagagcggtccatggcctccacaatattcatg

SEQ ID NO: 844831 - DNA, 562 bp, Homo sapiens
attgttgctcagctcaaccagtttgtaacaggtataaaagtcatgttaggctcgrcgcgatggctcacgcttgtaatcccagcactttgggaggctgaggtgggcggatcccttaaggtcaggagttccaagaccagcctgaccaacaaggtgaaaccccatctctactgaaaatacaaaaattagccaggtgtggtggcaggcgcctgtaaccccagccactcaggaagctgaggcaggagaatcacttgaacttgggaggcagaagttgcaatgagcagagatcatgccactgcactccagcctgggcaacagagagagactttgtctctcaaaaaaaaaaaaaaagtcatcttaaacaaccagaaaacacgttgaaattaatgtgtattatattcgtatcatagctcataaaaagtacagactgtgacttcattgaagaactgaaaaaatcaactgtggttttagtcattgatttgttgagggtaagcctatgaaaaagatgctaacattgtgggtaaaggaagggatatacaaccagaattcagaagtattcctatgg

SEQ ID NO: 844832 - DNA, 642 bp, Homo sapiens
taaagagtgtcacccaaatatcaatcccagtataagtacrttgtaactataataaatctactggaagatactttaaaatactgttatctgttaatgtattgtaaaatattagatgtataaagtagctttaataagtgaaatagctacaacaataaaccttccttcacatgaagtgaaaaaaattttttttaatttttctatttgaggaagtgaaatacatttacactaagacagagtaagcaaaagaaaaagtgcaagcaatagcctgcagaaaataaaatgtaacattctgtagctccaattacagaactgctaatacaaaagaaatggccgggcgtggtcgctcaggcctgtaatcccagcacttgggaggccgaggcaggtggatcacctgaggtcaggagttcgagaccagcctggccaacatggtgaaaccccgtctctactaaaaaatacaaaattagccgagcatggtggtgggtgcctgtaatcccaactacttgggaggctgaggcatgagaattgcttgaacccaggaggtggaggttgcagtgagctgagatcgcaccattggactccagcctgggcgacaagagcaaaactcttcaaaaaataaaaaaaaagaaataaataaattagaca

SEQ ID NO: 844833 - DNA, 609 bp, Homo sapiens
agcctgggcgacaagagcaaaactcttcaaaaaataaaaaaaaagaaataaataaattagacacaacaaatataaatactttatagctcttatattcaatgcttcatgttatcagcttctattacaaaaaagaacatagtttgtagtaaaaaagaaaaaatataaagctaacacaattgtatttatgaatctataaaatttcctcaactataaaaggatacctttcaaaaacatcaacaatgataatgccaccaataatagaacatattagaattcaaatattcccacatatttaataacctgtccaacattaaaacattaaaaggctttattaatagccctattataactactaattataggtagaaaataaattttctagatagaagatagatggatagatagttataaatagacaaatagacatagacataaacatatgtaacacttctagtatagatttttttttactgtatttttgtctctctgaagggaactacagaccatttagtaggaaaataaaaatgttttgaatgwagaaataaattaatctgtcttgattacttcatttcagagatcacagacttgaggtgcaaagaagttaaatga

SEQ ID NO: 844834 - DNA, 610 bp, Homo sapiens
agaagatgtgagggcatagtgagaaggaggccatctatgagctagatgttgtgggaagtcagggaccccgaatggagggaccagctgcagccaaggcagaagaacataaattgtgaagatttcatggacatttatcagttccccaaattaatacttttataatttcttacacctgtctttactgcaatctctgaacataaattgtgaagatttcatggacttttatcacttccccaatcaatactcttatagtttcttatgcctgtctttaatctcttaatccttttatctttgtaagctgagaatgtacatcacctcaggaccactattatataaactgattgtaaaattgcgtgtttgaacaataccaaatcagtggatttcatcacccgatttgtgcatgatatctctgcttatactgaaaaagaacagagtaacagattttcagggaacaagggaagacaaccataagatctgactgcctgcagggtcgggcagaatacagccatatttttcttcttgcagagatcctatagacagatgtgtgagtaggagaaatatcgctgaattctttttcraaaggaatattaataattgataaccctgggga

SEQ ID NO: 844835 - DNA, 679 bp, Homo sapiens
gtgaatgttgctttgttgggtactgtatatttttgtattcctataaatattcttgaactttgttctgggacactttcaaattacttggaaacagtatcatccttttgggtcctgtttttatgatttgctggagaggtccagagtactgcttagtctaggactaattctttcccattgttgaggcaagacccttctgaatactctacccaatgccctgcgaattatgaggctttccagtctggctggttgagaacaggcaccatcctcgccctgtgtgagaaccaatcgctattacttctaattctttcagctggttctttctatggtctttgttaatttcctgacatgcaagtgctgatcagtacactaactgctaggtaatcaagagagaccctctgcagatattcagttcctccctgccccactgcccctccaacctctctgaagctctctcctctccactacactggcctgctaccttggtctcccaggactctaagctccataaccttaattcagggaatctgccaggctctggctgcactctccctcctggcaccatctggaaatgctctcatggcactgagctagagcagtcatatggcccatctcacttgtctgcyatcttgcaaggatccctgtcctttgttgcctgatgccctttgttgtgcaaagcact

SEQ ID NO: 844836 - DNA, 610 bp, Homo sapiens
ccagaagatagatcccagataggttccacccagagcttatctctgtgcaaagtgagtcatgtgacctgtayttgggagaaactgtatagctacatagcttggaatttctttatattgcagaaaaatttagttataaatccaaattacttgttaagctggtcctcagctgacaaggtgaaaggagaagaatgctactgaaaaatccagacaaagtagtaaataaagggaacctccaagtgtgagtaaagagatctcgatttcccatcgcacatgacatattaagaaccagtgatataccaaaagggagaaaccattccttagggtctaaattcccaaacttagattgtatcttttatagccttgtgaaaacacatattttgattgaactaagattttgttacctggaaggaatttaacactttctcagattcattagttttgtcgtcatttattcaacaaatattgagggtctggcactgtgttaggggacacatatatatatatatatataaaacctaatccttaccctcaagaagctcgcagtttagctgagcccatggccttagatgaggatggtatagaaatatttgtcttgtaaggcagtgtagat

SEQ ID NO: 844837 - DNA, 518 bp, Homo sapiens
tatggttgcacagtattccatggtgtattttctttatccagtctatctttgatgggtatttaagttgattccatatctttgctattgtgaatggtgctgcaatgaatacacacatgcatctgtctttataatagaatgatttgtattcctttgggtatataccttgtaatgggattgctgggtcaaatggtacttttgtctttaggtctctgaggaattgccacgctgtcttccacaaaggctgaactaatctacactcccaccagcaggatataactgtttctttttctctgccacctcgccagcatctgttgttttgtgactttttaataatagctattctgacagctgttagatgatatctcataaaacccaaaactaaaaaccctggaaagacaacttaggcaataccattcaggacacaggcrtgggcaaagatttcatgatgaagatgacaaaagcaattgcaacaaaagcaaaaattgactaatggaatctaattagactaaagaacttct

SEQ ID NO: 844838 - DNA, 567 bp, Homo sapiens
caacaaagtctttcaattatcaaacttgactctcaattgttgctttcaatggaataatatgtatccatcatatttggaagaaggcactttgcttccaacagaatgtcaarcaatgtttctgcagatattgattttgttaaaaacaagtgtttaccacaatgtgtggacaattgctgaaataaagattcaaattacctgtctttggagtcaacaattttataataaacataagaaaaacatcaaacatataagatgtttaagatataaatggtctccccttaggtgcgatgcttttatgcaaggaataaactttgaaactctacttctctttggtagctctgaattctttatcctgaatttcatgtttagcattgcttggtgtaagttgaagaagaggcaaaaatgcaacaaagtcaggttacatgggcatctgggccactattcgtatagttgattcatgccttctagacctgcttgagccaattctaaattgattacttcattgtacaggggattaaatagatagctgctatgtctacttaaagttacgatgtggtggatccaata

SEQ ID NO: 844839 - DNA, 534 bp, Homo sapiens
tttggaagaaggcactttgcttccaacagaatgtcaaacaatgtttctgcagatattgattttgttaaaaacaagtgtttaccacaatgtgtggacaattgctgaaataaagattcaaattacctgtctttggagtcaacaattttataataaacataagaaaaacatcaaacatataagatgtttaagatataaatggtctccccttaggtgcgatgcttttatgcaaggaataaactttgaaactctacttctctttggtagctctgaattctttatcctgaatttcatgtttagcattgcttggtgtaagttgaagaagaggcaaaaatgcaacaaagtcaggttacatgggcatctgggccactattcgtatagttgattcatgccttctagacctgcttgagccaattctaaattgattacttcattgtacaggggattaaatagatagctgctatgtctacttaaagttacgatgtggtggatccamtaataaacagatcacaatgagaatctagcttgcaaaatatc

SEQ ID NO: 844840 - DNA, 548 bp, Homo sapiens
cagtagctgcggtcatcattccggctgcagcagggaggtgcggctaatgctgcacactccgtggagccggtgggagccccgccccttgtgagttgggacgggaactccccgtttgttgctgcagctgcccaaaccgcagctgcagacccaggcctcctgctccacggagcacaaaggaaccccatcctgctgggccgggctacagccacctaaattgcggctgtggatccgagcctccctgtgctatttggagagggctgggagcaggcgggatctgccatcccaggcgaggctgtgactcccaaccaggtgcaggagctgggtgtctctgcagcctgtaacctcgggtgccccaggaaggacctccccaccccgtccctgcaggctaggggatgtcttctcatgctgcctggcctctctccactccctgcgcctgctccgatctccgagcgagggttggggcggagcccgggggggacatgaatggcagcgggatgcagctmgtggtgcctcttccagcctgccatggccgcccatggaccattggg

SEQ ID NO: 844841 - DNA, 625 bp, Homo sapiens
gtgcatgcctgtagtcccagctcctcaggaggctgaggtgggagtgaagcaggatatttccctgaccccttcatgggcctcgtgacgaggtgccttgcttactcagcccrcagcactccacttgcaggagggagaatgcaggtgagtgggtgcaggagccagggtgattgcttttgggcaccaacaagagcaaactccttgcggggccccatggcagcatctagtagggtgaccatgacccctgaggccccagagggagtgttacagtcagtattcttttagctctgccatccgtggacagcttaagtgttaatagctcagtgggcccccttgtatccacactcatggctctgagctcttgtccagcatccaggaaaaatgaggtcacatgaacaaactgaatatggtaaatggggagattttattgccgatacaagtggctctcagtgggatggggagttaaaaaggggatggggcaggaaagcaatcctcccctgaagtccagccatcccctgtcatactcctcttcaaagctatgctgtcaagctgtccctctgaagtcaagctgcttctgtccgacatccaaccatagtctctgacgtccagcagcttatcctctctctgc

SEQ ID NO: 844842 - DNA, 551 bp, Homo sapiens
catttataattttctagacaaaattcattaaatatcattttattatccttgaaaaattctgaaatatagccttaatcagatgactaaatttgatatcagtagtaaaatttccttagtccacgttggtttgttaagccaataatctaaatatgtttacctttggcagcatgggagtatccctcttcttcttcttttctgaattagggtcatctaataagtctggctcaaaagtataaagttcagtaagctcattcatagtaaaatgacgctccacctgctgctgatcaacaactcgaaaagacagtgactgcttagttacttgccgatcataaatcttatcttccatggttccctttgtaaaaagaaggaagaatatacaaaaaaataaaattttgtaagcatgaaacttaatcaaggataaatacggttactggttaatatgaaatggtaaaactttatggtagtakattgccataaagaaaaactcatcagcaattttgcttaattcatgaaagatttcatctgtttagcatagtttaccataataaata

SEQ ID NO: 844843 - DNA, 642 bp, Homo sapiens
cacatctcttggctcatgggaacctgactccacattcatgtctccctgtgcctgcccttcaaacaccatctccttctctggcatctccccactcagggagcagcagcatctactcagatacctaatccagaaactagggacttaatggagattccactgttcccaccttgcctcacatctaagcagccacaagctctgtaattctacagcctcagtatttcctaattatccccttcccttcattcgcagacattgtctgagttcattcacatcttgtcatttcttacctggaactgtgcactgacttcctaaccattccctaaacccaacctcagcccttcggccctccatccctaaaccattctccatgtgcccacaagccatcttgcagtatagagcacacatttttttctccttttttgttttttaagggataggttcttactatgttgtctaggctagtctcaaactcctggcctcaagccatcttcccgcctcatcctcctgagtagctggaactgcaggtacatgccaccatgcmcggcccacaaattcttcagagagtttctctaataatgaataaattcaagttttagacagtaatctgatttatatcagcatttgtactctgagcatgggaca

SEQ ID NO: 844844 - DNA, 613 bp, Homo sapiens
cagttctgtcatgtatgtaatgagactgtagtgggactcatgccacaagattagttgaagattagatgagttaaaatatgtaaagctcttgttaacacagtarttacatacttgagaaataaagtactaatcttattagtactttaatgttaaagaaagactcaaatttgtatattatcaagagagcaactaatgagaatatgaacttctggacagtgaatttctaaaaaggactaaaatgttaaataatacatggtaatatttataatttattaatgaagtttcatttaaaaatgtattacatgcagagaaagtcacaaaatgaaatatgtcctgtcagcttttatcttcattggatctgattttataattttccttgattttaacctttgcaaatcgtaatccctagaatctaaagtgccttttaatgtagatatacacaaagaaagttaagactgtcaaataatgcagaacaaagaggtttgaagaaaaattatggcacaaagtttacaatttagcaacttgatagaactctatgaaatcttactttgcatttttagtgtccagtcattggaaaaccgtatttttagtttgttcatctatcttattttac

SEQ ID NO: 844845 - DNA, 632 bp, Homo sapiens
ctgatttgtttgagttctttgtagattctggatatttttctttgtcagatatataggttgtgaaaattttctcccactctgtgggttgtctgtyaactctgctaattgtttcttttgctatgtggaagctttttagtttaattaagtcccatctatttatatttgtttttgttgcttttgctcttggattcttggtcatgaagtctttgtctaagccaaggtctagaaggatttttctgatgttatcttctagaacttttacagtttcaggtcttagatttaagtctttgatccatcttgagttgatctttgtataagaagagagatgaggatccaatttcattctcatacatgtggcttgcaaattatcccagcaccatttgttgaatagggtgtcctttccccactttatgtttttgtttgctttgtcaatgatcagttgactgtaagtatttggctttatttctgggttctctagtcttttccattggtctatgtacctatttttataccagtaccatgctgttttggtgactatggccttagagtacagtttgacgttgggtaatgtgatgtctccagatttgttctttttgcttagtctcgctttggctatgcaggctcttttttgg

SEQ ID NO: 844846 - DNA, 632 bp, Homo sapiens
ctgatttgtttgagttctttgtagattctggatatttttctttgtcagatatataggttgtgaaaattttctcccactctgtgggttgtctgtcaactctgctaattgtttcttttgctatgyggaagctttttagtttaattaagtcccatctatttatatttgtttttgttgcttttgctcttggattcttggtcatgaagtctttgtctaagccaaggtctagaaggatttttctgatgttatcttctagaacttttacagtttcaggtcttagatttaagtctttgatccatcttgagttgatctttgtataagaagagagatgaggatccaatttcattctcatacatgtggcttgcaaattatcccagcaccatttgttgaatagggtgtcctttccccactttatgtttttgtttgctttgtcaatgatcagttgactgtaagtatttggctttatttctgggttctctagtcttttccattggtctatgtacctatttttataccagtaccatgctgttttggtgactatggccttagagtacagtttgacgttgggtaatgtgatgtctccagatttgttctttttgcttagtctcgctttggctatgcaggctcttttttgg

SEQ ID NO: 844847 - DNA, 591 bp, Homo sapiens
aatgaattcttacaaatcatcatcaaacaggaatgccagaaataaggttttacttttcactggcaatgattaggaaaggacatctctgtcttctcactgtctccattcctacccctctctctctccattcccatctccatctgtgtcttccctttcccaaccttttgtttctttctaaaatctgatgtaacctccctcccaacccaccaacaaaccctctttgtatgtaaaaccacattcttgaactgggaagatttgacttattatccatttaaaatgtaaatgtctaagtggacactctaatttttggcaggtcatgagttacttaaacatgttaccaaagggggcccaagtagagactgttcctgtttgtgtcagccaggcaagacttacctttgtcttgtaaatggtgggctgtactctccttgccttatgaagttcaacctgttacaggctgcacctgtcttttatcacatatgactttaggtcacattatctcatttctgctgaatgggtggctgcacatgcacagtgcacatacacatttgtatgtatctagttaycatgtatatttatttaaatttcacaaat

SEQ ID NO: 844848 - DNA, 595 bp, Homo sapiens
gaaaggctttcagtttttccccattcaatataatatctgctatgggcctgccattcacggcttttatcatgttgaggtatgtttctatacccagttttttgtgttttcttttttaaaaatcatgaagggatattgaattttattaaatgcttttttagcatcaattgaaatgatcatataaattttttccttcattctgttgatatgatgtaccacagtaaatgatttacatatgttgaaccattcttgcatccctggaataaatcccacttggtcatgatgaataatctttttaatgtattgttgaatttggtttgctagtattttattgagtatttttgcatcaatattaataagggatattggcctgtagttttctttgtgtttttgatgtgtctttggttttactatgacggtaatactgtctttgcagaatgagtttggaagtagtcccttctcctctatttattggaattgtttgagtagaattggtattagttcttctttaaatggtggaattcagcagtgaagacatcaggtcctggggttttctttrctaggagactattactgtttcatcttgttacttgctatt

SEQ ID NO: 844849 - DNA, 610 bp, Homo sapiens
acatacgatgtggaagttgactagtgaaggcccacaggtagcagagtgatcctcagcccaagtggcacacagaatgtggtaagaaagaaggctggagatagaagcaggggccagatcataaaaagtctgagatacatactaaagaatttgtggtttttctaaggcaacaaggagtcagggaatggcatgattagaaaattgttttagatcacttcctctggctgcaatgtagagaagcagagtggggcaagactggagatagtgaaataccaggtaggaggctcttgcactaatgtaaatgaagggttatggtggcctgaactggaagaagtggcaggggtggacatgaggaggctggagagaaatggatagaaatgagagcttacttaggagtagagtcaggcagattttgtgactgaatgtgggaatgagggagaggaaggagtcagtaatggcctccaaggttctgatttgggcaactcacasgatgataatccagatcactaagggatgaacatggagcagacttgcagaggaagggaggagttaggttttggacttgttgagttaaggtaactgtgtgatatctatgtgaagatgtccataagtc

SEQ ID NO: 844850 - DNA, 570 bp, Homo sapiens
agggcggtgcaagatgtgctttgttaaacagatgcttgaaggcagcatgctcgttaagagtcatcaccaatccctaatctcaagtaatcagggacacaaacactgcggaaggccgcagggtcctctgcctaggaaaaccagagacctttgttcacttgtttatctgctgaccttccctccactattgtcccatgaccctgccaaatccccctctgtgagaaacacccaagaattatcaataaaaaaataaatttaaaaaaaaaaaaaaaaaaaaaggaacgcagctcctcaccagcaatggaacaaagctggacggagaatgactttgatgagttgagagaagaaggcttcagatgatcaaacttctctgagctaaaggaggaagttcgaacccatcgcaaagaagttaaaaaccttgaaaaaagattagacgaatggctaactagaataaccagtgtagagaaggccttaaatgacctgatggagccgaaaaccatggcacgagaactacgtgacgaatgcacaagyttccgtagctgattcgatcaaatggaagaaagggtatcagtg

SEQ ID NO: 844851 - DNA, 633 bp, Homo sapiens
ccactaagagagtaatttcaaaataattatgatccacagagaactgccacaccatgagtctagccattgctgctgccacataaaactagtgactgaaaaaaagcatcattcaaatttttgttatttatgttatcgcaatagaatccttcaaattcctgacagttaatgaagttgagctgtcaacaacgaacgtattcgtaatctgttcagtatagctcccagtctatcagatacactagagtgagatatagaaggcagaagtgagcccaggcacggtggctcacgcctgtaatcccagcactttgggaggctgaggtggatggatcacctgaggttaggagttcaagaccagcctggccaacatggcgaaactctgcctactaaaagtacaaaaattagccgggcgtggtgatgggcgcctgtaatcccagcgactcaggaggctgaggcaggagaatagcttgaacccaggaggtggaggttgcagtgagccgagatcacaccactgcaacccagcctgggtgacaagagcgagactccctctcaaaaaaaaaaaaaaaaaaaaaaaaraagaaggcagaagtgagttggaagccgcaactctgatatttctgttagcaagcaccattcagt

SEQ ID NO: 844852 - DNA, 610 bp, Homo sapiens
tttgactagaattcatataatcagaaaactttaccacaaacataatcaaagcaaagatgatagaaaaagtgtgggcttattgaatctagcatccttaattcataaaactaatcatctccctgccttacactagtcacatataccaaaggtgctggaaatacaaaaatagatgaaaggccaggcgcagcagctcacacctgtaatcccaacaatttgggaggccgaggtgggcaggtcactggagtccaggagtgcaaaatcagcctggacaacatggcaaaaccctgtctcaacaacaacaaaaaaaatacaaaaattagctgggcatggtggtgcatgcctatggtcccaggtactcaggaggctgaggtgggaggatcacttcttgagcctgcaaggcagaggctgcagcaagccgagattgcaccactgtactccagcctggatgacagagtgagaccctatttcaaaaaaaaaaaaggatgaagtacaattcttccctctttctacaggctcaaaccctaggtgtcactgaggcaacctgcataaaatgtgattgttatacarggtaaaacatgcaccaagaagcgggaaaatacataaattctac

SEQ ID NO: 844853 - DNA, 530 bp, Homo sapiens
tcttaggactttagggtactttgttttgaaccgggaacaaagaagtttctatctcataatttaggagggtggaagtaatggtggatattttcactcaatatgcccaatttgcatgcagattatgtctaaaaagtttagcgcagtttttaatatgacacgtaaacttattctggttgatagttataatatgttcccaagttcaagtataatataataacattcatttagcataaacataatatcatagtttaatttagaaggttgtttcatattttatagtactatagtatcaatattacacactattgctcaaaatagaacatcaatcgacaggatgttagaaaaatcatcttctgccaggcatacatataccactttgctgacccttttcctatttaaacacactgttcttatgaattatataacgttattttgctacatgtaamattatctaaaatggctatcaaatctagaaatgaattttctttttactgcatggacatcattctactttgtcattcactttttat

SEQ ID NO: 844854 - DNA, 629 bp, Homo sapiens
agggaggaaggagtgatgtttacttcatctgcccttatctaaggaaaacaaaaacttttacaaagatgcccctctttcctcctcccctactgctgcagattcgcttttatgwctcactggtaaaaagaaaagctgagaaagtatttaacttttccagtgtctatagcagagtcatgcaaaggagagtatgactggaaataaatgttgagttataaagtcaatagtgtttgactcaggtcctgactccttcccgggtagaaggcttacagagtcaaattaggcatttggtttcaaatttgctgtggttaagcagacattaagatattcaagtggaagagcagacatagagtcattaggacaaaaatgataggtgatgccataggaaaagattaaattgagaagactacaaaaaagaaacatcaactgctggtgagaatatggagcaacagaagctctcattcattactggtgggaaagcaaaatggtacaactatcttggaagacaattggcagtttcctataaaactaaacatatttttacgtatgatccagaaattgcactccttagtacatactcaaatgagctgaaaacacctgggtccatacaaacaaaatgcacatgggtgttt

SEQ ID NO: 844855 - DNA, 629 bp, Homo sapiens
agggaggaaggagtgatgtttacttcatctgcccttatctaaggaaaacaaaaacttttacaaagatgcccctctttcctcctcccctactgctgcagattcgcttttatgactcactggtaaaaagaaaagctgagaaagtatttaacttttccagtgtctatagcagagtcatgcaaaggagagtatgactggaaataaatgttgagttataaagtcaatagtgtttgactcaggtcctgactccttcccgggtagaaggcttacagagtcaaattaggcatttggtttcaaatttgctgtggttaagcagacattaagatattcaagtggaagagcagacatagagtcattaggacaaaaatgataggtgatgccataggaaaagattaaattgagaagactacaaaaaagaaacatcaactgctggtgagaatatggagcaacagaagctctcattcattactggtgggaaagcaaaatggtacaactatcttggaagacaattggcagtttcctataaaactaaacatatttttacgtatgatccagaaattgcactccttagtacatactcaaatgagytgaaaacacctgggtccatacaaacaaaatgcacatgggtgttt

SEQ ID NO: 844856 - DNA, 646 bp, Homo sapiens
ttccattgcttcttctctattattcattcaaacgtttaaaaattgtatttgttttccttccatacaagtggaaaatagtcctccttttggataatattgactccatagggaatttatattggttccacagaatggtcaactaggctttgtactatccttatcaacaagcttcagtcccagtatattcaaataccaatcatatatcttacttatgctttaagtaaggcactttctaaacttaactcacttgtttagaaaactcaaataaactcaatttcactgtctgttagtgacattatttctctgattagtcttaaaaacctgaagttatcttcaaacatctcctccatttcccatatccagtgagcgagtcaataagttttgctacttatttcaaaatgcctcacattctttcctatctcttcctattgctgttatttaaggggccccctgcaatcttctttacttcattcatgaaatactttaacagcctccaagtcagtctttcctatcttcctatgcctgccctaattaatgccactaaaacstgtgagattactgtcctctgactctcatattatcaagttatacatattaccacttctccaggcaaaattttatcttcagggcttgtccaattcctcct

SEQ ID NO: 844857 - DNA, 651 bp, Homo sapiens
acagggatccaacgagagggcggccaaaggcacagaagaaaacaccacagggagaaggaaatctccagctgaactttgtmtcaatttaaatggggcaagaagcctcctggccagaactcacaggagggcatgaattcaatgtgcagactccacaggttggggaagaaccaagcccttttctttcgcaactcagaggcaggtagcctggggtaagttcttaagcccggcttgctcactgcctggaaacagacttggggttgttagaggggccacagcgggagtgagaccggccctttagattgcatgggagctgggtgaggcctgtgactgccagctttccccactttcctgacaacgtgcatgactcagcagaggcagccataatgctcctaggtacacaactccattgacctgggaacctcgccctgatcccctacccaaggagagtctgagctcagacatacctagccctgcccccacctgatgggccttccctatccaccctggtagctgaagacaaagggcatacatgtactcttgggaattttagggctctgaccactgctggttcctctacatattaccacagctgatgctctctggaaagtgccacctcctggcaggaggccaaccagcacaaaaatagaacat

SEQ ID NO: 844858 - DNA, 606 bp, Homo sapiens
gtgccaccctcaccccaccagaaacgccccaccttcctgtctcctttccgctcactgtcctcacagcctgtcctatgcccagccttgcctcagtggagatgaataagccacagtccacccctccactgtgtcacgtgggacagccctctcaagccgcagtcagcctcatcctcactgccctggggccggtggtgacctcctacctgccctccttactgtgagcgcctcccctatccagcccatcctctgagcggcctccaaaggcccccctaaaatgcctgtctcatcgtatcccttcctggcttatccaaaccccagtggaattaccaggctctgtgcccatctcacccctcctgagaccccacagaagaacaagtgagaactggttcatgccaggaaggagcttgggagggatacaggtgccaagcagtgagagacgccaaccagtttctggaccatggaaaggaatgggagtggactctcggtgaacggaagagaaacccacagcctggcgtctccacgagtggccgcaggggtgaagcagggtgggstccggactcagagcccagggacagccaaaggcaggtgtgagaggaggggctggag

SEQ ID NO: 844859 - DNA, 478 bp, Homo sapiens
cacactcacaaacacacatgcacacacwcagagagacacatgcagacacacacacacatccacacatccacacatcgcacatatgcacacacacataccctccacagacatgacacatgcaaacacacatgcacacacacacagacacacacatacaccccacagacacgacacacaccgagactgctggacaggcccaggcagcacagaatagggaaggagctgggcagagcctggggtagtgccatggcagtccaagcagggtctgtgtccatggtttgctgtgaccccggcctcagctctcactgctggagcagtcattcctgccatttgctgatcccaggggtgctggggtttgtgctggagtcacacagcgtgcccttcactgtgcagccagggaaactgaggcaacactgcagagtgaggcccacagcggcggcagcggctctcaatttgggtttgtgaacgtggtggtgaa

SEQ ID NO: 844860 - DNA, 495 bp, Homo sapiens
agtttccccatcagtaaaggggggatcctgtccctcagtatattccatcctccctgtgctatagagagcagaggagagaagacctagtccctgccctgagtcgaggggggcctgctrgattttgatgtctgtgtaggagtttgctaggcaccccagggcaaggatgtgccccaggtggccgggtcatggggagaagcagagggtgttggggaggtggaggcagggtgggctggctctgtccttctccctgccacaggctctggtttggggtgaggaggaagaagtttgttgtccacaaatatgaccccgtcatttcccagctcagggactgcctatacagacaacatccgaagaccccagtatgatttctgggctgcgttggttaggggagcgcactgggctgaggccagctgggatgaggacccacagggtagggacggggtagacagggccagccctggacagccccgcccctggtggccccaggatgaccac

SEQ ID NO: 844861 - DNA, 637 bp, Homo sapiens
ggtttcatcttccttattgttgtcacaaccccagaccctggagcgggacacagcacacctgtgccccatgaatatcgcggtgtgaatgagtaagtgacagaaagcacggatgggygattttaaagaatagggacctgtgggctgtgacgggcaggatgcctgcgccccagggctcacggtctcggcagggatgtggttttggtagcccctacatcgagtgaggacttctgtgataatgaccactgtcaatcacaagaaagaaactgaggcacaatgaacagagagagtttatttgggtcaaggttgaggacggtggctgggacattgggggtgctacctcggcctttgttacaagcaggttttaaaggcaaagcaggtaaggagtgggcggatacaaagtcctctgacaggagttctcattggtttaagagacagcatggatcggtgattggccgtcaccattgattctagaggatgagttacagggtccagcaggaggcactttatggctacccggtgtcagcctagagcccatacagctggcagattcaagaggtcgttctctagctcgagggggagtgggacgtggctgctgtcacattttaatgcctctctgggcctgataatttaacggagc

SEQ ID NO: 844862 - DNA, 639 bp, Homo sapiens
ggtacaattatctccattctacagatgaggaaacaggtgcagagaatttaagaacctagcccgtcatactattagaggggtgaacccgggtagtttaactcgtatgcctgtgtatttaatcattrcactgactgttttaatccttaattctaacccttagttctattccttctcacattgaatcaatcatctatgatctattaatgttgtcccccaaatcatctcagtccctgtgtactttggctggagtaatagattattttttaaagtagaggtttattttagagataatcttgcttatctaatttcctcatattgcagacttgctgcagttttacatccagttcactgatcaactatcaaactgaaggatagcttgtcactgcatctgcagtgactcacttgccttggggaaaaatacatgtcacacatttacattttggcttttaagtgaggaaacttcatggttttcagaacagagtaagattcttgaaaactaaaacaataaatccaatgctgattgtgatcaatgatgaataccttgtgtcacttgcaaaaatgtacagcttctggaggtgttttcctggtcttggggctggtgattgtgatcattataactactgatgagttaccaaattc

SEQ ID NO: 844863 - DNA, 594 bp, Homo sapiens
atctcactcaaattagaatggcgatctttaaaaaggaaacaacagatgctggagaggatgtggagaaataggaacacttttacattgttggtgggagtgtaaattagttcaaccattgtggaaaacagtggtgactcctcaaggatctagaaccagaaataccatttgacccaggaatcccattactgggtatatactgaaaggattataaatcattctactataaagacacatgcacacgtatgtttactgcggcactattcacaatagcaaggacttggaaccaacccaaatgcccatcaataatagactggataaagaaaatgtggcacatatacactatgtgtatatgtgaatactatgcagctgtataaaaggatgagttcatgtcctttgcagggacattgatgaagctggaaaccaccattctcagcaaactaacacaggaacagaaaaccaaacactgcatgttctcactcctaagtgggagttgaacaakgagaacacatagacacagggaggggaacatcacacaccagggcctgtcagagggtggggagctaggggagggatagcattaggagaaatagctaa

SEQ ID NO: 844864 - DNA, 620 bp, Homo sapiens
tatttcacctgtacaacacccatgacacgagtttacctatttatgaaaccttcacatgtaccctctaacctaaaagtttaaaaaagatatatttgttaatatgtgaaaagggatgtgatataaatatatgatcatcttcctgatacacacatgcacactataaaattaataagtcaaaaaatagttatatctgggtaaaggatcacaagctatctttatttctcacacttttctttattcctttaaaatattttgtagaaagtatgtatatcttaatctgcagaaaaaagtaagttactttaagagatgaatggcatcattctcaataattgggtttttgacataaggcttcagcaatggatggtattaggtttttaaaatattgagcaagccataccttaaaagaatcatttggtattaggaaattatttaaagcaatgccttttaggctattagcaacttttttttacttcgttaataattaaatataggaggctttaagtcktttctcagattacttctttttctaccctttgtgtttacatgaggttaaacatctagaactttgagatagaagatttgtttgtgttgtttgatgacggggaaagattcgggatgtg

SEQ ID NO: 844865 - DNA, 590 bp, Homo sapiens
tgtctaggccaagaatctggcttattcagtcaaatgtatgcattctaaagaaagaattggtacacagtaaatgaagtgggaagtgtgagttagcttcagagatcattttacatgttaagcmctgaagcatggaaagaatgaatgtgaacttagaagcctgcgtgaaggataggacactagcctagaactcaggaaaggtgtgctacggatggttctgccacttatttgctgtgtatatttgagaaagtgtttaagctcactgcattgcagtttcttagctgtaaagagaaccaactttaacattcccgattgtatgtttataaatgaggtttgcctttattcctttctgctatatcggaactagcaaataccaaacatacagaccaaataaatacataggaatattcaattaacatgctcatcttaactaacttataaaattctatcttgtttatatctagttgtattaatcagggttctccagagaaacagagctaaaaaagttcagagaaacagacccaataaatcatacataatgtgattaatattaatatataaaaaatcatataacatatcatgatatatattaa

SEQ ID NO: 844866 - DNA, 614 bp, Homo sapiens
tattgctattttttaggtgtgttttggcttttttgtagatttgttcttctctttttttctttataattggaaaatattttgtagtggtatcctttgtttcctttctctttatttttgtgtaactgctataggttttggtaacaatgaggcttacataaaacatcttacatttatagcggtctattttaacctgataacaacattacttttattgcataaaaaactacatttttcccctcccacatttgtttgatgtcataatttacatttttgtacatagcatcccagttaataaattattacagttgtattaatttttaactatttttgtttttttaatctttacaccaagttataattgacttactatccctactacagaattagaatattctgaattctctgttaactttaccagtgagttttatagtttcattttttgtcatgcttctcgttagcatcattttatttcagctcagagacctctttttttcagcagttattsgcatagcaggtctaatggtgatgaacattctcaacttttgtttttatagaaaagttttatctccccttcatttgtggaggatacccttgccaaataaaatattctcagt

SEQ ID NO: 844867 - DNA, 617 bp, Homo sapiens
tcaatatatgcagaaaaggccttcgacaaaatttaacaccccttcatgctaaaaactctcaataaactargtatcagtggaatgtatctcaaaataataaggctatatgacaaacccacagccaatatcatactgaatgggaaaaaactggaagcattccctttgtaaactggcacaagacaagaatggcctctctcaccagttccattcaacatagtatcggaaattctgtccagggcaatcaggcaagagaaataaataaagtgtattcaaataggaagagagaaagtcaaattgtcctgtttgcacatgacatgatacttcgaaaacccatcatctcagccccaaatctccttaagctgatgagcaacttcagcaaaatctctggatacaaaatcaaagtttaataccttctaaacctgtcttatttcttctttcattgtccttttcaggaagaatggttacaataaaacaaaagttagatcactcacttctcagttaagaagtcttcaataacttcccttcttttttagagtaaaagctgaagtcagatttagctgatttctctgacccatctactaccatctctggactcaatttttccttctcgatggcag

SEQ ID NO: 844868 - DNA, 628 bp, Homo sapiens
aaaagtgataagtttcaaacttaacattaaaattatgtcttatgtctgttactgaatccaagttatcatacaaagaaaaactcaaactgaaagtgccttaattttttgaaagaaatcactatgaaaaaattaaatttgaaaatgcccacttagggattcttatttttttttgtctcagtagagagtgagatcatattaaaaacataaattgtgttttaatttgtataattattaaacacattcaaaataaacatagaaaaacagaaaatacaagtgaaaaagttaaattagtaaaagctaatgatactgatactactattgacaatatttgaatatattctctttctgcttttctattttatacaatattagggtagtactacttaagtagtattataacatttttcctcaaaatacgatattgtagatattttctcaaatcccaaaatattttttgtaacataattttagtttgaatatatcatgccgtaactgagtatttttctattttttgacgttcatattgctttaacatttttactattgtatataaaatactttgataaatgtctttttgcgtgaatctttgtatamgtccttatatttgtgatatggagaatattagata

SEQ ID NO: 844869 - DNA, 576 bp, Homo sapiens
cttaagtcctataggatttcttcactcttttccttatgttttctattcgatcctctgactacataattttaaataacctgtgttcaagctcactgagtctttttttctgcttgagtaagtctactgttgaatcactctattgaattttttagttgagtctttgtattcttcagctccgcaattttcatttaattctttcttatgatatctatctcattgttaagcttcacagtttgtttatgtgaacataaacaaattttgattttattttaattgtctgtcttcccttattggtcattatcttctttcagataatcatttgaatttttttggcaggcagttcatagatctccatttttgtagggctggttactagtgctttatttcatttatttagtggtgtcatgttcccatgattgttcatgtcccttgtggccttgtgttgtrcatttgcctaagtagacatgtcttccagtatttacagaatggccttggcagagaaagctctcattagtcagcccttctagaagaaccagggcaggcttattgacagaatacttgggcaggatgcctagt

SEQ ID NO: 844870 - DNA, 598 bp, Homo sapiens
agtatgtatagataagagtaaatgcaaatgttattttatttttcagacttagtatatatgggtgaaattatttgacagttatagttaaaggacttattttattttyttttctttttcatcccttgccaaagttttgctatgttcactgatctcttctgtcttctgaatttggcactaaaatagttgcttccacatgccatgacttatttcaaattgcaaataaatattggcttcttagtaggaaattgtccatagtttagacttgacaaaaaaatctacttcaaatataccccacacttggttgttcaccagttggttcttctgagttcaagatgactgtgtctgagatctgagggctctctacatttatgtatctattataactgtacctgttatgcttctcctgaaatataatgatattggcagtggagcaaagccattacaatctggtttggcaggaagggatatttttcacattgtctaagccaaaatcagtcacctgattgcaaaaaaaaaaaaaaaaagaaaaagaaaagaaaaatggtgttacacaatctttatattttaatcttagacatttctttcaattgcaacatat

SEQ ID NO: 844871 - DNA, 502 bp, Homo sapiens
attgtatttctcagcagaaagagagggcataaaaaacagcagttattttattttgcctttgcrtgcttgaaagttttaatttctttaattcagagcatatatccataattcagaaatagagcttttcttttccctgattctttatccaatggaacacccacttggatttcttaatggccaaacattagataaagataatacttgcaaatgaatgagaatagtgcagatcgtcagtgaacagaaaggaggcttaggtgcacctgtgggaggcgtggcctgtgggctcactgccctcactgccaccagggaggcccagaggcgattatgttttgttgagtccagcaagtgacaatctatatagtctctttatctaactgtgcttcctttatttcaggtatgtaattttccataatcatctctgatataactagagttaacctcagtgctcaagcagttctttgccccattttccaaagcattcagatgccaccttttgagtacc

SEQ ID NO: 844872 - DNA, 645 bp, Homo sapiens
attttcgggctggagagcaggtgggtctcgtggcatctmacaaaatgtgagccagccagtgggcactaacgttaacaccgtgttggtaatcttaaaaaggaacttaacttaggggaaaaaatgtggaattcacattgaggattgtttttctggaacacatcttgagaccagaacccgtagtacacatattcacttgtgctttactcacttgtgctttgcattgtgctttgggtccacagagaaaaagatttaaacacagttagttgcacaattggcctaatatttgtaaatatttgtaacactcttaactgaaaataaagtgtgttatgacactaaaacaatgtttaacatttcataaactgttgcctttattttttctactgattagaactttataagagtatttaaggggcaaaagcaagggaatctgttgtcttatactttcattttaatctctgattttttaatctagtagtttgggtgggaggaggggtaagcctttgggtgagtttgaaaatacgtgtctataaattcctacattctatcagtctacacccaagcagacagtacagtcatggaactcacatccataattgacattccagttgagacaaaatgaaaaatacttgcctagcaaagtactga

SEQ ID NO: 844873 - DNA, 596 bp, Homo sapiens
acgtagacgggaaggccccattgaagcccttctgcctcctgggcctgggagtcagggcatcggggcccaccccatggctcaggcactaccccggtcctgtgcctcccccgcctctccctggcctcagactccctcctaaggtaggtggactgcattatctcttggttccttccagcttaaaaagtctatgttctaaatccatccatcaaaccctattttgagggctttgaagtgaagcctgggtgtttttaccttatcccacacacctacctcacaccttccaaagttccaacatctcctttgattggcatgtcaagtggacacatttctggactggaggggcccccactgtgagcctctgtttccaaggagctagctgctcacttccaaatgctgcgggttggtttgctcctgagggcacattgcacaaccaggaataaagtctcctagattcttgcctctgtattaccttgaaagccccatgcttcttcagtgtgatgggagcmagcacagtgagttatggataaaggaatggtgccagcagttaacttcagaggacggagggaaaaacctcagtcagctcagaataagatcct

SEQ ID NO: 844874 - DNA, 596 bp, Homo sapiens
acgtagacgggaaggccccattgaagcccttctgcctcctgggcctgggagtcagggcatcggggcccaccccatggctcaggcactaccccggtcctgtgcctcccccgcctctccctggcctcagactccctcctaaggtaggtggactgcattatctcttggttccttccagcttaaaaagtctatgttctaaatccatccatcaaaccctattttgagggctttgaagtgaagcctgggtgtttttaccttatcccacacacctacctcacaccttccaaagttccaacatctcctttgattggcatgtcaagtggacacatttctggactggaggggcccccactgtgagcctctgtttccaaggagctagctgctcacttccaaatgctgcgggttggtttgctcctgagggcacattgcacaaccaggaataaagtctcctagattcttgcctctgtattaccttgaaagccccatgcttcttcagtgtgatgggagccagcacagtgagtkatggataaaggaatggtgccagcagttaacttcagaggacggagggaaaaacctcagtcagctcagaataagatcct

SEQ ID NO: 844875 - DNA, 576 bp, Homo sapiens
gagatcctgccggtgggatccagaggaagggtctggcttmctagcctcctggaaggaccttgctgccaactcttcccttctcacctgctcagtgacttgtctgaacttacataactagttactggcagagctgagtccagaccccaattatctcgagtcaggacaggtgactttttgccatcccagggtgcccacccctgtagcttgaggccatctcccctggtggagtcccagtttcctcagctgagaaagggggtgagcccttcctgtcccactggccttccagggaggcggtggacccacctgccatgtgaactgtgcaaaccagagtcaagagtgtgtgccgctaacatggtgacatcagcaccgattgtagttgaaagttttattggattaaaaaaaagacagacaatactggtcacataaatgggtgttttttttttctcttaaggtttgaggccttatttattgttttatgtacgtagttccatacttccagcagtaattcaggaaacaggagagagagataaggtaagaaaaagagagaaaggcagctgggctcccaaggggtgaact

SEQ ID NO: 844876 - DNA, 613 bp, Homo sapiens
aaaagcgctttacagtgttattttgcaagacttgagccctgagtggatactgagtgtggagcagcctggttttgtacatttttgccacatgttgagatgccatgggagctggtgactcacgcgccacygacgttcacaaaagctcccggctcggagcagagcattgaagggaagggtctggctgcttggcgtatgttaaccaggctgggtactgagcgtcttaaaagccaagccacgtttgcctttcaactttactttgtggtgacgaaagaggaggtctctttcttcaggggcttactcagcgctgctggatctgaagatgcccgggaggagggtgaggggtgaaaagggcatcctaaggcaggatgggacacagcggcctctccagcttaactcagtattctctgaggcacagaatactggagatctgagacccctgaggtgcaagccctcccctcaaggatctaagcaggtggtgggctgccgctggcttctccccacagctggtggggggcagaagccctgttccacaggcgacaagtgtgggtcccagccatcatgtttagccaatggtcttgtccgtgttttctccccaaaaacgctttgagttagt

SEQ ID NO: 844877 - DNA, 599 bp, Homo sapiens
ccaagggactgagttctcctgctatgggctcttgctaataacgctggstggagccaggcctcggagcaggcaccacgtgccctggccgaggacaaagtggcaccaagctcctcgcccacagccacacccctgtggcccacttgctgattggcccagggcttagggtggagccaaagagcaccataggtgggcttggctctgtccaataggaatgctcgttactggagccaaacaatctgagccaatcagagcctctcatggtggggcagggctataaatacccagggaagtctgcgctagagcttccagggcgtctcctctggaacagtggctgtctcgggtccccaccatgtaggtgcagctccctgccttccacagcagcttctggtgcctggctagagttctgggactgaattcacagatcgtgccactggcccaaggtgagaactcggaaggtccctgaccagggccaagatcaggcctctggaggtgactagaggcagctgggtgatagctggccgggtacagtctctcagtgccacccctggtgaatttctcgcatctacagactgttgaatttatatattgcaaggcctagt

SEQ ID NO: 844878 - DNA, 599 bp, Homo sapiens
aataaggtaatggagattttaacggtataatcaataacgtgtcttcttttgcgcacacaagtaaagaatgcacctcattttcaccttattttcaagcatccatgggacactgaccagaaccgaggatacactggtcatgaacatcctattgtgtcccaaaaaacgtacgttgcacagatcacattttctgattaaaacaaaattaaacgataagtaactgtaatttttttaaaaaaatcttcttaactgctgaaacacagaggaacaaaatacaatctacagaatatttggaaagtaatgaaaataaaaacactatttcttataagaataaagccattcctcaagacagtcatagtattaaatgcattgtttaccaaaaagaaagctaaaacgtgtatgatttaaacattcaactcaataaattagaaaaggagggaaaagcaatcctaataaaattaaagaagatgaagccaaactcaatatagaagaaaacagagttgatagataaatgtgagctaatttgaaaaatgaaggaatttcaataaactggtractctagttaaataaaaagttgcaaaatatacataacacaacaaagg

SEQ ID NO: 844879 - DNA, 541 bp, Homo sapiens
acaactatatagtttttcatatgtacgtatttgaaaaggtatgatgtttagttttactgttttttaaatttcatttttcaaaaggtttctctttccatcgttcctggaaccatgctgagtcaggcttgctgtgactccagcaagatgggtgagcagaggccctgcacagtgagtggcgagctggggtctgaaccggagcctgcacagctctgaggctgcgctcccttagccctgggtggctgctccccgaccagctccagtgggcaggctgggtctgcctcgtccaacacagaatcaccaggggctggtgcatggaaggtgcctatttgttgagtgaaatagtttcacgatgtctacacatatcagaatatcacatttgtactccataaatagatgggattattgtcgattaaaaatcaaaataaaaaatatatttgttgagtaaacaggcatcctcccttgcaagcctatactggaaaaaaaggcatkatagtgccacagacagctgaaaggtggctagagtgtcttcacaaaagacatc

SEQ ID NO: 844880 - DNA, 612 bp, Homo sapiens
atgttgtaaaaagatcactctgatggtttgagattggaagctcatcatcaagaagkagaataatagcaagaccatagcttttgtgcaagatcatgatcaacactaagctacttagaaaactggagtatttggggcctggagccctctgtatcctgacatgtgcagtctcacactgaacaaagcaggtgtttaaatacacaaatttcctgtgagaatggagacaaataaccagagtgcagttagatttgtttgtttggcaataattttttaaatatgtagtagaaacaaaggatctagtgctgaggtgctgaggtgaggaaaggagaaggggaataaagggtgagaggtaagggggtgcttaaagttgttccaaccaatttcataaatcaagccactgaggaaggtataagaagtgaagaccaagttcatgaaagcccagaaactgaggatttgcgtgtgagacgtactctctaaaacaactgaacaaggagaaaaagggcgagaaagaaatacttcataaagccaagcctaaactaatgctttttgccctacaccttcacatttacacttaacctaaaaagattaaaatatcataataattctgagattcct

SEQ ID NO: 844881 - DNA, 617 bp, Homo sapiens
aataattataaacactcagaagaaattatgtttgactttctttcccatttaacytgacattttatcactttaattgtccttgtgattatttgtgtgtcagaggagaattttacattcaaaaagttaacccaattctctttaattgagggagtagaatcagaaattgagtccttgggcaaagcctgagagagaaattgaatatcagctccatttaggtttcaaaggtgaaactaccaattggctattataattcagggcatgaatactcctactaatcagatattttaagaattattttaccttgctcaaaacaccctcagtgcttcctagatgtcaattaaataaagtcttcattctcagtatggtattcaaacccttctacaaccaacacctggttctaccacttaccgactatgactttggccaaggtacttttttttgtctgagcttctggtttcttagttgtttgttttttaaggttttgtgggtacatagtaggtatatatatttatggggtacctgagacatttggatacagtcatgcaatatataataatcagcatggaaaattgtgtatctatcccctcaatcatttatcatttatcatttcatagttg

SEQ ID NO: 844882 - DNA, 584 bp, Homo sapiens
accaaaggctaactttcccttcttgaagatgactctgtgtgtgtgtgtgtgtgtgtgtgtgtgtgtgtgtgygcgcgtgtgtgtgtgttggggggatgggggagtaaataacttaccatttatgtatttattgtggcccattttaacatgtcatgtttttaattaaatgagtgaatgcatgtaaagctctcagaagagtacctgtttattagcacacgatgctatataaatgcttgctgccattattataatgccagataatttggcaggaggccaacttgtacaaatccttacaaatttcaaaagacaatgtccagaaatacagttaggtactaaaatgagttattcagaaagccttatgagacagtttttacacaaccagtggcaaaactatcacaaaataaaaaatgcttcaactataatgtttagagaaacttgtggcacactctgagccatgaattatatgagcagaagagggccttgagaacttcatatgctgtgaccaaagaggcagatgtacgtggcaaactgattcttctggcaccactcagctacaaatctgccctgaagtatgtatagttatg

SEQ ID NO: 844883 - DNA, 584 bp, Homo sapiens
accaaaggctaactttcccttcttgaagatgactctgtgtgtgtgtgtgtgtgtgtgtgtgtgtgtgtgtgtgygcgtgtgtgtgtgttggggggatgggggagtaaataacttaccatttatgtatttattgtggcccattttaacatgtcatgtttttaattaaatgagtgaatgcatgtaaagctctcagaagagtacctgtttattagcacacgatgctatataaatgcttgctgccattattataatgccagataatttggcaggaggccaacttgtacaaatccttacaaatttcaaaagacaatgtccagaaatacagttaggtactaaaatgagttattcagaaagccttatgagacagtttttacacaaccagtggcaaaactatcacaaaataaaaaatgcttcaactataatgtttagagaaacttgtggcacactctgagccatgaattatatgagcagaagagggccttgagaacttcatatgctgtgaccaaagaggcagatgtacgtggcaaactgattcttctggcaccactcagctacaaatctgccctgaagtatgtatagttatg

SEQ ID NO: 844884 - DNA, 615 bp, Homo sapiens
aggcctgcaaagcctaaactatttactatctggccctttacaagagtgtttaccaacccctgctctaaaagatcatcttgactacagtagatatgttgattaagtgtaagtgaataatatatatggaaaaccaccaatatttagattttctctagggtaacatagcatttactaagattaaaaattgattctataaccagattacagttaacttctataacttcaaatgttaccaaagtatttatcaaaggaaatcattctgaggtatgtctgacatctgatgccaccaaattgttagtcagtgatttttttgttttgtgttgaagtctggcctatgaacataatcgccaggagctagcagagacgcagagaagcttcgagaatattatcgtcaaattaacctcattcaggccgcagggctacacagctccaggggaaccagccatattgtattccatgtatgtgagttatgcttagcggttgccttttgagcaaaagacaagawgaacaaagcccccgaattctgcaacccagtagcactgacctcagctccattttaaatggaaacaacttggtaaatgaggacaataatttagacgatgtatttttatttta

SEQ ID NO: 844885 - DNA, 574 bp, Homo sapiens
tttggttgcaatctaaactttattttgctgcacaactccttttctgaaaatttacctgctttcaacaaggaaggcaagttytcctgcttccatgtcaatggaaggcaggtaattcctttatggagtttgaccttgctcccagcacggaagatgaatctgagttttttcctgcttctagggtaacagacagcagtcttcagcctgagacccatcactaggtaagtagctcaataggggttttgtcttgtctaaagttaagattaacaacaagctggtcttaatttctccttaccattagagtgctcagtaatcatataaattttgagatactttgtgtttttgcttaactttttttttttttgccgttgtttgtttctgtttttgttgttttggtctttctttcttcattgggaaactatccaacttgatcaaatctaaaggaaagttccaaattatgaggaacaaggcctctgaagtggctaaatttccacaaaaggtggggagggcttgggaggaaaaatgctcagcaaaagaaaaaacaataaagatttttgattttcagtacttaaggggc

SEQ ID NO: 844886 - DNA, 574 bp, Homo sapiens
tttggttgcaatctaaactttattttgctgcacaactccttttctgaaaatttacctgctttcaacaaggaaggcaagttttcctgcttccatstcaatggaaggcaggtaattcctttatggagtttgaccttgctcccagcacggaagatgaatctgagttttttcctgcttctagggtaacagacagcagtcttcagcctgagacccatcactaggtaagtagctcaataggggttttgtcttgtctaaagttaagattaacaacaagctggtcttaatttctccttaccattagagtgctcagtaatcatataaattttgagatactttgtgtttttgcttaactttttttttttttgccgttgtttgtttctgtttttgttgttttggtctttctttcttcattgggaaactatccaacttgatcaaatctaaaggaaagttccaaattatgaggaacaaggcctctgaagtggctaaatttccacaaaaggtggggagggcttgggaggaaaaatgctcagcaaaagaaaaaacaataaagatttttgattttcagtacttaaggggc

SEQ ID NO: 844887 - DNA, 574 bp, Homo sapiens
tttggttgcaatctaaactttattttgctgcacaactccttttctgaaaatttacctgctttcaacaaggaaggcaagttttcctgcttccatgwcaatggaaggcaggtaattcctttatggagtttgaccttgctcccagcacggaagatgaatctgagttttttcctgcttctagggtaacagacagcagtcttcagcctgagacccatcactaggtaagtagctcaataggggttttgtcttgtctaaagttaagattaacaacaagctggtcttaatttctccttaccattagagtgctcagtaatcatataaattttgagatactttgtgtttttgcttaactttttttttttttgccgttgtttgtttctgtttttgttgttttggtctttctttcttcattgggaaactatccaacttgatcaaatctaaaggaaagttccaaattatgaggaacaaggcctctgaagtggctaaatttccacaaaaggtggggagggcttgggaggaaaaatgctcagcaaaagaaaaaacaataaagatttttgattttcagtacttaaggggc

SEQ ID NO: 844888 - DNA, 649 bp, Homo sapiens
agatgcattatttgtgattgtaatttcttctcttcttgtttcatacagatatatatgtatatatatgcatatataaatacaaaagagaaatgtaaatgcaagaagagagttgatcgaaataaataaaaaatctgggggctgagcacattccctaacagaacatagtaacaattaaggctgggagcaggaacagattatttgaagaactagctgctaagcaagattttatcagatcagtagtaacttttagatttctcagcagaactaaaactggggcattttgttcatttccaagcctttttggtaattcctcttttatggaagaaagaatgtaagaactgaaactatttcaatgtatttgtttgataaacagacctaataaaaagtctggtgggagaaaagttagacaatcctggttgaactgggttttaattattttttaaatttacttgcatttacctaaaagactagttgtacggtattcactttaagaaaaagcatccacttttttccagcaagcactctttgatgcctgattaaattaacaggaccccttacyaccattcacctctagttccatctcgctttagcagaattacaattggaattataattggctggagggcgcctggcagcatgctccaggcca

SEQ ID NO: 844889 - DNA, 606 bp, Homo sapiens
catctgtggtcccagctacttgggtgtctgcggcaggaaaatagcttgaaccagggmggttgcaatgagctaagatcgcgccactgcactccagcctgggcaacacagtgagactccgtctcaaaaaaaaaaaatgggcaaaagatgtgaacagacacctcatcaaagaagatatacagatggaagataagcatatgaaaatatgcttaacctgatgtcattaaggaattacaaattgaagcaacaaggtaccactaaacccctattaaaatggtcaaaatccagaatgctaaaaacaccaaatgctggtgaggatgtggagtgacaggactctcattcgttgctggtggaaatgtaaaatggtatggccatttttaagacagtttggcagtttcttacaaaactaaacatagtcttaccatacaatctaacaattacactcctagatagttacccaattgaggtgaaaacttatatccagggccgagcacagtggctcacacctgtaatcccatcactttgggaggccaaagaggaaggattgcttgaggccaggagttctttctttttatttatttatttatttattttcttttgagacagagt

SEQ ID NO: 844890 - DNA, 538 bp, Homo sapiens
tgtgtctgggacagattgcgtagggcctggcaaggatataggcttttaccaaatgtggtggtggtggtggtggtggtggtgaatcaataatggggcaaaaatcatggacatatgaagaaatgcaacagcaggtagacataagaaaaacaattaacctcaggagtaaaaagaactcagaaccacaatttaaaaattgctttttacttattaaattaacaaaattaaaatagaactagtagtccttgctgttggcagagtgaagtgggatggacccttcattctgtattgatacgatttcaaatcacatatctcttctggaaagcaagttggtattatggctctagagtcttaaaggcatcatttagacccttttactcagtaaggtttttttttttttttttaccagtcacacaacaaacatttagaatcygtcatgtgctgggttgtgagtgaggtcttaagaagaacctagggagcttttaatgatatagaaaatgcgttaagttttatttgtaaaatggaatatacaatgtaaata

SEQ ID NO: 844891 - DNA, 521 bp, Homo sapiens
ccaatatcaaggtgtcagttgggttagtttttttggtttttggtktttgtttgtttgtttgtttgtttgtttgttttgagagggagtctcgctctgtctacccaggctggagtgcagtggcgcaatctcagctcactgcaacctccacctcctgggttcaagcgattctcctgcctcagcctcctgagtcgctgggattacaggcgcccgccactatgcccggctaatttttgtattttagtagagatagggtttcactatgtagatcaagctggtctcgaactcctgacctcaaatgatccgtccacctcggcctcccaaatgctggggttacatgcatgagccaccgtgcccggctgggttagtttctaatgaggtctctccttggctgtaaaaggccatctcttccctgtgtcttagcacgtggtcttccctctgtgtgcgtctgtaccctcagctcctcctgtagtgaaaacatgggtcacagggtcacattgtgttaaggcctgtccgcaatgacc

SEQ ID NO: 844892 - DNA, 624 bp, Homo sapiens
gatgggggagggaggaagtgcagggccggaggggccggttgaggtgcatacgcctcaccctgctctgcacacacagctcyttgctgcacccacatggcctacaagccacgaaagaaacattcatttaccccattgtgctggactaaatgtgaagtagctaagggaggctaaacttctcccacttctcaagggctgaggagtgagtaggacagtcccagacaagaaaactccacgatagatgcagtgggcccacaccagtccctacatttgagcctttctcacagcggaaaagtgccctttaatccccagcatcagagctcacatccagtgatttatacacctacctgcagccttttaggtcttgggcaacaacagcatgttgatattaattcagtggaattttgatcatctgagttcttagcagagagcaatgagagaaataggaatcacattccaaagagagttctgctcccccaggtgtggcccagcccaggctgcagaggcagtttccagctccccactgcctccaagaagagggcaaatcgtgcattcattgttatcatttagtccacacatcctctgactgccacagctggatggtctcctagaggcagggaggagtag

SEQ ID NO: 844893 - DNA, 687 bp, Homo sapiens
acaaagacgccccctagagttyggatcctggttctgattttttattttttattttttggtcacccttttcttttatgctgagccacctttcaggaactccagtgcccttttctgctccttggcctgagtcaagaccttgcccaggccatgaaatatatttttacagtctgacaactcaatggggggacttctgcttctgggaagatactttcccctattcttcccactgagtgcagctcaaaaccatggactttatatatacagtaaacataagaaggctctgaaaggtagaaagaagaaggcagacgggccagggaccttgggccccaagtgtcataggccgaattgtgtccctccaaaattcatatgctaacattttcatccccagtgattgcatttgaggataaagtctttaaagaggtaaggaaaatgaggtcatttagagtgggccctgtcatgccggacccctactgacttcagtagagttggtgccatgtttgagaggctgaagaagagacctggagccagtgcatgagacatagggtttattgaggggacttacatacagggtggcccagtggtgatgggctgcacaggaaaactgcaaccacctgtcaaaagcatgtggtttacatagcattttcacttagcaccctcccctggcaacctccatctggcaaccttcat

SEQ ID NO: 844894 - DNA, 560 bp, Homo sapiens
agactataacatagaagtgtcttgacctgatagaaaggaaaaggtgagaaatcagtgtttatacttcagtgtctgtgggggaaggaggaggacagaggagatagaagcttgcagagatgcctgtgttgtggcctcctgttctgggctgagtcaaagagtgaagaagaaggttacacagaaggaagtagacagcacacggaaggttgtcctgtttccaacctgggactctgaatagagacctctttgctgaacttggggcaactgcagagtccgacaaagtgagcctctgtgaggcctcttgcgtcattcggggccccctctgtgccatagaaccggctcacaaatccccattgtctcctgtgacagggagacggcagtttctgagaccgtacagggagctggccagagaaaaaggtccatgtggagactgaggtgaatgacatcggggcctagggctaaagccaggctggtcaagccaggaatggaaatgaagytctacagccagagcaggtgtcaggttcagccaaaccgacgggaggaaccccgggccgagaggcgca

SEQ ID NO: 844895 - DNA, 600 bp, Homo sapiens
ttcctggaaaacctcacatttatcaaatctcatactgacaataacagggttagggcaaactgaaaacctgtgagactttgtaaccagagctctaataaaaacaataactggtggaggcaaaatgccagaaaaaaatgcagcagaaatgcctggttaaaggtgctgagataatgcacatgtagtggagttctgagccagcggggctgccattatggtgggcacaggaagaaatgcaacctgtcatgaactgagagccacacaaggctgggggatgcacgtcaggaaggcatacgaatatacactctcattcttaattttaatagagctgaaaagactcccacacatgcaacagctgagtgaaaagctttttcttgttgataattataattctatttctactattccagctcctcttacctaagaaaaaaaatcacatattaataaacagaatttccacactatactgctatcattcccctatttaccaacwgcatatatgctaatttgtgtcaaagagaacactaccggctcccaaacttgccaattaggggtccacaaactacgtcctgtgggccaaatgcagcccactgcatgtttatt

SEQ ID NO: 844896 - DNA, 481 bp, Homo sapiens
tgcagtgagccatgatcaggccactgcactgcagccttagtgacacagcaagatmcacacacacacacacacacacacacacacacacacacacacacacacacggtgttttggctataagtaacaagaataacaaaatacaacaaggaatatctttaaggagtcattcatttattctacaaacattttcctgtcacttactatattccaggtcctgttctaggtgctggggatatggcaatgaataaaacagatcaaccccctcaccactcctgaaaatccaagaaaaactctggctttatagattttatgatctgtggggagagatttattatcttacagaacaagaaatccagagataggtggtcctgggctggtggatagaggctcaacactatcttaaaggaccttattctttccatctcttcactctgccatcctcagtgtgtcggcttttttctcaaccttgtaacctcatagt

SEQ ID NO: 844897 - DNA, 335 bp, Homo sapiens
agaaaaaaaataaaaaacatttttaaaaaaaaggaaaaaggagaaaaatttggacacagagacatggacatacaaggggagaaggcaggtgaagatgtaggcagagcrtggagtaatgcatctacaagccagggaaaaacaaaaattgctggcaacctctagaaggtacaggtggcaaggaaggaatcttccctagaggtttagaagggagtccagccccgctgacaccttgattttgagcttctagtctctggaactgtgaaagaacatgttttggttgtttaaagctactaagtttttggtaatttgtcattgcagccctacgatacaaatat

SEQ ID NO: 844898 - DNA, 623 bp, Homo sapiens
gtaactacgctgatttgtaggaaatgttggggatgtttcaaacgaagacaaaggggccatgtaaaagataaaatttggttttcatgatctctcatctatctctccttctgtattgtttataatgtgacacattttcagagcattgactagggaaagtaaccataactagagccctgtaaggccaagtttttcatcacaaggaaagtaaccataattagagccttttatgacagtgagaaaatttgtttttcatatcatctcacctatctccccttccgtattgtttataatataatgtgacacatcttcagagcactgactagggaaatcataattagagccttgtaaggcaagtgttttcatgacaaggacacttaccaaccagaactcatgtggtcctcctgccttagtgtcctgaataccaaagaaaagagtatgaaagggtcaagaatctcaattttctcctctggcggctgcacttgtactctgtatgaagacttttagtaaacaggctcctgatcgaacaactatgccaaaaagcctccaaataacaggactaacacgtatcaatctacgaaccagcatacggatcttttawtctatactactactgctaacaaaga

SEQ ID NO: 844899 - DNA, 617 bp, Homo sapiens
tcagatggagtggcggtcttctccacaattcccaagtacagcttccacttttccctcaacctctcataaagtcacagagtaaatagaaggtgagtttatttctccagtcttgaaattaacaattttcaagaaaacaaattattagaataactggtggagtcacagacatatttctagctccattaggtcaaaggaaaggaaagaggacaagggtagaaaggagacaagccctctaagaaactgtccattcagtctgtctgcagtcaatatgaagagatagcctttggagctacagaaaatattacattgaagtggattatgcttgctgttaaagaagctggtccagccgagcagcagcagaagacgaagactcaaatgtccatgtagagcatcatggtccctgaccaaagagacttcttctggttcctcttgctctcctcaccaagagcacagatgtgcccagcagcaatatgacagcaaatgtctctatggcttcgggatgaaaatgtccacacactttaagacccgagaagaaatggggagygctccacacccaaggaactgaagctagggaaagacagttttcttgtgtttctgtcatagaggtggactgatgc

SEQ ID NO: 844900 - DNA, 587 bp, Homo sapiens
tcctttcatgatttcccatagaaaatcaataacatcctttgctatccctcmaaggagcccatagagggctggcagaatagcagatatctgactctcatttaagttaacttgcagagcatggatccacattgtgtttgtcctatcgtcccttttctttgctagtttgataagaaaagttgtccaacagggaaataataggaaaacaatgacaaaataaaaataattcttatttgtagagcttaaaaatcagtctctcataagctaactccattacacgctttctcatcattgcctgaatatttctctcagccaagagaaggaataaaccaacccgccaaagctgcacactcaagttttaagtgcgctggagagtgaagccaaatagaagtcattcatttaagagctgcagtaaagtggcaactgcgttttggttgttgccatggttcagatccactcaactttaaatttctagtcattctcagaataccccaaagcattctacctttagctatctcaaattcatttatttctgactattttattgctcacgtactccgtgatgggcacagtgctggacatctgggaag

SEQ ID NO: 844901 - DNA, 587 bp, Homo sapiens
tcctttcatgatttcccatagaaaatcaataacatcctttgctatccctcaaaggagcccatagagggctggcagaatagmagatatctgactctcatttaagttaacttgcagagcatggatccacattgtgtttgtcctatcgtcccttttctttgctagtttgataagaaaagttgtccaacagggaaataataggaaaacaatgacaaaataaaaataattcttatttgtagagcttaaaaatcagtctctcataagctaactccattacacgctttctcatcattgcctgaatatttctctcagccaagagaaggaataaaccaacccgccaaagctgcacactcaagttttaagtgcgctggagagtgaagccaaatagaagtcattcatttaagagctgcagtaaagtggcaactgcgttttggttgttgccatggttcagatccactcaactttaaatttctagtcattctcagaataccccaaagcattctacctttagctatctcaaattcatttatttctgactattttattgctcacgtactccgtgatgggcacagtgctggacatctgggaag

SEQ ID NO: 844902 - DNA, 559 bp, Homo sapiens
agccagtcacccaacccctgtgagcagaactgcacagaccactgaagaaggtcaccatgagaagagctctgtaatgtctgtatgtaacttatgtagggagtaatctgaatgtggcactctgtaattttctctgtctccttggaatctaccatttctctctgtagttctttcaaggtacagtctgatgcaaagagaagagccatccctgatttgagcaaatcctaagactaaccccatgaactctgttcctcttcttacacacttagccttttgaaagtgaagccttctatgagacagagaagcccaggatacatcttcctgcttgaatgattttttaaaaggcagaaaaatgggtaggggagacacaaggaataaaaactctccttcaatcacatatgcctatgtagattattctggttatgagatcacayttttcacgaaaatctcagaggacttggtgtcctctaaaaggttaagaacccctgattgagagagatctttagcaatggaaataaaaattctgcttcttcagaataaagtggatgtgcatatgtcatct

SEQ ID NO: 844903 - DNA, 549 bp, Homo sapiens
ctgaataacaacaagatttaaattagcacccattaaataactaaatcaaagccaattagagccccttctggaaaactgcatgggtgacgggaatggccggccattttggtagtttgttagagtggctgtgttgataaataagaacgctttctcacctttaggcagttattactaaatcgctcattctcaaaccctttcttccaaattatcaaagtctttctttaagaccagaaaaggtattttttgtccataattattcatctcagaattgtcattgaggccatgtgaacaaagtcctcttgctccaggcaattcagagagactgtagaatcctccactaaaatggtatttgcacttatcctagcaaaaggaagatatgagttttttcactattgctataaggcaggttaaagccatgcagtctgtttatcaggttgtagaaytgttctaatcctggaattgtgtaccttaacctatgctttacagttttgtataaagttggccaagaggtgggatgtttttcagaaaaaaaaaaaaaaggtattgaat

SEQ ID NO: 844904 - DNA, 610 bp, Homo sapiens
ttacttaaaatatgtactttttaaagaatagtgctgttgcacatttaatagattacagtacagtgtaaaaataacttttatatgcactgagaatctaaaaaatttgtgtgatgcactttattgccatattcattttattgtagtagataatgtaaagtggaacctacactatctcaaaagtgtgcttgtaatagtaataatgtactggataattatagctagtggatcagtgtaattaatgacaacaatgtcagaggtatggaaggaagaaagtgggaatactctgatacaagacatttgcacaatacaggaagttgtacactgttatttgaaggtgggcttaggttaaaaatctaagatttacagactttctgttcagccctgacatttaaagagcttggaagttatcattaccatccttacaactagaaaatacttgaaaaactgaaaattaaggactttttcagaccaatcagagcactgagattgcagggcaaaatgycatcctgaatagtggagagacaggaaaatacagagaaacacagacaagatcagtaattgatatatcaagtagacagaaaatcaattaagatataggtgacctgaagaa

SEQ ID NO: 844905 - DNA, 604 bp, Homo sapiens
caaaggagaaagagggtataactatgcaaaaatgctgaaaagacatcaagaataaggctcagaaggacaaagggattgattgttaacatactgatctgtagccatgtctccacatagatgcctctaaagacaattcaaacccatgctgtctgtaaacaccctgagtctcctctccttaaaggcaagaacaaaccatgaatatccatggttatctctcatttttattgccctggaaacactggtcacttagattagacacaaaaaagaactccaatacatggaatgaaaaagataaaattatcagtattttacaagatgtaattatatatttgaaaatatccaaataattaactaaaaatacttagaaaatgtgatttttcagaatacattggacaaagtccagaaaacaactgcttagaaaaacaaggtggttagttggcatgtcaattttataaaacctctcaaaaggataattggcaatgttgtcctaaatttaaaatgaaccacagtctgtctcattsattcccagtgtggaaatttaacatgtagatatgatcacttccctgcaaaaccaacgtacaagaatgactttgtaagagtaagt

SEQ ID NO: 844906 - DNA, 465 bp, Homo sapiens
cagatatttattttacaaaaattttctcccaatattgagattgcttatttatattcttaatggagcctcttaatttttaaattctgtgagtacattgtaggtgtacatattatggggtacatgtactattttgatacaggcatgcaatgtgaaataaacacatcatgaagaatggggtatccatcctattgagcatgtatctattaagtttaaacattccaattactctctttattttaaaatacatagttattattaactatagtcactccattgtgctatcaatagtaggttgtcttcattctttctaactttttgtacccattagccattcacacctcctgcccagccccctactattcttcctagcttctggtagccattctcctactttctatgtccatkagtttaattgtttttatttgtagattcaaaaaataagtaagaaagtgtgatgtttgcctt

SEQ ID NO: 844907 - DNA, 527 bp, Homo sapiens
gctgaaagagcaaattgtgttttatcagctttgagtatgttactcaactgacttgagatctcaacataatggtgatcatgctagctttgattaaacaatcacgtgatgactattttcctatgttaatgcatattagtctgtgcatcagtctggatgctctagattatagggctgtaacaagtaacctccagagctctgtggcttaatacaacaaatgtttatttgttgcacatggtacaagccctatgtgttgggcagggggctttttttaccatagtcacttaggaatgcaagttgagggacacttcttcttgaagtgcacttccataattatcaaggcagaaaaaagggacatggtatattgtgcattttatgttaaaacttctataagagaggtcacaggttccttctgctcacattttgccaaccaaatataggtcattcttagattctggagaatayggcaagtgtaatctaaccataatttttgaagaaacacaatgtttgttaacaaccttctttttttt

SEQ ID NO: 844908 - DNA, 499 bp, Homo sapiens
tcatatgctgataggagaattgtggagtgattcasaggagatcaaactaataagtggcccagcctatatgcccttatgatctgggtgtggtgagataatggaaacctaggtagaaagaaaactccaaacgtcttatcgtgtttcctctttgaatttccttagattagaataattgtgtgccattgttaggcagagaaaaggcctaaggtaagacttctgactctccaagatcttctggtagcatggagaggagctacaaaaactttaagcctccatagctaaagatgcaatattgactggcatgtggatacaactctggaaggcccagagacctctctttttgtatctctttctaaggatcttgctaattttttcagttctctcctctgtgttgtgggagctagagtcctgcaaacagcacttcctagcctgctgtgcctgcagagttcccacttgtattccaccaatgagaagtgcttggtgaggtttgataggtgga

SEQ ID NO: 844909 - DNA, 624 bp, Homo sapiens
gaggaaggagaggcgctgtcggtggcattcatctttaccctacatggctcatgcttttttttttttttttttttttggtacacgcaaattgctcctttagaacctgaagctgaaaaaaacatttttttaaaggggtgtgctgagttttacaaaagctattgctttgcttcatgtaccatttactctcagggctgaacaacattcattaacaaatatatcctgtgccacttttcatgcagtgattttttttactagttatttcagtctgatctcctatgtcatgctggagatacatcagaaagaaacttccggtcacaaatgttgctgacctcaaataaggaattaagaaacctaaatttaaactatttggtgaatgcaaaatttgattctcaaaatgaaaggctatgtgatttttatatcagagtgatcaatatatattatcttatatttttaaaatatttattttgacatatacttatctgatccattatataactgaaaaatctcttgggacaatatatyatatattaatatttattgtaactgcaatagtaataataatagcaactaacactgagcacttaacatggaaagaacatggtattatgtacattatatgaattc

SEQ ID NO: 844910 - DNA, 532 bp, Homo sapiens
tattccatttatctatatgttttcccttatgctagcttcacacagtccttgttactgtaaatttgtaatctgttttgaaactagaaaaagtaaatccctccattttatgttttctggattggtttggctagtctgagtgccttccatttatacatgacttttagtatcagcttgccagtttctgtaaaatgatgactggaatttagatatagattgattaaatctgcagatcaatatggggattattgcaatcttaacgatattaggtcttccaatttgtgaatatggaatattgtttcatttatttaggccttcttttatttctttcagtgatattttatagtttctggtgtacaaatcatgtacttaatgggttaaatttatcataagtattttactctttgtgatagtattttaaatggattaattctctaaatctcattttggaatggtctttgttcatgtatagaaatacractgatttggtacattgatcttgatcttgtatcttgcaaacttgctaaattttata

SEQ ID NO: 844911 - DNA, 554 bp, Homo sapiens
cataggttaatataaagatcaatggctatgttatgctgatattgaattgggaagccaaaacttaggttttgaatccaagccttgcctgggtcccttsagttacacacctaagctctttgaacaataatttattgaactgggctatgacttggtttgggttgacccagaagctgcccttgaggtaagaatttgagtacaagtagagaagggagcccaggaaaccctggcagggaaggggattgaggaagcaaggcagcaaagggagagcagctggtaggagatgtattatcagggttaccaatgcaggcacctggagcttaatcccactgaggaagcctgggagtacggcagaccagatgcctcagagatatcctgtgtgtgagagtagggagctggggtgtttatacacccactgccatcagtctttggttcagggctgctcccaggagacgttacttgcctggaatgtccagccagcctatggcagaggaggctcctgcagccagcgaaagtctttaggcaaagatatgccagtgatgtgcatggaaatggta

SEQ ID NO: 844912 - DNA, 532 bp, Homo sapiens
gccagtaagagcacacttataatatccattatttttaagacatagtttcagcaatrcaaacccatttttgacattgaatgtgctaccatatttctgttaatcaccgatagaaataaggggctggcttgaagtagccatgtctagagtaaagcccttcctgaaacgtgctggttgagaacatttgactgtgttttctggattagcaaatggatattgccttcaattaggcaacacacacagtaacatgtgatatactgaagcatttttatgggcaatcactggcttataactgtgacatttttggcatcttgacaaaggtggctttaggttctttatatctgaggttgccaacttagtcgacttgggaggcaagcccttattggtttccaggtttgtcttctaagtcagtctttagagaaagcccagatctgccaccttgtcaaggtgtgggtaggatctggctgtgtctgtagtatgagatgcttataaacatgagacaagactaagagaaccaaacatgagtgatggaaaa

SEQ ID NO: 844913 - DNA, 615 bp, Homo sapiens
aatggccaggctgagagtgaaatcaagaacacaatcctacttacaacagccacaaagaaaatgaaatatctaagaatacaggtaaccaaggaagtgaaggatctctaggagaactacaaaacactgctgaaagaaatcagagacaacacaaataaatggaaaaacattgtatgctcacggataggaagaatcaatataattaaaatgtatatactctccgaagcaatttacagattccatactattcctataaaattgccaatgacattcttcacggaactagaaaaaactattctaaaatttatatggaaccaaaaagagcccaaatagccaaagcaatcctaagcaaaaagaacaaagccagaggcagtgcactacctgacttcaaactataagactatagtaaccagaatgctgttcttgtactggtacaacaacagacacatagaccaatggaacagaataggaaactcagaaataaacctgcacacctacaaccakctaatcttcgacaaggccaacaaaaacaagcaatgggtaaaggacaccctatttaataaatggtactggcataactgactagccatattaagaagattgaaagtggatccttat

SEQ ID NO: 844914 - DNA, 666 bp, Homo sapiens
aacatttctgttttataaaaatctccaaaccttctctttgttcttctgacataccaaagacaacctggtctgtgtgtaagccctgaattgcaattcttgattsccaaataaaatatttaaactttagagattcatctctatatgttgactttgacaccatcaatccacctgtgcattaatttattaaataaatatctatagagcactaggtaccaggtactttctagccttggaacctttgcacttaccatccctctggctggaacagcattccctaaatcttgtctggtctcagctcaactattaccccctgagaaaggccttccttcatccccttatttaaaatagcccacacgtggtcactttccattgcattatcctgttttgttttccttacagcactaatcacatgaaatgagagtcttcgtttgcttatcagttaattgcctgtggggaccccactaggacataatctccctgatagcggggccagcctccttccctgcgtcatccacggcgttctagcaactcagggagcccagagcatgctgccgccccgcgtgcaagggagcctaagttccaaaccgagcacgcgcagagggcgggacgctccgggcctccaggtctcgcaggccccgccccctcgccgcgggttcgctgttgggc

SEQ ID NO: 844915 - DNA, 464 bp, Homo sapiens
agtggaggctgaggcaggagaatcgcttgaacccgggaggcagaggttgcagtgagccaggatcgcgccattgcactccagcctgagcgacaagagcgagactccgtctcaaaaaaaaaraaagaaagaaagaaagaaaggacaggcgtggtggctcacacctgtaatcccagcacttcgggaggccgaggcaggaagatggcttgataccaggagtctgagaccagcctggacaacagagcgagacctcatctctacagaaaaaaaattttataaattaatttaaaaaaaagaaaaagtacagctctcggttttgcaaggctcagagtcactgtgttcccacttttcactccatccacacggcggccctcggcctgccattcgctgctttggcgcgacctgtctgtcatagttacacatctgtcgggattcctcccccaggaacatgagcaccttgaggctca

SEQ ID NO: 844916 - DNA, 613 bp, Homo sapiens
cttttccgactttatgtgtttttgtatgctttgtcaaagatcagttgtctttaaatatttggatttatttctgtgttttctattatattccgttagtctatatacctatctttttattggtaacatgctgttttggtagctatagtctggtaatatagcaagaaatcaggtaaagtgatgcctccagatttgttctttttgcttagtaatgctttggctatgtgggctctgttttggtgccatatgaattttagaatagttttttttcctagttctgtgaagaataatgatggtattttgataggaattgtactgaatttgtagaatgcttttggcagcatggtcattgtcacaatattgattctacctgtccatgatcatgggatgtgttcccatttgttgtggacatctatgatttcttttagtagtgttttgtagttttcctagtagacagatttcaccttcttggttaagtatatttctaagtaatttatacttttttccagtcgttgaaaaaaagattgagttcttaatgtaattctcagtttggttgttgttggtgtatagcactgytactaatttgtctacattgactttgtaccatgaaatttta

SEQ ID NO: 844917 - DNA, 584 bp, Homo sapiens
ccaaatgtacctgaagctttgattgttttcccaggaatatgggtttgacaagccaaatattgtttataactattttagtagtttataagtcaccacacaaacatatttaatttggatcattttatcttttccattacaagtcgtaaaatgcagaacttttaataatgaaagccttaaggactctggaaggataaggtggctgtcttggttctccacgagtccatgcttaaaaatggacttatgtcctcttgaataccagttgtttctccaatttaggtgcatagcactgataactgatgggttatcataggtaatttggcttagatcatggagtttattcaaattgtatatctaaacaattttagtattggctgatttagcatgcggatttctctttttttttcttatactgtaagttctgggatacatgtgcagaacatgcaggttcgttacataggtatacatgtgccatggtggtttgctgcacccatcaacccgtcatctacattaggaatttctcctaatgctatccctccccsagcctcctaccccttgacaggccccaatgtgtgatgttcccctcc

SEQ ID NO: 844918 - DNA, 612 bp, Homo sapiens
tgaaactgtgactgcagctgtcccctccctccaggtgttctgtcccagggagaagatgagtgttctgtctacaagcccctgactggagctgctgtatttcctgcaaagatgccttkcccagtgaggaggaatctagagaagcaccctggccacagtcgctttgctgcaccttggtgaattccgtctagtccaaacctcccagtctccttagggctgttaggggaaaaccgctttctaaagccacagtaatggcagctgcccctccatgaaccaaactgatcatcccaaagcagactccagactgttgtaatggcagtgagaatttaaagccagtggtttttagcttgctgggctccatggaagtgggacctgctgagcgagaccacttggctccctggcttcagccccctttccagggcagtggatggttctcctgtctcactggcattccacacactgctggagtatgaacaaactcctgcagctcagttcctgctcaaacagccgccaagttttgtgcctgaaacccagggccctgatagtgtaggctcaggagggaatctcctgatctgtggattgcaaaaaatccgtgggaaaagtgtagtaccccgg

SEQ ID NO: 844919 - DNA, 612 bp, Homo sapiens
tgaaactgtgactgcagctgtcccctccctccaggtgttctgtcccagggagaagatgagtgttctgtctacaagcccctgactggagctgctgtatttcctgcaaagatgccttgcccartgaggaggaatctagagaagcaccctggccacagtcgctttgctgcaccttggtgaattccgtctagtccaaacctcccagtctccttagggctgttaggggaaaaccgctttctaaagccacagtaatggcagctgcccctccatgaaccaaactgatcatcccaaagcagactccagactgttgtaatggcagtgagaatttaaagccagtggtttttagcttgctgggctccatggaagtgggacctgctgagcgagaccacttggctccctggcttcagccccctttccagggcagtggatggttctcctgtctcactggcattccacacactgctggagtatgaacaaactcctgcagctcagttcctgctcaaacagccgccaagttttgtgcctgaaacccagggccctgatagtgtaggctcaggagggaatctcctgatctgtggattgcaaaaaatccgtgggaaaagtgtagtaccccgg

SEQ ID NO: 844920 - DNA, 546 bp, Homo sapiens
tctataacatacaagttcaggtgaagcaaaaagtgcagaygtagaagctgcagcaagttatccagaagatctagctaagattatggatgaaggtggctacactaaacaacagatttttcttttcttttcttttttttttttttgagatggagtttcacttttgttgcccaggctggagtgcaatggcgtgatcttggctcaccgcaacctccgcctcccgggttcaagccattctcctgccttagcctcccaagtagctgggattataggcatgcgccaccatgcccagctaattttgtatttttagtagagacggggtttctccatgttggtcaggctggtctcgaactcccaacctcaggtgatctgcccgccttggcctcccaaactgctgggattacaggcgtgagccaccgcgcccggcctcttattccttttttttttcagatggagttccactcttggtgcaatggtgcgatctcggctcacttcaaactccacctcctgggttcaagtgattcttctgcctcagtcccccaagtagct

SEQ ID NO: 844921 - DNA, 546 bp, Homo sapiens
tctataacatacaagttcaggtgaagcaaaaagtgcagatgtagaagctgcagcaagttatccagaagatctagctaagattatggatgaaggtggctacactaaacaacagatttttcttttcttttcttttttttttttttgagatggagtttcacttttgttgcccaggctggagtgcaatggcgtgatcttggctcaccgcaacctccgcctcccgggttcaagccattctcctgccttagcctcccaagtagctgggattataggcatgcgccaccatgcccagctaattttgtatttttagtagagacggggtttctccatgttggtcaggctggtctcgaactcccaacctcaggtgatctgcccgccttggcctcccaaactgctgggattacaggcgtgagccaccgcgcccggcctcttattccttttttttttcagatggagttycactcttggtgcaatggtgcgatctcggctcacttcaaactccacctcctgggttcaagtgattcttctgcctcagtcccccaagtagct

SEQ ID NO: 844922 - DNA, 627 bp, Homo sapiens
ggctcattgcatgctttataccagtccttgttgcagcccactgaacctttctctatgctttggtgtcaatatccatcttccaaacccagagctatccagaatagtgccacaaattaccattttaaacatgcgatgtccttcagtttacatttgcagattttggtgaaatagcatcttccagtgaagtccactgcgctggagagagaaaggtataaaaagacagtcagatgtactttacaaaaaatttaattgtggcaaaaaattaacaaaatttaccaacttaacaagttttatgtgtgcagagcagatgtgttaaatataatcacattgctgtgtaatgaatctcctgggttcaagtgaccctcctaccagagtttcctgagtaggtggaactataggcgccctataccacattttgtttatctgttcatctgtagaatcaatggacatttggattgcttccacctcttggctattgtgaataatgctgttaatgaacatgggtgtgcaaatatctcttccaagatccagttttgaattmttttggatatgtacccagaactgctggatcagatagtaattctacgcttgatttagcacaaattttgtcaatccaaagagctgaaa

SEQ ID NO: 844923 - DNA, 502 bp, Homo sapiens
aagttgaaactgaaaatgcctcctcatcctctcattgaggatcccatcagttttgggrtctgcctttgaaatcacacatttgggtaccattctgtaagaatcaatttaattttcagggggaaaaaagtgttctggagctggaagtttagaacgcaagtaagtcgttaatacgacttactctattttgtttgtagtgagaaagttaaatggtgcttatagaattaccttgcctctattggcagagagtaaaaataaactgagctctcaatatacaaagacttccccagttcttttcctttcgctcatatcaatgcctgtctttaaagaaaaaaagagggttatttttctctcctccatcagtgggattctctgtattttaaatatcttttttaagactaatgtcaggtgactcaaattccactgaagtctctctttttagttgtctttctgccgctgcagacttctcttgacatgagactctgtgctgcttctcttgacagac

SEQ ID NO: 844924 - DNA, 632 bp, Homo sapiens
ggcctgtctcgtcaggttggtgtcagcccagctaggattaagcagaatggggtkgggggttgtagtgcacttttgacacagcgtgtacctggctgactacttctctgtcttttttttcctattgcaattcatgagtctcagcatcttctgaatggtgtttagtaggtcatcatgttgagttcctgctctagggagtagcatactctggctctgtatcattggcaaagggatttaaggttagatgataggctgcagttttgttaaatggaacaatatgaagagatggcattataaagaggcttggcagcagggcccatttgaatggttggttcttgattcccatgttgatataggcagatccttgacaggaattttgaatggtcccaaatgtggtaaatcgctggtacatcaagtcatcctcaaagttgtctgtgtaactgtgttgaatgcagttttgtgaatctctggtgattgtctgtatagggcttcatcatttagttattttagttgagcctgtttaacttcttcaagaagataagatatgtgaaagagatgcagacagtagggaaaaagctaggagctttgctcccccatcctctacttgggttctggaactggactcataggtgagt

SEQ ID NO: 844925 - DNA, 332 bp, Homo sapiens
tcgcatgtattactttggtaaaaaaataaatgtatgaatgggatttcagtraacagggttttatcgtgggtttttttttttttttttgtcttctgaaaacatgacgtcaaattgttggatattttcctacagttggtttagtccccaagaaggttttagtaaaagagcatgaatacagagcgtaactgaatcatttaccttgttcctaaggtaaatgacataaggaatacaagtatttccttttgattgggcaattaagactttttttttttcctataaaggttctcctgatagtgccacttgattactgattttgaaaagcctcttggtat

SEQ ID NO: 844926 - DNA, 513 bp, Homo sapiens
tccctagatttgtttttgccatctccaaattaaaaatagagtctagaaaaacagggtagagaatgcagaagtacagccgaatacacaaaggcatttggcatagagtaaaccatggtatttcaaattggtgggatgggagagaggaatggatttttcaataactggttttgagacaactgggtagccatttgggaaaaaattaaattggatccctgtcttcctccttatatggaagtaaattttatattgattaaaatatacatgtacaaaatgaaaccataaaaatattaaaagaaaatatagaggtatatatttttaaaccatggaatataatgtaagcctgactgaaaattcaggagctatgtaagaaaagattgacaaattttaaaagttctacatggttaaaaataatatcataaaaccaaaagatgractgggaaaaatatttgcaacacatgagaaggggctaatttcctttataaagtgttcacacagtcaacaaaaagtcaaaaa

SEQ ID NO: 844927 - DNA, 547 bp, Homo sapiens
gtttccttttttaatttttaaaggaataactcttgcttatttttttaaaaaagtaaatactcrttataaaaaattcaagcaaaactgaaaagtaaaaagaagccagcaataaattgttccaaatcccatcacccaaaaaacagctcttgattcattcattcaatgtgcctttattgagtgcttactctatgtgaggcactgtggcatcggggatcagcagggaacaaagtgaagtccctaccatcatggaacttacactctagtgggaggagaaaatgataaacacctaaatagatttacaagtggcatgaagaaaaattaaaatgaggtaagagcatagagagtgtcggggcactttcagatggagtggtcacaaaggctgctgtgagcagagagctcaatgaagtgagagagctaaccacgtgactgtggggaagtgtgcttctagcgaagggaagcatatgcaaaggccctgaggtgggtgtttgcttgccatgttctatgaccagagaggccagtgtagctgggggccagtgagtaagggtga

SEQ ID NO: 844928 - DNA, 601 bp, Homo sapiens
tgatgggtttccttttttaatttttaaaggaataactcttgcttatttttttaaaaaagtaaatactcgttataaaaaattcaagcaaaactgwaaagtaaaaagaagccagcaataaattgttccaaatcccatcacccaaaaaacagctcttgattcattcattcaatgtgcctttattgagtgcttactctatgtgaggcactgtggcatcggggatcagcagggaacaaagtgaagtccctaccatcatggaacttacactctagtgggaggagaaaatgataaacacctaaatagatttacaagtggcatgaagaaaaattaaaatgaggtaagagcatagagagtgtcggggcactttcagatggagtggtcacaaaggctgctgtgagcagagagctcaatgaagtgagagagctaaccacgtgactgtggggaagtgtgcttctagcgaagggaagcatatgcaaaggccctgaggtgggtgtttgcttgccatgttctatgaccagagaggccagtgtagctgggggccagtgagtaagggtgaactgggccatgtaaggttttggaaagccgttagcttttctccactggg

SEQ ID NO: 844929 - DNA, 576 bp, Homo sapiens
ttgcttgccatgttctatgaccagagaggccagtgtagctgggggccagtgagtaagggtgaactgggccatgtaaggttttggaaagccgttascttttctccactgggaagccattgaaagatgatgagcagggctgcagtgtggagagtagactgcagggaagcaagggaggaggcagcaagaccagttaggagctaccacagcaattcagaacaaaatgaggctgagttgcactgttcaaaaggtggaagggataggaagggttgaattctagactcattttgaaggtagagctgataggatttgctcatgaattggattgggaatttgtaagagaagagtcaataataactctgaagatttgtggcctggcaggtgaatggtggtaccgttactggggtagggaacgtgctggggtgtggtcaggatggggtgtcaagagttcaggttcaggcatgttaagttctaggtacctgttagatggctatgagggaatggtaagtcagttggaggctggagttgactgagagatctagactgtagatacagatttgggaatcaccagacatagaa

SEQ ID NO: 844930 - DNA, 602 bp, Homo sapiens
tctatgaccagagaggccagtgtagctgggggccagtgagtaagggtgaactgggccatgtaaggttttggaaagccgttagcttttctccactgggaagccattgaaagatgatgagcagggctgcagtgtggagagtagactgcagggaagcaagggaggaggcagcaagaccagttaggagctaccacagcaattcagaacaaaatgaggctgagttgcactgttcaaaaggtggaagggataggaagggttgaattctagactcattttgaaggtagagctgataggatttgctcatgaattggattgggaatttgtaagagaagagtcaataataactctgaagatttgtggcctggcaggtgaatggtggtaccgttactggggtagggaacgtgctggggtgtggtcaggatggggtgtcaagagttcaggttcaggcatgttaagttctaggtacctgttagatggctatgaggraatggtaagtcagttggaggctggagttgactgagagatctagactgtagatacagatttgggaatcaccagacatagaatggaatgggatctgataggaagcaaggagagatagaaaa

SEQ ID NO: 844931 - DNA, 548 bp, Homo sapiens
tctggtgagggccttcttgctgatgsgaactctccacagagtcccaaggtggcgtaggatatcacatagagagggagctgagtgtgtaaacttgccagctcgggtccctcttcctcttcttaaaaagccactagtttcactgccaagataacccattaatctattaatccattcatgatgacatgccttcatgatccagtcacctcttgaaggccccaccatggggattaagtttcaacatgagttttggaggggacattcaaacaatagcaagaggggtgatcggattacacaagtacagtgatagggtcatagtagagagatatcgaaggctctgtggataaggaatagtctaacagtgagtaatgctgatgagactggttgatagaggaagatgatgatgttacctagtatttacagggcacaaggcagtcaaagtgccttgccatactttatctcatttaacctcagaattgtacaacacagggcaggatgatatccggcctttttttttttcttttttttaatattttattttgagataatta

SEQ ID NO: 844932 - DNA, 528 bp, Homo sapiens
ttagtctattctcacactgctataaagaaatacctggctgggtgcrgtggctcacgcctgtaatgccagcactttgggaggccaaggcgggcggatcacgaggtcaggagatcaagaccatcctcgctaacacagtgaaaccccgtctctactaaaaatacaaaaaaaaattagccgggcgtggtggcacgcgcctgtaatcccagctactcgggaggctgaggcgggagaatggcgtgaacctgggaggcggagcttgcagtgagccgagatcgtgccactgcactccagcctgggtgacagagtgagactctgtctcaaaaaaaaaaaaaaaaaaaaaaaaaaaaacctgagactgggtaatttataaagaaaggaggcctaattggttcactgttctataggctgtgcaggaagcatagtggcttctggggaggcctcaggaaacttacaatcatggcagaaggggatgtgagatgtcttacatggtggagcaggagcaagagagagagcagggaggtgccacac

SEQ ID NO: 844933 - DNA, 604 bp, Homo sapiens
tggtgaaatcatctctactaaaaatacaaaaattacgtgggtatggcggcacgcgcctgtagttccagctactgaggtggctgaggcgcgaaaattgattgggcccaggaggtccaggctacagtgagccaagatggcgccactgcaatccagcctggggaacagagagtgactcagggaaaaaaaacgaacaaacaaaaaaccaaggagatgtggagagagtttgccatctttggcaaaaagtgaagatcactaatttggtgatcttaatttgatctctaaatgttgttttgctttgaaaaatagctgaacacatagcaatgttcagtttaaaaatcataattaatgaaattatgtatcttttctcagacccagatcacagaatcactgggaggagattaaatattgggatagagcagagtaaaaagaaccatgaaggaaaatcatctttaacttgaaactaaatttggtaacatytaatatcaaacgggattcttatagcatgtggaattgtttagtcactaccataatcatttcaaaaccagattttctgctttactgctatagtagttcttgcctagcaaatgaggagcaggtcttgagt

SEQ ID NO: 844934 - DNA, 626 bp, Homo sapiens
cagaagtaaaatatattgtgagcatatatcatcagcatctttctgctcttaaatagtaagtgatatttctgacttgaattcaataaccttcaaggtatccatgagaattaagacagaaagaggttgaggcaatggatataagccatacagcaaactcctcatgggagcatgaactcagctcagtttttctgacacccagccgcctcctctcatggctatgtagtgagtgacattgtatgcaagagtgaggcattggcttcaaggaggaccatgtgcattaaatattagctgtgtggcctttgccacagtctccctgggcttcagtctcaccatctgcaaatgataacagtacctatcttggagggttattatgagaatttagatgaggtaacacgtgtaatgttcttaccctagtgcctggcaggtaattaaggatgccacttaacaaatgacagtgattatcagatgagacatccatctgcttagctgacatctccacttgaacctcaatcttagcctgtccaaaagtgarctcttcattttctccatcaaatgtgttcccccagtcttccttctttcaataagcagcaactccattctttcttttgttcaggtcagaaattgtg

SEQ ID NO: 844935 - DNA, 501 bp, Homo sapiens
gtggtgcacacctatagttttagctactcagggggctgagctgggaggatcccttgaggccaggagttccgtgctgcagygaattatgattgcaccactacacaggctgggtgacaaagtgagcccctgtctcttaaagaacaaaaacaaaactcaaagtggattcaagacttaagacctgaaactataaaactgaactgaactacctgaaactgtaaaactagtaaaaataaaacagggaaaagtttcttgacattgctctgggcaatgatttttttttatatgacctcaaaagcacaggcaacaaaagtgaaaatagacaaatgggattgcatcaaactaaaatgcttctgatacagcaaaggaaacaatccacagagtgaaaagacaacctaaagaatgggagaaaatatctgcaaaccacacatctaataaggagttaatatccaaaacatataaggaattcaaaaaactcaacagcaagaaaacaatctgattaaa

SEQ ID NO: 844936 - DNA, 609 bp, Homo sapiens
ccacttgtaagtgtgaacatattgtatttggttttctgttcctgtgttaatttcacttgggataatggcctccagctgcctccatgttgctgcaaagggcattatttcattctttttaatggctgcatagtattccatggtgtatgtgtactatattttctttatccagtccattgtttatggacaccgaggttgattccatgtctgttgtgaatagtgctgtgatgaacatacaagggcatgtgtcttttctttttctgtgtgtgtatttatttatttatttaattttatttttttgagacagagtcttgctctgtcacccaggctggagagcggtggcacaatgtcggctcacttcaacctccacttcctggggtcaagcgcttctcctgcgtcagcctcctgagtagccgggattacaggcatgcaccaccatgcttggctaatttcatttgtatttttagtagagacggggtttcttcatgttggtcaggctgatctcgaactcccgacctcaagtgatccacccgccttggcctcccagagtgctgggattacaggcgtgagccactgcrtccagtgtgtgtatttatttttaagcaggcatat

SEQ ID NO: 844937 - DNA, 592 bp, Homo sapiens
gcgtccagcacactcacggccagggccgcacgcaggcctgtgttgtccgcttcctgggacggtcccctgcgtccagcacactcacggccagggccgcacgcaggsctgtgttgtccgcttcctgggacggtcccctgcgtccagcacactcacggccagggccgcacgcagggctgtgttgtccgcttcctgggacggtcccctgcgtccagcacactcacggccagggccgcacgcagggctgtgttgtccgcttcctgggacggtcccctgcgtccagcacactcaaggccagggccgcacgcaggcctgtgttgtctgcttcctgggacggtcctgtctgggaaacccggacagtcgttcctgtctcttcagtcttggttttctgttagtatgacaccaatctcctacgttgagttgcctcctgtaattccctgcaggatctgtaatcacatggcgtctggtttgggtgccggccacacgtccgctcacacgtgctgtctccgactccccccagccccatgtgcagctccctcatggcatctttttgggagggccattttccacgtcatttataccatctgggtgcttt

SEQ ID NO: 844938 - DNA, 650 bp, Homo sapiens
aggaaccttccagcttgaggagccggacaagacgtggcagctgggattgggaygcagactgtcctgcagggagaggcgctgctgggaccgggtcctacgggggagggcctggggaggggccattcatcatggcccggtctcaatggcatcctgcttctggaggggatgcccttgtctgtaggaaacacgtgcagaatgttccgggtggaggaaagtcaggttagcaactttcaggtgattcaggaaaaaattgtgcgtactcttcttccaacttctgagcctttaaaaagaatttaatgctgcctctggctttaaaaagctttgcatagatcagacccccacaagtccccgcgctgctcccggctttgctttctctggacttgagtcccctgcgcatctgtgtgtagatgttaacccggcgccaactcacagctctccttccgcagaacaatcgagctttccaggaaagcagcgaggcaccctctctgctgtggcagatgcagcaggtgcaggtgcggggaggacagaggcctggcctcctcacggccctgccttccacgtggggtttcctgcccttaccaccccagcccacctcccgatgaattccttgtacagttaaagtgatcttcccttctttcctcaagggacga

SEQ ID NO: 844939 - DNA, 468 bp, Homo sapiens
ataaaaaggaacgaactactgatatgctccaccaggtagctgaatctcagaggagctacgctgactggaagaggccggacacagaagcctatgcattctgattccgcctgatggaagttcatgggtgggtagaagcagggtgtggggctccggtgaggagactgtcgggaaggggcgccagggccctctggggtgatgaaaatgttctgttttgatcatcatgggtgtcacacaggcgcgtgccaatgtgaaacactaagctgacaggtaatatctgtgcatttgagccagtgtaagggcacctcagttaagcaaccgggaaaggcttgggccccacccaggtgggtcacctggccccgcactagggatctgrcaccaaaggactcgtggcatgtaatggccccgatggtgggccgagtgccccgacggggggccgagtgttccgacggggggccgagtgccccgacg

SEQ ID NO: 844940 - DNA, 352 bp, Homo sapiens
acatttgcaagtacatattctggcaatggaagacctatttctgttaaataaccaggtgagttatttctgttaaaataataactaacttttttctattgaaaaaaataggcatataaaaattggcatttaagtttttaagaagtaatgtagtttttgctttctctgtaatttaattaataattaattatatcaaaatgaaaatgaacactgaagatctactaacaagtacactcttaaaamtctctaaaaggatgagtgctaaattaaattttcccatttttgctgccctttttttttttttttttttttgttttaaccctgaagaagttttggtaaggaaattgcaatatca

SEQ ID NO: 844941 - DNA, 622 bp, Homo sapiens
ctcagagcgccggtcataagtcagcattttcctattcgaattcaaagaaaaaaaccacacccaaatactgttatggaagccatctttctcacaaattaagtcagaattaaacaataataaaacaatgaaaaaactacaaaagacaatttcaaaacagaattactatttctttgagaataatatatatacattttgcttagttgacaccaagtgtagatatcctacaagagtttaaaaattactctgtaaatcactgttacctggaaaataatgagttggcagatatcaactagcttaagatgtattttaggtgggagtggtggctcatgcctgtaattccagcactttgggaggccaaggatcacctgagcccaggagtttgagaccagcttgggcaacatagcgagacccccatctccacaaaaaaattagccaccataatggtgcacacctgttatcccagctacttgggaggctgatgtgggaggttcgcttgagcctgggaggtcaaggctgcagtgagctgtgattgcaccactgctttccagtctgggcgacagagtgagaccctgcctccaggggcaggaaaaaratgtattttatcccctaagaatgagaacta

SEQ ID NO: 844942 - DNA, 523 bp, Homo sapiens
catattcagtattgccaaagtatgtcaattttgtctttccaaaggatacacttccagctttgttgattctcttcrttgtttcatattttcatattttgttaattttagctcagatctttatatttttttcaaacttttaaataaacgagatttagctcatgtattttcattattattttctaatatacacattcagtataactttttcccatgaagtacaatgttagaggcattgcacaagttttgtatccattttaattatcttttatctaagtattttgtaagtggtttgagtttatttagaagcaagtgttttagtgcatagtttcaaattttcatttttaagttattttttagtgattgctttttaataaaaggtaatgctggttagaagatagcttatgttttatgacatttatttaatatttattgaaacttgcttcatggcctatcacattatcaattattggaaatctctcacatgggcttaacagaaaggtgtgttctctccaattgtcaagta

SEQ ID NO: 844943 - DNA, 611 bp, Homo sapiens
acttccaagatttcaacttgatttgtatccatttatgcaaaactagtgtgatctttttcaaatcgttcactcgacatgtagaaatgctactaatttttgtatgttaattttgtatcctgcaactttactgaatttgtttattaattataatagtttttgatagagtctttaggttgtttcatatataagaatttaaataactaataccaaccctactcaaactgttcaaaactatcaaggagaaggaaatacttctgaactcatttctgggagtattaccctaattagtattaccctaatatggaaaccaaataatgacttagcacaaaaggaaactatagaccaatatctctgatgaacatagatgtaaaaatcctcaacaaaatattcgcaaaccaagttcaagaacacattaaaaagactgttcaacttaatcacatgggattcatcccagggatgcaagtatgtctcaacatatgcaaatcaataaatatratacatcacatcaacagaataaaggaatagacatgtatgataatttcaatagatgccaaaaaaaaacatttgagaacattcaacattcctacataataaaatctctcaacaaacta

SEQ ID NO: 844944 - DNA, 564 bp, Homo sapiens
cttaactcttgtaagcagtgctgcaataaacatggcagtacagctatctctgtaatatactgattttctttctttggggtacatacccagaactgggattgctggatcatatggtagttcaatttttagtttttgagaaacctccaaactcttctccatagtggttgtgttaatttccattccctccaacagtgtacaaaggttctcttttctccacatccttgccagtatttgttgttgcctgtcttttggatataagctattttagctggagggtgacatatctcattgtagtttgatttacatttatctgatgatcagtgatgttgagaaccttttcatatgcctgtttgccagttgtatgttttcttttgagaaatgtctgttcaaatcttttgcctatttgttgatgggattattagattatcttctatacagttgtttgagctccttatatattcttgttattaatcctttatcagatgcatagtttcaaatattttctcccattttatggattctgttttcacttcatcgawtacattctttgctgtgtagaagctt

SEQ ID NO: 844945 - DNA, 622 bp, Homo sapiens
tgtatgttgaaataagtggagacatattcagtgtttatcaacatggcaaagatgtaaattatttaaattgtctatattgaactatagatgaaaattaaagtggcggtttaatgcaattttatcaaaatttcagcaagttttttatgtagatacaataatatcctaaagtttatgtggaaagatgaagtaaatataacagctgaaacaattctaaaactaaataagtttgcaggaatattctgcctaatttcaggacttatgatatagctacagtaatcaataatctatagtattggtacaggactaggcatatagatcaatagaacaaaatacaaaatctgaaagtagacccctgaaaatatgccaactggttttgacaagagtgaaaaatagcaatttcatagactgcctttccaacaatggtgctggaatatattgttttcatccatagattgaaaacaaaattaacctcaacctaaaccttgcaacttatataaattaaataaaagtagatcattgatttgaatgtaaaattataaaacattagatgayaaaaaaaatttaggatctggaggtgagtaaacagttcctagagttgacataaaataacattatttataaa

SEQ ID NO: 844946 - DNA, 561 bp, Homo sapiens
acaatgtgattatttgatatacatctatattgtataattattaccacaaccaaattaattaaaacgttcttttaccacccatagttaccactgcgagtgtgtatcaaggggatatctaacattttctctcttatcaaattgcaagaaaacggtgcagaattattaactatagtcaccatgttgtacattaaatctctagaacttattcatcttataactaaaagtttgtatctcgtgaccaacattttcgcatttctcacccacctaggccctggcaaaccattttcctccctgcttccataagttcagctttttaaaattccacagacaagtgaaatcatacagtgtttttctttctatgtctggcttatttcacttagcataatgtcctccaagtttgtccatgttgtcgcaagtagcaggattctcctctttttatggcttaacattccattgtatatatgtgtacaccaaatgttctttatctgtttatccattcacarataagtgttttccatatcttggtaattgtgaataatgttgcagtgatcatggggcagg

SEQ ID NO: 844947 - DNA, 633 bp, Homo sapiens
attatttacagatcctggagagaacaagacagcaacctcagggcgaatgggaagaggagagctgtctgggacataygtgctcgaccagtgggttggagactggggaagggacttgtgggccagagcctttgttgggatccagggaattacccagatgggtttcccttgaggagttgtcattggtggatttagagcaagcaggcaggagtcccaccagctaacgttatgactgagaagtggtcgttgagtcatatctgcatagtccgcctggggtgcggggtcagggtgagtcaagtgggctgtgtctatatgtcccataggaagttggctgccaggaggcagttgtgtaaggcagatacgtggattcatcacattgaggaactgggaggaggcagagaactggaaactgtttcacatgcttctggtatgagaaagtccaacttatatttaaaatggatgatgaaacataatatctatatatatttttctgagatggagtttcactcttgttgcccaggctggagtgcaatggcacgatctctgctcactgcaacctccgcctcccaggttcaagcgattttcctgcctcagcctcccgagtagctgggattacaggcatgcgccaccacaccc

SEQ ID NO: 844948 - DNA, 616 bp, Homo sapiens
ctttcttcttttctagtatatgcatttgatactacaaatttccgtataagcactgctttcaatgcatcctatacattttgataaggtgtattttcagcatcatttagttcaaaatattcttacatttctcttgagctttcttctttgacccatgtgttatttagaagtgtgtttaatctccacctattctgagattttccagttacttttgttattatttttagtttaattccattgtggtctgagagcagatggttgtatgattcctattattttaaatttgtcaagatgtgttttatggttcagattgtggtctctactggtgaatgttctatgcaagcttgagaagaatgtgcattctgctctttttaggtcaagtagtctatatagatatatgtccattatatctagttgatggtgttgttgagttcaacttcatctgtactgattttctgcctcctgaatctgtccattactgatagaggaggttgaagatccaaatctaccagtagaytcatctatttctccttgcagttctagcagtttttgccacacatatttgttgattgtctgctgttaggtgcatatgcattaaggactgttgcatctgtttgaa

SEQ ID NO: 844949 - DNA, 583 bp, Homo sapiens
gtataccattcaaccaatcttcccttggtgagaaagaaaaaaatagggtaactcccacattacataaatgcctaagaaaaaacacagccaacattccccttcataaataaacaatacatttttctaaaaagagaaaacattataaaagaaatgaaactaaggataaatgtttttaatggcaaggactttgatttttcaaattatttaaatgcactatgattatgtttgaaggttctcttagtagatgctggctcaggagttgactcacttaaaatacaactctgtaaggaaagcaccctcggcccctagggaatagggttatatgtcacttctgaccttctttaccaagataagctccaaagaacaccctatcccagcatcagtcaattgaagggaggaggtaaggtattaaaggatatttatttatgaaaagctaaaagagaggtccatggcaactaagtacacagattaaattacaaataaatctttaaccaccatttattaaacattacaastaatgtggcaatatatcaagaaatttagattttaatttaaaatgctacaagctaatattgcaattagg

SEQ ID NO: 844950 - DNA, 587 bp, Homo sapiens
ctctcaggtaagagcccactgagtcacgcagagccatctgcctgtgaggaggctagcacggcacccacacctggagcctcgggagggctctgcttgcattctctgttgcgcagtgaggatgccaagccactgcttttattaagaagtcattctgatggtaggcataggaaatagaggggcttattgagataaaaatgagatatctcaagccttgaataatcatctacctgttacagagggtaatagttgtaaaatattgttattgtcttaagatattttgaagctcctctcctcaacagaatctgcctcagaacttctatttctaatatccaatttgataatacctcaaaaagttaaacatagaattattgtatgactcagcagttctgccattaaatatatgcccaacaggattgaacactgcttttcaaacacacacatgtacatagcagcaccattcacaatagccaaaatgtagaaacaaccaaaatgtgcataaatgaatgagtggagaaacaaattgtggtgtctctgtgccctggagtattrtcagccattaaatggacgtcagtacagtcagaggctgc

SEQ ID NO: 844951 - DNA, 555 bp, Homo sapiens
gcaacgatggccaagaaccatcagaggcaagaaaaacaaaggagaattccctaaggccttcagagagaacaccgccctgctcacatctcaattttggattcatagcctccagaactgtgaaagaataaatttctattgttttaagtcactaagtttgcggtaattttttgtagcagtcctaggaatgggatacttatggtatacatgattttttattggagttacctatttttgtgtctctctcactaaagtaaccccattatggcttgttaatcattatttatccagctcctggaacagtgagtattttatattagataaaaatagatattgtttccttaattaaacaggaaaaatattgggtgcccgaaggaaaatggttcttaaaaaaaagcttttcaaaacacaaaaggaaaagcctatttttgtataacccaaatagtcrtatgaaaatttctacataattctttgacaagctatgtaacagttgttgtatgatgactcttttttttttaacaggtcagagtccaagtaactttctcacctgttatttaa

SEQ ID NO: 844952 - DNA, 460 bp, Homo sapiens
ttttctcttcttatttcacatcactgtggcatccacaccacccacccagcttacattttccacaagggccaggggyccggcacctgctgctgcatgttcggtttgccccaggctcaacagcatgcagccctgacgttcaggacgtggctctacgctctgcactgtccctctccaatctctcttgggcagtgactccaccttcatgacagcactcctcccccaggagtagactatttcagagtcatttcttcttgtctgctctcctcatttcctgctctctctgagatctgaagtgaacctgggtgaacttgaattcatcatctttcttgcatcgtcggctctgactcctaacctacagttataatctgcaagttgaagtgtctaggggtggactgcactgatgtctgcaactttgaaatgcataaaagtatcttcctccccatcccactgccaccctccg

SEQ ID NO: 844953 - DNA, 636 bp, Homo sapiens
gcattttacagaatcttcctctgcatcccacagtcactctccttttaaaaaatactgatccctgaaacactgcaatattctctggttgggcaattggtctcctgtcttcctgcatatggtgccagaatgttttctgatggatcactttcatcatgcccctgttcaaagtccatggggttccatagactgaacagcaactctagtgtggtccagagccttccacagcccacattctacttatgaacacaaaattctgttgaacagataattccatattggggttcagtaaattaaaattttactggaagattatagcttgggtataagtgatacaattgtttctccaagtctattttcataaaatgccttgagagtcagagtgctgcattggtgtccaggaagtatcactgaaagtgaagatcagtgccccaggaatgcccagccactatttttctactggcttctaaactcagttccccaaaacactgaacagcttcacttactttttcaaaggcagggaagtagcgattttttgttttctcttggatcaaggcaagcttggcatcttgttcctcaggttgastaaagggcagaagaaggatcatttcacccaaatctgctataccttctatatac

SEQ ID NO: 844954 - DNA, 551 bp, Homo sapiens
agtgagatcagaccacaaccttgtgtgtccccagcatgaggcatgacatgggctaatggccatcaaayattctgccaccaaggagcctctgctgtaatttgtatcgccccacttctcaggaaccctgctaagggtgacataggtcgccactgttgcacagctttcacacttgcaactgtaattttctcttctgaagtacgtgagacacaatagggtaaaattctcaatttaataaaggaattagggtcccacactagcattatttttaaggaaaacctctggtttctgatgtggttttgtggcattggggaatgcttgtgtgttctagaagcctcctcccctcattttaaccacgtgtttatttctctgcatcctcatagacacgtaggctgccccagggcagggactgtgtctgtcttgttcactatctccatgaccgagtacagaacctggaattaataagtgctcaagtaaataattgctgtgaatgtagtcaatctttaataggtagtttgttacaatccactcccttccatctctcatttgtagtt

SEQ ID NO: 844955 - DNA, 518 bp, Homo sapiens
catcaaatattctgccaccaaggagcctctgctgtaatttgtatckccccacttctcaggaaccctgctaagggtgacataggtcgccactgttgcacagctttcacacttgcaactgtaattttctcttctgaagtacgtgagacacaatagggtaaaattctcaatttaataaaggaattagggtcccacactagcattatttttaaggaaaacctctggtttctgatgtggttttgtggcattggggaatgcttgtgtgttctagaagcctcctcccctcattttaaccacgtgtttatttctctgcatcctcatagacacgtaggctgccccagggcagggactgtgtctgtcttgttcactatctccatgaccgagtacagaacctggaattaataagtgctcaagtaaataattgctgtgaatgtagtcaatctttaataggtagtttgttacaatccactcccttccatctctcatttgtagtttgcattttacctctaattacaatcatt

SEQ ID NO: 844956 - DNA, 518 bp, Homo sapiens
catcaaatattctgccaccaaggagcctctgctgtaatttgtatcgccccacttctcaggaaccctgctaagkgtgacataggtcgccactgttgcacagctttcacacttgcaactgtaattttctcttctgaagtacgtgagacacaatagggtaaaattctcaatttaataaaggaattagggtcccacactagcattatttttaaggaaaacctctggtttctgatgtggttttgtggcattggggaatgcttgtgtgttctagaagcctcctcccctcattttaaccacgtgtttatttctctgcatcctcatagacacgtaggctgccccagggcagggactgtgtctgtcttgttcactatctccatgaccgagtacagaacctggaattaataagtgctcaagtaaataattgctgtgaatgtagtcaatctttaataggtagtttgttacaatccactcccttccatctctcatttgtagtttgcattttacctctaattacaatcatt

SEQ ID NO: 844957 - DNA, 518 bp, Homo sapiens
catcaaatattctgccaccaaggagcctctgctgtaatttgtatcgccccacttctcaggaaccctgctaagggtgamataggtcgccactgttgcacagctttcacacttgcaactgtaattttctcttctgaagtacgtgagacacaatagggtaaaattctcaatttaataaaggaattagggtcccacactagcattatttttaaggaaaacctctggtttctgatgtggttttgtggcattggggaatgcttgtgtgttctagaagcctcctcccctcattttaaccacgtgtttatttctctgcatcctcatagacacgtaggctgccccagggcagggactgtgtctgtcttgttcactatctccatgaccgagtacagaacctggaattaataagtgctcaagtaaataattgctgtgaatgtagtcaatctttaataggtagtttgttacaatccactcccttccatctctcatttgtagtttgcattttacctctaattacaatcatt

SEQ ID NO: 844958 - DNA, 550 bp, Homo sapiens
atgaggcatgacatgggctaatggccatcaaatattctgccaccaaggagcctctgctgtaatttgtatcgccccacttctcaggaaccctgctaagggtgacataggtcgccrctgttgcacagctttcacacttgcaactgtaattttctcttctgaagtacgtgagacacaatagggtaaaattctcaatttaataaaggaattagggtcccacactagcattatttttaaggaaaacctctggtttctgatgtggttttgtggcattggggaatgcttgtgtgttctagaagcctcctcccctcattttaaccacgtgtttatttctctgcatcctcatagacacgtaggctgccccagggcagggactgtgtctgtcttgttcactatctccatgaccgagtacagaacctggaattaataagtgctcaagtaaataattgctgtgaatgtagtcaatctttaataggtagtttgttacaatccactcccttccatctctcatttgtagtttgcattttacctctaattacaatcattttttaat

SEQ ID NO: 844959 - DNA, 549 bp, Homo sapiens
cgtgaggtcacctatcaggtctagcatgttctgttggtctgctggatcctgcctcatgtatttgacaatccagaattctaaggtaaaatggcttgcatttgctgattaattatccagggatttggctaatccttyatgatgatgaactaaaagtccctaccagtcctcaattaaaaaaaatatgtaatattatttaaatagagatgagatctcgctatgttgcccaggttggttttgaactcctgagctcaagtgatcctcttgccttggcctcccacagtattaggattacaggcgtgagccatcttgcccagccgacaccagcactcaaacagtaaattcagtaaatttacagccctaaaactgtaaaggacacaatggtaggctgaggttatacaagatcagaacaactggggcattcagagaaaaagagttcagaccggatgttgggttgtacaagccaggcagtctgttgtttaattgttttatctcttggtgaccatttggcatctttttgcttagcctcaaggcatgtttagataatagcaa

SEQ ID NO: 844960 - DNA, 633 bp, Homo sapiens
ctttcctatatctaagtatgcaggcaagtcagttcatgagtgtatggacagggcactacactcagaagggctctgaacctggggtttaatgctccttgrtgactgtctggatatttttaatactttaatctttgattttgtgtcttgtaaaatccaatgggacaatggcatgtgctccaggggcttggagccttggctttccttcagtcctgccttccacttcctccaggaatgggttgtctgccactcactgccctgtttctgggtgccacaggccctacctgcttggccttcctctccttgagtcctgctgtctgtctccttccatgcctgtcagtggccttttggccccaggctgctggtgccacagcaatttggtagacaattctgcagagtctcttgccatttccaacccaggagctaagtgtgtgcaagcaggaagtttgcaatcccttggtgttgcctgcctgtcctgggttggtgctgtgggtccatgggaaggggagactgattttgtaatctccaacctgaaattttcattgttcaccagtttcagaaatgccatagctggcctgaaacagcctcaggaaacctctgcattttagagtggcagtgatgcaacaatgtgtcagc

SEQ ID NO: 844961 - DNA, 639 bp, Homo sapiens
tggtaaacattcactctgttgtcagtatttgtrtggtaaaagatcttaagttacatgctgattacaaaggaatacattatctttgaaacacttttgaaggaaacagtatggggaaaacctgggggtttagaatattcacaatttgatccagttggagctaggaactcaccaggtataattaagggaaaagtctaaccgaggaagttagggtatctgtcatctatgccaaatacataagtatcaactagataatctatgttacatgattaggctctaaaactgttgatcatgataaatatattcaaatacatgtattaaatcatttaatgagaactattgttattcaacccaaaaaggataggttaaaacagcatggcaggtgagtttgaaaaacttaactggctcttttttctttgtttttaccaagccctaacatttttcatcatcttttcctagacttactaatattataatgactgcacctggagatgaagagcattaataactaaagaaggcatccaaccctgaccaagtgcaagctttcagacagcattttacagctgttaaaaatgcagagacatgaacgctcaagtattatgtttaaaacaattttttaacttttagaatactgcttagaat

SEQ ID NO: 844962 - DNA, 615 bp, Homo sapiens
ttgttattcaacccaaaaaggataggttaaaacagcatggcaggtgagtttgaaaaacttaactggctcttttttctttgtttttaccaagccctaacatttttcatcatcttttcctagacttactaatattataatgactgcacctggagatgaagagcattaataactaaagaaggcatccaaccctgaccaagtgcaagctttcagacagcattttacagctgttaaaaatgcagagacatgaacgctcaagtattatgtttaaaacaattttttaacttttagaatactgcttagaattctaaccttacaaacagccctgaaccccaggactgtccagtgtattttagaaataatatccatcccctctcccccagctctttcattagtgtgggatttcctcccttagaatcaggtaactgaaattctatcagcaccagaaccacaaatagtgctgaaattatgcataaaataaaaaaaaatccagaagaccagggtgtgaggaaggagagcagatttgttgtctaactgcaagtgggggaagaattttgagctttcgcaaagggtttggaracctttattgataaaattctttgtctatttttagtttca

SEQ ID NO: 844963 - DNA, 630 bp, Homo sapiens
tatccatctcaaaaaggacaaattgcaaaaacataatattgattgtaaagaggaaaatacagaatagtacacaaaaggagccgtttatgtaaattatttccaaaggtccacaagtcagaggttggtgagcccacatagtaagtgcaaaaatataaagactggactgactggatagaagttgcttaagtggagatggaggtgatggttctattaaattttagacttatttgttagtattttatattttaaacaagattatattaatatattaactgtggagtttctttcttgttagagacagagtcttgctctgttgctcaggctcgagtgcagtggcacgatcataccccaatgcaacctcaaacttctaggctcaagcaatccacctgcctcagcctcctgattagccaggtctacaggcatgtgccatcatgcccagctaatttttaaaatttttatgtggagacggggtcttgctatgtttcccatgctggtctccaactcttggcctcaaggaatcctccttccttggcctcccaaagtgctgggattacaggtgcctaccaccacacacarttctgtctgtgtttttaaaaaatatatattgaaggtaaacatgacaaaatatta

SEQ ID NO: 844964 - DNA, 551 bp, Homo sapiens
ccagcaaacttgtctttatgaccaagttatgtccttgggagcttgaccttataaccatgtggccatggtttctcttttcacaatggtggcctkggttcagagttcaactcccagcttagggaataagtcctttatcttattctgtctctctgtctctctctctctctctctctatatatatatatataacatgtgatataaaagagctttaatcatttggcttaaaaataagtgctttaaatcaaatttttgtcagaagagtaaaaagtgtaatgacttttatttagttcatgtaacttaagtaatctttgggaaataaaggcagttttaaagattattggtaaaataaaaatatcttcaaaaatataaacatttggtctaaattatgcaggtcagatattaagtttgctaaatgctttaaggtcataaactgcttctttgacttttgaaaattgttcaatttacctactttggagcattagattctagataaggcctggggacatgtggaaagccatgccccctagctgtgctggaaagagtcagccctt

SEQ ID NO: 844965 - DNA, 536 bp, Homo sapiens
cttcagggatggcaaaatcaccacttaaggaagcaaaccaaaaaatcctatacttctgaaaatccataatctcacttttaaattattcatggtccaagtagaaatcataattaaatttgtaaaacagaattaaacaaaaataataatactatataacaaaattaaaggtaagcagataaagcaatatctagaagatatagcattaaaatatatacatacatatttatttgaaaaacgaatatatgttaaaaaaggaaaaactgaaaattaatgagctaagcattcactcaaaaagctacaaaaataatggcataaattcaaacaaatgaggaggaagcaaatataaagataagatcagaaattaataaaataaaaaagaatgagaggaaaagtaaatgaaaaatattaagaatagagaaacctaagtataaaaactgaagcagtttttwattttttttatatttttaaaattgtttttatagagaaggagttttaccatgttgcccagactgatctcaaactcctgagctcaagcg

SEQ ID NO: 844966 - DNA, 601 bp, Homo sapiens
catcacaacttctcctcaaaaccacaacgtactctaatccaagaataaataaaaacttagaactacaaattmgtttatttgggttttgtttttgtttgtgtttttatgacagggtctcgctctgtcacccaggctggagtccagtgccacaatcttggctcactgcaacctctacctcccggactcaagcaatcctcccacctcagcctcccgagtagctgggattatacgtgtatgccaccacacttggctgatttttgtatttttagtagagatggggtttcgctgtgttgcccaggttggtctcaaactcctgagctccagtgatctgcccacctcagcctcctaaagtgctggaattataagtgtgagccactgcacctggcctggtttgttattcctttctatttagatagtatgggtatttttgcctaaggatattgtcaatgtgacagtcacaccagattcgtcacgtcttgtcttctcttcagaagcttaaaatgcactgtgctataggggagggaatacaggagtacagaagttgtctgattatgatgataaattgttagtactgaatggtgcttattgatcatgtagtcag

SEQ ID NO: 844967 - DNA, 620 bp, Homo sapiens
tttggaagtggcagtgagagtggtttaagagatataatgttcaattaaatatttttagaaacgtgagaaaaaatgtaaaaagaataagaatgtttagtctgtgcttctatggtggtacctagattcacaaaaattttaatataaagaaataattttcctattagactgaaattattatcaatgggtttatcttaatctaaaccatatggtacccaaaaataaaatccaagtggtgaaatcatcggattgatacaaaatatggcacccagtctttctcgttctacatttatgccacttattctggtccccattttgtgttcattgagataatcttataagctttatttttatttctagaatccaaaatgatgtcatacagtaaggtcaatttttttgtacctatgatttttaaaatattatttaagctaagattgcaaaaagcacaatctagctatatttaaacaacaacaacaatacaattcagaactactaaacaacaagcaaacatatgcacacagggtatgcatayaggcttcactaaaggtaaccttagaggaaatatgagaaagttttagtagagaacaattagaagaacatggtcttttaaaaaaaaacttcta

SEQ ID NO: 844968 - DNA, 618 bp, Homo sapiens
ttttagtagacatgatatgtgcattttkctgtattgttttaagtggggtgatatgcaattgctccagttttgacattagctggttgaagtgtttaatgtaatggatttgagggaagtcagaactcttaaaatctgctatagctaagtatggtttatcaactgtacacttttgtgggtaatgcatattgatttttaattttatgataggtacaaatatactctgtaaagtctattgaataatctttaaaatattcagaagagcacttttcttggaaatttaaatgtgaattagcatttctcaaaatatagtgatgtttttcatacataagaagagtttcattatatgagaataaggtagaggtatttatctgcttctatttgattcaattttaggcttgtacctaaattcactacccttaatcaccctagttgtggatttatgccatgaaattgctgaaactaatcatttgactgatgatagtcctcagtgaaagcttagaggtatagctgacctttttcacggttatttaaaaaaatcattttgaagcactctcaaacaatatcaaatgttagttcctagaacataatatttgggatttttttaaagctacatgaata

SEQ ID NO: 844969 - DNA, 516 bp, Homo sapiens
tgcctggcttacttatttatttatttattgtaggagatgggtcttactatgttacccaggctggtctccaaactcctggatccaaacgatactcccacyttggtctcccaaagtgctggaattataggcatgagccgccgcatccagtccacacctttttttttttttcccccgagacagagtcttgctctgtcgcccaggctggagtgcagcggtacaatcttggctcactgcaacttccatctcctgggttcaagtgattcttctgcctcagcctcccgagcagctgggattataggcacccgccaccacgcctggctaatttttgtatttttagtagagacggggttttgccatgttggccgggcttgtcttgaactcttgacctcaggtgatccgcctgcctcagcgtcccaaagtgcctggattacaggcatgagccaccacgcccagccacaaattttggaatgttgtgtttttcactattttatttattttatttatttatttatttat

SEQ ID NO: 844970 - DNA, 614 bp, Homo sapiens
taattaaggcaaaaatattcctaaagataaaagctacatttcataaaaacaggaagatacaaaactcataattgtgtrtacgtgcctaataacattgctacacatgtatagaaaaaaaaaagacttaactaagcagaagaagagaaatatccaaaagcatagttgaggattttaacacctgtttcagaagctgagagaataaacaaaccaaaaaaaaaaaaaagtataaaaatagcctttagggacacaactaaatgttcctaactggtgtatacagaacactgcacccaacaactgcagtgtaaactctttatcaagggaacaaggaacatttaccaaaacagactggaccataaaacacatctcaacaaattaaaaataaaaagataagtaaaatcacacaaattatgttttcctgcacaacacaatcacactgtaacacaacagaaagatgactgaaataatcacacaaaacacttccacgctgttacgcataggagcacgatggatgttgaaaatgttttgaattgaaaaataataaaaagtgtcgtatcaaaacatgagggacgaagctagagcagtgcttagagaaaattgtatagcttcagttgcat

SEQ ID NO: 844971 - DNA, 596 bp, Homo sapiens
ctattggaagcttcttgtattttcagagaaatattaaaattactactttaaacattagctactcaaagatgcttagggtagctgctaagagaataataaaataatgtactaaaatataatgaaaaagaaaaatcagcacatgaaaatacttgatttatctgaaaggaattaagaaaaatggaacaaagaaataaaaacagacaagagaaatagaatagtaggatggtagacttacttaaacacaattattttagtaattaaatgtataaaactgaacaatctaatcagaagacaaagatggtctgtatgaaaaaccgagaacccaacaatatgaaatttgcaggaggcacattttagataaaatcatacaggcaggctgaagataaatgtctatagagtgggagtcatggacacattgtgtttaagaggcagctgaggtagctatagcactacgagacagttgagtttaattaaggcaaaaatattcctaaagataaaagctacatttcataaaaacaggaagatacaaaactcataattgtgtgtaygtgcctaataacattgctacacatgtatagaaaaaaaaaagacttaac

SEQ ID NO: 844972 - DNA, 614 bp, Homo sapiens
taattaaggcaaaaatattcctaaagataaaagctacatttcataaaaacaggaagatacaaaactcataattgtgtgtacgtgcctaataacattgctacacatgtatagaaaaaaaaaagacttaactaagcagaagaagagaaatatccaaaagcatagttgaggattttaacacctgtttcagaagctgagagaataaacaaaccaaaaaaaaaaaaaagtataaaaatagcctttagggacacaactaaatgttcctaactggtgtatacagaacactgcacccaacaactgcagtgtaaactctttatcaagggaacaaggaacatttaccaaaacagactggaccataaaacacatctcaacaaattaaaaataaaaagataagtaaaatcacacaaattatgttttcctgcacaacacaatcacactgtaacacaacagaaagatgactgaaataatcacacaaaacacttccacrctgttacgcataggagcacgatggatgttgaaaatgttttgaattgaaaaataataaaaagtgtcgtatcaaaacatgagggacgaagctagagcagtgcttagagaaaattgtatagcttcagttgcat

SEQ ID NO: 844973 - DNA, 528 bp, Homo sapiens
tagattttcagaaaaactgcaaaggtaattcagagtttttatarcccatctgtccattcttttttttttcttttctgagacaaagtctcactctgtcacccaggctggggtccagtggcaagatcttggctcactgcaacctctgcctcctggtttcaagcaattgtcctgtctcagcctcccaagtagctgggactacaggtgcacaccaccacacccggctaatttttgtatttttagtacagacagctttcaccatattggtcaggctggtcttgaactcctgacctcaggtgatctacctgcctcagcctcccaaattgctgggattacaggcgtgagccctgcaccaggcccccatctgtttattctaatccatttatcatcttaaatcacatccagccacatgaccaacttagcacactccaggggtaacagcttatgtcagtgtagcccatttgtcacaatggatggacactgttggtgcagtctgaccaactaaagtccacactctgacctccttcattt

SEQ ID NO: 844974 - DNA, 552 bp, Homo sapiens
aatccccatcctcttttacatgaatatcatggcagcctcctgtttggctctgtaggtttgagtactagcctttaagcttccctaccctttaaaccattttytatactgcaatcagagctatttttttaaaatgttgcattatatgtttatctgcttagtaactctccacttgcaacataaaggccaattccttaacataggcccttcatgatgaggttcctgctcacttttccagtcttgtttttcaccacttcctcatcctctcatatcctctggatcaaccacactgagctgtggttctccaaaatgctcccacactaactggaggattagttagcacctggcctctcctgcacttcctctgcctgcctgactcctctagctgagctgtaacctcctcagagtaggctgctttcctgcctggccagacctttcaaaccagtgcatagctctctatgcctgcccttatctgaaactgctaaaattgcctattgacttctaatgtttccgtacccttgaagacacagaaactgtcttatttgttcacaaagt

SEQ ID NO: 844975 - DNA, 606 bp, Homo sapiens
atcacttgcagatttggatatttaactctcactgagtacccacattcaggcatcttgttgcaagtctctgtgcaccaagagttactagaatcccacgtgggtttttayagctgtcataagaaagacacaagcaaagttcagaggctgcagagatagagttcaaggacatgagggaaaacgagatcatgagagatttggaggcctggtaaagaagaatgggtggaagtttgagaggttggaaaatgaggtaaggcaatggacagcattaagaaatataccaaattagaaataggtcacaccattcagtgttgtttgggtaggacaaatatgagagttctagttggttagaacatttgatttgagtaagtgggttgagtaggataaacttccaaaagtagtgtggtcagggccaaattttggagaggtttttaatgttagattaaggaatctgactttatttggcaggcaagaaggaaccattggaaactgctcaatggaagaatagcatgcacaaaatggcttataaatccctaaataccattttatagttgtctaattctttgcagttatagaccactttcttatgcattatctcttttaatcctc

SEQ ID NO: 844976 - DNA, 607 bp, Homo sapiens
aaatggatgttcccttagagtctctagaaagaaacgcagccttgccaaaaccttggtttgtgtcrttttaagccactaagtttgtgtaatatttattgcagtaataggaaactaataccaacacccatgtgagccaaaccttctaaacattctggagaaacccaagcctccagaattaagaatggaggctcaacatccacctaaagctctcatttagatgaaaagagtaggttaaagaaatgtggatttagatgtgaggaaatcaggtaatgctttcagggagtgtttaaaaggagctgcttttactattgaaaaagctttatagatccctgatgaagaataagaggcactgaggtgaatttctctatatccgtgtttctctagaggttcccagacctatacatttggggatttatacgtaaggaaggagaagctctgtatgaaggtaaagataaaggtctcagagcagatccctatatgcggtgctcagagcggggaagtggcggtcaggaatcagccctgactttctcttccactggcattagggcaccctctgtctccactctctgccactgtaccatttacatcatggggaatacactttgct

SEQ ID NO: 844977 - DNA, 647 bp, Homo sapiens
aggaatcttgctgtacgtactggagccatccttgatgaactctggcaaggtcttcgccttgggtttgggcagccgagcgtgttgctgcaatcctaagacttgagaagactttgggagaaaaagcagaaatcatcagggtctcaagaaatggggaagcagagtccatgaaaaacggtcattcacgttaagtgtcacttcctctgcttctctctctacttccttttcaggctatgacctctcaagacccctggtgtttttgctacatgcatgtgaaatattctctggcaagggagaaagggatcagggtagaaaatgaggatagggttgggggttggagacagggtgttcctgggattttccacttaggaatttggtcaatgtcctttaattctcttgctgaaggggaaaaaagcaaagtggggataccgtaagaaaggagccacaaagccttgtgacgacgcctgagctgaggtggcccagaagaaagaggacttccattgcgttcccccatgtgccagatgctacatgaygtctgctctttaatcctcaagttaccctctgagtggtttcaattcccagtttatgtaggagagaaagtgtgccttgtcaaaggtcacacggggatccacagcagggccaaggtttgg

SEQ ID NO: 844978 - DNA, 753 bp, Homo sapiens
gggcccagtaaaaaatgagcattcaggatccyctgttcaaatattaataggaatttcaagatggcaaagtgcatgaagccaagcacaggacgctatgcagttgcacaggtcaaatgcccatgaagctggccctggaatgaccttcaggcccatctgctgagatgctcctctcagccactgtgctgccaatcctcccctcctgcactggagcccaggaaagctgggggactcgctgctctcctgggcactgctggaggaagggatgcaggttattgctactcctaaatccacgcaaaacttttaggatttgtatcatctccccttcctctggaacaccaggcagcatctcacttcccagcccacctgcagctctcatctgccccccaaatcccaatgtgtgtctgctcaggcccagcagggaacacctgtgctttactcatgccttttcctttgtctgagttgtctcaagaatcttgcttttgcaaaaattgcatctgttcaactcaaattccttttctttgatttttggtgtgatcatctctttccagaagcaataaatgccaatgcctggtggggggaagagcagccaatgcaggaatgctaggataaaacaaggtgacttttctttcttttttcttttttttttttttttgagatggagtctcgctctgtcacccaggctggagtgcagtggcacaatctcggctcactgcaaactccgcctcccaagttcacgtcattctcctgcctcag

SEQ ID NO: 844979 - DNA, 604 bp, Homo sapiens
acacaggctaatggcatctttcataaaagcctggctttcacttcacagaatgtcactatcttacactatcatgtctttaagcatargagttattgcttagtcatttttgtatctccatcattttgcacagtgcctgtacatggtacaaacataatgtttcttattcaataagttaaataacatgccccattctacttctgggtaaaacgcagcactcctcaaaataaaagtaaagtatctttgctcataagtttcaaaagatgttttctcatttagagttaaaaaccagaagagaaatggacacagtagtgaaaataggaagcggcaatatgaagtcaatatatagtccctctactgttgcacaatttacattcagagtgatattttctaatgcatcctcaaattttgaaatttagcactcatgcacaggaatatgctgacactggtaattttttcttaatgtcacaaattctttgaaaaaggctttttataaaccaggggcctaatacatacttaaatgtatacaatgtatacttatacgtatcacaaatacttatatgtattataaaccaggggcctaatatatacttatacgtatcacaaa

SEQ ID NO: 844980 - DNA, 522 bp, Homo sapiens
ataaattagttgccctcctaatggcctcctggctgtacattcttccctaccttcataatccatcagcatcgtgaaagcacagagggacgttgagcagagctctgtgctggcgccaccgcactctgtagcctgtaagagagcagcaaagaggaatgtgttgctcaggtatagacgggggtgggtgcatagagacttccgctgcggcatggcccttcatgtccagggtaggcatgaagcaatggactattccaggttgtgcataggaaaccacacagcactcttggagggatttttgctctaaagacaactaattcaaaataaggcgctttctacctgaaagaacagcatgaactaagaaaagagatatatagagagatctctgtgtactatgatcaggttgcacatattctgrgatttatgtattcttattagttcaattccttatttattgaccacttactgtttacaatattgtattagattcttttaggattacagttgacccttgatcaatttcagggg

SEQ ID NO: 844981 - DNA, 560 bp, Homo sapiens
aattaattttatctgcttttaaagtgtggctactagaaaatttaaagtcatgtttgtggcttgtgttaagtttctattggatagtggtgctatatgtagtctgtttagtttttatcaatactattgctctcaccttgtcctacaagaaaagaaagcaatagaagtcattgtcctgaacacagacccatactatatgttcagcagagagccttgatagaggtaagactctttgagtaagctttatgcctttctcttgtgtttgcttttgtggatcagcttactcctttcaaggctttttttttcctcttcatcgttttctgaagagcagattgaaggtagccttcatgctgcagctggtttagctctactactaaggcatcactcttctggaaccttatctaatcctctggatgtttaaaaacacttctccacactgactgtttggaactagaatgtctcccagccctgcctgagcctttaaacttgttcagttggatcttgatagctttttacaktaccctatccatgcacagctggttatttagtagtggactcaagga

SEQ ID NO: 844982 - DNA, 592 bp, Homo sapiens
actttaaaaaggtaatgaaattagaggcgccttcccttagaatgttggatttgggttgggggaatatttggaaagagtccagaaatttatttataacatatacatttctcatcgacattctttttctctgcaaargacattatctactaacatgatttaacacaaacaaataaagaacgttcacacttctagaccagattacttcaatatcttgacatttcttttaaaatttgcagcggtaattacagctttgtcagctaagtaatcaattaggtaaaagtttaagtgcaaagttttatctgacatgagaagattaatgtgtgctttgctaataactacgtttagtaggatggatctctttagtagttctatttgtctactgtgcaaattcatcattacatttcccaattacctcagatattgctgtcattgtttttttctctagaggtgttaatgctttagttcttggcattaattatattggaaattactttataaaagaaatatgaaaaagagttttttacttagaaatagcaacagaggttgggtgctgttgctcagtcatacctgtaattccagcactttcggaggc

SEQ ID NO: 844983 - DNA, 532 bp, Homo sapiens
taatgaatacaactcagcaataaagaggaagaaactactgatgtatgcagcaaaatgggtgaacctcaaaatcagtattctaagtaaaaacagccagacaaaaaaagtatctattttatatgatgccatgtctgtgacatttccaaatccatagagacagactgtaaatcagtggttgcatgggattcagggtgatacttttctaaagctggattgaagcagtgcaacaatttaaaaattattgagctatgcatttacagtgaatgaatttatggtttgtaaattctacctcaataatactgaaaagaaaattagacccattttttttcctgagttacagttgtatatctaactactgactagctatttctgcctagacagctcacaagagcgcttcaaaattacacaaaaataggctgtatatttcctttgtgcatctctccaaattatatttcagcaccctattacctatrgtattaccacacagaaagttgctgaagctaaagaacttttttagactccttgcaactat

SEQ ID NO: 844984 - DNA, 610 bp, Homo sapiens
aaccccatgccaaataaatgagaygcccttttcttaagttaaagtgaaactattgtcaagaaaagccaacacaatgatcaaccacaatgtaatttaagttcaattactgtgtattcacaaaatattcttggaacaagaaacgtaataggtgcaaaagacagctaaagtgggtttgtcattttttgtcattttgtctcttttctttgtataatggtggctaagagcacgaggtaacagtggctgcttgcatttttcacacgtaacaaaaacacttaatgactcccaaaggaaatacattttttaacaagagctaatccatgatttgtatcctagacccctgcctaaacccttgttcatatgcagcccaagggtgtcaaatgtaaaagtctgaaggaaaagaatcctttcagcaaataagtatctttagaataaaaggaaaatgattaactttttttcttttctgaatatgaaaacaatcccaaaataatgaattgtgaacaggcaaatttagaatagatatgccaaaggcctccagaaaagataggggtcttatcaataacatctttgaaaaaatctaaaaggaatcaattaaattttgatcagagttaac

SEQ ID NO: 844985 - DNA, 488 bp, Homo sapiens
ttcatgaataagcaccattaaaagagcgaaaaggcaagctacagattgaaaaaagggaaatgcaatacatatatatygtagaaaggacacatatccggaaaaaagtattacaaatcaacagaaaaacaaacatatcaatgaaaactggataaaaagatttaacaggcacttcacaaaagaggacacacaaatgacaataaaagatactcaatctcaataccaggaaaatgcaaaatgaaatcacactgatacattactgcacccctactagaatggcaaaataatttttaactgacaggcatcagcaaggatgtggggtaaccagaatatccctgctaaatggtacaatcgctttgggaaaacattccacaatatgtaatactaagtttatcattcatatacctctaaaaccaacaatgccactcctacaaatataccccagtctagtaatgctctatttcttgatctgtggtggttcacttggtaaa

SEQ ID NO: 844986 - DNA, 653 bp, Homo sapiens
atattttggcagcagtttttccatcagattattttgtaaatattttctcccagtctgtgacttgctttttccattctcttaacagtgtctttcacasaacagaagtttttaattttaatgaggctcaacttaatttttttttcattagtagattgtgcttttggttttgtatctaagaagccatcattgaacccaggatccctcagattttctcctattttatctcttaggattcttatggttttgcaccttacatttacgtgtaagatttattttataaagggtatataacatgcatacctggatttatttattttttttgcatgtggttgtccagctgttctagcaccactagttggaaaggctatctttgctgttttaaattgtctctaaacctccatggaagatcagtggactgtatgtaggcctgcttctgggctccgtattcttttccatgcatctatatgtgtgtgttttctcttttcaccaacttcacactatttgggttactgtagcttaatgtaagtcctgaagttggtagtgccaaacctcagggagtttttctgaacttcatcatgagaacctggttgagatcattgtagtaacacttggaaatgtgtgagattcccccttagtctggtcttcaaggagtt

SEQ ID NO: 844987 - DNA, 549 bp, Homo sapiens
tttggtgaaattttggggttttctagatgtaagatcatattacctgtgaacagagatcatttcagttcttcttttacaacatggatgccttttctttyttttttttttttttttttttttggtataattgccctgactaggattttcagcactatgttgaatagaagaggggtgagtggcatcttgccttcttcctgattttggaaaaaaagctttcagtctttcacgactgaatatgtttgttgtgtgctttccacataaggcttttattacgttgagctagtttccttctattccagtttattgagtgttttttttttttatcattaaggggtgttgaattttgtcaaatgctttttctgtatcatttgagataatcacgtgattttcttccctttcattctgttaatgtagtgtattacattgattactttttgtatgttgaaccactgttgcattccgggaataaataccctttggtcatggtctataatatttttaacataacattgagtttggtttgctagtattttgttgaggatttttgaa

SEQ ID NO: 844988 - DNA, 543 bp, Homo sapiens
gctgcagttctttacatattctggatattaaacctttatcagatacatgatttgccaagatactctcccattctgcagtttgtctttttattttcttaacagtgtcttttgatgcacaaaaattttaaacttatataaagcccaatttatttcctatgtttctcatgcttttgatgtcatatctaggaatccattgcaaatctaaggccatgaagatttgctcctgtgttttctattaagagttttatggttttatttcttatatttaggttattgattcattctgagttaacttttatatatagtatacggtagaggtccagcttaattattttgcatgtggaaatccagttgtcccaacaacattagttagaggtgcctgttttcccccattgagtagacttgacacccttttggaaaatcagttggctattgatgtatgagtttatttctggactctcaattctatatcattggtgtatttatctrtcctatgccagcaccaaactgtcttgttaccttagctttgtagtaagttttgac

SEQ ID NO: 844989 - DNA, 574 bp, Homo sapiens
ttatagaagtaaattggaattgaaatcatgtttctataaaacaacacttatagaagtaaattggaatgggaatcacrttgctagcctaatatttaatgagacaatatggaggaaggctgtctccaatgtgctaattacttttcgggagtgtgttcaggaaggggcacaggcctgcaggccagggatctgagccacagacagcagaaagctgtcagagaagggagcacacaggcaatgctcgtggaactagaaaagcacaaaccaccaaatagaactacctatgaaagacagcaccatgcaatcatagttatactacagaattattacaacatttatactacagaattagtacatttccttatgggttctgagtaccagcagggtgtcactgactctggcaagagcagaaaccttcagattgaggcaaagccaaaggtttgagtgagaatgaacttaatacactaaatggaaggctattctttggttaaaaatgttgtaatgtgggagaataataaattatacatattctatattgttaatataatatataattaatataatactataagtaata

SEQ ID NO: 844990 - DNA, 617 bp, Homo sapiens
catgatgccggctcagtgtcccgcagaggctgtggtggccagagcccaatgttaatgcccccaaactgagcatctgtgactcagtctagtgcatcagggaggatcaaaaaaacgcaccacaaaattggtgagatcctgtgcagagttggctcgttggcctcatctgtgtcatgttgaggacagcacactccccagaatcctctgccggagggaggagcccagcacctccttgttttctgtttgaaccccggtctcctcaggtcctcaagtgatgccagcacattgatttgagaggcactggccaccacgatgacacacgaggcctgctttcagtggcatcctttccgatttcttcctactgctggccttgacacatccacgtctgtggatttgccctgggatgccagctcacatggcttctcatccagctcctctgggttccttagatgggcggtccccaaccttttcggcatgaggaacgtttgacattttttccatgaactggtgggtgggggatggtttccagatgattcaagcatgttacatttattgygcactttatttctatcattacattgtaatatataatgagataatgtgcaactcgccatagtgta

SEQ ID NO: 844991 - DNA, 503 bp, Homo sapiens
gaggggcctgggcggtggagggcgggctctgcaggtgtcccgatgcccagcccagctccagactctcagggctacaagctgagggcgccggagcgcgagcctgggccggggggctctgtcctcgcgtctctagaacgaggagccggttcagagaaacccaaagaattctttctctctggaggttttcccatcgcatgagtgtttccgtcgagctcgtcctcgtactcagcggcctagaaacaggccagagagctccacacctgcccgttcctcggaattccacagcctcgccttggaggaagcgggagtcgcgacgtccccatgaggctccttcacccccgcacaagcgcccggggccggagtgtcgcctggctcctatcgggcagcatcgacctgttcattttcctcagagaacgggcatttccatgaaggaartctgtgcgggggtgtgagtgtgaatgtgtgaatgtgtgagagggcgtttctgttgcatgtgtgtatgc

SEQ ID NO: 844992 - DNA, 568 bp, Homo sapiens
tgtgaatgtgtgaatgtgtgagagggcgtttctgttgcatgtgtgtatgcctgaggtgtgtgtgcgtgagtgygaatgtgtgttcatgtgcattgtgtgcatgtgtgattgtgtatgcttgtgtgtgaatgtgtgcatgagtgtgcatgtgtgactgtgaatgtgtgaatgtgtgtattcatgtgcctgtgagtgtacatatgtgagtgtgcatgtgtgaatgtgtgtaaatgtgcatgtgtggatgtgtgagagcgtgtgtatgcttgtgtgagtgcatgtatgtgacaatgcatgtatgtgtgtgaatgtgtgttcatgtgtgtgcatgtatgactgagtgcatgtgtgagtgtatgcttgtgtgggtgtgtatgtatggagagtgtgcttgtgtgtgaatgtgtatgagcgtgcatgtgtgagtgttatgcttatgtgagtgtgcatgtgtgtgaatgtgcatgtgtgtgtgttcatgtgcgtgtgtgcatgtgtgaaagcatgtatgtgcttgtgtgtgaatgcatgtttatgtgagtgcatgagtgtgcatgcgtgtgtgtgc

SEQ ID NO: 844993 - DNA, 627 bp, Homo sapiens
aaactaatcttttgtttctgagtccagggtctgagtgtttaggtgacagtgtcccctcagggtactagacagcttacagaatttaagtagaacatgccgaagcacggcaaattagtcaaaatggagcaaaaatatgtgcataacttaatttgtgatggccatttaagagtccaaaataatttcatttcactccttattttcctcttttaggttccgtaaatgaaaagttaccccaacgcgaaggcacaggaaaaacaggtaactatcttagaataaatgtctatgacgatatgtaacatctaacttatcccgtgaaataacttctcaagttaaagttgaaacatccactagtgatgatgatgagagccgaaccagtttgttacttctgcattcattcagcaatgccattcactcacgatcaccagctctgttgggcctgtgctccgctggggtcgctggtgttggacctgtgctccgaggcttgtttcgggaccaacggcagaygctgttaggaccccctggaacctcccagtctgtgactgtggagagggctgaggctcagtattttggctccctgtgggattctaaaccattgcagttattgaggaccctgataaagatgcctca

SEQ ID NO: 844994 - DNA, 588 bp, Homo sapiens
ctcaaactcctgacctcaagtgatctgcctgcctcagcctcccaaagtgctgagattatgggcgtgagccaccatgccaggctaagaaatataaatgtacatttttttaagccaatgtaaccatttcaggcttcagcagattaagctccatgtaaacctgtggaagaagagcatttctgtgtctcacctctcacttgccacttgcagatttccaagacttcaaatgacctgccattataattaaccagtaaaaactgagcaggcttttggtatttagtgggactgaaaataatgttttaggaaattccagtttacagaagttaccttacactataatttggtttaagtcagccgagatgagtggagcacgaaaagatggcattgagttgatttacagacacggggcatgaagctactggactatgtttgtgtttaataccagttttctagctacatgttctttcygaggggctgaagaaacacctagttggtattttaggacattaaaaataatatttaatttattaagttttaacaatgaaatgacaatcataggatatatataatgaccactcttattgaaatttc

SEQ ID NO: 844995 - DNA, 595 bp, Homo sapiens
agtgggactgaaaataatgttttaggaaattccagtttacagaagttaccttacactataatttggtttaagtcagccgagatgagtggagcacgaaaagatggcattgagttgatttacagacacggggcatgaagctactggactatgtttgtgtttaataccagttttctagctacatgttctttctgaggggctgaagaaacacctagttggtattttaggacattaaaaataatatttaatttattaagttttaacaatgaaatgacaatcataggatatatataatgaccactcttattgaaatttcaaatatcagaagagtgtcatttatacttaattttaatttttaaaatatacttttacttgtaatcatcttcggtagacatagacacatttatttgagaaaatgtaagtaatttttgataataatttgggtatttaaaaaaatttatctagcttgtcagtaccttttcctgtttttttatwaaaaaggccaaactgaaaatgcattgctttttgtttctctgatgtttctttatatcagataaaagtagtatttttccccatgaatttgtatgaaaataatgtg

SEQ ID NO: 844996 - DNA, 413 bp, Homo sapiens
aggagggccctcctttctccaagtcaaaacaaaagcaccacttaggcacagagggtgacatgggggccggccaccgccctttgcatgaaccagaacaaaatgttgccttattaggtgacttcgtgccggggtgcgggggctgcttcctgtggtgctgctgatctgcaaaagctaaacatttagactctgctccactcgaacactcctgccaagaagtctctttaggtattctgtctttgtcaggaaggcctgccagcttagcagcacccttggtctgggaggcgggaggaagtgtgtctgtggggmaaggtttgtgcgaagcgctgggcgggcgtggactgggcctgcctttaggagccacacccctcccagtgttaattctcacagggaagagctcagcaccgagtggctcg

SEQ ID NO: 844997 - DNA, 383 bp, Homo sapiens
taggaagtccctatctaaataaacctggtctccttatacaatcctatgatagatttctatgattttacatttgatttggcatccatctttaatttccctctagtaccaccagactttttctctctgtactttataatgtaaattttgctatttgatttacaccttagttgtttcctttaatatgcaaatttaaggctatttagctgacagctgcctaggattgtgaaacagattatcaagaatctgaaagtctgagacaggataaaacaaaaaaggtttttatgaatctataagatgtacttytatcggcatgcctaatatgtctatgtatttatgtgttgtgtacacaatgtttcactactgaaaatatataaagagttcca

SEQ ID NO: 844998 - DNA, 393 bp, Homo sapiens
tccagtgggatcctcctgcaaaggcagagagcagctagcagagaggaggtgatgcccccctacaacatacagtttccagtaacggygctgccgttttttgtttttatctgggtcacctaaataatgtggaactgaagagagtaatgcaagtgatagaaagaaggggcgttccacatccacactggagaaacaggcaaaaatgcaattatgacccacgaaggaacaacccaggggccaattcaatggcacagacagatgctgtgagaacaggggacacctgcctcattccgtcttccctcccacctcacaaaaaggcccccaaaacctgatatttgcctcttccaaagaggacaacactgcctcagtttccacacgagacaatccaatatacac

SEQ ID NO: 844999 - DNA, 501 bp, Homo sapiens
tcatacccgagatttatggtaacaagaaagccatgcggagacctggggcattctctcctgatttatgaggagatgcacagcatgggagaaagggccagtgagagttctgctgcggaaagaataaggccttaaggactcagcctactcctgcctgagaagagggaagagagaaactggagtcacattggaccccattgcccacaactctatgttaagacttaggaagtagttctctctaaaacacaaattaactgtgctagacaaatgctgtccaccctcacatggtttctattcactcagtttaaagctcatattgaggccaaggcactcagagttcttcataatctcttcccactggctccaccagtctcacatcccacagccatcccacatactcaacacgctggcttcatctttcttcaaaccaagactgtctttcacctgtcctgyttggtggcctggtaccctgttccttgaggctggaatcacctgttccaccct

SEQ ID NO: 845000 - DNA, 647 bp, Homo sapiens
catttatctaatacactcctctgctgagatatttaacacatcttcatctgtactctcttctatctctggcaagttgccccraagtaggacgtttacacctgaaaataaaaagtcataaaattctttaatgcttactactgttataactcagaacacaaattacgaaactttatatgttaatattcttatgtaaaccatagtgttagcagtaaaaagagtagctattgaagaatgtactgcatataaaattacctaatattatccatctaggacataaactgtatttatttattttgagagaaattctctctgtgttgcccaggctgggagtgccctgcaagatcacgggtcacaatcacagatcactgcagcctgaacctccaaggctcaagtgatcctcctacctcagcctcccaagtcacttggactacaggcgtgtactaccacacatggctaattttattttgtagatacaggttcccactatgttgcccaggctagtctcaaactcctgggctcaagcaatcctctctccttgacctcccaaactgttgggattacaggcatgagccaccatgcctggcaaacacttttttttaaagggctaggacataaacattctttaaatccttttaagcaagggcttg

SEQ ID NO: 845001 - DNA, 490 bp, Homo sapiens
ctgagaaggcactagcctgtagtggcgatgaacatcagctttgagtatagcttccccacgtaaggactgtatgaccttggaaaactttctttacttgttgtgataaataaacttccttacagcaaattgatcctcaagttattcccctgtaaggtggaaaaaataatggaaactaccttctaggcttgatatgaagattaaatgaggtaatgtacccaaagcacttagtacagtggctggaacatggtaaatatttgatcagtgttcttattattgttatggttaggaaggcgctagcaagagcaccattgtacttccagagcacattccattttccagcaagtggtgctttaatagatttctagtgacttgagagtgacttccctaagcatcttgcattaaggaaatargaccttctgtattctaaaaacaccatccaataagggattttcacaatttacttgtaggacctttgttacgtagaaccttc

SEQ ID NO: 845002 - DNA, 619 bp, Homo sapiens
ttgacagatctagttgactgaaacttattgaggatatggagaatttgaagaacacggttaataagattaatcataactataattatgcctataccatcttatattcaaaataggcaagctacattattttcaaattcacatagaatattgacaaacattggccataagtgagatggcacattaaccctcaccaagtgctgaaaagctgaaaccatataggaccagggcatagtttactgatcataaaacaatacaatcatcaaacatgccctccttaagttgtactcttaggaaaaagcacatgggttaaaggggatatcagaataaaaattatacgctctttagaaataacaagagcactataattcagccataccctgagacttcacaagctttggtcccagtaagctagaattcaaatcttagccctatatttaaataactccttgaattgccatttcttatcccaattatctgtcattccactgtgaaatatatttcatggcaaataatattaaaacctacatgaagcagtcaggagaaaatttgtagctttaaaatgcatttaagagaaaataattggtaggcagatcgycttggcctcccaattattgcctct

SEQ ID NO: 845003 - DNA, 628 bp, Homo sapiens
ggcagcagaatcaagctttctggttgcagaaacttctggagccagccagctgtataaagtttcaaatggttttcggaggagaagcagcttttgagtaaaaacctttaatctaaaaatctaaactcgacacaaaacaaaaacaaaacagagtgaggagctggtgccattggcccctgccatgacagatcctgatgtcattccctgcctgccatctacagagccacaccttgtccttcgaagaaattctgggatttctactggcagcggccaggaaaggaacccaaggttggtctgtcctgttctgacgttgtccttgtcacatgtggaagctggttcgccaggaaacaggctctggtcaaggctgggctcactggagaggtcagcccaaactcaaaacacatttatgggtaaaggaagggttttttaaaaggagactttgcaggcaacaaaaagaaatatagtattgatatatgccacaatgtggatgaacctcaaaaacattatgttaagtcaaagaaatcagtcacaaaaagaccacataaygcatgaaaccatttataggaaatcttcagaataggcaaatctaaagacagaaaatagattagtggttgtctagggctcaggaggt

SEQ ID NO: 845004 - DNA, 622 bp, Homo sapiens
agcactggcaaattaatcgagtcaaaagaggaggatgtaggaatctcaacttaaagccagttggtcagaagttccagaggtccagacttctgacaggtatgtgaagtaggggcagtcttggggactgtatgatctgacactatctccaggtagagagcatcagaatgaattgaactggaggacaccaagctagcgtgtctgtagaatcgactgcttgcttggtggtggcaagaaaccgccatacatttggtctcaggagtcttttgtggttgtgatgtgagaggagagtaacaacagtttttgttttttccactaagtataaaagataaaaacgtatactcctgtatagggcacttaccataaatagagtttgcaggactcaacgctgttctgggtgagtcagtgagtgagtggtgagtgaatgtgaagggctaggacattactatacactactgtggactttataaacactctatacttaggctacactaaatttaacacattttttttctttaataagaaattaatctcagcttactgtaaattttttactttataaactttwtaattttttaaactttttgactcttttgtaataacacttagcttaaacacaaacaca

SEQ ID NO: 845005 - DNA, 586 bp, Homo sapiens
gctgctgcccagccacagtgcccggggtgggggcttcatgccagccyaaaaggggagaatgtaaggaggggcagggcatatgtgagtgttcttggtgtgtatgggagtatgagtatgtgagtgtgttattgatatatgtaaaaacatgagtgtgctgttggtgtgaatcaaggaatgactgtgagtgtgttggtgtgttggggcatcagtgtgtgagtgtgttgagggttgggcatgagtgtatgttggtgtgtgtcaggcatgagtatgaatgtgttggtttgtgtcaggcatgagtgtgagtgtgttggtgtgtgtcagggcatgagtatgtgagtgtgttgggcatgagtgtatgttgttggtgtatgttgggcatgagtgcatgtttttggcatgtgttgggcatgtgtgtgtgagtgtgtgttgggcatgagtgtgagtgcgttatgtgtatagggtcacgagtgtgagtgtgttggtgtgtgttgggcttgagtgtgagtgtggtgtgtgtgttgggtatgagtgtgagtgtgttggtgtgtgttgcgcgtgagtgtatgttggtgtatgttgggcatga

SEQ ID NO: 845006 - DNA, 452 bp, Homo sapiens
ggaggcagggccatggcctggcttcctgcctgccaggcgcctcggggaccttcccacacccagccaggcgggagtcagaaccmtaagagctgcggtccgtctctgccgaggtggggcaaggcccctggagagcagggaaagtgaaatgggctcatttgcctttttcgtttttattttcagaggcgactttatgttcagaaaatgagtcctcctgggccgtggtcagttcttttcgctgcgagttctgctttgagtgtgggcagcatgtgtccccagcaccatctgtacttctctctcccgcccaccacggggttctcagactctgccggaggcccaagccctctgtcttgggggcaatctgttggactctgcagcatccttagtttacagatggggaaacagaggccggaggggctgagtgatggtccatgcgacttggacaggcatggcca

SEQ ID NO: 845007 - DNA, 655 bp, Homo sapiens; identical to SEQ ID NO: 835175

SEQ ID NO: 845008 - DNA, 485 bp, Homo sapiens
tgcttcgtaggtgaccaggaagcaataagctggggaaaatagagctgagatttgctgctgagtgttgcacagcaagaagatcatgttcaaataaacacaccaaaaaggatttgctctgtctgatttgaaytgtaaggtcctttgttgttctaaatttcaatttaattccacaacatttattgaacacctaaaacttgcaagtatcaaaatcaaatctaataaaggcatgggatttctggggtaagagcttaaggcatgtaatactgacagagtaaccaattccaacacataatcactgttatagctccacattccacctgactcactccatacaagcaatgttggatgttaccattgtcataagtgattgaactagtccaacttgaagcactgatttgcagagtgtctttatattgttgtggtcttttcaccaaaattctatgggcttttctttgatactaccgttttcaacccgtgtgcacaca

SEQ ID NO: 845009 - DNA, 576 bp, Homo sapiens
gttggatgttaccattgtcataagtgattgaactagtccaacttgaagcactgatttgcagagtgtctttatattgttgtggtcttttcaccaaaattctatgggcttttctttgatactaccgttttcaacccgtgtgcacacatgcttcccagatagtctactgtcctctctttctttgtgttcatgacgatgtgaacactggcatctgtttagtggcagtcctggctgtccttcaagctagcacagcactgttgaacaaaactttgccagcattacacctcctttccagaatcaccattcatccagtgatggctgccttctaacatccagttcctctgttcccccaaatcctttagtctgagtaccatgggttgatattgacaaatgccttccctcactctggtgcaagctactgccatctgttgccagccaaagctttttaagtggcytcctggccacccaccatgctaccctctcatccactgcctacactgcagccattgtgacctttctgaagtgaatatctgatgaagttgctcatttacttaaaatcctaatggcttcctattgctg

SEQ ID NO: 845010 - DNA, 576 bp, Homo sapiens
gttggatgttaccattgtcataagtgattgaactagtccaacttgaagcactgatttgcagagtgtctttatattgttgtggtcttttcaccaaaattctatgggcttttctttgatactaccgttttcaacccgtgtgcacacatgcttcccagatagtctactgtcctctctttctttgtgttcatgacgatgtgaacactggcatctgtttagtggcagtcctggctgtccttcaagctagcacagcactgttgaacaaaactttgccagcattacacctcctttccagaatcaccattcatccagtgatggctgccttctaacatccagttcctctgttcccccaaatcctttagtctgagtaccatgggttgatattgacaaatgccttccctcactctggtgcaagctactgccatctgttgccagccaaagctttttaagtggcctcctggccacccaccatgctaccctctcatccactgcctacaytgcagccattgtgacctttctgaagtgaatatctgatgaagttgctcatttacttaaaatcctaatggcttcctattgctg

SEQ ID NO: 845011 - DNA, 502 bp, Homo sapiens
tcacctgatattaatttgtttattaccygtttcctgtgtgtgaatataaactccaggaaggcagagaacttgtcttaattccccagttcttggactatagcctagcacatagtaggtgctaacaaacatttgtcgaggtggtggttacttattataatggagcaaaggagtaagaataaattaggggattcaaagagaaaatcatatttgatcaatgaccaaaacttcactacagaaagtcaaattttcttagacaaacaaagcatccatgtgggaaaaatacataacaatattggattcaagctaatttcctttttctatggattatatcagcaacaagaaatcatacattctaacttccaggcaaatagagttttttgagcatgaaacgacttcagagcagagtttttaaaactgccattcaaattattgtttatttcagaaatacggctgtgctatatagccttcttcaaggggaaatacatgtaaaccaaatatccat

SEQ ID NO: 845012 - DNA, 502 bp, Homo sapiens
tcacctgatattaatttgtttattacccgtttcctgygtgtgaatataaactccaggaaggcagagaacttgtcttaattccccagttcttggactatagcctagcacatagtaggtgctaacaaacatttgtcgaggtggtggttacttattataatggagcaaaggagtaagaataaattaggggattcaaagagaaaatcatatttgatcaatgaccaaaacttcactacagaaagtcaaattttcttagacaaacaaagcatccatgtgggaaaaatacataacaatattggattcaagctaatttcctttttctatggattatatcagcaacaagaaatcatacattctaacttccaggcaaatagagttttttgagcatgaaacgacttcagagcagagtttttaaaactgccattcaaattattgtttatttcagaaatacggctgtgctatatagccttcttcaaggggaaatacatgtaaaccaaatatccat

SEQ ID NO: 845013 - DNA, 623 bp, Homo sapiens
gttctccatataacagcctgagagattttttaaagtaaactcaaatcctatgtctcacctatataaaacctttctggggcttcccattccatttactatagactctaaactgatctccagctctcccgggcaccacatgatctgctcatccttccaactcgtgtcctcatcactctctcttttactcacagtgtcccagccagattggcctcccttcaattccataaacacgcaagactttcttgcctccggatcttcacatctatcattccgtttacataaaatgatgttcctcatcttctaatggttggctctctattgacatgtagatctcagctgaattgtcattgccctaatgagttgaaacatccctgaccatcctctcccaaaaacaatctgcttcactcgtcacatcacactgtttctcccctcctagctgttaccacaacctgcaactaacttatcagttgtctattttgttgtttatctgtacctgcrtagggaccttagaccatcttgcttcctgctacattcccaagagcctagaatcatgtccaatgtcatagagggccccataaatatttattaaataaccgaaggcaaagctggatcaaaatacatca

SEQ ID NO: 845014 - DNA, 602 bp, Homo sapiens
taaagggactgggaattagatccaaaacctgaaatggtgcaaggcccagagcatttttatactacaaaaaaaggaaaarctgcttttgaaaattgaattcagaagagaatctcccactcttagttgactcaagtgaggaccacgcaacctctctgtctacatgtgcttcttaagacatcaagggactctggtggaaatttgaggggcgttctttttctttatcttggcccaagatcccacccaatggtaatgagcagggaatggggtcggtgatctgaggcatgaaagaggttcattatgaggaagtggagagggaaggctggatgaaaagaaagtggcttagccactctgtccccaaaggcagggagcactgaggtcagttgcagactccaaaacagtcagtaatctgttctggaaacctgaagttccttattgaacagcgcaatctttcctcaagacatggaagaaccagcactgatgcagtcagcccttcttccaaaacaggtactggcgacagagaggtgggcgtgagatggactccgggcctattgccatcttagcatgaacgctggccactgaagtaggaatacccttctcacgag

SEQ ID NO: 845015 - DNA, 602 bp, Homo sapiens
taaagggactgggaattagatccaaaacctgaaatggtgcaaggcccagagcatttttatactacaaaaaaaggaaaagctgcttttgaaaawtgaattcagaagagaatctcccactcttagttgactcaagtgaggaccacgcaacctctctgtctacatgtgcttcttaagacatcaagggactctggtggaaatttgaggggcgttctttttctttatcttggcccaagatcccacccaatggtaatgagcagggaatggggtcggtgatctgaggcatgaaagaggttcattatgaggaagtggagagggaaggctggatgaaaagaaagtggcttagccactctgtccccaaaggcagggagcactgaggtcagttgcagactccaaaacagtcagtaatctgttctggaaacctgaagttccttattgaacagcgcaatctttcctcaagacatggaagaaccagcactgatgcagtcagcccttcttccaaaacaggtactggcgacagagaggtgggcgtgagatggactccgggcctattgccatcttagcatgaacgctggccactgaagtaggaatacccttctcacgag

SEQ ID NO: 845016 - DNA, 627 bp, Homo sapiens
agacacatgggctgatggatggaaggatgaaacacaagcaaactcaactgctaggatggagacaggagggatggagagtcagggagcagaatgctttgagtgacaaagcaagaaagaatgcaaagatgaattttcacggtgttgatgaacctgaagaagctggatcatcatgatgagagatgggaaagagataagccacatagtgggtatggtgctgagaatgaactcatttgtgtgatatgaagagtgagtggggttgtgagaggcccatgagcagggaaagggaaaggctgatgaaggcgaagcccagctgccaaggttataaagggactgggaattagatccaaaacctgaaatggtgcaaggcccagagcatttttatactacaaaaaaaggaaaagctgcttttgaaaattgaattcagaagagaatctcccactcttagttgactcaagtgaggaccacgcaacctctctgtctacatgtgcttcttaagacatcargggactctggtggaaatttgaggggcgttctttttctttatcttggcccaagatcccacccaatggtaatgagcagggaatggggtcggtgatctgaggcatgaaagaggttcattatgaggaa

SEQ ID NO: 845017 - DNA, 584 bp, Homo sapiens
aaaattggaagcatgaattgaaacaacacagaaataacatgtttgcttacagtggataaattttgtactattttatagaaaacctctacaaatttaagacaagttaccgagcttgttgacaagttatgaggccatatgaaaagcaaacacacaaacaacaacaaactaggcactaagaaaaagtaaaaggaaattaaagttggtcattgcaatttaattaagacaatagtttgaatgcaaatgaagacataagacaaattcaatggaacattagaaattgtcttgcttggtactgtagtttatataagcagaagcggagacatactgaggttaagttttcatccaaagtcaccattagattgtggcagagctggctcctgtctcttgttgagtcttcttttcactgcctgacattgcctcttataaacaggacatggtgccagttaattataattgcttaagaaaaagcaattgaaaaaayggtgaatggtaattacatatgggctgaaataacattgatataatcaggaatatttgggggaggaaacaccattctagaacatctatttcaaccttggcaagct

SEQ ID NO: 845018 - DNA, 596 bp, Homo sapiens
ctgcattttactgccctgtctcttaagcatttgtaggctttggaaagtttaaattttttcttgagtttcataaatttgacaattttgaaactcatagcctagatattttgtggactrtcacttaatatggatttggctgattttatctcatgattaaatccatgcatctttggcagggatatcacagaaataatgctgctccctcattgcatgctgtctgtggtgcatgactgtgacttgttcagttactgatgatgcctctgtgataactgggttaaagtggtgattgccaggtttcttcacagtcgtttactctttcctctttaagaaataataagtatttcatggtgaagtactttaaaactctgcaaacatctcattcctcttcaaactttcatgttattcatttctttctttatatcttttctttttcttttctttctttcttttttttttttttttttttttgagacagagtttcactcttgtcacccaggctggagtgcaatggcatgatcacggctcactgcaacctctgcctcctgggttaaagtgattctcctgtctcagcctcctaagtagctgggattacaggc

SEQ ID NO: 845019 - DNA, 636 bp, Homo sapiens
tgagggagaaacctccctttttgactttgaataccactgctgagaattgtgcttctatttcactttgtggaatgcttgaagtgatttttacagaattctttttggaaatgttaatacttgtggaacaaatggcttattgttaaacttggagctggaagacctggatttgaatgcggatatttccagttactagcagtgtgacctcagtttcttcagtaaaacaggatattatcattgtctgacaaagttttttgggccttagttaaaaaaatgttaagttaaagtcatttcggttcttgaaagtgccaagcaaatgtgaggcactattagtattttgtaaaaagccatttctttaaagggaagacaattcatgaagaaaaaattcaaatgaaagcaaagtaataaataaaattaccttaagaactgatgagagaattctgattttgtagatggaaatttgtttttgaatttaatgaatatacatatatttactcctttaagtagttattttatgtttcaaaaagattcaaacattttaattgcaaaaagtctttgccttgctttaaaagcaagtttaatttcagggacaatacacctattmattacccaaaccattcctaagcagtaacagcctta

SEQ ID NO: 845020 - DNA, 502 bp, Homo sapiens
atatctccaccatatacttttggaggattgagaaaatgtgtcatcgcttggaattcctaatcttattttattcattcaggttgaggaataatgtaagatattgctccactgtggctttatgaaattttttacttaaaaaaatccaaagcatgtaagtatttatctcatggcttaaatgttcatcactgtaaggagaagtttaagattggaatgtatctctagccttgctctctctccccctgagatctggctttatactttacagcagtaggtttgcaaatcaaaatgccagcttgacctagctgccagaaagtcctgaatatgaatcccacaacagaatttattaattttcctttacaagttggtaatttcttattttctcttaagtaatgctaatttygggtacacccttgccatgagggaggttctaggtctccagtgttattgtcatacactggcatgtatactgtcatctctactggtattatataatgttgttgct

SEQ ID NO: 845021 - DNA, 656 bp, Homo sapiens
gagacttgttaaatccttttccttaaaagactcccgaaattgtatcagttccggctcccacaaaaagcatggtgtcccggccagggggtgtgtggcccaggaaggagcagggaccctcagcyagcaaatcgcaaagtcaaccaagtcaaagaagggctggcgggcgggcaggccagagaaggccgcgtgtttgaatagggatagtggtcaaaagcgtttcctttcagtcaaggaaatacgaacttttcggcaatccccggggacatgaggacttgccgggcctagcaacatgtttctgacacacccacagggccgaggcgaaggggagggtgaggaccaggccttcagaggccaggacatgtgggaggggaccccaagcagagggcgggtaacccggggccctccttcttccccaggacacggcactacccactcaccatcttgggtggggccagcaccaggatgacgaaccgaacctcacaggaattctccccccagttctgtgggcgaaccaggcggctgatgcacacgtgccgcttctgtagggccttcatggtacagctggcaggggcggggaggacacagtgcacagttgcaccccagggagctggggctccccgacccagaaccccctcgaccttgacccctggcgacct

SEQ ID NO: 845022 - DNA, 627 bp, Homo sapiens
gggacaaggtcaagtagatatggcattaattttaagaattggagttataaagctaacacaaggtgacatcacaaacaagttttgtgactgtgcaaatttctttgaacctataaaatccattcttcataatgtaaaatgaagaaaagagaattccaaggtacttttcacttttaaaagaaaaattacctattcttgaggatgtttaaagatcagtcaatggatttcaattgtatatattttgtaataaaaatactctgaattagacacacatcttgtaacaagaaaaaaacacacaaaaataattaaattatgctgctatttctgttatggttaaggatagttaattatatatacagtatgtataacatgatataaagtatttttaaatctgggattatggtaatcttatctagtgctaactgcaatagagaagttttttctaattattaaattctttacagttggagacaaatgagataggccaggaccctggagacttgagataagtggctggtggttgtgatggtcgtcagcctgtggagaccaccacaaatctcacctgtgctaatgtgatctatatttgaamattctattctatgtgatgctaacagctacatatttgagctt

SEQ ID NO: 845023 - DNA, 525 bp, Homo sapiens
ccaatgaagtaaacatggaaaatgcaagatcacccatttgacctttaccattaacctatctaggcctcagtttcttcatctgtaacacaggggcattgaaacgtaaaacccaaagtttcatgaatgcatgatttggggtttaaaactaaaatagtattatttcagtgttctgaactgtatgttttcattaagtatcattttaaaatcacattttctaatttcatgtctctgagaagtctagatcccttatcaactcatagtggttgagaatctcaaaattattcaaaaatatccttgaggtgtggtgtcccaaataacctgggacataaactagcatagctggagcactaactttcaaaataaaattaatcaaggaataatagtcagctcttctaaaacaaatacatatataaacatatgcacatrtgctgtagcctcagaataccatttactctaagaatgtaagctattctcctatgctcaaaataatgtaaatttaaggattgagaacttcagtggtaaact

SEQ ID NO: 845024 - DNA, 580 bp, Homo sapiens
cataaattacattttatgattattattctttttgagatggagtctccctctgcttgytctgtcactcaggctggagtacagtgatgcgatcacagctcactgcagtctcaaccccccagccttaagccatcctcctgcctcagcttcctgcgtagctggaactacaagtgcacaccacagcacccagcatattttttttttggtttgggagagacaaggtctcactacattgcccaggctggtcttgaactccagggctcaagcaatcctcctgcccagatctcccaaaatgctgggattacaggcgtgaggcaccatgcctggactatattattttttaaatgaaaaagaaactagttaagttactagtgcacaaactcagttgaaaagggaaataacccctctacaaatcttagcttcttcctcctctttcccctctgctcccacaccccacccaccccttcatggcttaaaactggaaatgaaatttggtggaggaggattctgtttgggcaacaacatggatccaagtctttatttatagagaaaacaaacagcctctaattcacctgctggcccc

SEQ ID NO: 845025 - DNA, 630 bp, Homo sapiens
atcttcatactacgcaccccagataaatcccattagcttttgactgaaattgtattgtcctaatctcagagttcaaccattcagcagagaccatctgaaaacaagttcaggttgcttagatgrggcatgatgggcttatgagaaacaattagagaccttggacctagattatctaatgcagggttagagattccactcctagaaaccagcatgaaaaccaaaggattccacagtgtgagtatgaatcagaggtagtgcagttggaatatgatgaataaaatactgcaccagcagtagggagtctcctgttctagttaacatgtcttctaggctagttcctgtattccggctggatgaccaatcagacttagtctcagaatatatatgcttgatgatcttttccaagatttttaaggttgaaaattaaatgcatgtttcgaaagagttagtgagaaatattagtgatttttggtgccaaggaagaagtcagaagacataatttaaatcagtagtttaatattgtaacccttgtatcaaacttcatcttgataataaatgagaagttaatgggaagcagcctgcctagggaaaaccagtcactgttaaatgagaaacaacccagcccaactc

SEQ ID NO: 845026 - DNA, 606 bp, Homo sapiens
ctgtatcacatttatttgatctatacttgaacatcattttcagttcatacgtttgttatcaaatagatggagcatccagaatctgtgagaaagaatgaatagctgtagagaacacacagacttaagcacagagtacgtatgctcaatagacctatagttagatgtgaatattatgtcaaacacaaatagtggaaagtgaaggcaatgatgaatgtgggaaagggaagctaaatattaactaaatgtggaagtttctcacttatgtgttagggagctcagagtccctttcagtattaagcaggaatgtctcctttggtctgtgctctgccttctgcaatgacaaatttcccttcaacaaggcaacctgtttggtagttgactcttgtagtgtggttggcccttgaataacacaggtttgaaccacgagggtccacttacatgccaattttttttgcccaaatgcagatgaaaaatacagtatttgtgttatttgaaacttgtgtataccaagagcccacttttcctgtatgtgggttccacagggcagacagcaggacttcggtatgtaaggatctggstgtgtgaggggatcctggaaccagtccc

SEQ ID NO: 845027 - DNA, 624 bp, Homo sapiens
atcaatacctcttataattagggaagtacaarttaacattaaattacaaatcaaattggcaatggtacagtgaattttaatgcctgatactgggtaaagagcagagtaagataactgtatcacgctacagatagtaatataaaaattggcacaagttttttggagagtattcgggaaggtccttcaggaggcttgaaatatgcctaaattacaagatacgtgactgtagatttacctttacactggaaataacctaaatgttcaataataataatttgcgggttaaagaaatcccattcatttattcattcattcgataaatattttgtctgtacttaacatgtggcagataatgttggagtctctggggttattgctgggaacaaattatttgtacatgattacataattagagtataatcacggagattacgtgggactgttggtcatatggtttaactttataggagactgcctaactagttttgcaaagtgattgtaccaatttgcattcctaccagcaatgcatgagagttccagttgctctgtattctctccaacatattctattcttagtctttatcatttttaccattctgattggcatgtagtagtatctaaatg

SEQ ID NO: 845028 - DNA, 368 bp, Homo sapiens
agatgaagaacaagtaagtacagtgtataatgaggtgacagaagccaccactcattgctctgactaggaggaaacaacaagatgccttagactcttttggccaaggaaagacacactagctgtgtgaatgccaggtgagctggcatcatttgtctgggatagggtgcagtggaggctgttgaggcctgacagcttcccccttcaccttactccattgtttgccaggctcatgcctgggagaaccatatgcatargaagacctggatcttataggaagaagaagtggaaaagccaatacctgacctccaggaatcagaatttgtgttgcaggttgggttctatgcaggcagacacgaagacagagttta

SEQ ID NO: 845029 - DNA, 584 bp, Homo sapiens
gagaggtaagggttatcatccccattttgtagataaggaaatgagggcacagtgaagttaaagtctaatgacttacccaagaacacccagatagtaaatggtggagcccgagttggattcgaatccagtccaatctgtctcgtatcttagccactctcctacacagccttattctgctcactcactgtgtgaccagggcatattgcctaacctctcatccactgaggatgtcattttctttagcttttgaaataatacccatgtcatagggttactgtgaaagtttggttcaggtagagctcttagattcctgtctggcacacagtgacacctcttttcaggtgacccattctcgtttgatattgtcagccattgtgaaataagagggtatagagcaaagctttccaaatggaaaaacctgctatgatttctagaaagtcttgggaaactttytagatcagttatggaggttgcagagcagaaggcctcaaggacgagatgcaaaaacagcacccatgcaagttgacttgtaaactgctttcttcatcctttaggaggaattgcccaagaggcagcatttatgg

SEQ ID NO: 845030 - DNA, 612 bp, Homo sapiens
cagggcttggatttgtcacctttctgggtggagagaataaagggaggaaacacgaactgaggtggggtgcaggagccaaggcaggccctcaaagtgtgcatcgatgccttcaaaagccagctgcagtattcggccacctgcgatccctgggtgcccgccatcagcccttgctcctctctcttgccttggataggacagaagttgacacttgggggctcttggagaaccatttggagcacgtggaactcaagagtgaatcacttattttttgctgtgtggcagcagggcctccctagacaggacatattcgggggcttgcagccaggtaggggagtggaagtacctcctctcaccccacacacgggaattggagatgaggcagccgatcctgcctgcttgagtctcagctgtcattttccaggctggcagcaccagcaggagaacccgtgtgtccgccgggctttctttaaaatgcaccgagtgcaacccagtcctccttgtgtaaactttctccaactggccagatggtttgcttctatttaaggcrgtgagagtatttcctacggcctgctgccccctggcctttgttttgccccgggaaggccattcctc

SEQ ID NO: 845031 - DNA, 646 bp, Homo sapiens
tttcagagggggtggtgggcagaggacagcaggctgttgtcctgaagcccctagaacctagcggagaagaggcaggacccaaaagaaggaggtgtgttcaccctgtaggacttgctttgtaggtgcaggtgcccagaggccaggcccgtcagtgctacctggggtggggctggagaagggaaggcctgccaggccccataggtgatgggagggccaggacctcaggttggagggaaccactgaatcctcggccctgtggtgcaggcccacacagggcatagcccctgggcactggcactgcccactgcccactgcccgtgtgtgctggggccatgccagccttctccgctgctaaactggcttcttcaccctccctcagtgggcacagctgccgcttccatctcagtgtctgcttctcccttgcttggtgggtcattatgtgcccacttagccataggctttcactgagtccccaccttcatgcaggatgtgggaggtcccaggggcccccaggcagctcaggctggcctgccctctagtggggagcagagcagacagatctcccagcccagkgggggccagctgtggtggagcccgcctccccattctattcttggagaggaaaagcacagaaatacaggagtga

SEQ ID NO: 845032 - DNA, 629 bp, Homo sapiens
ataacaaacacccccaaatctcaggggcttccaacaacaagcatgcgtttctcacagttctgggcatcagttgtgggtggtcggctgattggtggcttctgctggaatctgatgggcagggctccagactgtagattgggttcaggtgtgatccacgtgtcttattgcagaccccaggctgaaggagcagccagctacctggggtatgcccttctcatccaagacggcaggagtgcaagagcaggggcaggaacccaggatgtctcccgagctctctgctcagaacaggtacaaggtcactttgcccatcccccatcagtatgtgcaagtcacacagccaacccaaagtcagtgggggcagggcaatatactctgcccacagggaaacacaaaatggggagagagaaggaatcctttctggaaaataataatagaatccaccacaccatggcagcaacagcaagatggcagtggtgtccttactggtctggatctgggctgtggttcccrcccaatttatcttatttttgtagaaacaggtggtgctggggcggtaggcggtggggggtggggtgggggttcttgttatgttgcccaggctggccttgaactcctagcctcaagcaatc

SEQ ID NO: 845033 - DNA, 633 bp, Homo sapiens
ttaaaatactatcatttaacataatcaacaaaattcttcagtttatctaatacctagtccttgtcagtttgccttgcttatctgaaaaattgtttttctgcgtttgttttgtttgaatcagagttcaaataaggtccacatattacaattggctatgtctctgaaacctcttttaattttgtgacattccctccctcctttttttatgctattgatttgttggaggaattgggtcacttaccctggagaatttacatgctctatttggttggtatgtttaaccagttcctctttactctttattacctgtaaactggtggttagatccaaatatgtgattaagttccaggccagttattttagcaagaaaatgtcatgggtggtgctgatatttaaaaccgggcagcacataatgttttgttaccccatggttagtgatactaagaccgatctgtgggttcaaatgtcgaaaggttgatgacttcaggacagaagtttactattatgtaattttcacaaaattatgaccatttcctagatacatcattaatttggacttacaaaatggtgacttttctaatttgatmatttcttctgcatttattggaagaacttttccttgtcagctacttg

SEQ ID NO: 845034 - DNA, 338 bp, Homo sapiens
cgaaaagctcagtggatggcttgacagcagaatggaggggattgaggagaaaatcattaaagtggaaaatagagcaatagaaattacccaatctgarctagagaaataaaatagaatgaaaaaaatgaatagactctcagggaccagtgggactataacagaagatctaatattcttgtgatcagaattctgaaaggagagtggaaagaagataccttaaagcatataaataaagggttttgggaaaagaaataggacaaaatcttcaggacctacagttaggcaaagagttcatagacttgacaccataaacataatacataaatggaaaagctaat

SEQ ID NO: 845035 - DNA, 611 bp, Homo sapiens
tctatataatgctatatatccatttaagcctgaatgtaattgaaatctaattcaatattactccggcaaaaatgagaaaaaaaagggtrgtttaatggaagattaattgtgtaggggaagcaaactagtcagttattttgtgggtgtttttgtgttccttggaaagtattgtgagcaattaattagtatgcagacctcgtattctctagcggtatcttgactatagctaaagaagaataatatttggcaagaagtgattataaattattttaaaaaatcaaacataaaagaaaagtgaactttctggttccttaagtaggcctatggagacacagtggcagagccaggtggattattctccttgattttcaaaatcagtgttttaatggagggctaattacgtagaagagaagaaatgatggtatgcaagaaaaacaaattgtatagataaaagctctttttgtgtgtggtggggaggagatttacacattttggtggtagatttggacagaactagaatttccatgtattttggcgttgggcagcagaacagccgaagtcttagtaaaacacacatacacacagagatgtgcacacacaggcacacactc

SEQ ID NO: 845036 - DNA, 626 bp, Homo sapiens
tgtaatcgtattaaagacaacatattcctatacatcatggagtgattgttatatctttcagggatatttgaaagtagygcatttcactcattcatgtggagtcttcagtaagtataagccactttatattagtagataatgttctaacatagaatgagccataactcaccatatagtaaaattataccatggcaaaaattctctgagaaaggtatcaggtaatgataattcttgatcaaaatgatttgtttcaagcatgtctcatataatactttaataattgaaagaaagaaatggtttcaggtagaattcttaaatatgtctttttatagatttgggaaatatgtttttctaacagattctcaatttcagtaccaactatacataaactaatacatttatctctaaagtcattacgcttcaatttatagtcttccttttttacatcatgattccagtgttcttttttggtcacaagaataaagccaaagttaaagcaaggataaaaagaatcattttattaatgttggcgtgcatgtccctgatattccttattgcactgctttttattttcagtttctcattaccattttaaattaaggacaaagatatttaacttattcaat

SEQ ID NO: 845037 - DNA, 647 bp, Homo sapiens
tctgtacctgtctgtgttacatactggaaatctgattagggtaggactaaaaaactcaaagatctattgtcacccaaactggcattgtgctgattcccaataamgtattttcaaattaaagctcttccaatatttgatgttaaatgttccacttgcctttctgagtgctgcatcaggaagaattgaaacatgatatatagaaggtcctgggttcccaggatacgaagcattcatatcttggttttttttatgagtttgctgaacattcacaactagctctttttctaattctctagagcatacatgaagtaatctttctttaggtcctttgctcctctttccaaattcctgaatgagcaacatagagacctgtaatagtgtctaaaatagcccaagaggaagtaaaatggtttatatgggtacaatctcagcttcaaggacaaaagtatattaattaataggagcatatttcaaagttcacttctaaagcttgccatttcattactgtcttggccaaagtacaaaatgatgatggtctatattatttaactacaatgaaatggccataaaatgttactgatattgagagaaaagtagattagcctgtattttttccatcagctcctttgaaagacaaagtgctacca

SEQ ID NO: 845038 - DNA, 200 bp, Homo sapiens
tagtttttgtacttttctctcagtgcatcccaggaagttgggttagtttatccgctgcagtgatgcaggtgtgaggacaaggtgcccagcccattagggccaagagggaacatgaaagaaccaggaccaaggcttgaggcagcctgggggaaccaaagacagttggtcrccaaagccataaacaccaagaggagtagata

SEQ ID NO: 845039 - DNA, 445 bp, Homo sapiens
gactctgagctccctcccaccccacctgagaaccatgagggcagggccatgtgctggggtgtggctccccacagtgccctgggctgccctcctccctggcactcccccacggcagacttgtgctgggagcttctcctgccagcttcacacatctgctggccccagcatttctcctgcaagcacattcaggtctttcccaagcaggattactctggcagcctgtgaatgcacaacacctgttgtctgaattctcctgtcaattgtgttaatcctgctttgctttggggatcctgcaggtagatctggatccggatcttgtctgctcagcttcttcctcaccaaggcagtgraagtgaagctgaccttcttgggaagtctttctagacttggccaagacagagcagattgttgaagatgggagcaggtggtgatgcagaacgcacca

SEQ ID NO: 845040 - DNA, 565 bp, Homo sapiens
tccagaaaaacaacaaggcatgaaaaaaagataagaaaagtcacagtcaggagccgggcacagtggctcacgcctgtaatcccagaactttgggaggcygaggcgggcggatcacccgaggtcaggagttcgaaaccagcctggtcaacatggtgaaatctcgtctctactaaaaatacaaaaattagccaggcgtggtggcacgcgcctataatcccagctactgggaggctgaggcatgagaatcgcttgaacccaggaggcggaggctgtagtgagctgagatcgtgccattgcactccagcctgggtgacagagcgagactctgtctcaaaaaagaaaaaaaaaagtcagtcagaaggagcatcagagccagcctgggacatgacacagatgctgaaattaccagacatggaatttaaaataactatgactaatatgttaagggctctggtggaaaaagttgacaacatcaagaccaaacatctctgaatattgacaaggacattggcaaggacaaatgggtaatagaagcagagaggggtccactttaagaaaaaaaatg

SEQ ID NO: 845041 - DNA, 572 bp, Homo sapiens
atgtgtgtgtgagggtgaggtgtgcaggagggatggaggaggaggtggctcctttgtgaccttctgtttccgtgagaamccttgggacacacctctcacccaggttgggggttccctgtcctggattaacttttgtttcacccagaggccaggccaacctaggcaggtttcggatatcgcctcctgtgtgggccagccctggttcaaacccgagctctggccctatgtggctgtggccaactgcccttcctcagaagcttggtttttgtgcctgtacagtgagggtggccatgtccatctcatgcaccatgtgcctgatgtccagcagcgcgttactgttcctcagtgattgtgtggcattgcgctgtggctctgtggcacttggttagggcttgtggaggtagaagggtgaaactggctggccactgccctcaggggtgccagaggagggaggggcaggagccaaggtgatgggcagagatgaaatggggagcaggacctggggacccccaggtagccagggggtttgcataggcccgggggcagagggtcagcttgctggagggcgtcgc

SEQ ID NO: 845042 - DNA, 602 bp, Homo sapiens
ccctgccctgtggagactgagggaggcaggggaactgtcctgtggcccggcccaggcttctagtggacacaggcagctttaccctggcaaggctccctgtgggcctgggggtggaggccttgtgggagccctgttctctgaggaggcccgtccctctccagaccttgcttcccttctgcagagatggcttggctcccatgggccctggtatcgggcagaggtggtctgtggctgttgatgaacaaacctgctcgcttggtgttctgcgactccgcccaggcggccactctctcacctgtttccctgccctcaagacctttctctaggccatagggttggggcagcagggaggaggcgtgcattgagtacaccgggcccagcgagcacagcccactctgcaccctcctccagtggcatttgaatgcccaggtggacagagcctgcgcagccccttccctgtgaggcgggcgtgatgctggcggtctgggggctgctctgagaatagagaagcagtgctggggccgggcctggcrcctggcatacaggtgccctggagtctctgtgtgtggtactcatggctctcctgcctcccctgaggttcc

SEQ ID NO: 845043 - DNA, 569 bp, Homo sapiens
ggaggcaggggaactgtcctgtggcccggcccaggcttctagtggacacaggcagctttaccctggcaaggctccctgtgggcctgggggtggaggccttgtgggagccctgttctctgaggaggcccgtccctctccagaccttgcttcccttctgcagagatggcttggctcccatgggccctggtatcgggcagaggtggtctgtggctgttgatgaacaaacctgctcgcttggtgttctgcgactccgcccaggcggccactctctcacctgtttccctgccctcaagacctttctctaggccatagggttggggcagcagggaggaggcgtgcattgagtacaccgggcccagcgagcacagcccactctgcaccctcctccagtggcatttgaatgcccaggtggacagagcctgcgcagccccttccctgtgaggcgggcgtgatgctggcggtctgggggctgctctgagaatagagaagcagtgctggggccgggcctggcgcctggcatacaggtgccctggagtctctgtgtgyggtactcatggctctcctgcctc

SEQ ID NO: 845044 - DNA, 569 bp, Homo sapiens
ggaggcaggggaactgtcctgtggcccggcccaggcttctagtggacacaggcagctttaccctggcaaggctccctgtgggcctgggggtggaggccttgtgggagccctgttctctgaggaggcccgtccctctccagaccttgcttcccttctgcagagatggcttggctcccatgggccctggtatcgggcagaggtggtctgtggctgttgatgaacaaacctgctcgcttggtgttctgcgactccgcccaggcggccactctctcacctgtttccctgccctcaagacctttctctaggccatagggttggggcagcagggaggaggcgtgcattgagtacaccgggcccagcgagcacagcccactctgcaccctcctccagtggcatttgaatgcccaggtggacagagcctgcgcagccccttccctgtgaggcgggcgtgatgctggcggtctgggggctgctctgagaatagagaagcagtgctggggccgggcctggcgcctggcatacaggtgccctggagtctctgtgtgtrgtactcatggctctcctgcctc

SEQ ID NO: 845045 - DNA, 519 bp, Homo sapiens
gattcatgggctgtcctaggctctcccggcccagaccctcccacctcctggctgccccttcaccctacccagccctggctgcagcrttggtgcccgcaggcatgaggcaggcatgagggctgcgtgtgtgggtgggcagacccccttccttgctaagagggcagcctttggtggaggccactctgggctgaaaggtcctgggtccctttccctggtgtccagggagcatctatccagggggcagctggtgtgagtaggttcctacaaggagggaaagaacacctggctgtgtgcagggggtgagtggggcctaggtgcaggtttgatttttttttttaatttcaaaggggatgtgttccctagagaagcttaggaagatggggaaatgtagaagaaaaacccagacccatgcaacccagtcccgtggcctctgctgggaagatttctttcccctgagattgatctgtgtgttctctcccgggcaggggtgtgctggctgcgggcccacctgctgtgggt

SEQ ID NO: 845046 - DNA, 615 bp, Homo sapiens
ttattttaatctctttgttaaatttctgtgatagatttctgaatttcttcttgtgttagagggtgcacaccattactccagggttttctgctgatgccttctttagttcctttggtgaggtcattttatcctggatgttcttggtgcttttgaatgttgttgctgtctggacattgaagaattaggcatttttttccagtctcgacagtttggttttgtttgtactggtcctttttcagagggctttccaaaagtcaaaggagactgttatatgttaactaagcctgtggtcactccagcgatttcagcactagagggcaccctaagcctagttatgttgtgacttgcagcctctcagatactcagccctgatgcacttaagggagaatactctgggaaatgatgcaaaatccaccactttcttccttctctttcccccaagtggaaggagtctctgtctgtgctgggcctcctgagaatgagggaggggtaatgtgagactgttcttctaaccctcttcaatgtgttctttcttgttatgctaaaatcaagtastgtaatctctcacctgaatttttttttttttttttttttagtttgtatgaagctaatttc

SEQ ID NO: 845047 - DNA, 626 bp, Homo sapiens
caacagaagcagaaagaatagaccaggcttcccactgttgggagaaacgagaaacatggcagacctcttccagaagaattttgtatattttctttgttttctgtttttgttttttcttttcttttcttttytttttttgagatggagtctcactttgtcacccaggctggagtgccgtggcctgatctcagcttactgcaacctctgcctcctgggtgcaagcaattcgtctacctcagcctcctgagtagctgggattacaggcacccaccaccatgcccgactaatttttttttgtatttttagtagagatggggtttcaccatgttggccagtctggtcttgaactcctgacctcaggtgatccaccctcctcggcctcccaaagtgctgggattacaggcatgagccaccgcacccagccagattttattttttaggaataaaatttatcaattttcctttaacacttttgtttatcttagtatttattccttggagtataatagtagtggtgtttagttatgttaaatgatgattgtttaatacaaacaagatcttcttttttcaaaaagatatataatggagagagagagagacagggtctcactctgtcacccaggctg

SEQ ID NO: 845048 - DNA, 549 bp, Homo sapiens
gctattaccattaagggctgcctggctgccctacgctgctggagaggcgcgttctgacagagggtgtgaaagtggccacagcagggttgggggcaaagagaattccatgggtttgcacctaccacgactcagacttctctgtggattgctgtcccagagacaggcaaaggcgagtcttggaatattctctggacaaataggaagaggcgtcctggagagatatgtggggagagaaagggggctgtagagcccagcagggagaaaagccatgggctcatgaggtccagggaagaagagctccagcagaagggagaagagcacagaccagcagggagaagagccatgggctcatgggctccagagaccagcagggaggagggctgtgggctcatgaactctagagaccagcagggagaagagccatgggctcatgagctcctgggaccagaagggagaagagcagagaccagcagggagsagggccatgggctcatgagctctagagaccagcagggcgaagagcagagaccagcagggaggaggaccgtg

SEQ ID NO: 845049 - DNA, 497 bp, Homo sapiens
gagcttccgggacggggtccaaaaaataaggccttatcctggcatggaagaccctttagggtctgtcttggaacttgccagcctcagcccctccccactggtgtttacctgctaggcgcacctcacccccacggggctacctgtttctctcagcgggctccctacttcttaggctttgcgcggccgtgccttttcagccagtttctccccggccttaaagagcaggcttgaaatatccctgttggggagcccaaagttagatgggccccacgaaacactgtgttcagaagcccaccgaagccctgaccctggaagtgggatgcctcattgacatttttttcccaattaaagggaatgttttgcatttttctagaattgatgaaactggtcaactgttamtcaccctccttcctttgtccctttctaggagccctgggctcccccagtgttgcctgggtctgactttgcctcagtgaaaactgcctcgaattctttct

SEQ ID NO: 845050 - DNA, 553 bp, Homo sapiens
cccgatgcagacaccggggaccccagcacctggcagctccctcctgctccttccatcactgccgccccaccctgagggtgacccccattctgatgtctgatgcagaaccagtcagacccacagctgggctccgcttgtgcatattcctgctataagtggagtcgtgtcgtgggggagtggatgcggtgccctcagactcgtcactccatggtgacctgccgtgggaccacgccagggtgcatttctcctttctcctccgacagatgtatgggttgtcaatggggacccagctttataaaggacgaaactgaggctcagtccatccaacctcaaagtctttacccctctgcctaacaaacaagtggaagatcaggaacacggggtgccaccagcccagcacatgagtcctgttcttgatgacatgagagatcccaagaatcaggkacctgctgattcgtgtgtggcccaggcctgggagtgctgcccctcaggacttactaccagagctctgggctgctctcccactgcccagagcacatggccctggggggct

SEQ ID NO: 845051 - DNA, 559 bp, Homo sapiens
gtctacctccatcaagttaaaaaatacagctacaaaccctcgtccttttggtaccgctgggatggagttaaacaggtctccaggtttccagtgagaaagcaccttctggagagttaggcttggaggagtcttccttgccctcagtaattacatgatgggactgaaaacctcggcttggctgctgcattgccctgccctgctggagggagaacacagctggctaagtgtgggtttgccaggagatggaagaatgagggctatagtcccttttatcctctctggggcaatctcagtggggcccacagggtgagcaagagaaggttgagatgaggctgatggcatgtgttgtggggcatggaagtgcccagaagtaccaatagataactccacgcacagtttccatcctccacccacatcactttgacattcattcgtgcctgaaaatgctctggaaggctcttacagagcctacccaagagaatcttattggcagagaatgtctccgtgggaaagggaaactgggggrcggccccatggctggctacagggctgaaggcta

SEQ ID NO: 845052 - DNA, 673 bp, Homo sapiens
tgaccggatcttccaggtgctgtctgtcacccctttctttgactaggaaagggaactccctgaccccttgcgcttcccgatcgaggcaatgcctcgccctgctttggctggtgcacgatgcgcacacccactgacctgctcccactgtctggcactccctagtgagatgaacccggtacctcagatggaaatgcagaaatcacccgtcttctgccttgctcacgctgggagctgtataccggagctgttcctattcggccatcttggctcctcctaaaaattgttttaaagtttgtattggatttgaattttagaggcttgctaactttcctttaatagtaactctctgactatccttacccttttaccaaccaggctagcaaagttgaaccaccagttttaatgttctcacttttcatctgtggacctagacatgaaaacaatggaggctaagatgggatttttgagttaacctgctctccactgactttttgagtggacggtggaggtacttctcatgaaataccaaggtagaaagtgaactttacccttgttgcattttggcatggcttgcttacagcttttattcatgttaaaaggtaaatttatgacatggaaataaatagtcataagtttagattacggatccsagctgtcagactctccagccaga

SEQ ID NO: 845053 - DNA, 643 bp, Homo sapiens
atagtttacattttctcatcagtaacaattcacaaaagattttcattatgttctgtgacagaatgtgactctacaaagtacaagaaaacctacatttaatgattcagcattagaagtctgtgtggtttctttgttgaagtcattttcagaaggcatagattatataacacgtcttcttttaaatcatataaacttacatgctaatttggatgttattgatgtcatttgcccacactttcagtgttattctggccatttaaaaattctggactttttttttaaacgcaatgcctcagatattttcctttattttgatttctgattttctttgtaacatacttccagttttacttcctaagtaccctttgctttcttagttgtccaagaataatatatcaacaaacatttgctgaagcctgccatgtgaaggatattgtatctaccatatctttcactttacttctttaccctgtagaatttggccttagtattatagtctgcgctccctttaattgttattatttttattatggatggaaatttgtttgatgctcmtaagttcttttgtttttgccctcttccaactatttcctaaacttcttgtctttatcatctttactttattctatggcatttgaattta

SEQ ID NO: 845054 - DNA, 602 bp, Homo sapiens
gcagctaaaagtaaagaaacagaaaggattctgccttatggaaaagctcactaacacagagacagcagaacaggtgcggggctggagggctttgaagatgttgcagaagcaggaagcagagagcattgagttgtagcatccaggccctactcccagatttgctagggatggttggcactgttacagggcccagttcaagtgcctgagaaaatgacttcagtgtgtgagacatgccaagggttatactatttctaccttctagaatagggtgtaggaaactggatgggagggaagggttgcactgaatcagccagagggctgagctttgcaccatgacccttcccactatggcaatgatgtggcatctcactggccagcacattggtaatttgagtatgtcttttgttatgttctctgtatttagaattaagggagttcagacactgtaaagagaaggtgtaatatgttaaggcttttaaaatgtgaattttttggcatatatggtggagaaagcaaatgcttagttgtgtgacagggatmagagtctccttagaaactaattaacaaagtgtccagtatattaattatttaaattcataaaa

SEQ ID NO: 845055 - DNA, 595 bp, Homo sapiens
ctcatctaaaaatatgcaaattctctcgagacgctagaaatatttttcaaagttatttaaagccatattatgtttggaccatgtactggtttaggctaaattgatttatcaagctgtatgtttggcacagtggtggctatgactacattagttgtcttggaagaaaaatgatttttataggtcataagttaggtcagttagtcatcatagatttactgtgtttctgacactgtttccttagatttgatctggcttttctcttgtacatttgaagcttatttaggagtgtgtcagaacaagctgtctcacctgcctgaattgttagcctttagggcagggacaatgttgttatgttatgttcagagcagggcacaggagagagttgcctggatcataaagaatggtgatgagctcaagttggtgacctggttcctctgttcagacactatgggctggaaaggatgtgccatatttctcaggggtttttcctaataacccctctgcagctatcctgcaccttgttacaaagtcttcttttacattactttgtaaacatrtacctgtaatgtaacttccatttttcaagcattccaat

SEQ ID NO: 845056 - DNA, 593 bp, Homo sapiens
ccaagaatacacatggagaaaggacagtctctgcaataaattgtggtggaaacattggatatccacattcagaaaaakgaaatagatctcatgccatataaaaaaccaactcaaaatgaattaaagacttaaacataagatgtaaactgtaaaattactagaagaaaacatggagaaaagtcgatgacatggcctgagagatttcttcagtatgacctcaaaagcacagacaacaacagcaaagataaacaagtgagattacatcaaactaaaaagcttctgcatagccaaggaaacagttaatggagtgaagagataatccatagattgggagaaaacatttgcaaatcaaatgtctgataaggggctgatatccaaaatatgtaaggaactcaactcaatagcaagaaaacaacccaattgaaaaaagcagcgaaggacctaaataggcgtttcacaaaagaagatacaaatgaccaacagatatatgaaaaaactcttagcatcattgattgtcagggaaatgaaaatcaaaccaaagggagctatcacctcccacctgttggtatggctattgccaaaaagataaaagg

SEQ ID NO: 845057 - DNA, 653 bp, Homo sapiens
ataattggatatcttggggatgagacttaagtgtaaacacaaaattcttttcatatacaccttatacacatagcctgaaggtaattttatgcaatattcttaaayattttgtgcatgaaacagagttttgactgtgacccgtcacgtgaggtcagttggggaattttcctcttgtggtggtatgttggtactcagaaagtttcggattttggagcagtttggatttttggattagggatgctccatttgaatattctttttatatacagcacatggtcagtgctcactaaacttagtattgcatgaatgaatgaaaaccaaaggtcatttactaagcgtgctactatttcagaagcctctttttcctgatttggttctatggtcagtggtttaatatttcaagtgctctgaccacgtaatggttgttaccacactgtgaaggtggctgggtgttcagtgattgctgcccacagaggacctggaagtgcttgctgtacttggttttctggaatggaaatcatggctcattcccaggagcccctcagcaggggctttgagtctggtgctaagcagcagatgtgcagattcccgcagggcgtacctgagcccggagagggggcgtcgtagcgcacagcgcactcgtttccgcattc

SEQ ID NO: 845058 - DNA, 622 bp, Homo sapiens
tctggtgacagctgcaccataatggccacctgctccgtgctggctcccggaaggccccagagtctgaatgtgaacctggtcctcctctgccctcatcctgaaattatgtcaaagttaatagaagatgtttagatgctccagagtgatcgttaattatcaagtctaattcattttcttttggcttaactaataaaagataacagttaatgttatttaaattgtgtctcttagtgggggcagcttcttcattctacttctagaaatcaagatggtccttaatgctttctgaagttcacttaagagttcctctcttgttttttttttttaagtggttttgccttgtccaaagtagcagcatgtggagattaagaaatattaatcctccaaaataatgatctttcattttcaggtgtttaaggataattgctgcaagagagaaattctggctcttcagatctattgtcggaatgaaagcagaggttgtgcagagcagttaaygctgggacatctgctggtgagtagcaaagggacactggaaccttttacatgaaggaattcgagtcccttacatccagctgatgaagtggtcagtaggatgtggcactttaagaccatgttgaca

SEQ ID NO: 845059 - DNA, 573 bp, Homo sapiens
agccggcgggagatgcaggaggcagaccaggtggcgaggattctcttcaacgcactgactgctctgaagaggcagaacctggagcaggagagccaggaagggcyggggccacttggccaggttggtgggatactcagcattggcctggtttctgtgtgatctcttcctacagagctgctaaccctggtgagccagaagatgtgtgtggtcgtgtaccccgaggtggagcggggctcagggacagaggaggctaatgaggacatggaggagcagcagcagcccatgtaccaacccactcccacgaaggacaaggacgtggcggggcagccccagccctgaggaccaccattccctggctactctctccttcctcccccttttatcctacctccctgccttggtcctgccaacacatgcgagtacacacacacccctctctctgcttttgtcaggcagtggtaggactttggtgtgggtggtgagaaattgtaaacaaaaactgacattcatacccaaagaaccagcctctcaccccagggtccatgtcccaggccccactccagtgctgcccac

SEQ ID NO: 845060 - DNA, 591 bp, Homo sapiens
caagggtcccagttagaggaataagggaggtgtgatgttgcccagaacatgacagggggtaaggaagagaataatttcttgtgagacaactggatggaaaatctattgtgtatacttaatttctactttctttggaatgcctctttccccggttgtcaatattatatagcctggcaatgaaaaaagggtgaagttttacagttctaaagatccattctttattttggtacaaaaataaattgttcaacctgtaaattgtcacttattttcgtattgttgtaaagcaaacttacagaataggaacacctgctaccagttccaagaatatcacatacatatgccttagaaaaaggccaggtatgatggttcatgcctgtaatcccagcactttgggaggccaaggtgagaatggatcgcttgaggccagcagttcaagaccagactagaaaacgtagcatgacccctgtatctacagaataatttaaaaattagccagatattgttgtgygggcctgtagtcctagatactcaggagactgaggcagaaagattacttcagcctagaatttgaggttacagtgatctcacgct

SEQ ID NO: 845061 - DNA, 540 bp, Homo sapiens
cccgactggtagacgctatctttcattaaatgctggyactttttattccagcacccctcccacccacccacctacccccaccatcatccagccctcctcatcctcttagcaggggccaggcaagccagctacataaaataagcccagcctgtgtctcttttgagagacgcagtagagagttccggtgtggcgtaaacatatgcacatggggaactctgcttcctgctgtcctgtggcgacatgctgatgactgtgaagcgagaggttttgaggaaaggccaccctctgtggagaggtcattggtgtataatggagggcactggaggacagggcacagggcccagcagggagagcctgtgtggtaaagcccgtggcgagggtttgctgggggagggaggagatgaggccaagtctggttccatggtggggctgttttggaggagaactgatgagaaatgaagttgggaggagccaggtggtgggggtggagaggtggaaagaacctgctgaaactggcttgcctgccggatcctgagcggg

SEQ ID NO: 845062 - DNA, 564 bp, Homo sapiens
ttggtagaaagatgcaggaccaaaaatagtattaatacctaatatatgattccatttatataaattatggaaatgcaagctaatctacagtgacagaaactatatcattggttgttggggactagagtagaagacatggattacaaaggggcagaaatctttaaaggaatagaaatgtttcatattttcattgtggtgatggtttcatcgatatgtcaaaattcattaaatagtacactttaaatatatgtagttgtcaattatacttcagcaaagtagtttttttaaaaggctctcaaatatagttttctatctagttcataaaagaacagatttcaaaaaactggactatcatttaagaagaaaaaagagtaatgtgaaatggtgaaatggaaagaaatgattaagtttaataattaaacacagttattaatcagaaaagagtatatgtgtgtgcatgtgaaacaacataccatttscaaaagaagtagttcttctctttctttctcttgatccaacaaatctctctcataaaactttttctgaaactgtttaaagtttaaa

SEQ ID NO: 845063 - DNA, 548 bp, Homo sapiens
atgctcttctcatgatagtgaatgagtctctcgagatctgatggtattgtaagggggagtttccctgcacaagctctctctttgcctgccgccatccatgtaagatgtgacttgctcctccttgccttctgtcacgattgtgaggcctccccagccacgtggaactgtgagttcaattaaacctctttcttttgtaaattgcccagtcttgggtatgtctttttcagcagcatgaaaatggaccaacacaataaggtaaagagagtatacttacagcatccatagacatttccattctgtccaactctaatacagtctataaggaaagtttttaaaattattctaaagtaattaaattaaaacaaccaatcatttctcagcaacttattttgcaaatggaggttcaaatagaagacttctgcactagggggaagactaagtcagaaaactaaagttctgcccaattctacattgtacttacaatcartctttatacaatcatgccagggtcaattttaacttttgaaagtttttaaccttaagaagac

SEQ ID NO: 845064 - DNA, 450 bp, Homo sapiens
tctccccagcccctggccaccccttcctgctcctgcttctaacagttggactttttagattccacttctaagagagcatgcrcccatcatgtgccattgatgtaagacttaaaaaggtaaacacaagaaaagggagctctcaatcctcccctgggacctttgaggccctcgaggctgggcttagagagggaagaaaacagggcgaggctatgtgttggaacaaaggtaagcagacagacagagagatgctcctattccactgcactcaggagcaggccacatccagttggagaagcagcaatgcagctggagaagaggcttcagcattgggttcactctgagctttttacaaaccatgttcctaactgctgggcaaatctctcaacttcttcaaccctccattttctcatttgtaaagtgggtatttggggcactcagtccctgggatta

SEQ ID NO: 845065 - DNA, 568 bp, Homo sapiens
tgaatggaagttcagccagggggaagtggcctccagacccgacatgaagtcaggggaccatgcccagagtgccaacaatgcagggccagcagtaatgaagacaaatttggcttggacaaatgttgtggtctaaaaattttgcagtagataatctaggaggaagctcctctactttattaacatgtaggttttgtggtttatggtttcagattgttttcattttgaatgataccttcagagatctatttgatgctgggtgcttctagagaagttcatccagttctgtgaatgcacatggaagtgtctgggaatttgacttctctcctgtagggaagtcatgtagtcagccctgtgtttctgagcaatcccctatagctatgtggaggacacagttcttaaaccatccataactacgcttgagtgtgtacacatatatatgcgtgggtgtgaacctgtgtctgggmgatgctagggatccatttgccatctcttcctcctttctacccaccaaagaaaacctgtaatttaggtgtaataccacaagggggtgataacgcaccatgatgca

SEQ ID NO: 845066 - DNA, 437 bp, Homo sapiens
ttatgtaggcatgattgattaaatcattagtcataggctatcaatttcaacttctctcccctaaagaaaggtggggcttaaagtcccaaccctctaatcctgccttggtctttccagtgaccagctcccctyctgaagctacctaggggatgccaaccctcagtcaattcatttgcatatgaaaatatatttatcactttagaaatttcaaatattttaagcgttgtatgccagaaaacagggaagaagaccaaatatctatttcacaatatcacacctacttcataaaattgttattagaatcaaatgtgaaagtgtttgctgattttaatatagtacccaggcatatgattttaaaatatgttattcacagataatgtgttataatttttgtcaaatagtaggctttgaaaagaaaatatgaatgccagaggagg

SEQ ID NO: 845067 - DNA, 523 bp, Homo sapiens
acagtgagagcccctacaagctggctcctggatccttttgacatcattcctgaactctctcagaggtttctggctgtctgatatgttctgtgctcatcttgtatttttcckgctccagacctgaaataagccatttcttcagctctggtttcttttaagggcttggaagtttcaaaaccacagtctgcatgtgacaggtgctcactgctgttgggttggccgctggttctaggcctctgctggagtgtgtgatctgctttctgacggcagggcgttcacatgggtgtgctttaatcttacgtctccgtcctctttttccactgagagtgctggtctcaaggacagtggagatgagagaattggaatatcgcataatgtctcatctgttttatctcttgctacaaacatcacaatctcaaaataacaatggcagtacaactgccacctatatcattactgaaaacagtgaagatattttttgcctaagtcttcccattctgtgtagttatgcagggtctcaact

SEQ ID NO: 845068 - DNA, 433 bp, Homo sapiens
ctcctatgcaaatatgtatttaaacactgcttttgagtctcctaggtacatgcctaggagtggagagttggtcatacagtaattctgtgtttatcatatcaaggagctgttgtcgtattcttttttttttttttttttgagagagggtctcactctgtcacccaggctggagtgtggcagtgccatcacggctcactgcagcctcgtgttgtcatattcttgatagagattacattatttaacctcagaacagcccttggccccaattatcttggacttaagctggcatgagaccatgctgggtggtaagtgtgggtgtytctgatatttagagataaggaagcagggggtcgggaagatggtatggtttgtccaaagggctgctgcaaacaacagctaaggatgcttttccctattggtcaagaccaataga

SEQ ID NO: 845069 - DNA, 487 bp, Homo sapiens
cctccagctgcatccacctccaggccccacccagcctcctgtcctgagccgctttggatgagatcaggggctcatgagccatgcaaagccagcccggcattcctgcccagaacagccatgcttgcatrtttctgtacatttcgtccatggtcttcttgtccacaagtcttagccggcctatttcccttctccagaaacataaacatggtatttgtaattttattatcaccaaggttgcattgatgagaggctttctccttgtgtgtcgcggttcaggagccagtttgaggggcccaggccctgaagcagccttcttaggagggcaagcctctttttgcggagaagattcctgggctggcagagtgtgtggtgtggttcatttcatgtgccaacttgcctgggccatgggatgccagacagctggtgaaacattattcctggtgtctgggagggtgtttcttaatgagagcacatgtgaacccacaga

SEQ ID NO: 845070 - DNA, 629 bp, Homo sapiens
gggggacagaagttacaggcagacatcaatcaataaatgtaagctgtacattggttcagcctggaaaggcaggacaattgaagcttccaggtcataggtggattcaaaggttttctgattggcaattggttgaaggacttaagttattatctaaagatctggaatcaatacaagggaatgtctgggttaagataaggggttgtgaagaccaaggtttttattatgcagataaaacttcagggagtaggcttcagagtcaataggttgtaagtgtttcttatcagacttaaaaaggcgccagactcttagttaattctctcctggatcaaagtaaagacctggaaagggaaagggattctctacagaatgcagatatcccccacaagagacagctttgcaggaccactgcaaaatatgtcaaagaaatatattttgaggtaaaacacttccatttctttcagagcctgctatctgtcatgtgatgctacactagagtaaggttggaatttggtgtcctattgctacaaggagtctgttttttcattcttcagatctctgtcttcatggtaacgctggtctgttgtgcctgaactccaaagggagsagggtaaaatgaggcacgcccaacc

SEQ ID NO: 845071 - DNA, 512 bp, Homo sapiens
tggggaaacttgtagagtgtatgacaatttagcaagatgtataaggatgaggaggarttccaaaagcaggtggatgggggagctccaagaggggagtttccagctgagtgcaagttgtagaccatttactgtagcaacatcttagagtagaaggctggatggtagaagaggagctgcagagataagcagaggtagctagcacacagttatgagaagttggctggagaatgagatttggcaagtgctccatgtaatgaagatttgtttaaagaaaagatgtgatagaaaagggctgagttttaaactccccaagtttaagaaggtttgaagtttttaaactttaaaagtggccagggagggagccaatagagtaaaagtataatggtgagggttatgctggatgcaagaaattagtgtttcactaaagaagaatgttcagttgtgtcagatgtcacagagaggtgtagaaacataaaaagtgcaaggaatccttcagatttggtaaagaattg

SEQ ID NO: 845072 - DNA, 505 bp, Homo sapiens
ttgttgtgaaaactatgggagacagtacatttaagagctcagtaattataattgttgttwttattatgattaacttagtgaaaataaaatccaaaaggtaaaaaacaaacaaacaaactgctgctgtgatatactcatgaccagtagagagtcaaccatactacactctgtgtacccttagtactacacagctgaccctgaacaccttgggtctgagccacattagtccacttatatgtggattgttttcaattgaacatggatcgaaaacgcaatatttcgggatgcaaaacctgcgtgaccaagaactgcctttttctgtatctgtgggttctacagctccgatggggagacttgagcatgcacagattttggtgtttgtccaaataccagtcacctgcagatgacctaggggtgactgtaaatggataacagtgcttagaataatgacgttgaatcaatattcagcgtatgaaacttagtaaagtaggaaattgaactagaa

SEQ ID NO: 845073 - DNA, 588 bp, Homo sapiens
aataatatattgtcttctcaaaaaatgctaagagagtagattttaagtgttcttaccagaaaataatatctatgtgaagcaatgcatgttagtttgattttgccattctacaatgtgtgtgggtgtaaacgcacatatataaacatatatatacacacacgtaaatgtatatgtgtatatatacacacacacacacacacatatatgtttcaaaacatcattttgtacactataaatatatacaattttggccaggcatggtggctcatacctgtaatctcagcactttgggagactgatgtgggtagatcacttgagttcaggagttgagaccagcctggccaacatggtgaaaccatgtctgtacaacaaataaaactagccaggcgtggtggcacgtgcctgtagttccagctaattggaaggctgagatgggaggatcaatggagcccaggagggcaattttgcagcgagccatgatcactccactaaactccagcatgggcracagagtgagaccctatattaaaaaaaggggcaggccgggtatgctgcctcatctctgtaatcccagcactttgggaggcc

SEQ ID NO: 845074 - DNA, 585 bp, Homo sapiens
cttgatataatgtgacaaaaaaggtactttaccactgtgggctttttcccccaaaacctataatcccagtcttatcttgagaaaaacatcagacacatyccaataaatggaatttatatatacctcaccaggactcctcaactgtcaaggtcatccaaaacaaggaaagtctgggaaaccaccatagccaagaggagcctaaagagacatgacaactaaatgtaatatggtgccctggaagggatcctggaacaaagaaggacattaggtaaaaatcagcaggtgctaaataaaaatatggactttagtcaataatcatgtaccaatgttggttcaacagctgttgcaaacataccatcttaatatgttaacgacagcagaaactgggtaaatggcaattctctctactatctccccaatttttctataagtcatgaaataaagtgaatgttttaaattgacaaaggagatacataaatagccaacaagtgcataaaaagatgttcaacatcaggccgggagcagcagctcacgcctgtaatcccagcactttgggaggccgaggtgggtggatcatgagatcag

SEQ ID NO: 845075 - DNA, 611 bp, Homo sapiens
gaggtttgctagagacacatttaggatcattgcatttttgttggattgatccttttatcattatataatgttccttttgtctaataattttctttgctctggagtctactgtatttgatattaatagtgtcactctgttttgattaatgtttgtacagtttatctttttatatactttatcaacctatgttgttcattatgttatgagtttcctaagaaaacatttttaggatgggtggagcaagatggtggaatagagaacaccaccgatcatacccactccccccgcaggaagactaagattggcaactatccacacaaaagcagcagtttcacaggaactaaaagtcaggtgagcacttacagagcatggttttcacttcatatggctgaaagagaacagtttggaagttcctgaaaaaactaaaaatagagctatcatatgatccagcaatcccactgctaggtatatgcccaaaagaaaagaaatcagtacatcaatgagatatctctgctcccatgtttactgcagcactgttcacaagagctaagatttggaatcaacctaaktgtccattcacagataaacagataaagaaaatgtggtacat

SEQ ID NO: 845076 - DNA, 594 bp, Homo sapiens
tgttttaaggggtaaaatgatatcccattatggttttgatttgcatttgtctgatgattaatgatgttgaagattttatcgtatacctattggccatttgtatgtcttctattgtggaatgtctgttcagatcatttgctcaatttttttaaatcaaattttttgttttctgactgttgagttccttgtatattctggttattaattccttgtcagatgggtagtttgcaaatattttctcctattctttgggtgtcttttcactgttattgcttactttgctgtgctgaaactttttcgtttgatgtaatcccattcatctatttttgcctttgttgcttgtgcttttgaggtcttaccaaaaaatttttgccgagaacaatgttctgaagcatttccaaatgttttcttcaagtagtttcatagtttcaggtcatacatttaactctttaatccactatcatttgatttttgcatatgatgagagacaggggtttagtttcattcttctgcgtatggatatccagttttctcagcaccatttattgaagaaactgtcrtttctccaatgtatgttcttagtgcctttgtcaa

SEQ ID NO: 845077 - DNA, 360 bp, Homo sapiens
atatttaaaatgatacaattgccaaaaaygtggtaaattcccttttgggttgctgttagtttatcccaaccagacctcccatgttaagggagtttcctgaaccccctgacttttcaagactatgaaacgtgctccgggtacagctccctcaagtctccacaccctcccactccatgaaagagacagaacatctgctcctcatctctgggaaagtatatttaattattggatgctttccttttcaaaatgatgctggcttattgtgggtttttttctttttttttttagcctccagggcacaaacaaaataaaatcatcccttcgatgtttaaatcagataatagcatctgcatcaacaaa

SEQ ID NO: 845078 - DNA, 614 bp, Homo sapiens
ttttatggctgcatagtattccatggtgtatgtgtaccacattttctctatctagtccatcattgatgggcatttgggttgawtccatgtctttgcatagctttacctatgaaaaagctaggctcagaagtattaaagtaatgtatctaatgccctggggcaagtaagtggctgcactagaattcaaactcaggtctacagaactgcaaagctcagggtctttccatatgatactcatgatgtttcagctggttcaccccagcttgctctctctgaatggagaaagggctgaaaaaaaaagaaccaggcagcaataggttccgagactaaacaagccaataacattcaagacggaagtaacaaaattcaggtcaaggcaagaaactcagagtccaagtgaaggctgttggggattgcagcagcagagcaaagaaggccagaaagaagctgacagtgtcagcagcccgccgccctagaagggagggcaaggacgaggctggctataaacagggctggcagcacagggagtgacatcaccctgatgtcgagacaagggactttctcaacaccagatgcttttattctcttctcaccttggttgcaccagtccttgg

SEQ ID NO: 845079 - DNA, 614 bp, Homo sapiens
ttttatggctgcatagtattccatggtgtatgtgtaccacattttctctatctagtccatcattgatgggcatttgggttgaatccatgtctttgcatagctttacctatgaaaaagctaggctcagaagtattaaagtaatgtatctaatgccctggggcaagtaagtggctgcactagaattcaaactcaggtctacagaactgcaaagctcagggtctttccatatgatactcatgatgtttcagctggttcaccccagcttgctctctctgaatggagaaagggctgaaaaaaaaagaaccaggcagcaataggttccgagactaaacaagccaataacattcaagacggaagtaacaaaattcaggtcaaggcaagaaactcagagtccaagtgaaggctgttggggattgcagcagcagagcaaagaaggccagaaagaagctgacagtgtcagcagcccgccgccctagaagggagggcaaggaygaggctggctataaacagggctggcagcacagggagtgacatcaccctgatgtcgagacaagggactttctcaacaccagatgcttttattctcttctcaccttggttgcaccagtccttgg

SEQ ID NO: 845080 - DNA, 609 bp, Homo sapiens
ggtgggaaaagagcagggaaggttctgcctcatcttcccctcagtttgagaatgaacattgttaggttcctcaaaaaactaaaaatagagctaccatgtgatcagcaatcccacttctgggtatgtacccaaaagatgagaaatcgagaaatcagtctttcagagagatatctgcacttccatgtttgttgcagcactgtctacaatagccaagatttggaagcagcttacgtgtccataaacagatgaatgtgctatggtttggctgtgtctaccccaaaatcttatcttgaattgtagctcccataattcccatgtgttgtgggagggacccgataggagataattgaaccatgggggtggtttcccccatatggttcttgtggtagtgaataagtctcatgagatctgatggttttataaggggaaaccccttttacttgcctgtcaccatgtaagacatgcctttggcttctgccataattgtgaggcatccccagccatgtggaacygcgagtccattaagcctctttttctttataaattacccagtctcaggtgtgtctttattggcagcatgaaaatggactaatacagaacggataaaga

SEQ ID NO: 845081 - DNA, 608 bp, Homo sapiens
aaaatctaatgatatatttaatttgttattcttatttttatttgttatttttatttttatttgttcttctcctgagaatgtgtaataagtgtctgtggtctgtaccttccgggggtggtttcaagcagaatctcagggcttagttttagggatattcctgggtgagaaggaaaaattcttttactttatacctgcagagaaattgatacagttccacaagaaattgtggtagatcaattggtgatttacaaaaaaaaaaaaaaaaaaaaaaaaaaaaaaatctgtttctcttttctgtacggtggagtatttgtgatagtggataaatgtattctgtaggtgggtgcagtggctcatgcctataatcccagcaatttgggaggctgaggcaggtggatcacctgaggttgggagttcgagaccagcctgaccaacatggagaaaccccatctttactaaaaacacaatattagccagttgtgatggcacatacctgtaatcccagctactggggaggctgaggcaggagaatagcttgaaccygggaggcggagggtgtggtgagccaagatcatgccattgcattccagcctgggcaacaagagtga

SEQ ID NO: 845082 - DNA, 287 bp, Homo sapiens
aagtaatagcttcactatgatcacagagatgatcaatgatctaaatgcctcacctattttcagcagagccatggatacaagtaatcacaaggcagaaratattttccctttgcttctgaactgcttttggtggcaatgatacaaatacaaattgtggttgatgtttgcataagggcacagacatgcttggtccaagctgaagtaaagattccaagttgtggaccgtcctgcccacattctgcatcatgatgtcaaaatagcatctgatgttctttgcattttcattg

SEQ ID NO: 845083 - DNA, 526 bp, Homo sapiens
atatggcatacaaatggaatcatacaatttgtagccttttgtgtctgatctctcacttagaataatgttttcaagacccatttatgttgtagttgtatatcagtactttgtccctttttatgactgaacaatattctattatatggatataccaacttttgtttatccattcatctgttgatggacattgggggtcatcctgtgtttcgctatcgtgaatagtgctcctatgagcattcatgtacaaatatttgttagaatacatgctctcagttgttctgggtatatacctacgagtgaaattgctgggtcatatggtaagtttacgtttaatttattgtgaaactgacagttttccacagcagggtgctttgcaatccataggaatttttagttagcttytctatttctgcaaaaaagtatgttgagtttttgataagtattgcattgggtaagtattggagtgggtaataacactttggggagtgttatcatcttaatattaaatcttataatccatgaatgt

SEQ ID NO: 845084 - DNA, 620 bp, Homo sapiens
gtattggccaggctggtctcaaactcctgacctcgtgatctgcccgccttggcctcccaaagtgctgggattacaggtttgagccaccatgcccagcctattttgccaatttctgtcttttagttgggagtttagtttatttacatttaaagtaaatgataaactgaaaaaggacttatgccattttgctatttattttccatatgtattacatcttgttttcagtttttctgtgtatgccttcttttgtgtttttttctaacgtgccattttaattccttttgtatttctttgtattcattatttacctagtgttaatacttggaattgcaattaacatcttgaatttataacaatctagcttgcattaataccaactaagccttaatattatataaaaactctgctcctatacagctttgtccctgtcttttgtcttcttattgtcacatattaggccttcataaattgtgtgcacattacatagatgcataattattgttttatgtatctgtcttttaaatcacataaaaaaaagagagaacataaaagccaagaatacaataagactggcttttgcatttacttacagtagttasttttatcatttgaattttttg

SEQ ID NO: 845085 - DNA, 593 bp, Homo sapiens
cctttcttatcaatagaaacttgtggaacttttgtaaaatataataatatttaggtttgagattcagaggtcaaggacaatttatcccttttggataccagaaagaatgttttcctctgccyccatgacaggattaaatgaagtgtgtgtgtgtgtgtgtgtgtgtgtgtgtgtgtgtgtgtgtgtgtgtgtactgtttggggtatactgtcttcctccttcaggaaaacccacccagtttgtcccaagtaatacaattctcattcacagggtattgcattcctaaaccagaagtgattctcaagttggagaaaggcgaggagccatggatattagaggaaaaatttccaagccagagtcatctgggtgagttagtatgtgccagatggaatttaaaggaaggtagatcacaaagggtaagtttggataataagaccattgaaatgttctttaggaatcatgttttagaggctccagacctttggaagtaacatgttgacgtgacccaaatatgcagtgactctgaatcacccagcatctcccagtatcactttcatacacacatcttgttgttttttttaaattgtgatata

SEQ ID NO: 845086 - DNA, 630 bp, Homo sapiens
gtataacgagaatgaaatgtataatgaatgtatcattatarctgttatgatatcctgcagtatattttcattactgtaataatcttgtgctctatttatttatcctttcttttcctaaccactggaaaccaccaatcttttcactctccaaagttttgcatttttctgaatgttatatacttggaatcatagataactttccagattggcttctttcagttactaatatgcatttagtatgtaatatgcagttagtaatagctcatttcttttcagatgtgattaacatttcattttctaaatataccacatttgtatttatcattaagctacttaaggaaatcttggttcctcctgacttttggcagctattttaaaagctgttataaacatctgtgtgcagatttttgtgtggacataagctttctggtcatttggataaagacctagggaatgcaactactggatcacatagtaagattatgtgtagttttgtaagaaactgcccatattaggagagtctttacattggtagaggagactgtgctaacatactgcagaaccatgctcagctaattatttgtttgtatttgttttagagatggggtttccctaagttgcttaggcttg

SEQ ID NO: 845087 - DNA, 611 bp, Homo sapiens
taatttgtatcctgaacgtttctcttcagagaaatataaaaatccagcaatccattatagtattgtattaagcctaagatttcattatttatcatacacatttatttatttatttttattttttatcatacacatttaaagtacggcctttgatttatagaatttttcattttgtggttgtgcctgcttatctttgtttttgtgtgtgtatgtctttcacagaaattagtatcattctgtcatagctcttaggaaattcagagttaatcaaatatgttataaaatgtgtttgtataatgaaaaggttggaggagatgattctgaaggtgccatttagagcaggtgtgctatggtttggtggctctctattctctgcccgctttaaatcttagtaggcagcagatgaaatactactaagtgacctttgacacagaacccatgaatgctccaagtatgatttcattttaccgtgttctttgtaaactcaaatgcctgtcaaatcagatgtgtgtttcgatgtttttactgaatgcgccttgaggaggagactaaagcttggggtcaatttggcataatccccacgtttttytttttctattatagaggtttct

SEQ ID NO: 845088 - DNA, 529 bp, Homo sapiens
gaaagggaccttggagatcactgagtcccactgtctcactgtactgttgaaaaaccaacatgtgagtaatggaccgaggaggaagaaggcagcatttgtggagggcttaacatctgctttgggatatagggtcccaggtcccatagccagtgagtggcagagtggggaccatgcaatgcttaaatgagcacttctaccccatacacactttgccctacgacttacatattcataccacgtgtgggaaagggtgtggcatttaccacataaagatacttggaattcttgcctcaaagggtaagtgggttttccttctgtattagccgatatactttttaaaaattatggtaaaatatccaaaacgtacaatttaccactttaatcatttttaagtatacggttcagtggcaccaagtacatttgtttcgttgtacagccttcaccactatccatccaatacatttttaaagtgagtattttytaaaactatacatccaaaacaagagtgaaggaaacaaaaaagaagtag

SEQ ID NO: 845089 - DNA, 613 bp, Homo sapiens
gaaagatgcctttgaaaggccatctgtgggcaaagtctcgtgcccctctgtgaatgcatttgatgtaaatttttgttcctcttggttgaataaatattgttactaaaaatagctttaaaaggacatcaggatacagctggagcaagacaaaggaagcagggcagattgctgtgggttttggaactttgctttcctgaacgcattgtacgtgtacagtccgttacggcccagccccatcactcatgtcattcccagaggcaaaggcatttggattagtgaaatgcagcctccctagtcctgcccctgagttcctagttatctctgtaacagcagctacaccttgggttagggtcttgaagttagcagcctccgccccaccctgatagacagacatattctccttctagataggaaataaaaagcagaggatgcctgttggagaacagagctgggcagcagagggtgggcaggtggcaatgtggtgatamcctctccaccctgtgggggacgccagttcctgcacttcccatccagccgctgggtgcactgccacagtcacggcttgcagaatgaaggatttattagtcatggaaactggcctcggagcaccgtg

SEQ ID NO: 845090 - DNA, 553 bp, Homo sapiens
ttttaaatgtcaacagcagactagaatattttatatattataatttaacaggttatggtgataattattggtgataaagagagtaaagcatacaaatacaaagcayaaaattgtatcagctgtgattcccttcacatgacctgctgaaagcagatgtgtgcgtgagcaccagccagacatgctgaaacatgttcatgaagtgggaaatagaggtgacaggcattcagtgttgatgcaggagctacctgcttcacgtgagttacggtcacttcaaaggaaagcagataccatagcatgaatcaatatttccttcttagaactttctacaacaaaattgaagagagtcgagcttggatgattattgagttcagccaccagcccaaagcctgagtcccctcccgttgtccccatcagtcactaaccagcctatgctcaaacggctcatctcatagcatctcatgtacaatccatgtgggaactctgaactaatataagttttataatttgaaagtgaagtcgtgtgtttcaaagtgctttgtaagctgtagaactt

SEQ ID NO: 845091 - DNA, 540 bp, Homo sapiens
ctttttaaattttcaagtggttgttcctgagtttacagtatgcatttttattagtccgctttgaattgatattatttccattttgttcaatgtgaaaaactttaaaataattcaatttatacctctttttgtcttttctgctatagttatatatgtagctattattgctgcatatgttatacaccccacataggttgctaatatttaaaattaaataatgaatcaattattaaagaatttaagaaatatgggctgggtgtggtgactcacacctttaatcccagcactttgggatgccaagccaggctgatcacttgaggccgggagttcaaggccagcctagccaacatggggaaaccccatctgtagtaaaaatacaaaaattagccaggtgtggtggtgcatgcctgtaatcccagayactcgggaggctgaggcaggaaaatcgcttgaacccgggaggtagaggtagcagtgagccaagaccatgccactgcactccagtctgggctacagagcaagacttcatctcaaaaaaac

SEQ ID NO: 845092 - DNA, 540 bp, Homo sapiens
ctttttaaattttcaagtggttgttcctgagtttacagtatgcatttttattagtccgctttgaattgatattatttccattttgttcaatgtgaaaaactttaaaataattcaatttatacctctttttgtcttttctgctatagttatatatgtagctattattgctgcatatgttatacaccccacataggttgctaatatttaaaattaaataatgaatcaattattaaagaatttaagaaatatgggctgggtgtggtgactcacacctttaatcccagcactttgggatgccaagccaggctgatcacttgaggccgggagttcaaggccagcctagccaacatggggaaaccccatctgtagtaaaaatacaaaaattagccaggtgtggtggtgcatgcctgtaatcccagacactygggaggctgaggcaggaaaatcgcttgaacccgggaggtagaggtagcagtgagccaagaccatgccactgcactccagtctgggctacagagcaagacttcatctcaaaaaaac

SEQ ID NO: 845093 - DNA, 540 bp, Homo sapiens
ctttttaaattttcaagtggttgttcctgagtttacagtatgcatttttattagtccgctttgaattgatattatttccattttgttcaatgtgaaaaactttaaaataattcaatttatacctctttttgtcttttctgctatagttatatatgtagctattattgctgcatatgttatacaccccacataggttgctaatatttaaaattaaataatgaatcaattattaaagaatttaagaaatatgggctgggtgtggtgactcacacctttaatcccagcactttgggatgccaagccaggctgatcacttgaggccgggagttcaaggccagcctagccaacatggggaaaccccatctgtagtaaaaatacaaaaattagccaggtgtggtggtgcatgcctgtaatcccagacactcgggaggctgaggcaggaaaatcgcttgaacccgggaggtagaggtagcagtgagccaagaccatgccactgcactccagtctgggckacagagcaagacttcatctcaaaaaaac

SEQ ID NO: 845094 - DNA, 585 bp, Homo sapiens
cacctatcttttctaaatatatattttcctgaagattctttagcgtatctgyacattatttagagattgttgtctgaattttcactatctgggttttctatgagttttgtcttgttgactgattttactctagacagtgtaatacatttttcagtttctttacatggctagtaatttttttatatttgtatattacataatgggcaacaagctccattatctttctggatgctcttgtctttctctgaaggtaattaacttttatcctagtggccagttgcatttctcatcaatcatcctaaatatatgagtatgttcctttaagctttagttgggtggttccatttctgttttggccttggtgtactctgtcagggatttgtatgaattccaatttggggacttccacttctgtggttctccctgctttctaggatttccctcctcaacttgtgtgtgctctgacatccccagactctcccttctcaatgggccctgactttcttttgggctgtatttatgacatgcccttaggagaagagctgtgtaaataaggatgtcacccaacgtggtcttgcctttcaa

SEQ ID NO: 845095 - DNA, 581 bp, Homo sapiens
ttgaacttgtatttgaccttatattctgatgraggttgaaattgacattaggcagttttgctttaagtcaacccacctcacatgttgaaataatgaggtctttgccttgatgttaactccatccccttcactctctgccatatttaaaatgtgctccaatgccatttagtttttactattaatagttatacagccttattaccgaagtattaagtggtatgattgggtcatcatctaaaagattccttacaaaattctctaaagacaggcccatgtgccagacattgtattattttgcctggaacatagcagttgctcaataaataattatttgttgcctgaatgaattcatgatttaatcactgaaatcaacaagttttgatgtcagtgaagccttaaccagcaatttggatgtcctgggctgtcatatcaatctagtaactcatcttctggtgcgcagaaaagtgttcatcaacagtttattcggtgctgtccaagagaaatagaatgtgggccacaaatgtgagccacagatgtcattttaagttttctagtagctacgtttaaaacaaaaagaaaca

SEQ ID NO: 845096 - DNA, 453 bp, Homo sapiens
atggaaacttctctgaggtacctgccccaggacttggagtctaggggagggatgatggcaatgaaaggtttcttttctcctgtcacatcttgctccagacgtcatcttgtctcctgttacacttrgatctcaggcatctatcctggcttgatgttggagtcccccaggtgcctcatagtcccctggacactggcagggtcacctttcttttctgaaattgcagggcagcttgatgtacattgtaatgaacccaatttatgatgcctggcaatgcatttactaagtgccatttatctttttgtgtgtggaacgcattcagtcttctaagcaatgcctggatgttcattcatgtctggacttcaggttaggcatgagggtgaggtaaagtcatttgcaacagggttgcagctttcgaaattggggacgtgactgggcgcggtggctcacgcctgt

SEQ ID NO: 845097 - DNA, 476 bp, Homo sapiens
ttcagaaccaagttccttatytttctccccatacctgctccaagtctttccatctcgacagtaactttatccatccttccagttgcaatggccaaaatgttgatgttgtcgtcgcctttttttccgtcgcttacctgttcaacctgtcaggatattctattgactctagcttcaaaatatttctagaatccaaccacctcacaccatcttcactgtatccaactgtagtccaagtcatcaactcatcagcgtttttctttttttgtttttgtttttatacgcctgccacctcaggagcatcagcgtttttcaaagtaggagttagaatgattctgttaaaatataagtcagatcaaattattctttggttcaaaactctccaatagactccctatcccactacatacaagtcaaagcccttataatggtctacaatggtgctactcaagtatggtctatggacctgtgactgtctg

SEQ ID NO: 845098 - DNA, 533 bp, Homo sapiens
gagcatggtgcactacaggcattgtctggagaagctggtctcggtaggactttaggaccacccttcagaaggggagccccactgacgccagcttggaccagagcagggtcagcggcgaggaggccacaggcggaacggaagctcgtggactcagagttggaagtcctcggccttgccccggctctgccctctctgtgctgcgtgcccttgggctgcttatttaatatttgtcagcctcggtttcctcacctgtaaaatggggatgataacagtatctacgttgaagggttgtagtgtgaagcaaatgagataaggcatttgagcagtgttttattcagactgtgtgttggaggaggcttgggagggtctgagggagattatgaggggaaggcagcagcgaaacttccccacctaagccagccctgggcactgcctctcagtaggagaggatttatttatcgctctgtggcatggaaatgctatttcytcttaagagccttctcatttggtctccatgttttgcctgggttggg

SEQ ID NO: 845099 - DNA, 533 bp, Homo sapiens
agcttctgattctttaaaaaccccagggatgccagaggggaacaggaggtgacacttgggaactgcagctgctctattctagtccgtactctccaktcacatgtctcaaccccttgagatgacccttcccaagggccttaaagatacgacaggctgagagctctgcaatcacggtagtaatcacaggcatagctatatgagtattctggccttatccaaattccaaaattctctgagataggaattatgatctccatttccggagcagaaaggggaggtgcacagaagctaagtaacacgcctaagtcacagagctggtaagcagcagagttgagatttaaacccagctatgtctgacttctcatctaagtttcccagaaggccctgggtggggcatttaaacaaataactgaggcagtgggacacgactcatgagggctctcaccaggaagcagctgacgtctatgagcaggacagtggggatgccaccaaaggtgaccccctggagcacggtgctgtttttggccgagttg

SEQ ID NO: 845100 - DNA, 331 bp, Homo sapiens
tctgaggtagtgacgtttaggactcaaaaaatgaatgttgggaggaacagcattcaacctataacagggattggagggaaatttttctacgaagttaatccttgagtttacttgaaaatgataaggaaagtaactcaggaaagatgaacatgcagacagttcaggagaagaaacaggaaaacacaaatgtgcaaaggcatgggacataaggtgcctgtatgggtgtggtcccagaggagactgatgwcatgccagaggcttgtatgtccagctcagcagtatgtaattatagtgaagatagcagagagccagtgaagaattgtatacatat

SEQ ID NO: 845101 - DNA, 560 bp, Homo sapiens
tcacttgaaatggtataacactgataccagtagactgtgataagttacgtatattgtaatacctagagcaaccactaagaagactacaaaataatacactcaaaaacattataagtaaatcaaaggtgaactaaatatactcatgtaacctagaggatgtgaaggaaaaagaaacatagaaacaagaaaccaagagaacagaacagaaaacaaataataaaattagatgtattagacttaagtcctaatacatcaataattacattaagtgtaaatggtgtaaataccatggttaaaagacaaagcttgtcagattagataaaaaagaaagaccaactatatgttgcttataaaaatgtcctttagatgcaaaaataaaaaaaaggttaaatataaagggatagaaaaagaaataccatgctaaattatttaaatgaaagctagagtgactatattaatatcaagataaaggtaacttcaaagcaaaacatattacaagggataaaaaaggtcagttcatcaagaggacttaayaatcatgaaattgtatgtattcgatt

SEQ ID NO: 845102 - DNA, 609 bp, Homo sapiens
aacacatcatttgctaagctttattgattctaagactatgcattttgtgcaaataaagaattgtrtcaattaaacataatcttcagcattttatgtgctatttatatattgtcaccctagcttttattttccaaaatatcctttagagttccaaattcaagaaaagattttagtatctaagtcatactgtgtaaaattggcttgtttaagtagatcttgaagtttgcggccttttgatttccttttttaaatttttaatagaaccattgcactaagtaataatgataatcaatcctccctttaagacttttaagacataccaggccctgcctgactctggacatgaactaggtacttctctgtcccactgataaatggaaattctctatagtcctgacttatacatttaatgattatatagagagtcttgggttttacagatatagatataaaggctctatattgagtattcaaattaataaatttaaagtacattttcttttttatttcccatatcaaccatgggataataaatgtatagaatacaaattgcaacaccaagttaatatgtttatctccatcagtctcatgcaagtcacttttctaaaa

SEQ ID NO: 845103 - DNA, 593 bp, Homo sapiens
tattcacagatgacataattaattttatacaaaacccaaaggaatctataaagccaactacctgaactaattaagactgacaaattctaaatatgcaagttcaatataaaataatcaattgtatttctgaaaaatttaaaactgcattaactgtagcatcaataactataaaatacttacttatatggtgggccttcaccatatagaggctcaggccttcagttctggaaaactaccttgtctttctgtaatgtttccttcattttgtgtgttctttatggaattgcaattagttaagacacttgacctcctaaattaataacatgaattttcttttccctttttgttcaattctcaacattttctttatatttttcatcattcttcacttttagaatgaggcacagagaacctgggtaattcttcaggatcactcagtctttgtttgaactgctctttggaaacagagcacatgactttagcgactacacaatactgctttttttaraaaatgcttttgtaatgaataacctgatgtttaattaataagtgtatcctatagggcagagaagccacaaaaagatataaaaatg

SEQ ID NO: 845104 - DNA, 627 bp, Homo sapiens
agaaagaaattaaataagatctatataactggaaaggcatcccatgttcatagatgttaataatattaaaatggcaagtcttcccaaatcaatctatagattcaatacaatacctaccaaaaycccagctgcgtttttttgcacagactcacagattgatcctaaaatttacatggaaaagtgaaaggaacccagaatagccaaattgttttttaaaaagaaaaaaacttgaggactcacaacgtcccaatttcaaaacttactatgaagtaatggtaattaaaatattatggtacagtcctaagtacagacacataaatcaatggaataaaactgggatccaagaacaaacttttacatgtatggttaatttatttttgacaagattgtcaaacacaagtcaatgaggaaagaattagttttttttaacaaatggtactagaaaactggtatccacatgcaaaacactgaagttggacccctacctcacaccatatataaaaaattgactcaaaatagatgacggacctaaatgtaaaagctaaaactataaagctctttagatacggcatcaaaagcataagcaaaaaaaaaaggaataaattgaactttatcaaaattaagaat

SEQ ID NO: 845105 - DNA, 621 bp, Homo sapiens
tcttcccagcttctcaacattgcagggtcccattagtgttctcatctagcgccttagctttcagtattatctgtatgttgatgattcccaggtttatatccctagtctggccgtcccatctgaactcagtctactccatatcagttaatggcagttccgtccttttagttgttcaggtcaaaaaccttgaagttttcttgacttgtctctttcatgtctcatgtaagatctttcagtaaatcttgtcagttctactctgaaaatacatccaggatctgactgttgtcattgctattccgaggtcctgtccaccatgaatttctgcagtaacctatttggtctctttgcttttacaatcctgttctccttcattatttttcacacagtacccaaactgatcatgccatatgtttgctcaaaatcttccagcatcttcccatttcaaccatgataaaagccaaagtgatcttacagtgttctacaaggcyttatacgatctggtttccatgtagcttttggacctcactccctatttctcttccctctccttgaacccaccaggaatgctcccaccttcgagcctttgtatttgtttcttctttgtggagtactgtttcagag

SEQ ID NO: 845106 - DNA, 583 bp, Homo sapiens
aaagctgtctgttttaatactttgagaatgtgaggaagtgtatttgatagactaagtctatcaaatactctttagggacttaatttttttttttttttttttgagatggaatctcgctttgtcgccaggctggaatgtagtggcgcaatctcagctcactgcagcctccgcctcccaagttcaagtgattctccttcctcagccttcagagtagctgggattacaggcacgtgccaccacacccagctaatttttgtatttttagtagagaaagggtttcaccatgttggccaggatggtctctatctcttgacctagtgatccgcccacctcggcctccaaaagtgctgagattacaggcgtgagccactgtgccacagccagggacttaattttttttaatgagtatctttttaacctgagatgcttaaaatactaaattttttattgtggtcctggaacttgttatatattagttttgaaaatggctaatttttacatctctgtttttaraaaagatatatgtgaactggaaaaaaaataagggtatgaacgtgaattggctttaagttcaaagtttatg

SEQ ID NO: 845107 - DNA, 553 bp, Homo sapiens
ccctgaactttcttgagctccggatcttaaatgttgacaaccctgatgtcttagcagtttggggtctactcaaagcccagttatcattgatgaggtctataaaacatttatagaagaattaatgccaattctagagaaactcttacatataatcaatgagaaaggaatattccaaaatcactctcgaagaggccagtataaccctgatgcgaaaacctaacaaaaacattaaagtgttagagtgtttgagaaaagtgaaaattacctttctgataaagactatgtgaagatctctcgaaactaagcaataggaaaattaacaactcaataaaaatgaatgaaggatttgaacacatatttcatgcacatggaagaggcccaacgtcattaattattagggaattgcaatttaaaaccaccattagatgccactrcatacctactagagtggctgaatttttaaaatcatactgatcatactaagtattggcaaggataaggaagaacagggaccctcatacattgctaatggaatgtaaaatagttgtaccat

SEQ ID NO: 845108 - DNA, 613 bp, Homo sapiens
atagaaagtgcagaggccctgagtgagaagtgagcttggcatgattgagaaaaaggaagtattatgtctgaggtagagaagtgaggcagagagcagccaggaaagagatcagagcagtgrccaaggacctgccacaggaagcttgagagtaatgataagtactttggattttactctgagcaagacagtgatacaggagctaaaaagaaattatttaggcagatagtgagggtaagagagtcctcggcagaacttcccttttaatagacagcaaccccaaatatcatttattttctaacaaagagcagcctgaaaaatcgagctgcagacatagataagcaagctggaagcttcgacgggagaatgctggcagctgtgccaatagaaaagggctacctggaagccaggtatgttcaacatggaggctccatctacccttttctttgtcaccacgtgtatagtaaaagaagcaggcaacatggctggccaggtagagaacccatctgcataataaaagattaaggtgggaccgcaagcttcttcgcaccctatgcaaatggcacacctggtccaaccaatcttttgtgccctatgtaaatcagacacctcctca

SEQ ID NO: 845109 - DNA, 580 bp, Homo sapiens
tcagaggcataatgctaagcaaatgaaagaagccaaacagaaaagactcttttctgttcaattccatgtatagttgtccctcagtatccatagaggattgtttccaggaccccccaaaataccaaaatcaatagatgcttgactcccttatataaaatggcctagtattttcatataacctatggacatcctcccatatactttaaatcatctctagattacttataatacctaatagaatgtaagtgctatgtaaatagctattatactgtattattttcatttatattatttttattgtcaattttattgttttttctctaatattttcaatggacagttggtcaactctgcagatgaagaatctgtggatatgaatggcctactctatatgatattattaaataggcaaagactgtagtgacagaaacaggccagtacttaccacgacctgggagtggcaggagggaattgactgcawatgtgcaagagagaacatttcagggtaatagaaatgttctatgtcctcattgtgatgatggctatgtaactgtgtacattatcttccaagcattcacct

SEQ ID NO: 845110 - DNA, 580 bp, Homo sapiens
tcagaggcataatgctaagcaaatgaaagaagccaaacagaaaagactcttttctgttcaattccatgtatagttgtccctcagtatccatagaggattgtttccaggaccccccaaaataccaaaatcaatagatgcttgactcccttatataaaatggcctagtattttcatataacctatggacatcctcccatatactttaaatcatctctagattacttataatacctaatagaatgtaagtgctatgtaaatagctattatactgtattattttcatttatattatttttattgtcaattttattgttttttctctaatattttcaatggacagttggtcaactctgcagatgaagaatctgtggatatgaatggcctactctatatgatattattaaataggcaaagactgtagtgacagaaacaggccagtacttaccacgacctgggagtggcaggagggaattgactgcaaatgtgcaagagagaacatttcagggtaatagaaatgttctatgtcctcattgtgatgatggctatgtaactgtgtacmttatcttccaagcattcacct

SEQ ID NO: 845111 - DNA, 633 bp, Homo sapiens
cagaatggattgaaaaaacagtccaattatttgttttctaaaagagactcactttagatttgaggacatgcatagattgaaagtgaaaggataacaagatatttcatgtaaatagtaactaamatagaagtggctatactactatcagacaaaatagaataaaaactgcgaagagggacaagaaaggacagtatataataataaaagggtcagtttactagaagatttaatggttatgaacatatatgcaccaaacataagagctcctaactgcatgaagcaaacactgacagaattaaagaaacaagtgttcctataattatagtaggagatgtcaatgaccaattttcaataatgaatagaagaaccagagagaaaatcaataaaggaaattgaggaattgaaaaacactagactaattgggcctaagaaatatatacagaacactccacctaacagccaaatacacattttttctcaaatacacatctaacattctccaggactgactatattttgggtcacaagtcaagtcttaatgaattttaaaatattgaaataatacaaaatatattttccaatcacaatgggataaaactaaaaattatagcaagaaggaaaaatggaaaacct

SEQ ID NO: 845112 - DNA, 622 bp, Homo sapiens
tttaaattaagtttgaagttaactatgggatttttcataggtgccttttttcttggtgaggaagtccccttttatttctagtttgctgaatgttttatcatgaagggacattgtgtttgtcaaattccctctttgtgtaaattgggataataatgaagtttttcacctccttgattctattgatatggtgtaatttttttttttttgactgggtctcactctgtcatccaggctggagtgcggtggcacagtcttagctcattgcaacctctgcttctccagctcaagcgatcctcccacctcagcctcccaaatagctgcgactcctatattacattatttattttattgttctaattttgaccatttggagctttttctgctggctcatgtgttcctttgacatgccacatcattgtgtgagcgtgtgtatctgtgtttggttagcactatatcacttattgatactaaattgatgatctaggataatcacatcttttctaacttaattctataatcagtcatttctccaagaagccctacttcctttcattggagaatagtgttagaaatcaaartattatcacttaatattcttgttattaatgaggtatcattactt

SEQ ID NO: 845113 - DNA, 649 bp, Homo sapiens
caagatggtgaaaccccatctctactaaaaatacaaaaaaattagccgggcgtggtgggacgcacctgtaatcccagctactccagaggctgaggcagagaattgcttaaacctggaggrgcggaggttgcagtgagctgagatcgcgccaccgcactccagcctgggagacagagcgagactctgtctcaaaaaaaaaaaaaaaaaaaaaatgcttctcattgacaatacacctggtcaccaaagagctctgatgtagatgtacaaggagattaacactgttctcatgcctgccaacgcaacatccattctgcagcccaaatatcaaggagtaatttcaactttcaaatcctattgtttaagaattatattttgtcaggctatagcttccacagacagtgattcctctgatggatctggtcaaattgaaactttctgaaaaggactcattattctagatgccattaacaacactcattattcatgggaagaggtcagaatatcaacactagaggaagttggaagaagttgattccagtcttcctggatgactttgaggggttcaagatttcagtggagaaagtaacctcagatgtggtaaaagcagcaagagaactagaattagaagtggagcctgtagctgtcattg

SEQ ID NO: 845114 - DNA, 579 bp, Homo sapiens
ttttttcttagaaaattgaccctttattattatgtgaagcttcttttcatcctcaatagttttcctttctttgaactctgctgggcttgaaatcactatagccaccccagataattttcactggtgttagtgtgaggtatcttttttttccccatccctttgcattgaatttatctaagtgtttatatttaaagtggatttcttgtggacaacatgtagtcaggtcttgtttatttatcttttctactctagtggtcttattttttaatccactcaacaatcttttccttttaactagtgtattcagaccattcatatttacagtggttattgatatggttggactaatgtctaccatgtttgtatgtgttttctttctgttgcagttgttgtttgtttctttataatccctctacttttctttctcaattgagaatttcatacgattatattgtaycacctgtcttagaatgttggcgatacttctttttgatatgcttagtgtttactctagttttctatgtacatttttaactaatataagtccacttccaaataacactatagcatttcacatgt

SEQ ID NO: 845115 - DNA, 579 bp, Homo sapiens
ttttttcttagaaaattgaccctttattattatgtgaagcttcttttcatcctcaatagttttcctttctttgaactctgctgggcttgaaatcactatagccaccccagataattttcactggtgttagtgtgaggtatcttttttttccccatccctttgcattgaatttatctaagtgtttatatttaaagtggatttcttgtggacaacatgtagtcaggtcttgtttatttatcttttctactctagtggtcttattttttaatccactcaacaatcttttccttttaactagtgtattcagaccattcatatttacagtggttattgatatggttggactaatgtctaccatgtttgtatgtgttttctttctgttgcagttgttgtttgtttctttataatccctctacttttctttctcaattgagaatttcatacgattatattgtatcacctgtcytagaatgttggcgatacttctttttgatatgcttagtgtttactctagttttctatgtacatttttaactaatataagtccacttccaaataacactatagcatttcacatgt

SEQ ID NO: 845116 - DNA, 586 bp, Homo sapiens
ttaactaatataagtccacttccaaataacrctatagcatttcacatgtcctataggtaacttacagcgtttcccactttctcccttgcatcccgtaagatgctactgttatttatcttccccacgtgctatattcattacctgtctgatccaccgagaatgagaaccatacaatactctattgtattttcattaactttttctctgaagctcttcctttttgtatgtggatatgaattttggttctatagcatttacatttttctgaagaacttattttacaatttcaggtagggaaaacctgcagccaatgaactccctcagattctgtttgttagagcaagtctttatttctacttcacttgtgaataacaatttggtggctatagaatgctaggtgaataggggtttttttctgtcaacactttaaacacttatctctgctctttattttgtttatttttttgtatgatttctgatgataaacccactgtaaattatgtccttattcttctaggtttgctcctcagtgagtaaaacaatttttttgtctctagcttcttttgattttcttttcatttttttg

SEQ ID NO: 845117 - DNA, 518 bp, Homo sapiens
ataatattctattaggaccattacttcaattgcagagaaatatttctcattaaaaaatgcctgttgaatgaggacagctggcaggaagagccacctgtccaattagcagcagcccagccgtgcctctcccagrtcctttggctccctgtaaccatcttgggagctttcatttatgtctataacggtgttcctcattgttttctacaaagcaaaaaatgtctggagagacagctggttcaagacatcttacctgtataaacaatatctttgctttccagtctgcggtggcattgttctgtccctggttgaatacgttatgtttgaagacattcaagttgtaaacacagagccatccatccttcagctaggcaggggtttgggtaattaacaacaatcaaagttgctgtattcagaggttggaagaagatctggaggaaagattctcactcttggtttaatttgctgatgaaaatgttggatggggaagaaagcttagtctggtcctctcatcttgcagg

SEQ ID NO: 845118 - DNA, 518 bp, Homo sapiens
ataatattctattaggaccattacttcaattgcagagaaatatttctcattaaaaaatgcctgttgaatgaggacagctggcaggaagagccacctgtccaattagcagcagcccagccgtgcctctcccagatcctttggctccctgtaaccatcttgggagctttcatttatgtctataacggtgttcctcattgttttctacaaagcaaaaaatgtctggagagacagctggttcaagacatcttacctgtataaacaatatctttgctttccagtctgcggtggcattgttctgtccctggttgaatacgttatgtttgaagacattcaagttgtaaacacagagccatccatccttcagctaggcaggggtttgggtaattaacaacaatcaaagttgctgtattyagaggttggaagaagatctggaggaaagattctcactcttggtttaatttgctgatgaaaatgttggatggggaagaaagcttagtctggtcctctcatcttgcagg

SEQ ID NO: 845119 - DNA, 610 bp, Homo sapiens
taaactcctttgtgttcttttccttatgcaaggccataatattctattaggaccattacttcaattgcagagaaatatttctcattaaaaaatgcctgttgaatgaggacagctggcaggaagagccacctgtccaattagcagcagcccagccgtgcctctcccagatcctttggctccctgtaaccatcttgggagctttcatttatgtctataacggtgttcctcattgttttctacaaagcaaaaaatgtctggagagacagctggttcaagacatcttacctgtataaacaatatctttgctttccagtctgcggtggcattgttctgtccctggttgaatacgttatgtttgaagacattcaagttgtaaacacagagccatccatccttcagctaggcaggggtttgggtaattaacaacaatcaaagttgctgtattcagaggttggaagaagatctggaggaaagattctcactcttggtttaatttgctgatgaaaatgttggatggggaagaaascttagtctggtcctctcatcttgcaggttgagaaatgggggctggatcaatgtaggtggcaagacaagaacttatgattcactt

SEQ ID NO: 845120 - DNA, 492 bp, Homo sapiens
attgtcaacctgaaatgggggctgtaatgggaatggaggcagagacaaccatccaccaaagaattgtggtgtccctctttcatggcacagtgctggctctgggacgtggctacctaccaggaactacatcttcgcatccttccacccactctcatcccactaccttgcagctgagtccagccacaggaatgcatcctagccaatgaaatgggtatgaaagtgctgtatgatgccacttctgggcgtgacccatgcaaacctcaaatccagagcttctccttgccttgccctatctaatggctgggtacagggaagtttaagatcataggagatagtgaacctagatcttcaaatcacctgagggaacaaagtcttttaagatgaggcatacacacacggtctgttgctgaagcaagayataaaattttattgcgtgaatctattaaaatttttctgggggggtgttattcattacagcacctgctattaacc

SEQ ID NO: 845121 - DNA, 674 bp, Homo sapiens
tcactgcaacctccacctctcagattcaagtgatcctcccacatcagcctctcgagaggctgggattacaggcatgtgccaccatgcccagctaatktttgcatttttagaagagagagcctttcaccatgttggccaggctggtctcaaactcctgacctcaagtgatctgcctgcctcggcctcccaaagtgctgggtttacaggtgtgagccactgcaccttgcccacattgttcttttcaggggcctctgagccactcaataccttcttcatatattaaaggagggacgaatcttcatctttcaaaagggagggcgatggttttaaaagcaaagctctaacctatgagcttttactccaggacacaaacactggcctatggagctctgtggcccaagcacagggcagggtactcagtgggggcacaacacagaggacactgaaggctgggaaggggaagaatggatgggagcgagattcattaaaggttacaaaattacagctagataagaggagtaagttctactccataccactgtaagatggctgtacttaactaaaatattctagtttcgaagagttagaaggaggatacggaacatttccaacacaaataaatgatcaatgttgagacgatggatatgctaattacctggatccaaccactacac

SEQ ID NO: 845122 - DNA, 619 bp, Homo sapiens
agcagctgttattaattgaaagcttatttgagggccaaataccacagaatatgcattacttatttattgattttaayccatgcacccaatcttatgagtaagactattattatccccaactaataaatgaggaattgaggctcagagatactaagcacttgctcaaaaccaccagctagtacatgcttcactgagggtgtgaactcttcatcgttatatttaacctcattcaacttctggcaatcaatcccaaagaaataataataagtcactcatacacacagaggcgcctcatggtttgagaagagaaaatcagaaaataattaaacatccaacaatgaggcattgctaatataaactgcctccatgttggtcaggctggtttcaaatcatgactgcaaagaatagtctgtgaagaccagctgaagacatgtgttcacctcccacttcttcccaaaactcactgatatcccagtaaataactacaagtgagacaatatcataaaatcactgtgaactgataaaacagaagccaggtgaggtggtgctggtagcagaaccagggcaaatggagaaggagagggaggtggaatggtgaggagaaagaagctgtttccca

SEQ ID NO: 845123 - DNA, 412 bp, Homo sapiens
aattttcccaggctgaaacaggaaatataaccactaaggatccttaacaatcttccaagaaggtgcttaaatttccagagtkgggattatcaccccaaaatatgttcctctttggcttagcatgaggagcagcacaacttgcctgcttttgttccacaaatgtccaagtgaaatccgccaatcaactcacctgcccgtggacaaacaaaactactcagcaatctgtgccaccacctagttctacattcctaaaatgaataaacaatccaaatcattaatgctggtggaggcaaacaataccaaagaaagaagtaagctgaacccataaaactgactccaggaaaaatagagaatccagacacaaacaagaactttcacagaacccttaattaatatcttccaagatactgaa

SEQ ID NO: 845124 - DNA, 541 bp, Homo sapiens
ctacccttgctctctgttttggcctctctgtatcagtctcagttctctgcctcccaaagtactttttttttttgaaaatagtttgtatcttgttataataaggcaactctaagagttttcaacaaaatacatttkgtaggcttgggtagttagaatattcataccataaaaggtaattttccagataactccctgctctaaaatttcagtttctctttacagattactaggaaggtctttttcattgatgtgaaggactttgtcactttaggtaactaatactactgagcatattaatacccttcaacaccatgctaatcaatgctgaacaacagcatacaggtatcactaaagagaatacaatgctacaataaccaaaagctttgctctaggaggccaaaggggaaaaccgtcttgtcacttggctgccacttcaatgaagtaattgggtaagactcatttattcctaaacaacagttgccaaatttgaatggaaatgagtatttggatttagtcattaatgttcaaggaaatgctgcag

SEQ ID NO: 845125 - DNA, 457 bp, Homo sapiens
accctctattcccatgagccagtctcttctctttaagttgatgctagctgccgttttgtgttatytgttacagactaatacaatttgcaataattgaagatgcaatatttattgatatattattatcaattgaagtccatagcttacattaggattcactcttagttttgtatgttctgtggattttgacatatgtaaaatgacttgtgcccaccattacagtatcacatagaatggtttcactgccccaaaataccctctgttccatctatttatccctcttcctttccatggacccttgacaaccactgatctttttattgtttccatagttttgccttttccagaatgtcatgtagttagaatagtacggtatgtagccttcctaaatttgcttccttcacttagcaatatacatttaaggttattttttgttcccaatagctcacttcttttt

SEQ ID NO: 845126 - DNA, 581 bp, Homo sapiens
attatagttttagtttgcttattcttaatgactaatgatgtcaagcatctattcatgtgcttatttgccatacaagtattttttttccaagaaaatgtctgttcaaatcttttgcccatttttaaattgggtggtttattttctattatggatacaagtcctttatcagatatataatttgcaaatattttctccacgtctctttttcattctcttaacactgcactttgaagaacagaaaaattttaatgaagtccaatttattaactttttcttttatgaatcatgttttcagggtcatatctaataacctaataaaatttatctatgttttcttgtaaaattttacagtgataggtttaacatttaaatctattatctatttgcattgctctttttaatatggtataaggtgtgaaaataagttaattttcctttacacatatatatccatttttttaaaacagtacatttgttgaaaaggctgttttttctttactgaattaccttkttatctttgttgaaaatcagttgttcatatacgtgtggttccatccatttctggattcttgattctgttc

SEQ ID NO: 845127 - DNA, 615 bp, Homo sapiens
ctagacacagtgcttggacactcaacagatggtgactcctggcactgtgaytccgttcttaaaaaggcgttatattattcattactgaaaggtaagcgtatccatgggtagcaactgcaaaagggaaagttcaaacgattttgtgattttaaaacaaattttattctaggaagagatgcaaaactcccaaaattctgaaaccaaggaaggaggaatactaatataatcttataataaaaaaataggaatttgagtgaaatggaaattgaaggcatgaccataaaataataactgcttttcttctgtgcttgtaactcaatctcatttcttcttagtcacttcttacacaggaagcatttactttgtgaagataaatatggctgtccaaggaagggcaatataaaagatcagttggtttgtgtgaaaaccgggaaagaaaaaaaaattttttttcacttttcagtagaagactgaaagtttgcaaagagatgggatgggtgataaattttttaaaaatcctaggataaaatgtgattcttcaagtcttagtgtagttactttcacttgctatttatgttttaaaatagtacagaacctgaagatttaaatctaggt

SEQ ID NO: 845128 - DNA, 615 bp, Homo sapiens
ctagacacagtgcttggacactcaacagatggtgactcctggcactgtgactccgttcttaaaaaggcrttatattattcattactgaaaggtaagcgtatccatgggtagcaactgcaaaagggaaagttcaaacgattttgtgattttaaaacaaattttattctaggaagagatgcaaaactcccaaaattctgaaaccaaggaaggaggaatactaatataatcttataataaaaaaataggaatttgagtgaaatggaaattgaaggcatgaccataaaataataactgcttttcttctgtgcttgtaactcaatctcatttcttcttagtcacttcttacacaggaagcatttactttgtgaagataaatatggctgtccaaggaagggcaatataaaagatcagttggtttgtgtgaaaaccgggaaagaaaaaaaaattttttttcacttttcagtagaagactgaaagtttgcaaagagatgggatgggtgataaattttttaaaaatcctaggataaaatgtgattcttcaagtcttagtgtagttactttcacttgctatttatgttttaaaatagtacagaacctgaagatttaaatctaggt

SEQ ID NO: 845129 - DNA, 554 bp, Homo sapiens
gtcttttaagttcagggaggactcagcagatgagatctcttggccctaagtgtctagggccagactgactgaaattagaagggggagctcacagacctaagttcacacaatggaaaggagaatggctgccactgactggggtacttgataattattagcagatggtcgacaagttttccctggaacacttccgtgaggttatacatcctcgttatcattcattactcatgttttctctgcttctccctccttctcaggccactgatcaggagtcagagcagaatgagacaagaggagactgttactatggcacctaaacaaaacccagatgattaaaatcaggaaagcttttgtcctggacatcatgtgtgtgacctaagttgtctgtgtgtagttctgcatttcttgggtctctaagtggacaaaagtgatactggtcaatggggctgatgccctgcagccatgtgagaaaaggcgggcacctsggagcgtagccggaatgcagaaggctccttagaggagatgacaatgggacacgtgcttctaagagcaag

SEQ ID NO: 845130 - DNA, 610 bp, Homo sapiens
gattctttacaaaaaaaaaaaaaaaaaaaaccctgcctttgacaatttcactgggcaagtgatttgagtaaggaccaggtatttgagaatgagtagatcttataatattacgtagcctacctcaatctagggcagcctttgacacactagcaactgcctggactaatatatggcccttggctggatataagagctactgtcccaaacgggaccagacagtgaagcataacaggatcctttgcagagaagaaagatatttctctcttcattacatatcatactggggatgagaaatactgccagagtccccactatcatccttggctacagtttacttcaatcttactgatttcatatgaactaaatattaatgagtgtacagaaatgaacagctacagaaatgaacaactaaaatataaggtagggatctgagcaaatgcataaataaatttaaaaatcaaaatgtgttcccatcaaatcatcactgtggtgtgatttgtaaacattattttatgaagtcaatttcatgagaaatgtggaattctcrgggtacagtgtaaaaaattcttgacactctcctaaactatgtttatactggacaggaagtaaa

SEQ ID NO: 845131 - DNA, 602 bp, Homo sapiens
agcttatgaaaattataaaggcttttgacaaatatagtcccttagagaaagggcaccagtgacattcctacaggagtgagtctatctgtyccatgcattctctagtggtgtaccagaaatatctttaaactttcatcagttcaaggcattgcaactgatagcccagaagtaacttcattttaatttttacttcctggtaaagttgaacatatattggcctgtccattggccactgaaatttcttttcttgttaactgtatgttcatatcctttgtctttgtaaaaattaaggaatttaaaaaagtaatttagaaacggattgtgtgtcctcttcattaatttgaaagagctctttacacataaggtaattctttatcacatatgttgcaaactttttccagcttgcactttacattgtttctgaagtaaacaccatctgcatcctttcctgtcaacatccctacctcattcaggcccagctaatctagattttcctatgcactcagtcccgcaggcacatccttagtgcaggttcctggatggatcagtcactctgtggtgtatctaaaatgctcgcttatcctgtataatccaccaatcct

SEQ ID NO: 845132 - DNA, 545 bp, Homo sapiens
tactatgtatgtgtgtatattatacatgtatattttatataatacgtacaatatttaaagccataaaaatgtctttaaagatattctaagcttatatttttcagtaattcacataaaatatccttttttatactttaatgaatttgacatactcttaaatctgcacaagaacaatgtgacatctcataaataaacaaagctgtaagctacagagattcagaaacttttattactcacaaagtgaatatttgaagtcaacaatcacaataaacatctttccttaaacaacgaaaacaagattataaataaaagccatcgttactgccatggttagttaagagatgaggaaaggggcttgtgttattaactagtttcttcagttctagaacactgcttggcacagagtaggtgctcaataattgctgaataactrgaatggcatttaagaataaataattagacagtggatcttagttaacactgtagtgataacactgggaggtgacttttttcaacagcaatggcctttctttacaggaagaacc

SEQ ID NO: 845133 - DNA, 454 bp, Homo sapiens
gcctgaaatggaatacaaattgtatttgcacaaatacattcttctgaagggagcatctgtaaatttcagctgatccttaaaagcaactatgattccatgaatgtttaagaaccaaattccagtccaaatactgactgtagaggacaaacaattttaatgagaaggagaaaagagttaaaaatacttttatttcctttttgagtagatttctcattttcatgtttcaaaatttaaaatacatagcgtgtccagtgaatagtttctctcccttccctgcccacttctccctggttttcctccacatagcaaataatattatcagtttttgtgtagcttccataatgcattctctacatatttgcatgttatatatrcacatacatatatgggcaagcatgttatatatatgcacacacatatatgggcaaatatatacatacaaatatatacatac

SEQ ID NO: 845134 - DNA, 616 bp, Homo sapiens
cacttggtctcacgtgttcaaggttcaactgtgctgtggcatggcgagcactctatgtctttttatggctgagggatattccaggctatggayagaccgcattggtttgtgcatcttaccagtcgatgaacatttgccttgcttctactctttattgtgttattgtgaataacacctctgcaagcattcaagtgcaagtttttccgtttgtatctattttaggggattgaaatctacacactgtttacaaggtgcttttcccacattgcagatattctccattaaatattcttctgcacagtcactggtctgggcttcatgggattaaatcttgggatataacataattcacttggccgcccagttattagtcaatctcagctccatgagtgccccgtgtccggtttgtgccttcctatcatccctccctcgttccaaaagcatctcagaagcttgatggcttcacctgtgagacccaactcactggatggttggacccaaagtccccctgagagataatctcccagcagtgcagccgtgagacaaggatgggagagcagcgagcgtgggaccaggtgggttcctgccaggggagcccaaggtaacaggggtgcga

SEQ ID NO: 845135 - DNA, 510 bp, Homo sapiens
ggaaatctacactagtaaaggtatctgtattaggaagagggctgctccagacaaattttattaccagagagactttttatttttattttttgagacagggtcttgctctgtcacccaggttggagygcagtggcttgatctcggctcactgcaacctccacctcccaggctcaagtgatcctcccacctcagtacaccccctcaacagtatctgggaccacagacacacgccaccaccaattctttccctcaccctgccataacttgggttgctgccactcaagcccctaacagaagtcccaagccccatattcttttctgtagctcaggatgctatataagcttcaattatctgacccttctttgagcctcatattttgtaggattcctgtgtacaactatgtaattaattatttttcctccagttaatctgtctatgtcaatttaattctcagcccagccaaaggacctagaagggtagaggaaagccatttttttctcccttacacc

SEQ ID NO: 845136 - DNA, 453 bp, Homo sapiens
tgagactttggcagggcagaggaatgggtggggacactcttaaagtccaggcccaaaacaagcacacacaaaactgcaccacattccactggccaaggtrttccaattatgattgctgcattacaaacctacctgagactgactggcataaaacaattattttactatgttcagagattctgtgagtcagggatttgggccgggtatggtggaaaccccttgcctctgctctagaacatccggggcctcagctggaaacactcaagggctgtgactaggattggctggaggtgttttcactcacatatgtagcacttgatgctgggaccacagctggacctcagatcaactggaacaccactttgtggcttccctccatggtcactctgtgtggactagtttggtctcccttaaaacatggtagctggaggtcgggtgaggtggcttatgcct

SEQ ID NO: 845137 - DNA, 482 bp, Homo sapiens
tggagaaactgtgacacagattgattcattgacttgcccaagacttttcaagtagtaaatggcaataaatgcatgtaaaaggatctaacataatgcctgtmatctttgtagatgctcagtatttgttctttttcttcctcatttaattaacagtactacctgttatctctaattagatatggtagctccaaatacttttgctactaaccattgtgcttctgatagctattgttaactacaaacataattggtggatatgtcttaaaaataaggacttgtcttgaaacagccagatatgtgaaaaaataactttttagtaatagcccactttatatctgggttttataattatttttgtattgtccactgaaagcagaatttttttttttgtatcataggcacacttaagacctttctgtttggtaagaacagcattcattttctttgttcaatgtaacaaatatttatgaagcaccttggac

SEQ ID NO: 845138 - DNA, 625 bp, Homo sapiens
tcttcctttctaaaatgaaactccctaaacactaaagtagtggttcatgcaaatgaggatatccagttttaacctgtgctgcttccccctaattcaccttagctgtgtaccatgcaagaagcccaacataacgcatagcggtttgtctttcagacataccagtgcggcattctgacttctagatgctaaatacagccgggcgcagtgtctcacacctgtaatcccagcattttgggaggctggggcgggcggattgcttgaggccaggagttcaataccagcctgaccaacacggtgaaactccatttctactaaaagtacaaaaattagtcgggtgtggtggcatgcctgtaatcccagctacttgggaggctgaggcaggagaactgcttgaacttgggaggtggagattgcagtgagccaagatcatgccactgtactccagcgtgggcaacagagtgagactctgtttaaaaataaaaaaataaaaataaatgctaaataccattaatttaccaaaattcatgtcacctaaaaaagaaaagtaaaycaatgaccagttcaaatgtgttttaactggaccagggttccccaagaggtggaataataatgaaagcggcattgt

SEQ ID NO: 845139 - DNA, 582 bp, Homo sapiens
tcagtgacatttccaagctcacccaagtgagcttggccaagtttgaaacttgaagagtgcttaaagttctggatggactcaattccaggtccatctgccattaaaacccccaagctcacttgcttccaggctttaaacgtgctcctccattcccagccaagtgcctttaaagaaggctttctctgtggatctactttctcacctctcatccactcagcctgctgcagcctgctttctgccctcaccctctgcagaaacggcctgcagaaggtcatcagtgacctaggttaatcccatcagcctctcctcagttctcaccccacgtggccttttgtggcattgacattgctggccatactcatcttcccctaccctccaccctctgccacatctggctgagcccctttctctcaccacttcacctctcatcctataatccccacctcaggtccctccttccaggtgtcattggcccttttaaagracctgaggactcagctaaagttggaaatcaggaatgtgtgtgtgggacttcctggtaggtgtaggggtgctatgggtctaaatgtgtccccctgaaat

SEQ ID NO: 845140 - DNA, 373 bp, Homo sapiens
gctcactgcaaacttcacctcctgggttcaagcaattctcctgcctcagcctccccagtagctggggctacagacatgtgccaccatgcctggctaatttttattttttgtagagacagggtctcactatgttgcccatgctgatctcaaactcctggcctcgagtgatcctcccacctcagcctcctatagtgctgagattacaggtgtgaaccatggtgcctggccaggactgatttcctkataagaggaggaagagacaccaaaaacctgtcgctctctttctttgtacacacagaggaaaggccatatgaggacacagcaagacggtggccatgtgcaagccaggaagaaagaactcaccagaaaccca

SEQ ID NO: 845141 - DNA, 649 bp, Homo sapiens
caaaagacagcagaatcccatctttcttccattttcagtgctgccgcaatggtctgcatgagtggcctggctgacaccctcagagcaccaacaatgctgaaaagagaagcagacaccaggttctttttytctctttctttctttttttgagacagagtcttgctctgtcacccaggctgaagtgcagtggcgcgatctcggttcactgcaacctccaccttctgggttcaagtgattctcctgcctcagcctcccaagtagctgggactacaggcatgcaccaccaagcctggctaatttttgtatttttggtagcgacggggtttcaccatgttggccaggctggtattgaactcctgatcccaagtgatccacctacctcagcctcccaaatttctgggattacaggcatgagccagtgtgcctggccaacaccaggttcttattaggctgtgctccaatatcatcatctggtttctcattgtgatgatgaagcttgataactttggaaaatttgaaatcgtcgttgatcctagaactgagaaaattgttgtgaccctcacaggcaggctaaataaatgtgcagtgatcatctccagatttactgtgcaactcaaagacctagaaaaatggcagattagtctccatc

SEQ ID NO: 845142 - DNA, 649 bp, Homo sapiens
caaaagacagcagaatcccatctttcttccattttcagtgctgccgcaatggtctgcatgagtggcctggctgacaccctcagagcaccaacaatgctgaaaagagaagcagacaccaggttctttttttytctttctttctttttttgagacagagtcttgctctgtcacccaggctgaagtgcagtggcgcgatctcggttcactgcaacctccaccttctgggttcaagtgattctcctgcctcagcctcccaagtagctgggactacaggcatgcaccaccaagcctggctaatttttgtatttttggtagcgacggggtttcaccatgttggccaggctggtattgaactcctgatcccaagtgatccacctacctcagcctcccaaatttctgggattacaggcatgagccagtgtgcctggccaacaccaggttcttattaggctgtgctccaatatcatcatctggtttctcattgtgatgatgaagcttgataactttggaaaatttgaaatcgtcgttgatcctagaactgagaaaattgttgtgaccctcacaggcaggctaaataaatgtgcagtgatcatctccagatttactgtgcaactcaaagacctagaaaaatggcagattagtctccatc

SEQ ID NO: 845143 - DNA, 538 bp, Homo sapiens
tcattaagagtcgtaacagcattcttattgttatctgtagtatcatctaactcactgacatatacatatgtcattactaaagaaggtccaacttgagcccaacatgccataggagacgcttgtttttaattatgaatctactaaattaatcattattttatgcaaatttattcattctttcatcaaggttggtatggtagaaagtgcccaacaccttgatgaaatgcaagtttgatcaattaacccagtaaccttatcaggaaaggaaatgagatttgttttatataatatgctaaattttatcaattataatttgtttgatatatatactctcaccatgggatacaacacttgctatgaaattttgtccctcaggaagcccacagttcaatgttggaggcgaagtgataaacagtaagaatgcgcaaaatagtgagtcatattaatagcatgcacatgataccatgtgaatagtatgggaatagagagttcatatgcacaactcttataaaaaragtccagaatagtatctcaaggg

SEQ ID NO: 845144 - DNA, 606 bp, Homo sapiens
tgtgcacataaataacgatacctgcagaacctaaagaaatacatgagcacatagaaatatatgaaygaaggcaaacattccttaatagaactcatttgcaattctttcataggctagccctgtgaatgagaatatgccaatatttatactatttctccaattcaaaatgttaacaataaatacatttcccaaagtgctctttcttggctaaagaagctaaattctgttctgggcatagtttaccacttttatctactggtcaaattccttgatttgttttaaggtccttcatggaaatgaacatacttttttcttcaggtaagaaatagaaaatataacattttattattttaaattagcaataactattctttcatcctttttgtggcctgagggaggatcagatttgttattgatgttgcttgaaaaggcagagatggtttgagtaaagctatcgagtgcttcaaggagttatttatcatataaagatgtggctgattaattcagtttaacagtgcccactcttcttctctgttcctatacttctaacccaaagtgaaaaaagtcgcatatttgaaacacaaatctacccaaaatttagaaaga

SEQ ID NO: 845145 - DNA, 473 bp, Homo sapiens
gattttaatatgcttagatgttttggtatttatctttctcagagttctctgagctttctagatctatggttgttaatatttctttactattcttttgatgtttgtgggaccagtacagataatacatctttcctttctgatgctgtgaatttctgtattctctatttcttcttagttaaccttcttataggtttatcaattttatttatcattccgaacaagcttaggatttcattgatttttctctattgttttctgttttcaatttcattgattatctgcttttatccactatgatgtaactgtcatttaacttatccaaggactataatcatacaacacaccgttagaattactgtaaataaaaagatatctttyataattaagaagaaaaaatattttaattttatttaatgcctttaattttccctccgccgatgttcttcctttctttatttagatgtgagtttctg

SEQ ID NO: 845146 - DNA, 436 bp, Homo sapiens
aaagtcttgggaatagaaacccatgtcccaccagtttatttagctggagcttagaaggagaattgattsatgttttgtcatgttgaggggtgaagccggctgcacttctgggtcaggtggggacttggagaacttttccgtctagctgaaggattgtaaacgcaccaatcaacgctctgtgtctagctaaatgtttgtaaatacaccaatcagcactctgtaaaaacgcaccaatcagcgttctgtaaaatggaccaatcagcactctgtaaaatggaccaatcagcagaacgtgggcagggccaaataagggaataaaagctggccaccagagacagcagcagtaatccactggggtacgcttccgcgctgtggagagtatgttcttttgctcttcacagtaaatcttgctaatgctcactttttgggtccacac

SEQ ID NO: 845147 - DNA, 576 bp, Homo sapiens
tttatggttattttgtggaatatattgggatggttatttaagatttgtacagcattttcatacatgttgggtcacttgagaaggcagcaggatatgtatgctatctaggtttcccatctcgatttctttagctgttcttggcagccttcactttgttaaactgactatataaagccgagtagcactcaaaatcagagctactttctctcaagaaagaacatgtggttaagtcattatattatattcctaatgtggtgcagcctgaatgtaaagtaaaattagactgagagattgaatcaaccaaaaaaacaataaagaagaacatgtgctttcagcagaatatatactgcagttttgttgataagtgttaaagcacaatttcctacagtatggatagtccagtctgagctaaccaaaggttactcctatatgcaagataagttataccttcataytcccaatcaagatccctgacactgaattcctccatagcataatgagaggactattttaacacagcaagaacattctattataaagcaattcaaaaattgaaaccaacttattacattgggc

SEQ ID NO: 845148 - DNA, 500 bp, Homo sapiens
attgtgacagtattaagagttgggatccttaagaggttatggcgagggtgggctagttatggtgggagcaggctcctcataaaggcatgagtccagcrcccttcctttctctgtctcatgtgctttcttgcccttccaccttctgccatgggatgacacagcaagaaggtcctcagcagattcaggactctcaatcttgacttcccagcctcccttttaagaaatgaatttcttttctttatacattactcagtctcaagtattgtttgatagcaacaaaaaatggactaagccagtgggtaggactgctggtgactgagcagaaatcaaggcagtggcaccaaactgtactaatgatcgctgcattcttcaccacacttgcaggaaaaatattcatttcactaaaaatgttattaggaaagcagtaaaaattattaatcttattaaatctccacctgagtccatgtctttttaccattctgtgcaaaaaagtgagaaat

SEQ ID NO: 845149 - DNA, 626 bp, Homo sapiens
aataccaagtacccataaaccgaacttggaactctacattgctgcatcacagagtgtcacacctagatctccatcacaaagcaattgaattgaatccacgttgttttcattaagaaattcctttgattaaaaatgtttatgatgtctatgccattaaaacaaatatttaaaaaatagtatctccatctcatcttgtaaaagtttgtttcagtatgtgtgttttatcacaggcacaacaatacacaaatattattatgcaagataaatacaggcatagcagacataaagctcaaaaactgcccgagtgtggaatcaagcgtagagatcacctctccagaccatggcggcccttgcagatctgtgaaatggccactagagggtgctaggggagcaaagtggaggacggggttagcgcccctcctggtccttcctcccagccgctatttccccaccctttcagattaacaacccaagagccaggtgggttttccaatatacttccccatggcagccttgggctttcccaaagtggggagtttccctgaggccaacatgcctatgagaatcagaatggcaaayagttcttttttctacattgactggaggagaaggctgatgcccaataa

SEQ ID NO: 845150 - DNA, 565 bp, Homo sapiens
tgctactgagaaatctaacatcagtccaagtgttgttactctctaagtaatccatcttttctttctggttacttttaagatttttctcattgtctttgatgttctttagtatattaggtatgtaatgctgcatgagaagttatccccaaaacacagcggcttaaaacaataaacacctattattccacagtttctgtggctcaagaactcagaagcagcttagctggctgattctggctgaaggtattttatgaggctgcagctgagatgctagctagagctataatcatctgaagggctggccagggcagaaggatacacttccaaggtagctcactcatgcctcataagctgatgctggttattggcaggagggctcaattcttctccagtagggcttttccatgggttgcctgagtgacctcacaacatggtgaytggcttcatccagagtgagtgatccaagaatgggcaaggtggaagccacaatgcctttcatgacttaacctccaacgtcacaccccttcatttgcacaataccctattagttatgaaattcagcccc

SEQ ID NO: 845151 - DNA, 458 bp, Homo sapiens
catggtataccaaatgattcagctgtgaactgcattttcagagtaatactaatataaacaattctaacaagaattatgatataattacattgggagaatgaaagtacrgaaagtgtgcatatgtgccagaaaaggggaaaagagttaaatcctcatctttcattgcaggaagacattggataacactttaagaagtaacagcaaaggtggtgattgttgcacaataatgtgaatatggttaatgccccataaactttaaaatggttaaaaggaagtcctagccagagcaatcagacaagagaaagaaataaaagacatacaaataggaagagaagtcaaactatctctcttcacagatgatatgatgctatacccacaaaaccctgtagtctctgtctaaaggctcctagatctgataactaacttcagcaaagtttcaggatacaaaatcaatgttc

SEQ ID NO: 845152 - DNA, 620 bp, Homo sapiens
gaaggaaaaaaaggaagaaataaaactgtctgttcatggatgacatgattttctatgtaaaaaatccaaaacaatcaacaaaaaatctggaattaataagcaattatagyggcattgcaggatacaaagttaatacacaaatgttcattgctgtataccaacaatgaacaagtggaatttgaaattcaaaacacaataccatttacattaacacctcaaaattgaaatccttaggtataaacctaataaaatacatacaagatctacaccaaaaaaacaaaacaaaacaaaaaagctacaaatctctgatgagagaaatcaaagaagtaaataaattgagagatactccatgttagggaggctcaattttgtcaagatgtcagttcttcccaacttgatctatagattcaaggcaatcttattcaaaatcccaacaagttatttcatagatatcaataaattggttctaaagtgtatagggagagataaaagacccagaatagccaacaaaatattgaaggagaagaacaaaggtaaacgactcatactacctgactctaagacataatataaagctacagtaatcaagacagtgtagtactgacaaaagaataggcaaa

SEQ ID NO: 845153 - DNA, 467 bp, Homo sapiens
atccttctctccaaatacactaaatcctcatttaaygttgttgatagattctgtggctttagcagaaggacatacagcaaaaccaattttcccgtaggctgattgaaataaagaagagttaaattcctatggcatatttctggttacaaaaacattaccaaacttctagataaagacaaaaacacttctaatattacacattgaaataaatgtgagctatacgtacatttgagaaaagattaatcaaaacaagacgattatttacccagtggttccagttcagggtcacgggtggccagagcccaccatctctgcagctctgggtgccaaatgggacccagcctggacaggatgccctcccgtctcaggacacactcacccatacccacacccactgagacagggaccatttagacacaccagtgaagccaacaggcagttttgggatatgaaaggaaagcggagga

SEQ ID NO: 845154 - DNA, 467 bp, Homo sapiens
atccttctctccaaatacactaaatcctcatttaatgttgttgatagattctgtggctttagcagaaggacatacagcaraaccaattttcccgtaggctgattgaaataaagaagagttaaattcctatggcatatttctggttacaaaaacattaccaaacttctagataaagacaaaaacacttctaatattacacattgaaataaatgtgagctatacgtacatttgagaaaagattaatcaaaacaagacgattatttacccagtggttccagttcagggtcacgggtggccagagcccaccatctctgcagctctgggtgccaaatgggacccagcctggacaggatgccctcccgtctcaggacacactcacccatacccacacccactgagacagggaccatttagacacaccagtgaagccaacaggcagttttgggatatgaaaggaaagcggagga

SEQ ID NO: 845155 - DNA, 545 bp, Homo sapiens
gtttttaacaaatatattctatatttgttttatctatatggaaatttattcatcttgaggttctgtggttttagaacaaaactcactgatgtttgaaaacattgatgtgacaaatggccagcagagcccttctccatggtataaaaagtagcacttggtacaatgaactttttaaggaaaaatgtgtggagcaattgtttaaaagaatgtttctcttaaaacaatgtctctcagtatgatttgaatatttgtactctacatattctggactttttaaaaaaaataataaacctcttatataaatatgttaaggcatgtttggaaatgtcaggcctattctgaggcttttgatccaagggcctcatttatgaaattctgggaatttcatgagttctcagtatgacttttgcccactcatttttttgctcatttgtttattcactcagccatycaaaaataaagaaatgagaacataatactcttccaggccttgaggattcaaagtgattcagataaaatatagtgtgtttttatattctaaagac

SEQ ID NO: 845156 - DNA, 656 bp, Homo sapiens
ggcaatctaccataatgatgcataggtggaaatatgtttgctatagtaatatttttgttcatttttcactgaaagactttgactcaaaaacttcttaatgaattttccagaaatataacagaaatatggtgactgtatctgcagggatgaaaattaggttaatcagccaagcagtttatgtagaataattttggttgcattttagcaatcatccaaatatgcaatgaatatttctttccactatttggctaaaggaagttctttgttgaaactagttcaaatatatgcattggcattttcccaaattgttggccagttaagtgcatagtattactgtggcattttgtttaaatgattgaaatacagttttattcatttagttatagaaattacaagttgatcaatataactttaataacatggaaccatgacataattgttttgcacctgcatcttttgtgagcacaaaagtgtggatctagttaatgtgttcttggcaggaaaaaaaaattgcttttaatggttgtattgctttagtcttttattggcatayacatttttattatgcaaatttaaaaattctaaaaatggtcttcgctcatgtaaatagtgcttagtgtatgttgacaggctgtatcattattatgttatttaat

SEQ ID NO: 845157 - DNA, 606 bp, Homo sapiens
gctggcttttttttttttcctttgagacatagtttcactcttttagtccaggctggagtgcaatgggatgatctcggctcagtgaccctctgcctcctgggctcaagtgattctcctgcctcagtttcccaaatagctgggattacaggtgcatgccaccatgccagctaattttgtatttttagtggaaacagggtttccccacgttggtcaggctggtctcgaactcctggcctcaggtgatccgcctgcctcggcctcccaaagtgctgggattacagtgtgagccaccacgcctggcccaagctgtctttttattagcagaaaacaagagaagcctttcctaaccgtgattcatgaaagaaaagttcaatccgacacacaaaagcaaacaaagcagcttctgcaaaagataccaacagcaaggtcaaaagttaaatgaaaacacggggaaaacatttgccacataaatcacagacaaagggctcatcttccttgtcaggcctctgagcccaagcctgcgcgtgtacatccagatggcctgaagtaactgaagaatcacaaaagaagtgaaaatggcmggttcctgccttaactgatgatatt

SEQ ID NO: 845158 - DNA, 593 bp, Homo sapiens
tttattgcatctcactgttttcagctttctctccccttttaaagtacctgaaataataactctatctttcaactcatttttagctcctgtaagtttttttattttctcctttgtgttctaactgttgtggcctgacgctaataaatgttttatctttgtggtctaaaggaaacattccttccaacataatatttcctgtagggaacagcggttgaaatgcagaaggtgttttgttttccctttgggaaattggcctaataaacagagtttatgctttattgaaataattcctatgtcattattactaagttttggtttgtttagaaaaaaacccgagattaaattttttttaattaagattattacatacatgtaaccctctgtatgtgcttttaaagtccttgtgccattaagttacagagctttgagtccttggtctaaaaagaacaccaagtcctgctaaatattaaacactgacagcagttaaaacctcattttctgacctggtagaagatgccaatcaaaataaactgtgttcatgagacagarggccggaaattaaaacgattcaactcctcaaggtctggagacta

SEQ ID NO: 845159 - DNA, 639 bp, Homo sapiens
ctgggactacaggcgcctgcaaccacgcccggctaattttttgtatttttagtagagatggggtttcaccgtgttagccaggacgatctcgttctcctgacctcgtgatccacccrcctgggcctcctaaagtgctgggattacaggcgtgagccaccgcgcccggccttctttttctttttaatttttttgtagaacaaattttattttaaaaatagggacgaggtcttgctatgttgtccaggctgatgttgaattcctgggctcaagcagtcctcccaccttggcctcccaatgctagattacaggcatgtgccaccagtagttttctttaaatcaacagaataataaatttggtcatgcttccagcccacccacacaggtagacacagcttagttcagtctccacatagagaagactcctatatacgaaaaatgtaaagacgaggcattcctccgcttgctttctgaggacaccctaccctgtatttgagtagccgtcaataaaccttccctccccactgaactctgtgacttgcctggaattccctcctgcacgagatccaagaactttctcttagggtctggattgggacctcttttttttttggcaacacaaggacatgccaattgtaactt

SEQ ID NO: 845160 - DNA, 622 bp, Homo sapiens
gaggtctcactacatcacttaagctggtcttgaattcctgggctcaactgatcctcccaacgcagcctcccaaagcgctgggattacaggcataagccacyacacccagccaacatgcatcttataatacaagaaaatacattttaaaagcaaatacttatttaatatttgctttaaaacgttgtcaggcaggttgtaggtgctcatttgtagatagttagaaaatatcctccgaattgtttgactgtctccatcctgccaagcttagaggtgttgagaatattcttttcctagtatttgtttcctatatactagtatttcttatatcttttcctggtatttgtacgtatttctttgggagtccttaaaattcaatcaactctaaattatcaattctggatccttcagtctacaaaacctctctgtttcctgggatgattttctgcctctgctagaacagctccaagaatctgcaaaaatagtacttaaggtctcaatttctttttttttttttttgagaccaagtctcactctgtcgcccaggctgaagtgcagtggtgcaaactcagctcactgcagcctccacctctggcttgaattttcccaggagtgagaagtctcc

SEQ ID NO: 845161 - DNA, 585 bp, Homo sapiens
cctgaagtttgatttctcacagaccagcaagttttccagattaactcagtactccactaatacatgcttctgaaacgggagtaggcacagactcaattctgtgcagggaggatgcaaagagcagaatatccttggtccatctttctggagggtcaacttcactggaagactctaaataaaaatatgtaagtaatttttaaggatgcaggacaagatggctagacgcagccaagaagtgccactcccaccaagagagacgaaaatatggagtaaaccaacatacttcaaacacatcttcagagaaaaaacactgagagttgatagacagacaatgcagacaccaaggctgaagaggaaggaagctgagaaccctgcaaaaggttgctgagcatgacagctagttcctggccctgaacagctcctagggaaggagtgagtgaagtgatggcagggcagcccactcttgctgtggacctctgggawcctacatacaagagaccccacaacctccacagacatttgaattggcaaagggatcttaccagagagtaggcagagacagagctccaacattaagccagaggc

SEQ ID NO: 845162 - DNA, 445 bp, Homo sapiens
cgccccccacagggcctgcagcccgggacaacaccggccatgtgaatggtgggtacccattggatatgggcgggtcagcacaggtatgtggggtgcagccattgcttggggacccacggtgatgctctgtgctccctcttcccacagtaactgcattaaagtgtttcatctgagctttgtcatcatctctgggggcactgctgacctgagtctggggaggcaggcgtcttgatccaggtctggttacagaggggcaccccacattcattgtcaatgaatgaatgaatgaaggctctgtatggtatctgcaagtgaacagagcctgtggggagacagaaggtgggcacaggcctgcccctgtctttacagcaccytagcacccaggccttcagcagggcaggtgaggttcccacgctagggccctcatcccatccaccctagagtg

SEQ ID NO: 845163 - DNA, 634 bp, Homo sapiens
cgggccaactactgtgtgctgagcatggggacagaccctaaactcrccacgtcccccgttccccagtgtgttggtgcaagttaccccaagcaaagtaaggagatcacatgtgcccagccccattcctgcctgattccttagccagccaccatgccatgcctcttcacctaagcccctgacgggcagcaccgcatccccagacacccccacctccccactccttcccacctgccagggtgccctggggaagtggctcgggccaggcccacggaccaggtgcagacacccccacctccccactcctccccacctgccagggtgccctggggaagtggctctggccaggcccacggaccaggcggcctcagtgcaggggctggtcccagtgtctccatgcccactgctggcatctggccactcactggcccgctgtctccaccagctcctggacatgaagatctttgtggacacagactccgacatccgcctggtacggcggctgcgccgggacatcagtgagcgcggccgggacatcgagggtgtcatcaagcagtacaacaagtttgtcaagccctccttcgaccagtacatccagcccaccatgcgcctggttgaatcatggtccccattaggt

SEQ ID NO: 845164 - DNA, 471 bp, Homo sapiens
aggaaatgagccaaaatgttaactgttactttctagacttatgaataaatgttatgcttttacccatacttactcttattttcctaatattctataatgagaactttttatttttttcctttttgagacagtctctgtggcccaggctggagtgcagtagcgcactcttggctcacgggagcgagccaccacacctggcttccgttcgttgcctgtgcttgtggggtattactcaagaaatctttgcctagtccaatgtcctgtagagtttctccaatgttttcttctagtagtttcagcttgaggtcttaaagtcttttaatttgatttttgtatgtggtgacagagaggggtctagtttcattcttctgtatatagatatccagttttyccagcaccgtttattgaagagattgtcttttccccaataaatattcctggtacatttgtcaagaatgagttcactgtaga

SEQ ID NO: 845165 - DNA, 659 bp, Homo sapiens
atagcaacttagcaccttccccttaacaaccttcacctggaaacctttaacccaaaacacggggcctctacggcttgtatggcccacatcccacgggatgggcagagggctccagtgttcctcctagataagaaacaaacctctgggttgcccaccctcagattccttagcataaaacgcagaacacacattcatgtgtgtctgtcatatggggtcattctcagggtatgcttaagctaggttattgctgtcaagtacatctaccacacagagatttcaaaaggaaaataaaaagtaaagctctttcttactgacaacttttggttaatcacagccactcattttcacctgaccttaactcccacagatagtcaacaactcttagagaaggatttgggattaattccaacctatttccatagcaaagaaaacatgtcaaatctcctaagcagtgggtgaagatgataatcatgattttcaaggagtattgtgttaaattcctacttttgaaagttttgcatattattttatcacctcaacaaaagaaaatcctaagtscttctttaagctctacagagtgtaaatatattgctcctttgcccccaagtggaaacataagggaattatgaattaaaattatatcagttatggatggaata

SEQ ID NO: 845166 - DNA, 659 bp, Homo sapiens
atagcaacttagcaccttccccttaacaaccttcacctggaaacctttaacccaaaacacggggcctctacggcttgtatggcccacatcccacgggatgggcagagggctccagtgttcctcctagataagaaacaaacctctgggttgcccaccctcagattccttagcataaaacgcagaacacacattcatgtgtgtctgtcatatggggtcattctcagggtatgcttaagctaggttattgctgtcaagtacatctaccacacagagatttcaaaaggaaaataaaaagtaaagctctttcttactgacaacttttggttaatcacagccactcattttcacctgaccttaactcccacagatagtcaacaactcttagagaaggatttgggattaattccaacctatttccatagcaaagaaaacatgtcaaatctcctaagcagtgggtgaagatgataatcatgattttcaaggagtattgtgttaaattcctacttttgaaagttttgcatattattttatcacctcaacaaaagaaaatcctaagtccttctttaagctctacagagtgtaaatatattgctccyttgcccccaagtggaaacataagggaattatgaattaaaattatatcagttatggatggaata

SEQ ID NO: 845167 - DNA, 603 bp, Homo sapiens
tgaatcttcactgttccttgttcctttccccaaggccaaatagaagagtcccagatgttctaactagctttatttccccaagtgtcagcatttggccagcatgcctgaagatctagaaactgcagcttctctgccacatacagccaatgcttcaccacccgccttgtgcagggagagcaagcctcagctttgcctgtacactgtgctgtgcacaccagatccccagcataggacagtaacagcacaggcactgcaggggacttcagggaggcctgaatggccctggacccccagcccagacttctgtgcagaagagttaagagttattgagtgactgcaacctaaaggatatttcttctttaggtcatttaactacactaccagcttcttgaagccaggggctgcgtctcgtggaccttattgtctgctcagcaataacacagggcctggtgctttctgacgaatccacacacatgcactgagtggagctgcgctcasggatgagcacagctgcatctttcacggaggctgctttcctgtcagcttgcatttccctggatctctgtgtactgtggagtacagggccttgggctgagcccaaag

SEQ ID NO: 845168 - DNA, 638 bp, Homo sapiens
gtctgcagacttggcatggaaggcgagaactcacagagagagcacgtgtgctgtatgtgtcacgcaggatggcaaccgctcccagacgggcactgatggaaacagtgaatcagagaaagggytgaaacagtgccctgaagcctggccaggcagggtcactgggagcaccctggtggggtgtgcaattgtatggttcatttgcccaacacggcacaatgcacaacagagaaaatcaaatcaaactccagacaagaacactttgcttaagaaagcagatgtgagaaatgtgccacttgtttgtgaaagtttttcatcaaaacagctctcacagagatgggggggtttgatttaaatgagaaatgtgcttataaaaaacagatctttggtgagtaatgaatagctattatcttatctatttaattatgtatttaaacgacatatgaaatttattatattttcctaaacaagtttgaattatgtttttgattatctgaagtgcaacaaagttcatctgcaatgattcagctgtttattcattctaatatatggccacctactacactgtctggcacctatcgagagtttaacagatgtttaattaataagtaagcatcagttggtgaatagcagtgctattc

SEQ ID NO: 845169 - DNA, 621 bp, Homo sapiens
actttcttctaagggttttatagtttgggttttacatttaagtctttaatccatcttgagttaatttttgtataaggtgtaaggaaggggtccagtttcaattttctgcatatggctagccagttctctgagccattattctcagcaaactaacacaggaacagaaaaccaaacaccacatgttctcacttgtaagtgggagctgaacaatgagaacacatggacacagggaggggaacaccacacactggggcctgttgtgggagggtggggtgcggagaccatcaggaaaaatagctaatgcatgccattaatacctaggtgatgggttgataggtgcagcaaaccaccatggcacacgtttacatatgtaacaaacctgcacatcctgcatatgtaccccagaactttaaaaaaaaaaaaaacagagtagcaggtggattgaagaaaaccaagattggaagcaccactgaactaacagtgaatttaccattttttgcctgcagtgcttcccagcttggtctrggaagaaagccaaaagtggacaagtgcaaaagagagaactccaggagaagccccctagttcaggttggaggaggagcagagagtcccttagcagca

SEQ ID NO: 845170 - DNA, 323 bp, Homo sapiens
aaataagtcaaaggggaagacaccttatctrtaaagggacaaagacaagaattacaacaactattccttagaaaccatgcaatcaagaagagcatagagtgaaacatttaaagttttaataggggggaaaaaaaaaacccggccaacctaaaatcctgtaccctgtggaactgtccttcagaaaatgaaaataaagagacaacactggaaaaggaataagtgaagataaaattttaaagtttattttctttattcttaattgatctaatagttaacagttgatatgctaggaaaggagagaaaatggaatcatataaaatgct

SEQ ID NO: 845171 - DNA, 479 bp, Homo sapiens
ttgcgtgtgatggtactggtggtggcttttgttcaaaccgactcaaaatcatccacgctagtctgcaaattaaagcagagagacaaatgatatctcaaaatcctctctcaagtcatcttcattgcaacccctgatcccaaatccttcttcctttcaatactctcttctataggaagacaggaacatacactcatacatacacagttgcaaaccactggggctagcagaaggcaaaggggcaagtaaaatagagaaaaaaggatgctcgtggcagatttttttgcaaaaaatgacaagaattattgatctgcctgtactcattcctttgggtattccccactcctacactgtggttgtacccatgactacctttagccaatgaggcattagcaaatgagatgcaactgaaagcctgaaaaatgcttggacactggggttatcctttyttgccattcttaggatccagagaccaccatgta

SEQ ID NO: 845172 - DNA, 610 bp, Homo sapiens
gtttctagacctgtgctatcagtgtcaatgtaagtcttataagttccctatgagaatgttaaatcacaagggcttagggtatataggagttaagtgatgctttcagttgatgttgaatttcatggtgactccagagtcacataatataggagcttccaagcttgacaaattgctcatatatacgtaggcagaagtggctgatcactacagtgctggtcctgggcctgtttggtttgtgtccattcttgtctttcccctactatgctgtatcacaggggaacatacctcccacaggctgcatttcccagcctcccatgtctgactgctaacagttgggtcaatggtaggcattgtcaggagattagagggcagaagaaaggagaagccagggaatttctgccttggcaacgtctctgcctccatgatgctatctcctgccagagaagcctaccaaggttccagcttactccatgtaaccctggtccctgtgctctggtgatgctacctcttctgtgtgccctttgtggtttcctgcctttggtaatccctasgttgactcactgctacttatttggcttttttttttctctcctattacctataaaccaac

SEQ ID NO: 845173 - DNA, 593 bp, Homo sapiens
ctgttaaaaattttcacactaatttcctttcacaggcctaaaaatgtacttttccccctctaccattttttcccttatttatatcattttatgttggcctctttcttttcactytcttccattcttttatctctttcatttttctccttctaataactttttatccatactaataatatagatgaagatagtatatgtgtattagttcattttcacacagctgataaagacatacccgagactgggaagtttatataagaaagaggtttaactggacttacagtttcatggggccagggaagcctcacaatcatggtggaaggcaagaaggaccaagtcacatgttatgtggatggcagcaggcaaagagagagcttgtgcagggaaactcccgtttttaaaaccatcagatctcctgagactcactcactatcatgagaaaagcatgggaaagacctgcccccgtgattcagtcatcttccactgagtccctcccataacacgtgggaattatgggagctacaagatgagatttcggtggggacacagagccaaaccatagcagtacacaaaaggtgttgctaaagattttt

SEQ ID NO: 845174 - DNA, 533 bp, Homo sapiens
tctctgttcccttatgttgtaattttctaaccttttcccctcccatccagtggccttatctgaaaaatgaatcctcaagttgtccacagctcttcactaagacccrgtctagatccaaaatgaattcagaaggctctcagccagcggggcaatgtgtggaatttatggtagtttgggggcgtaatcttagtgcagacaagtttcctttgccttgttggaatcacatcggagccatcaaattatattgcttctcaagatgcagttaaagtgatttgggatgtgctcctctggctctcccacttgaagagctttactgtgaagcttgagcttaaggtagagatgagctggtaggcccaggtgaggaaagtggttagattccttgtgacatctggaatcagtacttgactgatagagttggacagtactttcatgatcaagcattccaaacacctcatttaatgagggaagctccaaaagtcaaatccaagaatgccaagttagggaggagtaagagctagaataaaaatctctca

SEQ ID NO: 845175 - DNA, 630 bp, Homo sapiens
agatgacacataagtgatcccaggcaaggccaacggaagaacagtccagctgagccctgctccratcattgacccacacaatcatgagcacataaaatgctgcttcaagccattaagtttgttatgcatctatagagaactgatagagtgaggaaggcatcagttgagaggtaacaagaaatggggtccaagtctccctccagtcctgcaattggagattagggggtcctaccttcactaaagccacctcctgtttgtggctctccaatgaagatcttataagcctttaagtcctaagaagagtttggcaaatctcttcaagcaggatggcagggcactccagggttaagacaaaggaggaatgagtgatgggctttttaaaactcggcactgcctagtgaagaaggaggaagggacagctcccttgctctctgagatacgctctattttgcccctagacgtttctaatagtaaactatagtaagtctgacctcgagagatcaaacaggaaggtgaggacacagagtgagcccaacagtttgtgaaacaaactggaactctaatctaacaggagtatgaaatgaaactgccaactctgagctatgaagactacactttactaaaaggatg

SEQ ID NO: 845176 - DNA, 552 bp, Homo sapiens
cattgaatctgtagatcactttgggaaatattgatatcttaatgtctttcaatcattaacataggatgtctttccagttatgccttctttaatttcattcagcaatgttttatagtttttggtgtacaagtctttgcctttttggttaaatttatttctaagggttttttatgtgcttgtaaattaaattttttaaattttctttttgaattgttcattactagtgtgtagaaatgcaattgatattcatgtgttgattttataccctgcaagtttgctgaattcattttttgacagatttttgtggaatcattctggtttcctgcatataagatcatgccatctgcaaacagagatagttttacttcttcctgcccatttggatgccttttatttatttttcttgcctaagtcctctgactaggacttcccagcactgtgttaaatagaagtggtgataacaggtgttcttatcttatttctgatattaggagaaamgtttcagcctttgacatggaatatgaagttagccttgagtttttttatatatgg

SEQ ID NO: 845177 - DNA, 535 bp, Homo sapiens
tactttctcttccaaggttagcattttttacttcaaggaaaagaagtgttttctctttaaactgttgcatttagaacactggaatacatattttaagtatttactttaaatgcacacaagaataaatagaactagactatttgaaatgattattccagctataaggtacagactggatcatttaaagacagggataacatatcatagtatacctattatgctttttcatcaaatttctataatcggatgtgttttcaattcttggcaaaagtttaaaaagctgcttctcaattggttataaggttttatcaatgagtaatgttttacaagctggagttttcatcttttcagagagataaaaaatacaatttaaattcaacatgcttcagatgagagtaagccaaggtgaattataaaaaaaatwaaaatgcaataaaaattttttaaaaaattctctcacagcaactgattctcagaattatacttatttactaaacattcactatcacttactttccaattattctacatttac

SEQ ID NO: 845178 - DNA, 621 bp, Homo sapiens
aattgcagagcgcgttagtgttacggctgtcattactattaactatgttcagaaggctggaaatgctgctcccctccaaagacctgcccccagcagccagcctggtgcacactggcatttgcctgggccaggraggcttggaggccgcaggctgctctggggaggccatgcttctcagcttagatggagtcctcttcattttgcatgctggcccgggaaaactggatttatccacatgcagtgttggcagcttgaggtccgactcgcagaagcacaggcaaatgcagacgaatgccagcagtcaggactcaggaaagctgagctgcccctgaagacacaagccctttgcccaaaagctgagaagcactgaaagcccgaagtggcatctttaattcatggcaccacttagagatcgtattgctaaattcgaattaataatctttaaacaacaacctacagacatggcagaactgtaggcctcgtccctaggcagagcctcaggatctcctcttgctcccatcttggaatcccaagggtcaggatgggaagaactggggggaacatgggatgggggtgttccgtgtggccccctgactgcacctgttggcgagctgccaagga

SEQ ID NO: 845179 - DNA, 621 bp, Homo sapiens
aattgcagagcgcgttagtgttacggctgtcattactattaactatgttcagaaggctggaaatgctgctcccctccaaagacctgcccccagcagccagcctggtgcacactggcatttgcctgggccaggaaggcttggaggccgcaggctgctctggggaggccatgcttctcagcttagatggagtcctcttcattttgcatgctggcccgggaaaactggatttatccacatgcagtgttggcagcttgaggtccgactcgcagaagcacaggcaaatgcagacgaatgccagcagtcaggactcaggaaagctgagctgcccctgaagacacaagccctttgcccaaaagctgagaagcactgaaagcccgaagtggcatctttaattcatggcaccacttagagatcgtattgctaaattcgaattaataatctttaaacaacaacctacagacatggcagaactgtaggcctcgtccctaggcagagcctcaggatctcctcttgctcccatcttggaatcccaagggtcaggatgggaagaactggggggarcatgggatgggggtgttccgtgtggccccctgactgcacctgttggcgagctgccaagga

SEQ ID NO: 845180 - DNA, 542 bp, Homo sapiens
ttaaggtataatttgcatgcaktaaagtctcgtctttttagtgtacagttctgtggaatttcgataaatgtatccagtgtgcaaccatcacatcaagatatagaagggttccttcacccctaaatccttccttggggatgacaacctctcttcaccctcagtcctttgcaactaataatctgttttcttttcctatagttttgtcttttctagcatgtcccataaatggaatcttatagcacgtagccttttgagtcttgcttctctcacttagcagaatgcatctgatatccattcacattgtgcctgtatcagtagttcattcatttttaataatgagtggtgttcagttgtaggcctacactataatttgtagagggacattaggattgtttccagatttggcagttacaaataaagcccctataaacattcacgtacaagtttttcatgagcatgggttttcatttctcttgggtaagtaccgataagtaggattgctatgttgtctaatacatgcatgtttaactttgtaagaaatg

SEQ ID NO: 845181 - DNA, 498 bp, Homo sapiens
tcttgtaatgtcctttatcaggttgagattgttcccctctagtctttgtttcctgagagtttttttaatcatgaatatgtgtttataaaatgctttttctgtatctcttctgatgattatttgatttttattcttcagtttgatgatattacattgaatattgatattacagtgagttacattgattgagttttttgaatgtcagactatccttgcattccttaaataaaccccagttggctgtagtgtactatcctttttatatatgttttttttttgcttgcattttgttaaggatattatttatattcatgaggattattggtctgtagttttcttttattataatgtatttgtctggtttagatatcagggttatactgatcccataaaatgagttggaacacgcaccctcctttttttgtatwctgggagaaattgtgtaaaattggtattatttctttcttaaatattcagtagaaataaccagtggagcca

SEQ ID NO: 845182 - DNA, 654 bp, Homo sapiens
acactctttcaaagatgtatatggcaatgtaaaggttttacaatagctaaaacacctttgaaaaagaactaaatgaaagaactcacagyatctaattttagggcttattgtaaatcttcagtaatcaagattgtggaattggtgtcaagacacacaattaaccaatgaacagaaaggagaatcctgaaatagacccataaatatatagtcaattaatgcttgacacaagcattatggtaaagtcataagtcaaaggggaaataatacaatcttctcaacaactattgctgaaactattgggtacccttatgcaaaaaaacaaaaacttcaatccttatttcatgccacatataaaaattatttgagatgtatcatgacctaaatgtaagagctacaactatcaaacttctagaagaaaacatccggaaaaaatattttttacctacggcttggtaagacatctttaaaatgacaaaaaaaaaaaagcacaaatgcaaaaggaccatttaaaaaaataagtacattaaaaaaaaaaagaattggatttcattaaagttacacacttttgtttctccaagaacactgttaagaaaatgaaagaggaagccaagccaatgagaagtatttggaaaacatatatctaaaaattatttt

SEQ ID NO: 845183 - DNA, 531 bp, Homo sapiens
atatcttttgagaagtttctgttcatgtcttttgcccatttattaatggggctatttgttttttcctgttgatttgtttaagttccttataggttctgcatattagacctttgtcagatggcatagtttgcgaatattttctcacattctgtgggttgtttttttactctgttgatagtttcttttgctgtgtagaagctcttcagtttaattaagttccacttgcctatttttgtttttgttgcaattgctttttgggagttagccataaattcttttccaagaccaatgtcaagaagggtatttcttaggctttttcctaggatttttatagtttgagtcttacatctaaatctttaatcaattttgagtaactttttgggtatggtgaaaggtaggtgtccagttttattcttctacmtatggctagccagttatcctggcaccatttatcaagtagggagtactttccccattgcttgttttagtcagtcttctcaaagatcagattattgtaggtgtgtggcttta

SEQ ID NO: 845184 - DNA, 593 bp, Homo sapiens
tttctgagagaacggaggaggaaaagaaggaggaagaggagaatggaattttggagaatacctacatttgtgctgcgttatggggctatgaaggaaacaggccacgggagggaagagggtaccttttggtctagaaggttcagcctttctcctctattcccgcatgcagcctgcgatctagggccagccatgaccaaacgctcgtgcctcatctgcttccctccagctcctcagactcgcccttcagggcgcctgctgttcagagcctgcatgggaatccgcatgaggtcatattttgcctggagagcagtggacgccacagtgcaccatggccaagatccatctcccaatcctgactgcaagtttctcggagccggagcacaaatttgccatgcattcttttgttcattcttttattactgtgtattcattcgcaggtgatatgcatatgtctgtgcggtggaaggctgaaaatgactygattccttcttagggcatttggaatctagtctgagagtctggaatatttggttcctaatgaaccatagaaatatcgttgaaatatttccccattccactaatcattaggctga

SEQ ID NO: 845185 - DNA, 515 bp, Homo sapiens
tcttgtcacccaggctggagtgctgtggcgcgatyccggctcattgcaatctctgcctcccgggttcaagtgattctcctgcctcagcctcctgagtagctgggattgcaggcgcctgccaccacgcccagctaatttttttacttttagtagagatggggtttcgctatgttggccagtcttgtctcaaactcctgacttcaggtgatccagctgcctcagcctcccaaagtgctgggattacaggtgtgagccactatgcccggcatgttttttttttttaataaggtagatctatgtatattgacataagtggaattccaagacatgttgctgtgagtctgtaagacagagtgtataatatcaagaaaacagacaaacctataagcagtgtaaattggtacatcatggaggctatttggtaatatcagtcaccttttttttttttttttttgagatggagtcttgctctgtcacccaggctggagtgcagtggcgtgatcttggctcacttt

SEQ ID NO: 845186 - DNA, 601 bp, Homo sapiens
acatgtatctctgctgaactcctgggtggmaaagctttgactctgagccataattaagatttcatatactctcagactgaaattgagtggaaggcgggaatgttgcattggatgctgcataggactggatgggattccggagtagactgtccctgtaaaacaagctatatggttttcctggccactatcaagtaccctttgcgtggccaccttggggcatgactatgacaatgttttataacagcctgtatttgggctcctttcttgaagtatatcccagaagctgaaggctgtgtcatcaatagaagtagtctttgacatgtgcctaatggaaggggagaaaagtggccttgggtccactgcctctgagctttcattctggaatacaatcttgctccctgggagcaacaaaaaaagaggttggtctagaccaaggcgatgcaacaccaggcctcttggctgaaattccatgtacatcagggtgttccttccctcccacattgcttaagggaacccacacagagaaacatctggccagatgcaatctacaaaacacgctgtgaaacatattagctccctcaggccaatgggggcccaccta

SEQ ID NO: 845187 - DNA, 571 bp, Homo sapiens
gggacatacgaatccctgacatcctcttgaatcaggatctctttaaggagattccgggaacctgtattttttaatcttaagtttcacaggttatttgttatgcaaagctagatttgggatccactaaagatagcctcctcccatcttcagtgtctcagagaataattaaatggaatgggcacttcaggtgctgagctggaaaaaaacatggaaggagagtcagtgcacatcgtatctgaagtttatttctcaggagtgcttgtgactggaaagagagataacaataatggggggcagaggtatagtcatgaagaggtgacttaacattcctgccttggtaggaaggaaggagccactgcttctggattcctccagggcctacatgctaagtgctgggagtacagaagagactgccactggagatgcaatgtcaaagctygcattcctgaagaaggatcccgtctgatggaggcagtggtaactggagcttcctgtaactcccaggagctcctggtatagcaaaggaaggaaggcagctgctcttccaagggcttgactcttctggtgtaaa

SEQ ID NO: 845188 - DNA, 590 bp, Homo sapiens
attccatccatgtctttgttattgtgaatggtgctgtgaaagaaagaaaaccaaatgtggcactttctcacttataagtgggagctaaacattgaatacacagggacccaaagatgggaacactggagactgcttgacgggggaaaatgaaagtggggaatgagttggaaggttatgctcactaccttggtgataggatcattcatacaccaagcctcagcagcacacaatttacccatgtaacaaacctgcacatatacctcctgaacctaaattaaaagtggaagaaaaattaaaaggaaaagctccaatacaagtgctcctctccaaggtacatatatctaaccccatcactaagtatataaggaaattctttgcaaatgctgagaaaagggccaaaggcctaacaatttttcaacactgaagtctgagttttacagtttgtcccttttttatggtaataaatttctytaaagcaagcaaggctggtgattaggcaagtggccagcaactctcagttgacaaagagctttcttttcttgggctacgtgtattaggagaacattgctacaggtcagatgtcaacatta

SEQ ID NO: 845189 - DNA, 406 bp, Homo sapiens
tcttcatctctctagttactaacaaataacagctgcttctagaacagaccatgactttctaaatgtcctttgcacattctcttccctcatctgttccctgtattattcaagtaactctgacatctgcaggtccctctcaagggtttttttctttgagactctcccagtaagaattatgtcttttattctgtcattccaattttcactcatttttctgtttatttgttcagtcagtcagcaaatatttattgtaacatttaattacattacaaacatagttgcagttgcttgagttacagcagtgaataaaacaacgctcctgcccacatggagttyacattctagagcagggaagggaaggaaaaagaaagacagtatatcaggtgatgatatggctaggaagaaa

SEQ ID NO: 845190 - DNA, 623 bp, Homo sapiens
tgcttgactcacagaatgcaagagacgcttttaaagaagcagatccgaggtcttatccaacaaacaggtctgggattggasttggggatctgtttttttacatctctttgggagattctgataattttcaaaagttctcttggaaaggaacatagtcttagttaatgtttcagctctcccactatttgacaactgtagacagtagggttgccagatgtagcaatcaaaaatacagggtgtccagttggatttgaatttcagatgaacaacaaatactttttcagtaccagtatatatatatatatatattgttttctgaaattcaaattcaattgggtattttatattttctctggcaacactagcagggagctcaggccagactcagctcaggctaggttatttggggaaaccccctattttaggtgtgggcctgagttcctcagttccaccagatgttatacgttgttaggaaatgttggcatgcagtttcataagtactcttatgaaagtcagggatccaggctggaatgaaatgtggaccaccccaggactgggagaaatattggaaaatatggctcatggtgccatggaaggaagcataaacagcctagtatgacagg

SEQ ID NO: 845191 - DNA, 610 bp, Homo sapiens
agaaatgaagccacaccacgatacagtcagcaagaggaagccgggaatgggagatggcaacagtccctgtcactggaacgctggcctcyctggacaagccaccctttaggaaccccaccccttatgcctgtggcggtggcacggtgctgtatcctgcctgggctctggcctctactctctcctccctctggctctgcctcccctgtttctcaggggcctggatgcctctcgctctggccaaatgccttcaaaaaagatgacttcccagtccgtcagggagacacttcctggagatccgtgtcatgatcgtttctctctccaaacgtgtttctgcttaattgggcaggtatcatgagccgggagctcttggcttccatacgtgtctcaggcagggaagcttccttcttccccacgtttcccctcatgggtgggtggattgcctagaatgagcgctaggcgaccgtgactggccttgacttccaggacaggtggtgtcccatttcctctgcacttcctgtctcattcttgagggacatcctctcctctgctcctgggtggcctgactcccttgatcttctggacgaaataaatgtcaggaaaccaaagggac

SEQ ID NO: 845192 - DNA, 591 bp, Homo sapiens
tgaccagaaaactgtacctggagaaaatgaggtatatgttgcaggatccgggaccgcggtctttgcktgcttcgtgaaaaatcggctggtctccaaactcgcgaaggaaaattcaaggcgcctcaactcctccttttaaattttttaataaagagcctagaaggggaactttccctgggcctgccggagtcccagcctggctctcccaacttcccagcggccataagtgtttttctgcttccattcgggccccccgtcttcccgggcatctctgagctcctgccggatcaaggctgtggtcatcacctcattcatctctgctgcttggcctgagcctgcacatttggcctccttcttaaaacaggggctcctagagagtcccaaaatccactaaccattcccatatgtgggatcccttccctgatcacacaaagcagaagcctgagaaaaaaagcaataaagagtggcctcctggctctccttctcctcttacgtcccttgtctgggaaaggggttcccaaccccagccccaccaagagcatattaagaagctgtcttcctcccttcctttcctatctccccctcagatgc

SEQ ID NO: 845193 - DNA, 523 bp, Homo sapiens
cttataatgttatccatggatatatatctatgataaaaatagaaaaaatatatgatggtggtgcttctgaaagggagaggaatggtactggggaagggacaaagggaacttcaactttatctgtaatgacctgtttattttgaaaactcaagagcaaaattgacaaaattttaacagtaacttaacaaaacctcaagtctggatagtgagttcaagagtgttactttatatggacaggcagtgactcatgcctacaatcccagcactttgagaagccaaggcaggaggatctcttgagcccagccatcctcccaccttggtctcttgaagtttgagactagcctaggccgcatagtgagaccctgtctcttcaaaaaaaaaaaaaaaattgacagcaactcaggaggctgaggargaaggattgcttgagtacgggaggtcaaggctgcagtgagctatgactgagccacttcactctaacctggatgataaagcaagactctgtctcaaaaaagaaaataaa

SEQ ID NO: 845194 - DNA, 486 bp, Homo sapiens
tgcttcttttgcctccttctcgtattctcttgccactgccatgtaagaagtgctgttcatccaccaccataactctgaggcctcctcagccatgtggaacccttaatgcaattaagcctctttttcttccctgtctcggttatgtctttatcagcagtgtgaatatggactaatacattttgtattgtcaaacttcttaatatttgtggagagaatagatgtgtagtatcttgtgcatttccctgattactaatgaggttgagaaaatttttatgttttgcaggctttctcttttgtgaaatccctattaatgcattttcccaattttctgttgggttgctatttttaaaattagaaataactgtcatcaatccaaaagcttacacatggcagatcccttcacaccagttcacagtacaaagtaactccttgcttgtagaaaacattattattatcattattakttttgagatggaatttgacttt

SEQ ID NO: 845195 - DNA, 496 bp, Homo sapiens
gttttgatattaaaaatgcactaatacactaaagaattggttagaacaaaattttcttaaggtrttattttactgttaataacattacatgagattttaatttttttaactcaaaagttcaacttttattgcatcttgctattttcagctttctctcctctttgagaaggactgagagaataattctctccatcaacattttcgtcagctcatataaattttttccctcaggtcctaactgttgtagcctgatgctaaaaatgctttatcataaaggtctaaaggaaatgttttcatccaatataacattctgtgctcctggcatttcttaatatgtctaaattgttctgtgttttgatttgcctaggaaagctgatataaaaaaatttttaatgaaggttattacatccttgtaactttctgtaatgtttttaaagtcctggtgctgtttagttacagggctttgactcctgggtctaaaaaggacactgagtcc

SEQ ID NO: 845196 - DNA, 587 bp, Homo sapiens
taaatatttgcagagtgagcccatttttttttctccatgggaagcccccacagggccttgagcatagaagtctgagtgctgtgctctacatagagactcctggaaagcccaggctagttwgctaaaatttttatcagttatctgttgctgcataacaatttattacaaacagcaatgtaaaacaacacacatgtattatctgagagtttctgtggattaggtatctgggtgtggcttagctgggtcttctgctgagatctctcacgaggctgtagttgaggtatagtccagaattatgatctattattaaggactgactggggaaggatctgcttccaagctcacatggttgttggcagaatgcagttccttgcaattataaaactgagaacctgtctctggctggcctttggctgggtgctaccctcagtttctaactggctgttgacaagagacgatcctcagttccttaccctgtggacctcctcaccatggctgcttgctacacaaagacagcaaggagtcttctagcaaaatgggcattacagccttatgtaacgtgatcacagaagtggcatgtcatcacc

SEQ ID NO: 845197 - DNA, 471 bp, Homo sapiens
agcaaaaatcagatcatgccacttctctgttttaagatccactaatggcctctcattgcactaaaataaaattgaatctccttcccgtagcttacccatctgagctcagtttccatagctaggaaatggggataattgtggctttaactagaatatagtaagttccatgagggcatgggtttttatctgctttgttcactactgttttcctagtgcctagaacagtgtgtacacgtaataggcacttaataattatttactggatgaataaacacattcagattatgtggataccccaaagcctttcttctttcctctttcagagcagtatattatgtagctcagtattttctgcattacataggaaggccagcwaaggcttctgatgcaatatctcctttctttttcccttctcactttttacgcatgttctcctgtccctccctgtcttatgtttgggtcattaggagg

SEQ ID NO: 845198 - DNA, 611 bp, Homo sapiens
acttactttgaggaaccaaaagaaaatgactccattcttctcggttamcaattattaaacaagagtcaacaacatgaaaagatctaatatgcttctctgagagtttggaacaattaattctgattttagtcagattaatcagaagtgaatagctcggtctctgatctgaaaactgtcctcattctggtacgttctcctttccccgcctccctccccgtttggcctggttaactcagactcgtccttcagaattcagtttagttatcacctcctccaggaagtctccctggtatcctaaggctggattaagtgtgttgtcatcttagctctacgcatgatcctttgaaaggctgtgccacatggtagatgctctacaaatttgttgaatagacaatcatggttgtaggaaggttattgctctcttaaaaaaattaaaatcttccacaactagaaaatgctatgaaactgacaatacattattttaaatagtcttacttttttcacttatgttgagtcatattatgatgaattaaagtattttgaagaaaattatttgaaaaaaattactacaaaagtaagattttgtggtagaaaaattaaaataatataaa

SEQ ID NO: 845199 - DNA, 604 bp, Homo sapiens
ttcacttatgttgagtcatattatgatgaattaaagtattttgaagaaaattatttgaaaaaaattactacaaaagtaagattttgtggtagaaaaattaaaataatataaatcagtgaaagatgacagtccckctccatcccaatctcatcttccaaaataactattgttaatggtttagagtatatccttccaaacttttaattaggttgagtcctaagaacacatatggacagaacacaaaccttgatactttggcagtttctcacaaagctaaacatagtcttaccttatgagccagccagcaaccccactccttggcatgtacccaactgagctaaaaagttatgtccacataaaaacctatacataagtgtttaaagcagtctttattcacagtcacccaaaactggaagtaatcaagatgtcctccaataggtgaatacataaacaaactgtggtaaatccatacagtggaatgtttattgcagcactattcacgacagccaagacacagaatgaacctgggtgtccaacaatgataaataaagaaaatctgattatatatgctcaaaatggaatactatttagccacaaaaaagaa

SEQ ID NO: 845200 - DNA, 293 bp, Homo sapiens
tttttctttgatcatttgttgtttaagagtgtgttgtttaattgccacaaatttgtgaattttccagttttcattctgttactgatttccaacttcatctcattgtggttgaagaaaatatttagtattatacctatctttttaaaatgtattgagacttaatatgtggactcccttatagtctatctggagaatgttccaggtacacaagagaaaaatgtgtattctattgttgttggctagaatgtctgtatttgtctgttwggtctaattggcacattgtgttgttcaag

SEQ ID NO: 845201 - DNA, 574 bp, Homo sapiens
taataagcggaaaactcttgtttcatctgaaatctcctgggtaacctaggaaagaaaaatacctatcagtaacatcttactccccatattgccttaataacaatttaaaattaatttagagcaattattaacacaataaatattttttggtagacttaattcctcaaataaaagaaattttagtaagttttttgattgcatattattagaaatgaacccacatttatggaacatctagtatgggtcaggtactctacttagaagaactctttgtgatatgcattataattctcatatcattgaagaagaaactaagactccaagaggttaaataagttgttcaatctcatagaatgggtagactcaagacttgaatacaggtttgttggactgcagagctcctttgggggccaaggcttgaggtcaggagttgagaccagcctgggcaacaaagtgagaccctgtatctacagaartatttaaaaattttacctgggcacagtggtgcatgcctgtagtcctagctgctcagaaggctgaagtaggaggatcgcttgagcccaggagttcaagg

SEQ ID NO: 845202 - DNA, 681 bp, Homo sapiens
aaatatacagattcttaaaaaatctctactagagagaaataataattaactatcttgtactctactaccaaaatgaaagcaatcagcaaacttcttggtagtcatttaaatctaaaatataagaaaatatttttttcataggtaagaattaaaaaaaaaaaaaaaaagcctaaaacaccacctacccacccgttcacccctaataataaccaagaaagaataaaatgaggttaccctggaatcttgttcagaagaccttaaagaatcagtccaagatagttaatgtgtgtccagaacaacatgaatttcaccagcaaacatctgtataagactctacagtttactaagcactctggatattatctcatttaactctcacaacctcataaggctgtactgttaccccatcatcctcattttataattaagataaatgaggctgagagacagtgacttgttcaggatcgcagagaaagaaaatagtgtgatcctctgcttctttcctgttaattcccaaaggaggccaggagtggtgacagtgatagtggaggaggctgagtggaagggaamggcctctagtgataagcactgtgatacccttcaggtgtttagatgctgggtgggtttggaaagtgcagccctaactgaagacaggatcccttcccaaagtttcttcccatt

SEQ ID NO: 845203 - DNA, 621 bp, Homo sapiens
tatgttctcattgaaactctcctttcttctttcaatgttccttatcaatctcctttgctattgctctttgcctacttgatccttaaattttgggagaaatgtcaggttttgtgctaggctctcttctcattctacatgcttcccttgggtgatcgatcacatttactcctaaggcatcaactacatgtgtatctaatcactctcaaatttatatttttattattttatttacttttatttatttttttgagacagggtcttgctctgtcacccaggctggagtgcagtggcacaatcatggctcactgcagccttgacctcttgcattaaagtgatcttccaccttggtctcccaggtagttgggactacaggaacccaccaccaagccttgctaattttaaaacattttttgtagaggcagggtctcactgtgttgcccaggttggtctccaactccttggctgaagtgatcctcccaccttggcccatcctaaactactgggattacaggcattagccatcatacctagcctcaaacctgtatttttagtccaaacttttctctccaagctacaatgacmtatctagctccttactagacttttccatttggaagttct

SEQ ID NO: 845204 - DNA, 634 bp, Homo sapiens
acaaaatataaccaataaaatcaatggcgaagtaaatatctataataaccaattagacagtgtaagagggaaaaaggaagccattcccaatagcgagaaataccataaataygaagacgtggcaaaaactttcctaaagacctgaataagaaaaaacctttactattgtcaaaatgccaaatatcctacattaatctatgtgccttttttcttcttgataaaaatgattttaaagttctgaagaaaaaaattttacaaacaggaaatacctgaaaaataaaaagagtgaagattataatacgcaacaaaagttttggtaatcaaaaccaggatagtgttgaagtaggaatagaaaaaagaaagtcactggaacagaacacaaaatctatgtttacatggaaatttagtttatgacaaccaaggcacttcaaatctgtggataagagactgaatctatagtaatggctttgggaaactagccatttgaaaaaatacatagagagagttctctttcatcccttagaacaaacttgctcctgattgagcaaatatttaaattttggaaggaaaaaaaggaaaaactggaagaaattacagttcaaaattgttataattatctaggagaaaaggccta

SEQ ID NO: 845205 - DNA, 443 bp, Homo sapiens
accagaaaagccagtggtgtaattcagtccaagtctgaaggcctgagaaacaggagtgctgatgtccaatgggagcagaagatggatktcccagtttagacagatagagcaaattcacccttcctctgcctttttcttctcgtcagtccctcagtggattggatgatggctacctacattggtaaggggatcttcttcatccagtctgctgatttcaatgccagtctcttccagaaacacccccacagacacatgcagaaactactctttatcagttatgtgggcatcccttagctggtcacgctgacatgtaaaattaaccatcacaccaccccacctcctttcctaccaattcttcatcataaaacccagaagaactagtctgctaaccataggatcctgcttagaaaacaagggaagaggaaaaactaaacagccaaagc

SEQ ID NO: 845206 - DNA, 610 bp, Homo sapiens
agatttcaaaataatgcaatccctgacaagtattttcaaaaacactgtgagagagacatatagccaatattataattgtttctgaaagtcattttattctccttgtacttttttcacgcctcctgactcttccaagccaacttcttctccaaaaactctttaaggggcccctctcccagacttagttcaatccctttcactttcttcccaattagtcaccaacaaaatccagaaaaaaaaaaagcccacaaaggcataattttcttcaaatggtggaggaggagaagaaactgagtgagcaaagccaaaatactcttgaggagtagaggggtgggaaaggctggttaatatatgaaataacattcatatattaaatattataaatttactccatcacaaatccctgtaggatttgttagacaagagagcacgtcatctgttacatcattgtgtcctctttctgtgagcagaggaaaatatataggcttcrggatcacgaagagctatgctcctgatgaacagcagattcatttttacgaatactggcagtcctccatgggttgtgcttctgtgtctgcacaggtcattaagaagtctaaagccaaattta

SEQ ID NO: 845207 - DNA, 610 bp, Homo sapiens
agatttcaaaataatgcaatccctgacaagtattttcaaaaacactgtgagagagacatatagccaatattataattgtttctgaaagtcattttattctccttgtacttttttcacgcctcctgactcttccaagccaacttcttctccaaaaactctttaaggggcccctctcccagacttagttcaatccctttcactttcttcccaattagtcaccaacaaaatccagaaaaaaaaaaagcccacaaaggcataattttcttcaaatggtggaggaggagaagaaactgagtgagcaaagccaaaatactcttgaggagtagaggggtgggaaaggctggttaatatatgaaataacattcatatattaaatattataaatttactccatcacaaatccctgtaggatttgttagacaagagagcacgtcatctgttacatcattgtgtcctctttctgtgagcagaggaaaatatataggcttcaggatcacgaagagctatgctcctgmtgaacagcagattcatttttacgaatactggcagtcctccatgggttgtgcttctgtgtctgcacaggtcattaagaagtctaaagccaaattta

SEQ ID NO: 845208 - DNA, 600 bp, Homo sapiens
gggatcctccccagctctgatgagtcctgctggtatagagcatcaggtttcatagccacactcatagcttcttttctttcattaaaaataactttttattatggaagagttcaagcaaataccaaagtagagataataggataatgagcccccatatatctaacacatcaacacatcgctgaggttgtctcatttatagctctcacactcttttccattgcccaccagattactttaaagcaaaaccagacatctaagtcgtttcatccataaatcccttctggaggaagagggctttcatatggacttggagaatggaaaggtcatagatagggtgggaagaaggcagagtggcatcctaacagggaatgaaagcacaagaagtttggacaggaaatgaaaattatatatacagagtcaggaagaaaccctcctgaatggagagaaatttggacagatcagttggaagtgattaagaaaagtttcaacccgccagctccggagcagcccgcgagctcacgccaggcctctctcyagcctcagcctgcgatcttactaggcacagctctctggccctcgaggccttctgcacccagctgt

SEQ ID NO: 845209 - DNA, 629 bp, Homo sapiens
ttcaagatgtctgcagtgactatagagaatatctgtgctataggaatatcrgtatctcctgtggtgacagcatctcagggattgctataactcctggagtgtgttatctgtgctcatactggaatgttttatttcatttcgaggttagtgaaaagaagtaattgttttctttccaaattcaaggactttttgaattcttctctccaaagaatccagctacctacataaaacaaaattaataacaaaaataaagaataacaatcccttgttttaaaacctcaaattaagattttatgacaagaatctaatattaagaaaatggaacatggtgtgtttggcacatccatggaaagggatggagaaagaactctcagacagtggttctcacattttagaatgcctatgaaacctggaaagtttgttaaggaggaaggccattcttccaaacattctaattcagctgatctggtgatcaggtctggaattcctctcaaggtccagtagctagttaatggctctgctagcatctgaactcaggtcagtctgaccccagagcctgggattttaaccactacactttccttccaactggaggtgggagcagggccaggaaggatactacaaagaaa

SEQ ID NO: 845210 - DNA, 655 bp, Homo sapiens
atgggagttcattcactatttggctctctgcttgcctgtagatggcgtatagaaatgctagcaatttttgcacattgattttgtatcctgasgctttgctgaagttgtttatcagcttaagaagcttttgggctgagatgatggggattttctaggtataggatcatgttatctgtgaacagggatagtttgacttcctctcttccaatttgaatacactttattttttctcctgcctgattaccctggccagaactcccaatactatgttgaataggagtggtgagagagggcatccttttcttgtgccagttttcaagaagaatgcttctagcttttgcccattcagtatgatattggctgtggctttgtcataaatgactgttattattttgaggtatattccttcaatacctagtttattgagcatttttaacaagaagggatgttgaattttgtcggaggccttttctgcatctattgagataatcatgtggtttttgtctttagctctgtttatgtgatgaatcacatttattgatttgcgtacattgaccaagcttgcatcctggggatgaagccaactcgattgcggtggataagctttttaatgtactgctggatttgggttgccagtattttattgaggattttg

SEQ ID NO: 845211 - DNA, 581 bp, Homo sapiens
ggcaataaataatagagaagacccagaagaagttattgggaagaaagttgcctccagaggtagagctggagaccattattcttcatgactattgatatggtttggctctgtgcsccaacccaaatctcaccttgaattgtaataatccccatgtgtcataggagggactcaatgggaggtaattaaatcatagggttgagtatttcccatgctgttcttgtgatagtgaataagtttcatgaggtctgatagttttataaaggcgagttccactgcacatgtccacttgagttccgctatgtaagatgtaactttgctcctcattcactttccaccatgattgtgaggcctccctagccatatggaactgtgagtccattaaacctctttcctctataaattacctagtctctggtatgtctttattagcaacatgataacagattaatacaattataaatgcaaaattgcttctaaaatatgagcaaacaaaatttagcaatatataaaaagctgatcataatacataatacatagaaaaaataatcaccataaccaagtggagtttcttccagtgatgc

SEQ ID NO: 845212 - DNA, 607 bp, Homo sapiens
gaaagaaaaaacttttgggtgtttcttttttgtttttctttttttccctcctattcaggtagaatgaacagtactgctgtgtgtggatgaagtagggttcaaacacaaagggtttaaaagacacacattgcctctttcaaagtttggtctaaattatgaggcagtcatgaggccactgtggaacagcagagccatgaggggtaagggtgtgcgtactggagccagtgcctgagtttgagtcccagctcacccaggtcacttactatgaccaggcaaattacttcatttctatacctcagtctcatcatctgtaaaatgggataacaaataaccccacccccaccccaccattgggtagaggtcattgtggggattaaatgagttaattcatgtaaggtgcttagaacagtacttggcaccaagtaaaccatcctttgatattattatttgactggggtgggagggaaaatcataaaattctaaagaaaacaagcaacttggtacctgccagtttgctttctctgatcctttcttactctcatttggtatgtctctrggaaaaatatacccagagacacatctttttcctaaatggttccagaatctg

SEQ ID NO: 845213 - DNA, 609 bp, Homo sapiens
tttaacaattgcatgcttctatacttcatacatccccgtaaattcttttaaaacaaaaactggattttttttgtctaagtttcaaacacttctagatttcttccyccaaaatgcgtattaaccagctttttcacaggcgttttttgccattaccaggatgtctatagtagactgcatccggcagctgataaatatcatagttcatgccccacaagggttatagctgtgcctctgttctactctatggctggttcctgaagcctcctgcactttactccagtgatctcaagctctcagagcccaaagcagggtgtgcagtcccttcttaaccctttaatacatgactccatagatctgctttttaatattcccacgctcttcccagggaaggaaatcacaacccacaaatgagaaggccattcaggaatgcgtctttacctcaaatccctttgtgaaaatctttgatacttggccttaaaatgtatttagaggaaactcatactgtaaattctggagattctcagaaggatctgaaggttctaaagacttccaataaaatttacatcttcaacttcatggaaatgtggtcccttaggcacaaattaatgt

SEQ ID NO: 845214 - DNA, 616 bp, Homo sapiens
agtgtattaagtgtgcaatagcattatgtctgaaaaacaatgtacataccttaacttaaaaatactttattgctaaaaaatactaatagccatcagagacttcagtgagttgtatctttttgctsgggggagggtcttacctccatgggctgctgactaatcaaggtgatggctcctgaaggttagagttggtgtggcaatttcttaaaatatgacaacaatgaagcttgccacattgattcactcttccttccacaaaaggaagcttgagatgctgtttgatagcattttacccacagtagaatgtctttcaaaattgcagtcagtcctctcaaaccctgctgctgatttatcaattaagttaatggactattctaactcctttttcaatgatattcacagcacctttaccaggatcagattccatctcaagaaactactttctttgctcatccataagaagtaacttctcattcactgaagttttatcatgaggttgcagcaattcagtcacatcttcgggctccccttctaattctagttctcttactgtttctaccacatctgcagctccttcctccactgaagtcttgagctctttaaagtcatccatgag

SEQ ID NO: 845215 - DNA, 598 bp, Homo sapiens
ggatccagtagattttaggtctagccactctactgtttcagcagagaaagcagagactgaagctgcattctatcttactactctgttgggaagkgtaatctcaggagtgagggatgcagggaaggaaggaaagtcaatggttgggttctctatagagttttctgacattgatttcaactgatgccttaatcctgtgccatcagacctttaaaagagccattatataaactgtgtctaagatgaggacagagggtgaagaatttgtctatcagttgccgtcttccattggccaagtataccccatggggcattactgccttctgcacttccaggctgcatattatctgaggacagagtaggggtttgtcctgcctctgggtaagtcaggaagctgtgggtctggggtcaagagggtacacgatgtagagaggatgaggccctgtcagcgtgtgcttgtgcaaaacctgtctgagtccacgccagtgctggtgcccacagtgggacttgaataagacctggtgagaccagctgaaggtgtctgataacacctacgactgccacctcccctgccctccatttccttctgaagacaggaatg

SEQ ID NO: 845216 - DNA, 648 bp, Homo sapiens
atggctttggaagaatttttgaagcaggcgagtaataggactgaacggctgctttacgttgtgtttcgggctgttacatagatctgagctatgtaaaaatggagccttgtcatctgtggtccttttggttcttataatgctgggtcccttgtgcaggtagtgaatgcccacatattgataacatgcatctttctggtttgaattcagataagagaagtgtggaatacttatgaactagacttggttaattatcagaacaagtgccgcttgatccgtggctgggatgacctcttcaacaaggtcaaagaacacatcaacagcgtctcggccatgaagctctctccgtattacaaggtgctgttgctggggaagctttccctccccaccagtggtctcccacgctttcactgtaatgccttttcactgacagttactaggtacctgttttttattgtattttttgagacagggtctcactctgtctcccacgctggagtgcagtggcaccatcacagctcactgctgcagccttgacttcctgggctcaagtgatcttcccacctcagcctccaggtagctgggaccrcaggcacatgccaccatgctgggctagctttttattttttgtagagacagcatctcactata

SEQ ID NO: 845217 - DNA, 338 bp, Homo sapiens
taaatatttcagggtctaggttctttaatgtaaacatgttttgccacattttaccttttgaccacttctctgtgtcttaagatatttacrtgtaccttccatttttctcattgccataggagagattcacccaggatacacaacctcactatatctattcaccccgtgaaatgactaggtgggtgagaggcatctttgaagcgctgagacctctggagaccctgcctgttgaaggcctcattcggatttgggcacatgaagctctgcgtctcttccaagataggtaagggaagccgaggatccagttggtcccattctcccctgctctgagttcttac

SEQ ID NO: 845218 - DNA, 553 bp, Homo sapiens
attccttttaaagacacttgtwtggtagatttttatgtcagacttgaaaactagcagcacttccttttttatttttatttggctcttttggggtttttgtttgtttgttagattcttggagtacagtggcgcagtcatggctcactgcagcctcaacctcctgggctcaagcaatcctcccaccttagcctctcgagtagctaggaccacaggtgcccatcaccacaccaggctaatttttaaattttgtgtagagacaggacctcaccacggtgcccaggtcggtctcgaactcctgggctcaagcattcctcccacctcgacctcccaaagtcctgagattacatgcgtgagccaccacgcccagccttactttcctttgtttcatgaattttggagttttataaagtgtaatatcataaaagattacctgggagcccaaatgccaaagcatcaaaacaaaatttttctaaatggatgttaaatgtccacctttttaaaaaatcactgtaatgactaaaaggctggcctgctaagccatgagttggtgcga

SEQ ID NO: 845219 - DNA, 643 bp, Homo sapiens
aatgcacctcagtgaaggtttttgttttggtttggtttggtttggtttgatttggtttggtttgtttgagatggagtcttgctctgttacccaggctggagtgcagtggcgtgatctcggctcaccacaacctccgcctcccaggttcaagcagtcctccggagtgcctcagcctcccaagtatgctgggactacaggtgcacgccaccatgcctggctaatttttgtatttttagtagagacggggtttcactatgttggccaggctggtctcgaactcctgaccttgtgatctacctgcctcggcctcccagagtgctgggattacaggtgtgagccaccgcacctggccttcagtgaaggtttttattcctagtcagaaccctctcctgccagtgcccgctgtgtgaggtttattttgctgtgaacatctggtagcattcttgtgtagggacactctcctttgccccgagggccagagagccgtgctccaagcggaggctgttggtgggtcccatgaagagcactgcttgttgcctggagtagtcaaaagcagaagaagcgttggtgtgaaacagtcccygcaagtctcaggagtcttgcagccacttaggtttctgtatctcccacctgactgtgagcc

SEQ ID NO: 845220 - DNA, 555 bp, Homo sapiens
cccccagctaaacaaagccactctcaccaggcacagcatgccaagggcctctcggctactgcaaagctggagaaaaggccagacttctctttggacaaggytgaacctttactgaacagctgtcctccccacaagaggaactagagcacagaggggctcatctgctgggccaaggtagctaagggcaatgtgagggtctcacagtcaacccaggacctccctaactcaaagctcttccctaactcaaagctcttcccgctacacagcaagaagaagggacttcccagctaaatggtgacatctgctttccactgaatctgagaaaggagaagcttccagaatgagactaaataatttgcagaggagaaggaacagaacttgccttcagaatgtggaccactccccgtaactcagagacaaaacaatcccataccttgaagtagcttggagatgagctttattttatatcaacattaatacatatgggtatacctagctttatttcccccctcaacttagagtctgaatgtgtggtaagcatgttcatcgctggat

SEQ ID NO: 845221 - DNA, 633 bp, Homo sapiens
gctacaaagataaatgacaagtgttgtcttcagggagtttccaggcttgtatcagggatggttaacagaagcaggtggtttcagcataatgttaagtaagtgctatgatagcataatctctcagagaaaacaccaagcctgtcctagaatttgaagaaattttgaaagagaggatacctgggctgatctgaaaggatgaagaggagttaggttaaacaaagaaatgcagtaaaaaggatggagagaggaaaagaagcatgaatcaatatgttgtttctacagcagaaattgtgtggcaaggaacagtaaagggtgaacctggcaaggcagacaggatccatggcacctggtgtctcatgcatgtgcaaaggagctgacctttattttatagcagtaaggaaccacttctatttgtttttgagattttttttccccaggactttgtgaaaaatatcttggcctggaaaattatagaagagatataaaggataaaagacagtcrttacttcaaaatgcaacctttatatcatagaaatatagttcataaaactagagcagatatttgagatcacttaattctactgcttcaatttacaactaagaaaattggtccaaaggcaatcagtgccttat

SEQ ID NO: 845222 - DNA, 633 bp, Homo sapiens
gctacaaagataaatgacaagtgttgtcttcagggagtttccaggcttgtatcagggatggttaacagaagcaggtggtttcagcataatgttaagtaagtgctatgatagcataatctctcagagaaaacaccaagcctgtcctagaatttgaagaaattttgaaagagaggatacctgggctgatctgaaaggatgaagaggagttaggttaaacaaagaaatgcagtaaaaaggatggagagaggaaaagaagcatgaatcaatatgttgtttctacagcagaaattgtgtggcaaggaacagtaaagggtgaacctggcaaggcagacaggatccatggcacctggtgtctcatgcatgtgcaaaggagctgacctttattttatagcagtaaggaaccacttctatttgtttttgagattttttttccccaggactttgtgaaaaatatcttggcctggaaaattatagaagagatataaaggataaaagacagtcattacttcaaaatgcaacctttatatcatagaaatatagttcataaaactagagcagatatttgagatcacttaattctactgcttcaatttacaactragaaaattggtccaaaggcaatcagtgccttat

SEQ ID NO: 845223 - DNA, 589 bp, Homo sapiens
aatgcttttactgcatcttttgaaatgatgatatggtttttcttctttattctgttaatggggcattccctgccctgtaggagtgatagttgaatagaaagaaaaacaaagaartggtaatatctgttgtgattgagggttacaaaagatgcagtgggagtgtagagagaggagtaatgaaatcaacctgataaagttaggaaaactttcagagaaactggaacaagatggagctttggcatttgtgatagagggagggaggggagtggtatatcttgggcagaggacatggccattgtagtgggaatatggggtacatagtggagggtactacctagagatgtgactgtagcgcggggctggggttgtgaaaggagcattacatgctgtgttaaggtttctgtcttgtatgtggttataggaagccaaaaaccaagccaaagagttttgagaaagtgaggaatgtgatgagatttttgtgaaagatctctcctgcagtattatggtgtgggtgttgatgagttgttttaacaaccttacattcctgtgataaacgtcacttggtcatgatgaatcatttttaaatata

SEQ ID NO: 845224 - DNA, 629 bp, Homo sapiens
taagacactaagttagtatcaaaaaatcacttaatttctatgcattagcaatgaccaattagaaaacaaaatttttaaaagaacaatttacactaacatttaaaaacataaaatactttatggtaaatttaatgaaaaatatttaagacttcttctctgaaagctcattgagtagactctaagagtattttagggatagaagagaagtgaacaaagtcctttttctaaggtaaaaatgacactggtaaagtggagaaaggagcaaatacagtatttttggaattgccaagtagttccttcacctccgtatcatggttcttcaggttccagatgcgaagagtcttaccccatgacacagagactaaaatcaaaccgccactgggtgtaaagctcagatctgctacaacatcttggtggctggaaagattcaaaagcaggagccccgtctgcatctcccatatcttgatctgcctaacattgagtctcatagcaaggaccaggcaagaracatctggcacttgagggtggttgtgtgcccagagcttcctgctgggtgggaaatgagtaatgaaataaagatatatagcatgtgtatggattaaagcacttcatttatgaatattttaatt

SEQ ID NO: 845225 - DNA, 513 bp, Homo sapiens
taaatgggaatattgcatgatgctgtggtttggggtatggatcctatcaccagatggtgagcacagtgtctaataggtagtttttcaacgtattccccctcccttcctccaccctcaagtagtctgcagtgtttattctttccatatttatgtccatgtacgctcaatgtttagttttcacttataagtgagaacatatggtatttggttttctgtttctatgttaattcacttagtattatggcctccagatccatccacactgttacaaaggacataattttatcctttttgtggctgtgtagtattccatggtgattatgtatcacattttctttatccaatctaccattgatgggcacctgggttgatcccatgtcattgttattgtgaatagtgcagtgatgaacatacaagtgcatgtgtctttttggtagartgatttattttcatttgggtatatgcttaataatgagattgctgggtacaatagtagctctgtttcaatttcct

SEQ ID NO: 845226 - DNA, 650 bp, Homo sapiens
attttcaggtgaatttttgtgaaagaattttttgtgggagatartgaaagtgtatatataacagcgtggatgctgttaaactgatgtcactcaattgttagtaattctctgtgtacttgggcaactaagtccttttatactgagaagttcaatgttatgaatagcttatagaaataggtaacatcattctcttccccattccctggcccctactttatatatatatatatggatagacagttatataatatatttatatatgattatgtaattatataattatatataatataaatatatttatttataaatataaatttataatatattataaatttgtaattatatatattataaatacaataattacacatatagagagagtgggaaccaggactatatttttatatatagtaggagccaagaactgtatttatatatggtatataaatataaataaatataaatatatatctatcttctgattttcatggaagttgaaatgcctcataagagaatgacatgtttagacatattaggtgtatggattggcatgtaaaaatggagacaattggcaggaggttgagctatcagagaaaatgtcaccaaggaacttgtgaagtgtggcatgatgagacagctttaacgac

SEQ ID NO: 845227 - DNA, 685 bp, Homo sapiens
ttttagtgatcctatcaaggatcactgtatccaaaatcccttctggagaattcactggagaatgattagaatttaatgacagaaaggctagcatctctttcctcagagaatttccacactgcaatcaagcaagaaggccagggatttccattttgttaatgtgtttgactagataccctgaatatctttctattgtaaagcacctaaaattatggataaaacattgaaaaacaaatattacaaatggacagctaaactctcaataaagtaaataaaatatttatgtttcagattgatgatgagatggaaaattagagcgataaatttaggaggtgatgctgcagctttactctcagggaagaaagaaattttagtagcttggttccaatgttcacattagaatagaagatgaagtagagagtgctgatagtgaattggaactgagtttttcaggtaaagcagaaagtgctagatctgcaaaagtgctagaccttcactggaatgacagaataagaaaacataattttcctgctggcacagtaagacaacttaagccagtcgtggtggctcacacctgtaatcccaacactttggaagactgaggcagggggatcacttgaggccagaaatttgagaccarcctgggcaacatgtagataccttgtccttacaaaaaatacaataa

SEQ ID NO: 845228 - DNA, 646 bp, Homo sapiens
tgttagaaacatgtttcttttccactctggatgttttcttcwacgcagaggattgttctttaacattcctggcctcttgtcctgtcagttattcctccccatggaggtggaatgagttacctggttggtgggtgataaccattgttctaacatctcatttgggagtctcccaaatgtgttgaacttgggctttagtttctccttccctctccacccaaaccaatgaaaggcaccagcctgaacaagtgtttctctctgctgactcaaactttctcttggatgactcttcccagggctgaactgaatgggagttagcaaaacaaggtacaatcatcaaactggtttttatcaataataaaggtggtattttgttctctttctaatggctcttttttcttttcatttggttcagaacttaaggaagaaggcactatttaaatggaatcccaaatagcccagcattctttcttttatgttccatcaaccaaggacagtctttcctgacttgccactttgaaaactaagatcactcccttctcattacctccactccctcttccacctcccagtttccctcatttgtgcttttacattgtaaaggtattaaaaacctttgctttctacttttaataattaaatactctca

SEQ ID NO: 845229 - DNA, 648 bp, Homo sapiens
gaagaggcaggaaggatcctccctgctatggtmtgcatgcatcctccaaaattcatgtttggaaattaatagattggtgcccttataaaaatggctatgggagtgggctcatgctcttctgctcttccaccacatgaggacgcagcaagaagacccttgccagatgctggtaccttggtcttggacccctcagcctccagaacgatgaggaaataaatttctattattcataaaaccaactcccgccccccccaaaaaaaaaccctacttaaaaactttgtggaccttcctcctataaacaggaactgtccaaaaagagcactatatttttttttggatgtagtcttgctgtgtcacccaggctggagtgcagtaatgtgcacatggctcactacagcctcaacctcctgggttcaattgaccctcccacctcagcctcccaaagtactggattacagctgtgagccactgtgtctgaccccatttatttatttttgaagcattataaaattaattttagtgtcctttgctccccacaaacctaagaggtttgcactgataaaacaattgtgactatataatcctgatctcctaggatcactgttctctgaccactagcatccaccaaagacaacttggtcctcaaca

SEQ ID NO: 845230 - DNA, 594 bp, Homo sapiens
aagtgctgggattacaggcgtgagccactgcgcccggccaacccttgtccttttaaggctctgccacacctcttcaaacaggacagagctcacacccctttccaggtaaaggtgtgtgtgtgtgtgtacgtgcacgcacgcgcgcgctgatggcaatgtcggctgcctcactcattctattcctagtccacttaacagaagagatccacccccaaaacagagtccaatatcctcccttacagaccttccacagtgggagtaacttcaaaagacaaagggacgactgtagttgaaattgtagtggccagaggctcccatcttcttgacagctgagtaacaccaggaacgtcagacacaggagaggggtcctccttttcttcctcagtcttgccactgtctctgataagctcgagggtagcaacctgctcttgtgtcaccatggataaagtggcatctggctcttgaacagctgttgtcatctcttgagtgatgatgtcttaaaggggggaaaacatttaaaaatagaccaaatccctattttttwaaaaaaaaaaaatcatgatatgattaaaaacttggggggaggggagcaga

SEQ ID NO: 845231 - DNA, 628 bp, Homo sapiens
tagactgcaaagagttaagtatgatcattgcaaaccttagaacaatcagtgtttaaaaaattaatctctataaagagatgtagtaagaaacacaatagatgatgctacayatgttcaaataacccaaaaagatggcagggaaggggaaacagaagaatgtcaaatggatggaacaaacagaaaacaaatagcaaaatagtagaactgaacccaaatatatcaatcattatagtaaatgacaatggtctacacacactcttaaaagacagaagttgtcagaatgcataaaacaacaagcattattcatatgctgctcataagaaactcactgcaaatataatggtgcaggtatattaaaaggaaaaagatttaaaaagattatctatatgaacactaatcaaaaaagccaggttggtgatattgatatcagacaaaatggacttgaaagcaaatatatttaccagggataaagtaaaacattacataatgatagaagagtcaattcatcaagaagacataacaataccaaatgtgtatgcatctaacaaaagagcttcaaaatatatgaagcaaaaactgaagaaactgaaaggagaaatagataaatctcccatgacagttgggaact

SEQ ID NO: 845232 - DNA, 567 bp, Homo sapiens
agaagattgcagtaaagcccagcacaacacaaaggtgttgggaaacctctgaataccctggctcctgtcacaggctgcctggctcgaggtggtcaggacaggtcggggaaagcctgagcagacccggtcgtcatgggttgggaccagggcctgttcctccccaggccacagagggtcccctaggagctgtgccagccaaacagggacttacgtgagcagctccttctttatgtccttggagagaaacttcagcttaaagttggtcagggtgacttcccccggatacttccgctcctcaaaattctcttccgacacttcctggtcatctgcttcagaagaagcaaaagaatgggctgctggctctgactgcaaaaaaccagcaggaagatgttttaaccggctggcggggaggcctgggcgcccaacccagtgggcgagggagagggacccttcaggacagtgtccacagaagcayctcccggagtctcctatcttctggataagggaggaagacttaactccccccagcaaaacacagaagacaacacccctgaggggctggatccc

SEQ ID NO: 845233 - DNA, 592 bp, Homo sapiens
gaagacaacacccctgaggggctggatccctcccctgcttcagccagaggtcctgcgttgccctagaaatgaggcctggtgctgcccagtgtggcaggctcctgacaccctccctggcctccctccgccacatcactccgcagcataaacatcaggatacagttcccttcagagccagggatggcactcaatagacagtaggcactaaataagtgttaccgaaatgccatgaagatgagatggcacaacgagggtaataacatacaaattacaacaatcgcagtaacctcgaaaccacctggcctgacacgcccaccagtgcgatgccttgaccacagcaggtgcttgataaaggcttcgaactgaatgctgggtatggaggctcagagctgtggacacagataagcagggcgtagtccctcccacggaggggccaggggtccaggaagggtcagaaggccaacattctgcaggatgctgtaaccagagctcaaaatccwgtcctgacaggcactcgcatgtgtcccaggcaagtggctcaggctcttggggcccaggtgccactctgtccaacttgagataacagcagccc

SEQ ID NO: 845234 - DNA, 347 bp, Homo sapiens
gccttaaaaccacattttactgaggccttgaagacaaaattccactaggaggggcatctcacattccctttagggtcaggatgagcccacacgctggctcatccscagttcagaagggagagagctcgagggaagatccccaggcctcaaagcccttggggattttggctttcacaacagttctgttttccttctccaatcccaggctctccaactgcaggacccctgcccaaatccctgcttgggtagggtaagcccaggcagctgctctctgatgggtccaactgcagccctagctccagggctcagagcagccccctctgctgctctacaggcttagaaaaatt

SEQ ID NO: 845235 - DNA, 381 bp, Homo sapiens
acttagagctgggggacaagttccctcttggctctgagtttcccaggataactgccgtcccagggagcccggggatggttcagagcagcctcccagttactgctgactgaatacttggttgtcagtcgctcgtcagcatgtgggattgtgctcaccctgcccttaccaaagttttgtttagggaaaaacagagatttgaaattgggacgacttactatggttaacattattttcattgagactgggccttaatcttcgaatggaacaaaaaatctgacttaggtcgtaaggggsagagaaacacgtttgacgctgttattttaatcgttgagaccgtgctaacttgttcagttctcatgaacgtgttctgtactggacact

SEQ ID NO: 845236 - DNA, 381 bp, Homo sapiens
acttagagctgggggacaagttccctcttggctctgagtttcccaggataactgccgtcccagggagcccggggatggttcagagcagcctcccagttactgctgactgaatacttggttgtcagtcgctcgtcagcatgtgggattgtgctcaccctgcccttaccaaagttttgtttagggaaaaacagagatttgaaattgggacgacttactatggttaacattattttcattgagactgggccttaatcttcgaatggaacaaaaaatctgacttaggtcgtaaggggcagagaaacacgtttgacgctgttattttaatcgttgagacygtgctaacttgttcagttctcatgaacgtgttctgtactggacact

SEQ ID NO: 845237 - DNA, 588 bp, Homo sapiens
ttcatgttccaaaatggcacaaggarggtcttaagcatttttaatattccacttatcagaattggaatatagataagtatttgcctgctcccagttctttgataggcattctattaaaatcaaaggcaaatgaattgtcagaaatagatttagcttacaatatagatccactagtccttgcaagttggagtcacgggctagttctacaattaagaaagaccaattattcaatctcttagaaacttagcttacctaataccttgtctttatgtattatgtaattgtttttattctaggagaaggtactttattagttcaagactgcccagatatacagtaatgaaaaagaagaaaaaggctatcatcactctaataaaatgattagttatgttcggtttggaagtgtttgctcaatatattttgtcatagacagcataggatcccagacctcttgacatttctttgccacctagattttatagtcctgctggtacgtgcaagcaccttaaagaagaggctaatactggggaacactaaggtatatatatttattatatcatctctatttttaaagtataggccaatcat

SEQ ID NO: 845238 - DNA, 526 bp, Homo sapiens
atacttcttttggtagacaccacatctattgcatctggaataccatatgcaaattctcttattacctrttgctgcatctgttttatttctggtctttagaagtctcagagtgacattagaattacaactagttttagtaagtattatttagttatcctgagagatttgttaaataataataatttttaaaagcctctgtagtcagtaatcagcttctcaccaatgataatacttctgtctgagattaatatcagtgcttttcaatgcagcagactaaaactaatctctattatagaatccacagctggcctgatggaactgtaatacaaaagtaattggtattttttgatgtccagaggatgcaaattataatttgtctcctgtgtacagaaaaaaagtgtgtcttgtatggtaaataattaaacttgatactcataaagttatatttttccatgtcttaaaggagatgactattttatacttacagtcgatataaatataataatgtatttatttcatccttgaa

SEQ ID NO: 845239 - DNA, 537 bp, Homo sapiens
gactgcatctcaaaaaacaaaacaaaacaaaaaacaaagaaagtacttaaatgaggaaagaggagagcactacacagtccttgcctgggactcagagcaaacttcatgtttttgctagtcaaacttagctgctttaattgaccttttagggtcaaaaggccttcactttccagttgtcagttcaaacgttctcaagttgatgttttgtggggagggaagattgagattgtctacatcacatttatttgacttgtacttatccactgtgtagtgttataattgtgctttatttttgtttttatgggctatttcccatcatgctgctgtctgcactgctgttggaccactttgcctatagaaggtaaatgagtccctttgggacatatggaattgagaaccttaacttgtttctgcttcttgttcttaraggaattatgaagcagtcatgatggctcatgatgagtgagcagctctgtaatttgtagacagaggtataatatgtaggagtcacagaagagctgtgccagcatgctgttc

SEQ ID NO: 845240 - DNA, 521 bp, Homo sapiens
gatagtgccttctatggagacagtcaaaagctaagattgttggagtcagatcgacatcttcatatcccagctcagccagctctcgggctgtgtgaccctgagtgagtcagragctttctcaggttcaacttctttataatgtggaaattgtaataacattaccttttagggttattgtgagcacaatgattgtatagagattaaggcacataaagaagttcacaatagtagatatggttgtcaaaattatcatcataattataccagagacctgaggttcctgtgtacttcatgaatctattaagaaaccattccagaaagtaggaccagtgggagatgaccataatagccatcgatattgcaaatggagaggggcaaatatgggtgcttctgtgatctgggaggggccttggaaggaggtaaggcttcagtggccttcaaagatagagtcttaaaagaagattgaaaggacagaataaaaatgtactgtctgaactccactatttcaaacacttgactga

SEQ ID NO: 845241 - DNA, 648 bp, Homo sapiens
actgtaaaactgaagcctggctttcccctgaggtaccatctcctcctaaccttcaacaggggttggagggggaaactactcctttgtatgtcatctccctgccacctgcggagtacggargaagagccagggcatcccttgcacttccgggccactttcttgtcctgcagagataccaccaatcccatcttggcttgtgtccacaaccctcatgggctctccctttccaccctcactgcctccatctgtggtggtccagggctgtttctcagtggcaggacactggccaccttcttgcctattcttctctgccattgtttctggggatattacatcctgatgtagcagttcctgtattcttctgcctctatttcagccgccatcccagaccttgccttacctacagcttctgcatcactgtgattctgaacatagaactcctctctgccacctttgatctcttgtcctccctcacttccttctttgccttctctcagtccttggctttgctgatgctctgttccctggcatgcttcctggtctcccaactcatctctattcttgggcttataaaaagttttttccgcctccttcatccatcttggatcctatggttgattatatcaacaatggtcttgtatgtgcccc

SEQ ID NO: 845242 - DNA, 595 bp, Homo sapiens
tgatattgttataagattagagacacaattaaattatttattgtctttttgttttttaaactctgtactggygtaggaccagccttcttaatgcctgtgtgtaggatcacaggcttcatatccatgtacatcttactgaggcctgtacttattggttgaactgaatgttgtttaaatgagaaaactccagtatcatagcgtgattagcctcccttttgccttcatctttcgttgttcatttgttttttcctgctcttcatctaggctttcccaacgagcctgctgcagtcattgccctcaacaccattaaggaatggcttgccaagaatcaccatgaggtaggaggaacgacataatcagtgaacatccaagatgatgtaatttgatgctcagttccccccaaaaaagcacataaattttataaatatcaactacacctagtcattgagccaaacctagctgaccattcttcacttgggttacatgagtaattaaatgttttttggtaattgatagaatgcagcaactctattgatctatctggtgaagtgaccagattcatttagccataatctaatttttttacattggtgga

SEQ ID NO: 845243 - DNA, 621 bp, Homo sapiens
aattttataaatatcaactacacctagtcattgagccaaacctagctgaccattcttcacttgggttacatgagtaattaaatgttttttggtaattgatagaatgcagcaactctattgatctatctggtgaagtgaccagattcatttagccataatctaatttttttacattggtggatagtatgggttatatgtgtgaaaaagagaaggggatggatttcattaagaataaggagttttcctatgctattttccttaaagctaagttatctttgttgacttgaggttcctggtgtacagtaattgtctggtatctgtgttctttggatttataactaatcacttccctaaagtcacttctgagtgtgagattgaagtgggcttgtataattgatcacaaaatcgttatgagcgggatttcttatgaaactaaataccttcatcagagtattcatcatcctcctattctgcttacttaataagatctttgtgatacgtttagtgatgaataggggaattactcaagtaaacaaagcagcaaaataactagagaccgtggagcgttaaatttcagagatttgtcartttacatattgtaacagctaggaggtttcaggc

SEQ ID NO: 845244 - DNA, 603 bp, Homo sapiens
aatgcattaaaatgcttatcatagtgtcatatataaacacaaacatttaacaattatttttaatagtaacattattcttataactactgctgtcattattgccctgccactagattctgagttcttttagggcagggactttgattattttgttcactgctatcgcttagattctagaactctgtctatactattgaacaaatacttcactatttgaagaaggctttacttttgttctggatgataccagtcagtggtcccttatcatgagagccaccttgctttctgtttgcttgaatttgctgcttttatgaaatccaggtgtctcatctcagccacctctgagtcctgtggtatagcctgtgagttcagctgtctggaaatgaagtctgtttgtaacattatcataccacactttatacataaccactgtagccaattgtttaaaaaatagtcaacttgcttaagcacttccaagctccctaaaatytaactaagtcctaagaataaaaaggaaacattttgttttgactgtaaataaatacaagctttccataagagagagagagagagtaattatagttatttgtggtctgaaatgtg

SEQ ID NO: 845245 - DNA, 647 bp, Homo sapiens
acaccatggaagcccaaagacaggagctcttttacagaaatgaaacccctagaattagtccccagaccaatggctctgcatgcaaaggcacagacagcatagactgaaagtctactgtgtgcatagctgcagccaggagatgggcaggggcccataagagaacaccaaggtcatgttcattaagcattcactgaggctgtgcatggcctacctcagcgctcacagcccctcctcctagtggcaactacgactctcccctgagataggaccggtattccaaacacctctccggggcaggcaggggtggcagccccttcactaactggactctccttttgtgctcagagtaacccccctcccattttaccaacgtggaaagggatgagcttcaggagcttggccatggtcaccggtgccagggagtgagacagaggcagaaccctgggaggcctgggtgattcaaacacatcacagagtctttaccctaagggagctgcaatccagccggggaaataagacccygaggaaaatgagcaagagcagttaaaccgcaacataaggcaataatacaaggaggctaccacccagagccggacattccacacccagcagtcggcctcgccgcctcccgcccgcttcttcttgta

SEQ ID NO: 845246 - DNA, 647 bp, Homo sapiens
acaccatggaagcccaaagacaggagctcttttacagaaatgaaacccctagaattagtccccagaccaatggctctgcatgcaaaggcacagacagcatagactgaaagtctactgtgtgcatagctgcagccaggagatgggcaggggcccataagagaacaccaaggtcatgttcattaagcattcactgaggctgtgcatggcctacctcagcgctcacagcccctcctcctagtggcaactacgactctcccctgagataggaccggtattccaaacacctctccggggcaggcaggggtggcagccccttcactaactggactctccttttgtgctcagagtaacccccctcccattttaccaacgtggaaagggatgagcttcaggagcttggccatggtcaccggtgccagggagtgagacagaggcagaaccctgggaggcctgggtgattcaaacacatcacagagtctttaccctaagggagctgcaatccagccggggaaataagaccccgaggaaaatgagcaagagcagttaaaccgcaacataaggcaataatacaaggaggctaccacccagagccggacattccacacccagcagtyggcctcgccgcctcccgcccgcttcttcttgta

SEQ ID NO: 845247 - DNA, 605 bp, Homo sapiens
accctgtctctgtaaaaaataaaaaattaaaataatttttacaaaagagagaattgccatacttggcagataaaaatacaggacacccagtgaaatcygaattttaaataatcaacaaatttttttttagaataactatgttccaaatattgcatggtatgtattacactatattatttgttgtatggaattcaaatttggcagtgttccatgttttatctaaatcccagctaacatgtggctaacgaccactaggctggacggcacagataccgaacattcccgtcacacagaaagtccttatgaacactgctgctctggagaggtcttcactcacctgtctgcttcctgggctgggaggacgtgaagacggggcttcactggaatgtgggacctctgtatctggcgtgggtcctcacggatggcaaccacattccaagagagtggcccaagagcaaggcttcctccgctctgtacctggaggttacccgccagcgtcacttctgtcctgttctggtgggttacacatgtgccattccagccaacccaggttcaagaggagggggatccgattccttctgatgggaaagctgcaagatcacatt

SEQ ID NO: 845248 - DNA, 521 bp, Homo sapiens
aactggctttgaaaaacccatttatttgcctttgttccagctgcctctcagtacctcctcacattttcctcagaaaagttctctcagaggaaggaaagaaccaaaacttattgagcaccctcaatgcagtccaggcagcatgaggcactgtcatatacagatggtcctccccaacttaggatggttgcaagttttcaactttatgatgatgtgaaagctatatgcattcagtatgttccttgggttatgatggggttacagctggataaacccattgtttggggttgttttgcttgcttgtttggttggtttttgtttgtttggttggttggttgttttgagacagggtcctacttactctgtcgcccaggctggagtggactggtgcagtcatgagtcactgcagcctcagcctcctgggcttaagcgatcatcccacctcagcctcccaaaaagtagctgggrctacagatacatgcctcaacatctggctaattttctttattttctgtagacacagg

SEQ ID NO: 845249 - DNA, 565 bp, Homo sapiens
ttgttctctcctcatgtattttaaatgtatttgtaatattttsttcttaaaaaataataattgtatgtttttatggggcacagtgtgatgttttgatagtgtatatattgtggaatgattgacaacagccacatttctcacctacaggatcaaagattccttgttctttcttgacttgctttcataaatatctatagctcttgttttttttttaaattttattatttttatactttaagttttagggtacaagtacacaacacttgtttttacttcttcaggctttccccattttgcctctccgaaattccctactcagaatctacctttagcccacgaacatatcaactctcctttgactaaataattgggattttttcttcccttgtctactttgaatttgaaacatccaagtgctggcaaatggattctttccatggtagaagcagcactgacattcatagccaggcttcactctcacctgtgttcagggcatggagtctgtgagtttgagtaacagcctgcagcccctgctcatagcacggagatctctgttctattgatt

SEQ ID NO: 845250 - DNA, 522 bp, Homo sapiens
agactgtttattccactgactcaattctcttcctaggcagatactgccattctctaaagcgtagctacttccgacytccaagtttctctgtctctctggagagggctcagtgtgctcagtgtgatgatgaagcttgcaggctctgaagacaaatgaatatggcctgatgcctggtgcttcatgaggcattgggttgagatctgcttgtctgttggagtctttatgtgtaaaatagggattcacacagtcccgacttggtagccctgttgtgttggttgcacaaagaagagctcagcacagggcctggcacagggcaggggattaataagtggttgctgctattatcatgtttatgatttctggcagtttgaaaggagattctctggagttcagtgctgtagatgtcaagccttgcctcccctccacatctacgctgcctgcgcccttgagtttcctattaacttaataggcctggacgtaaaggagccagttgttcatgggatcccagagtcaatcaacaat

SEQ ID NO: 845251 - DNA, 651 bp, Homo sapiens
catgctggtagggtgaagattggtgtaaacacttggacaaaaccatgttatgaatatattttctattaaaggtgaacatacacgtgtgttatggctaagcaaccccaattccaggtatgcactgttggaaatatattctcctccaccctaggaaacaggcataagaatgctcttcttaacattattctcagtagcctcagaccagaaataacctaaattaaatatccaccagcagcaaaataaacacgactatacagtgttttttaaaaaaaaaaacaaaacagaaaatagcaagtgttggcaaggatgtagaaaaattagaacttttgtgcattgctggtgggaatgtaaaatggtccagctgctgtggaaaaaagtttatccattcctcaaaaagttaaacatagaatcatcatatgatccagtgttccatacctagatatatttgcaaaagaattgaaagcagggactctaacaaatacttgtatgccagtgttcctagcaaaactattcacaatcaacaaaaactggaaactcaaatgtccatcccagataaatggataagcaaaactatttagccttaaaaaagccatgaaagwctgatatttcctagaagacagatgaagcttggaaacattacactgagtgaag

SEQ ID NO: 845252 - DNA, 633 bp, Homo sapiens
ctttattaacacggaaagtgatgcacagcttagcatttccttcaattctgtggacaacaactcgtggcagtgttagtagtacctgtgactgtcatcaatagaaaccatagatattttcrtattacattacagttttataggcatttcaaaactttatttacactcatcgtgacttcaaaatcatgttaacgtttagacatacagctagatcctgctatttagtgtgccaattaataatcacagatattagcatatcataaatttgttgtaagatattttgataactgtagttcagtataagtggtttcctttgtactcctgtgtattttacttaatgtgcttacaagcattttgagaagggattcaagggctttaccagaagtgtcctgtgttcaaaaaatggttcagaactgctgctctagctactcgggctttgggtagtaactttcctttctcaggggctcttgctgggtcctggctgaagacgtgaggtggctttcttactcataatttcttcctttgctgcccttctgaaaatggagatagtcagtgggaaggcaagggccttgaggggatctgaactgttccccagtgtcttcagattggtggatgacagacaggcctgccaagggc

SEQ ID NO: 845253 - DNA, 360 bp, Homo sapiens
gcaaaatcccttcacagcagtacctagatgagtgtttgcttgaataactgggacacaggaatcttgggggagccatctttaraattcgacctcctacaacccttctggaaatctgagagtgagtcaggggaagaaaccctcttttgtagtttccttttagggctttctactttgctcaaagttgggcactatttcacttcagtagggtcctgcaagccccatgagggtagtgagtgctgtcctaggaaacagtaacttaaccctgatacccatttgtccaagaactctaaacaggctaaacataagagtgttgaattcataagtgaattcatttatgaaaaattttattgtttccgtgaa

SEQ ID NO: 845254 - DNA, 360 bp, Homo sapiens
gcaaaatcccttcacagcagtacctagatgagtgtttgcttgaataactgggacacaggaatcttgggggagccatctttagaattcgacctcctacaacccttctggaaatctgagagtgagtcaggggaaraaaccctcttttgtagtttccttttagggctttctactttgctcaaagttgggcactatttcacttcagtagggtcctgcaagccccatgagggtagtgagtgctgtcctaggaaacagtaacttaaccctgatacccatttgtccaagaactctaaacaggctaaacataagagtgttgaattcataagtgaattcatttatgaaaaattttattgtttccgtgaa

SEQ ID NO: 845255 - DNA, 611 bp, Homo sapiens
tcttaatgcatatatttattttatggacagagtattattatttttctgtccaaaaagtcaaatgctttattatgaagatgccatttaataatctatttttaaaagtttcattgaatataacttacatactacaaaattaacctgttttaagaatacaagtagacaaattttagtatcattacagagttgtccgtcatcaccaccatctaattttggaacattttcatttctccaaaaagaaaccttgtgcccgtttacagtcgctccccatttccaccccaagcctcgtttaaccacaaatctttccatctctgcatatcccagaactaaaactgctggccttacatagtgtagggtgaccatcctggtctgcccaggactgaaggatttccagggtcatggggtgtccagtgttaaaacctggacggtcctgggcagaccagggcaagtcggtcatttgaccatagtgctttttttaagccaaaactttcagatctccttttcccctcttgcgtttcgtttgacctctgcctyatggggtggcctaatttggtaggtcaggcaaagacactgtacaaagggacacccctaaaaatcaaggactgtaaaac

SEQ ID NO: 845256 - DNA, 586 bp, Homo sapiens
actcctgttaatagaggctaaatgtggattatcacttgatatggtttggctctgtgtcccacccaaatctcatcttgaattgtaattcccacatgtctaggaagagacctgtaatccccatgtrtcaaggaagggaggtgattggatcggggttggggcgggggcagtttctcccatgctgttctcgtgatagtgagtgagttctcatgagatctgatagtttaataagtgtttggaaattcctccttcattcttctctctctcctgctgccatgtggggaaggtccttgttccctcttccaccatgattatgggtttcctgaggcctccccagccacgtagaactgagtcaactaaacctctttcctttataaattacccagtctcgggtagtatctttacagtgtgtgagaatggactaatacatcactttaatccatatttaaccttgatggtacctgcatcatatgaaagggctgtgtatttggttcatgtaggtgcctatgttatcaggggttctggagcctgcaagtcttatcttgggttgatctccaaaaagaatacttgcctacataaaagtgaattc

SEQ ID NO: 845257 - DNA, 630 bp, Homo sapiens
ctaacttgtcctgtattcctaagaccaagcacagagcctgtcatacagcacatatgccatcaatgtttgttgactggattaactaatgttctcagacccctgggtgaccacatattayagaaacttaacttcataaaattgtacacagtattagaactttaaaataataatatgcatttagattacctttttctcctcttgaagtttttctttatgggccatttatctgtgcatatattaactggccaaatgagaaatgagattagacataaccataaaccatatttatataagagaaatactgatgtgatacaaactgctacattttatatgagtatataaaagaaaaaaatgcaaagatgaaatagatttataactaattaggcaacattctttaaacagtaaaatttgtattttttaatcaatctccaacaacaaaataacgttagagttgaaaaaaattcaacaagaaaaaaaatccattattaaattggaagaacattactttattggcataagtcaatggagtacagaaaacgtatcttgggagggtaaaataattattacctaagaaattcagttgcttttcatctaaaattaacaactaaagttttttcctttgtaccgctc

SEQ ID NO: 845258 - DNA, 573 bp, Homo sapiens
ctcactaggacatcataagttatttgagataataggttgttagagaaggagcacgggctttgatgttagaccagctttgaatctgagacccagctaggtcgggtgtggtggctcaygcctgtaatcccagcactttgggagaccgaggcaggtggatcacaaggtcaggagttcgagacgagcctggttaacatggtgaaaccctgtctctactaaaaatacaaaaaaattagccaggtgtggtggcaggtgcctgtagtcccagctactcaggaggctgaggcaggagaatggcatcaacccgggtggtggagctttcagtgagccaagatcgtgccactgcactccagcctgggtgacagagcgagattccgtctcaaaaaaaaaaaaaaaaaaaaaaagaatttgagacccagctctggcacagaacagccattgatcttagacaagttatataaacctctccctccactcctaccccaaaaccttaggttctatatctataaaatggaaataatatcagccatcttgcaagattgccataaaaattaggtataatatatatagagtgct

SEQ ID NO: 845259 - DNA, 586 bp, Homo sapiens
tcacgtgagcacacacctcccccctccacacacacccatgtgcatgtactctcacacacacacagacctgtgggcgcacacctacctacacacacccacacgcctacccacatgcagccacactcatgcatgcacacacacctgcctgtgcacactcatacattctaagatacacctacctgtaagccgacttgcacatgcacatacatacacactcagccatgtgtgaacacacacaaatgcaaacctgtataaaaaggacacaggtactttgtacactgaatttattgtgagaattaaaatgcaatggttagatgcccaggagtccttgctctgtcacttactagctgggtagtcttgggcaggtcacttccactctctctgcctccgtttctgcatctgtgaaatggaactattagtagcacctccctcagagattgttgttgaagatcgcytggcacagggcatggtacacagcgagtgcccagtaaatgtcagctattagtagtgccctgtgtcagccaaaactttttggtctctggaagctttcttttcaaatttgcaatgactacatttcctcaaaaat

SEQ ID NO: 845260 - DNA, 577 bp, Homo sapiens
aaagtgctaggattacaggcatgagccactgtgtccagcccaaatttggatatccattttcacttaactaaaagatctgacaacatcaggcctgtatttttacagggaaaaaattgaytggagccaggcatggtggctcatgactgtaatctcagcactatgggaggccaaggtgggaggatctcttgagtccagaaattcaagaccagcctgggcaacatagcaagaccacgtctctacaaaaaactaaaaaaattagccaggcatggcaatgtctgcctgtagtcacagctacttaggagactgcagtgggaggatcccttgaccctgggagttcaaggctgcagtgagcaatgatcacatcaccgctgtccagcctgggtgacagagtgagaccctgtctccaaaaacaaaacaaaacaaaagtcagttggagctgagaagcatttgcgcccattgagtcccactttgaccttcaggttgaactccccctggcccacttcctcattcctatcacaggactggcccctccagtcttgagtttgcttctcttgctctaatgctctaaataatcatt

SEQ ID NO: 845261 - DNA, 626 bp, Homo sapiens
agccctcatctcagtgaagaacgaagcataaacggatccatccagagcttgaagcagggctaccaggccctgcccagcccaaatcaaccaatctctagccaacacacagacttgtgctattacaaatagaagtggtttaagccactgagttttggggtgatttgttacccagtaaggactaactgatagacatcttattcttaaatggtgggattcaatattgtaaagaggtacactctctatgaattaatctataaagtaagtgtgactccactaaaaataccgatagatgtttatttatctgagaaattgtaaaacaaaagtagccactaaaaatttgaaagaaactaatagtgggggaaaagtcctatcagatattaagtcctatcagatattaagaggtgccatacaactaggatagtaccattacacaatatgctactggaataagaacagataaactaataaaacacaacagtaagggtaggaaagatgatagatagatagatagatakatagatagccatagaaaggtagagaaaatgctatattatgaataagtggtaggaaggtggaagattatatagtaaatagcattgaaaatcgcaatataggccagatgcggt

SEQ ID NO: 845262 - DNA, 552 bp, Homo sapiens
cactgcactcccacctgggtgacagagcaagacccaacctcgaaaaaaaaaaaaaatttaaaaagaataaactctgtcgtaactgccacagatttttcttctttggtagctaaacaagcattggtctcaagataagcaatattgatagttgtgaatattaaacaattcgcaactcatccagctcacaaatgctaacaatccctgttccatctgccataactacagctttgattggagaagagagtgatttcagtaactttctcctgatcagaggaccaccaaccacagactggttctggctggtttacagagattgcgtacctgcttacctttgtgctctgaaaagaacttctgaagtataggcctaattgtaatacatttaaatcatttaaaggggtgtacaatcttttggtttccctgggccacattggaagaattgtcttgggctacacaaaaatgaatttgtgctgggccacattcaaagccgtcttgggctaygtgcagcccacggactgcaggttggataagcttgatttaatgctaaatctccac

SEQ ID NO: 845263 - DNA, 556 bp, Homo sapiens
ttagctgggcagagggtggatatttcaccataaattcattaatgtggaccttgaagaccttccatctttatgcaaatattccttcagtgaaatgcaaatatcccctggatacaatcagaccttgtgctgtcaacaactaacatagtttggatattctttaacaggtaacctctttcttctggcatcataccagaaagtatgatgccagaagaaagaggataatcatttgctcacattagatttcacccacttcacagttttccagatgaggactaactgtctgctttctctttatgcatttgcttaagaaatcttctgtctcaatttatctctctctctctctcccctcccccttctgccccaccccacccttatgggactctaattacacatatttttttctctctttgattcagtttggataaatctattgatctgtcttcaagtttactgattttttactgtatccaggctgccmagcccattaattctttatctcttgatgttgtggggagatttgtcagcatttcccttggaatttgtttagtttttgtct

SEQ ID NO: 845264 - DNA, 621 bp, Homo sapiens
tacacaccaccattacagaattagagtgttctgaatttgactgtgtatttacttttaccactgagttttacactttcatatgtttttgtattactaattagtgttcttttctttcagcttgaagaacttcctttagcatttcttgtaagacaagcttagcgatgtaaacattctttccagtttttgtctgggaaagtctttatctctccttcttcatcgctccttcatttctccttcatttcagcttttgaggtacaataattttggttggcagagttttttcttcagcatcctgaatatatcatcccactatccctggcctgtaagtctctgctgataaatctattgctaatttcattggaactctctgatatgttatttgcttcttttttcttgctactttcaggatcctctctttggtttttaatggttggattataatgtgtcttggtatagttttgtttaattgaaccttattggagacatttgaccctctttacctgtgtatttatatctttccccatatttgtaaagttttctgctattatttctttaaataagctttatacytccattgtctctctcttctccatcttgagcttttatgactcaaaatttgta

SEQ ID NO: 845265 - DNA, 620 bp, Homo sapiens
aattggagaacattccttctatttgtgtttacctttgccaagtgtctcgtcatttwaaattttttttttggtttgtttgtttaaaatatagtttcagaataggtacacagagtgaatttgaacccaggcttgaggcctgactggtgattatttataatttctggtagggggtaggaacttttattttttcttccaaccaaaatcaaggctaagatgcaaaatcttctttgctatttcctttgcatggcgaacattttctaattcactattttattgggaatgtgggcctttcgggactcattccaaagtctccatgctgacactgcactgctttgtcgcctgcctctcctgtcccccttcccccgacacggatgtaaaaactgaaagctctaatttacaaaacactggcaaatgccctcagggtctgatgcctgctccagtgaatatttaccatgctcattctgaattctggcttccaacttcatttttggcctctggggattaagatactttaatttcttgccaagttagctactcattttatccagcattttaaaggtgctttttgggggagaattttcaggatacagagtctgtcatattgctggaagtaaacatca

SEQ ID NO: 845266 - DNA, 748 bp, Homo sapiens
aagacatgcatgcagccaacaagcatatgraaagaagctcaatatcactgatcattagagaagtgcaaatcaatacaatgagatgccatctcaaacccagaatagctgttattacagagtcaaaaaataagatactggtgagactgcagagaaaagggaacacttaatatactgctggtggcagtataaattcgttcaatcattgtggaaagcagtatggtaattttcctaaagacagaaaatccattcaacccagcaatctcattactaggtatatacctaggggaatataaatcattctaccataaagacacatgcacatgaatgttcattgcagcactattcaaatatcaaagacatggaatcaacctaaatgcccatcaacggcagattggataaagaaaatgtggtacatatacagcatggaatactgtgcagccacaagaaaaaatgagatcatatcttttgtgggaacatggatggagctgaaggtcactatccttagcaaactaacgcaggaacagaaaaccaaatactgcgtgttctcacttataagtgggagctaaatgatgagaactcatagacacgaagggaacaacatacactggggcctacttgaggatagagactgggaggagggagaggagcagaaaaaataactactgggaactaggcttagtacctgggtgatgaaataatctgaacaacaaaccccccctccacgacacaagtttacttatataacaaa

SEQ ID NO: 845267 - DNA, 586 bp, Homo sapiens
tggtccctgaagcagattctgatctctttgtctagagcctggcaataggacttatttgagcagagcctggaaccacttccaacatctcacctccctgctgtaggggatctctatggagagcagtatctcctccgggctcagcagggtctttctgtagccagggaagaaggtgtggtccatctggacagttctcctggtgcctgtacagaagcaagatgaagaggagccaaagtgagggaaaggctgggaaccccccatggggagaaaggataaccatcagtgggattcttcatgctggtctccaatgcccacagtcagagcaaatgactggcacaattggggccaaatcctctctctgaaatccttaagcatccttaagcaatggtgtgctggtgaatctttaacaaccagttccgtgtagggggaaaagccctggtttatagcatttgccaatttctgtggtgtaaatacttccaggccaccaaagttgcrtcactgaatgtgaagctgggaagaaggcaggaaagagttagcacagcaacccggactgctgtcctctgtaggggttgcttacaaggctggccct

SEQ ID NO: 845268 - DNA, 241 bp, Homo sapiens
ggaatccatccaataaacacagcaacaccctatgctactgaccaagcaaagcttgcccctggtaccaaagagctaaatcatgaccaaagtgtgacatgaatgtaactgaaatgcgggttagttgctcaatgtatgcaragtcccacggacaagagtaaagtctgataccaataaagtgaatgtattccaaagctagcttggaggaggggcacacaacgtcctgcctttcaatgtgccgctt

SEQ ID NO: 845269 - DNA, 614 bp, Homo sapiens
attgaccgagggatatgacacatggaggtggcatagtcatgcgtcatctgtccatactccaagagggcacagggcaacaagaaatactagaagacagtcagggcaccactgctgccattgaggtgggatctggtcatctcctagggcctgtgaccctgagtcctgcagtcctgagctgccagggtaggggaggtggagatcaacccatggtcccacagtgaagtgtgtcccagctttagcaaaccaaggtatcctcccactgtgcattcctctcctccccaagcctgctcctccagcagctccccactcccctccttttgacttatctgagccaagccctgtccctaactagaaactcagaggtgatgaaaacaaagttttttcctcgctttacttacttcctgtgaactcgcttaattgttcccagattactaggtcaccaggaggatttggtaccttggatttttttttcttcttcttccttatgctttctggagacaacaagggtcacttggggtccwgccttgtgtggcaagggtatgctgatcggatttctctggaatccatttctgtggtgtttcttgagtgaggggatggactgagtggcctgggtg

SEQ ID NO: 845270 - DNA, 614 bp, Homo sapiens
attgaccgagggatatgacacatggaggtggcatagtcatgcgtcatctgtccatactccaagagggcacagggcaacaagaaatactagaagacagtcagggcaccactgctgccattgaggtgggatctggtcatctcctagggcctgtgaccctgagtcctgcagtcctgagctgccagggtaggggaggtggagatcaacccatggtcccacagtgaagtgtgtcccagctttagcaaaccaaggtatcctcccactgtgcattcctctcctccccaagcctgctcctccagcagctccccactcccctccttttgacttatctgagccaagccctgtccctaactagaaactcagaggtgatgaaaacaaagttttttcctcgctttacttacttcctgtgaactcgcttaattgttcccagattactaggtcaccaggaggatttggtaccttggatttttttttcttcttcttccttatgctttctggagacaacaagggtcacttggggtcctgccttgtgtggcaagggtaygctgatcggatttctctggaatccatttctgtggtgtttcttgagtgaggggatggactgagtggcctgggtg

SEQ ID NO: 845271 - DNA, 557 bp, Homo sapiens; identical to SEQ ID NO: 817684

SEQ ID NO: 845272 - DNA, 560 bp, Homo sapiens
ggaagaaaaattttaaaaaaaaaaaagagaaataggttctacatttattttacatacttttttttcactctgaaatggccatgtttgaaccagtgctttgcctcagaaagaaattattaatataattctctatagctagggcagtgattgtgaatatggtctattatattttcctagagtataagggaatctgataaatagtgattcgtagtgaggtagcaacaatatgtaaatgaattacttttttttccccttttccttactcctaggaaatggaaggttgctttaattaaatattcagtacttgttttcaaaactggagtcaatctttggcaatattaagtcgtttcctcttctgaaaaagtaaacaccacctaactgttgtttctatgggtatgttcctaactgtaaacttgagtaagtgagcctccttcagtatctaaagatttgggtgtttttgtttacctgtttatgtataaccctccygagcctcttcaggaagttcctccattccttacagaatagggcacctaaagtatttcctacatagggtaggtgga

SEQ ID NO: 845273 - DNA, 594 bp, Homo sapiens
tgacccttatggaaatgaaggtccatgattcagtttggattccaagtaggaaaagaggttttaaaagttcctttccattgtctcagtgagaagaccactaaagagttcaagttaaagaaggaaagrttcggtgctgtacaatcttaaggttagcaagcaaagactaaaaggtatctgctaccagtaatgagggcttaatgacagaaatggacagtcttgtccgaccagcttacgtgggtgaggtcaacctagttatgcactgaaactatacccttacccactttcagtaaaggtgtttaccagctccgtagtgagaggagatctgtgaatttggtgtctgatgtcactgcatggccttgtgtagtttgttcagtgcaactaagtacattctagagtgtgtccttagtcaatgtcagccaatgcttttatcaccatcatagggtcttgagtttcgaaaggtcttcaggttcttctttacagacacctaaagtgattggccctgcctgaccgtggtcaagatgctagcggctaaagtgggcaaagccaggtaaggagatgattcacagggttctgccttcatgtctcttacccatg

SEQ ID NO: 845274 - DNA, 406 bp, Homo sapiens
ccccaggaggatgtgtggcatctacacacttgttcattgcacccgagaaggtggaacgtggaaagacgaggccatggtagcttcgacggttccttccggagggaccagatgggccaaggacccagctgccawgaggtggccggagagaaggcccagcagcgtgagggcttcctggaggaagagggcccagcagcatatgagggcttcctggaggaagagggcccagcagcatatgagggcttcttggaggaagagggcccagtagcgtgtgagggcttcctggaagaagagggcccaacagtgtgtgagggcctcctggaggaagagggcccagcagcctgtgagggcttcctggaggaagagggcccagcagcgtgtgagggcttcctggaggaagaggatgttc

SEQ ID NO: 845275 - DNA, 573 bp, Homo sapiens
cagcctgatgagtgtgttgtcgttcctaccttattccgctacrgaaagatcaatgagttcatgcggttaaagaacttagagtttgggaggctgaggtggatggatcacttgaggtcaggagttggagaccagcctggccaacatggtgaaacccccgtctctactaaaaatacaaaaactagctgggcgtggtggcgggcgcctgtagtcccagctactcgggaggctgaggcaggagaatcgctcgaactcgggaggtggaggttgcagtgagccaggattgcaccactgcactccagcctggacaacagagcaagattctgtctctaaacaaataaataaataaataagaacttagcacagggtcatggcgcatcggagcaatcactcactgctggtctcccaaagacacagaagaccttccccagctgctgggggtcaaacacggaacaggcagtgcagtgaccacacggcggacttgctgtggccaccgatgcaagacgggtcctcgcccggccacagtgagcgcagggccagtgccgccggggggaacctgaggctggccgcaccgga

SEQ ID NO: 845276 - DNA, 534 bp, Homo sapiens
ccgcctctctcagtctcttcctcacacttcacccccttcccaagctgctgggcagtgactgcactgaagacccagtagttctttaggaaccagcaattcacttcagtgagcagcacgtgcgcgtgatttgtgcgaacatgctttccccacagcactttactctaaggagtcgcttcctgcactgggtcctccatgaagacgggcagctggggctcgggttggcatggtgtgcagggctgcagtgctctggccagtgggtggttggggctcgggttggcgtggtgtgcagggctgcagtgctctggccagtgggtggttggggctcgggttggcatggtgtgcagggctgcagtgctctggccagtgggtggttggggctcgggttggcgtggtgtgcagggctgcagtgctctggccagtgggtggttggggctcgggttggcrtggtgtgcagggctgcagtgctctggccagtgggtggttggggctcgggttggcgtggtgtgcagggctgcagtgctctggccagtgggt

SEQ ID NO: 845277 - DNA, 622 bp, Homo sapiens
tctgggatgactctactgatctcctgtatctataagttwgctgggtgttacaagctgagctaagcttggatcagataggcggctctgcctcaagttactctttgggtgagtttgcctctgggtgctggattgagttctggtctgcttctgtgttcattctgtggccctaggctgaagggcagtggctgtctaggaaaaggcttttaatagagatgataaaagcacaaggaagtggaaacacgtgagaactcttaaagctaaggctcagtagggacacactaccacttcttccctatttcattggccagggaaagccacactgtcaagcccaatatcagtagttaggaaaatataatcctcttttccgagtccatggcaagaatgtggatgcaaaatactatgtaaggaagtgaggaacgtggccaatacgtcagtccactatatcttccaactggaaactacgtttctgtggatatacatgacccattcctttataaaattcctcttggcaaagagtgctggctgttcaccaaacatcactttcctacccttcctggatatacagctaggacacatttcccagccttcttcgtacttagatgtgactatgtgactggttttg

SEQ ID NO: 845278 - DNA, 407 bp, Homo sapiens
tttttttttaacattaccatgcatggttatacatcagtcttacrtcctccttcctagaggcagcacctgctataggtattcttgtatgtgtgatgtatttaaggagggcactcagaataagggagcagaggggagatggatgaagaagaggaaggagttaagcaaggatgtgtgttcagctggagtctagccttggcttgagcccaagattctggagtatgaatggccgtggaactggtccttccttgaggcaagtgggctggattttgtatccctatttgagtcagtgattggctgcagaccactgtggaagtggtggctggcacataaagtccaggtgaagtggctctcatcaactgagggcaattctatggaaaagagcagtcacggagctactggcaggcaac

SEQ ID NO: 845279 - DNA, 407 bp, Homo sapiens
tttttttttaacattaccatgcatggttatacatcagtcttacatcctccttcctagaggcagcacctgctataggtattcttgtaygtgtgatgtatttaaggagggcactcagaataagggagcagaggggagatggatgaagaagaggaaggagttaagcaaggatgtgtgttcagctggagtctagccttggcttgagcccaagattctggagtatgaatggccgtggaactggtccttccttgaggcaagtgggctggattttgtatccctatttgagtcagtgattggctgcagaccactgtggaagtggtggctggcacataaagtccaggtgaagtggctctcatcaactgagggcaattctatggaaaagagcagtcacggagctactggcaggcaac

SEQ ID NO: 845280 - DNA, 589 bp, Homo sapiens
gcttgattgatgacaggtgcatattattgctaacaggctttggatttgcctaatcataagaaacacttgtgcctgggtcatgtctgccmtcagcattccttctgggtggcagatgcagtttgtgagtttgccaacattctgcatttatgagaacagtttgctgtttactcatacagcctccagtggtatactgagttgatcacaaccctcacactttcggcctgcaacagtttctccctaaaatgataaaatggtcctgaagaattaacacttcatcttggcctgctttctctaaacatacaactgctctggattttgctttgtatgtttatgtctttataaaacaagagaagtcatcactaaattatgacaggagtcaaattcttaagtgactaatggcagcctatgtcaaaataatactcaaaaattaaacagttcatatgaagggtaactttttttcaacctttatttctagccatctctaacagaaataaggtagccaaatataatggacgagacattaaccttttttaaaaaaatattcaaacattttaagtaactagcattttgtaacaaaacaatcacattg

SEQ ID NO: 845281 - DNA, 563 bp, Homo sapiens
tttttcctcattaattagaactatgttatgacatagctattgcactcttgttctcctgtttttaccatcccacaagtttaagagtaaaatgaccactgcattatcttaggaataattttacttgtcatatagtactatttcttatggttttactcaaaaaattttactgtacacttctgcttcattaatactgaagaaggtggaaagaacttaaaattatttctattggtcttacctacctatgtcatttattacttggcttgaaatagatgtttacatatattgaaaataatgtcatttggataactgaatacaattataacaaaaatttgcacagatctgagtatttttagatcaaatcatataccatgcccgaatcagagcaacttttaaaagtaaacaggacactgtattattatccaaccttactgttgctataaagaggttctactgmgtatgtttaaatcatgacttaaaattctatttaaattgagaagcaacccttgcaaatatcccaacctggatccagctaagaacaagtattagggacttatgcaaatgtg

SEQ ID NO: 845282 - DNA, 581 bp, Homo sapiens
ttaaaggttatatttcattggaatggagcaaattttgcccccttagtatgggratatgcttcatcaaataactgagatgctgtggtattccatggagatgaaatcagattgtagaagaagcttgcccctatcttctacagggctgaactgttcttggaaaagagaatattttctccttgaaattcttacaataagaagagatgtgcaggttgaacgaaataacgagtataaaacaatacctaacactagtaaaatgatgtactactacatcgagatctaaatgtttgtcatttatagaccaaccactagatggagagcttgtcttaccactgagtatcaggtacttctacaaaatttcaaagcaaggattattaaatttaaacttctcagcacatttaacattcatagaatgtggcatccattgctgtcgcagataattaatgtccagttttatgattatgaaataatttacagctaaatagaaatacctatcagttacatgcaaaaaaagttttgtgaatgttgggtgcctaagaaaatagatcataagaaaagaggttataagaaaagatgctaattgt

SEQ ID NO: 845283 - DNA, 636 bp, Homo sapiens
aaagataagagagaacaggttggttgaacttgggcagaatcacagatacaattccacactaaagaatgaaaataagcaatgaactagacagaaggaagaaatcatgaagacttaggaagcagaattacaatctgtcatattaacaaatggagtttgccttctaagatcagatgttgctcagaaactttcattgtttacctaataatttaatatcactagtttcctagtgggtcaagcagatgcaaaatccagcttattttcttctatgtgctctcaagcttattgcttattttaaagtaaaatcctgaaaaaggaaaatattaggttggtgcaaacgtaattgcggtttttgcattgttgaaatttgccgttttatattggagtacattcttaaataaatgtggttatgttatacatcattttaagcatatttctcactttttttttgctaatgacttattgctgtttatatttattttagactatggaaatgatgttagacaaaaatcaaatttagcgattttctgagttcaaaataggttataaagcagcagagacaacacacaacatcaacaatgcatttggcccaggawctgctaatgaacatacagtgccgtgatggctcaagaagttttg

SEQ ID NO: 845284 - DNA, 617 bp, Homo sapiens
ttggacagctactagccatcagagatttagagccaaagtgcartactcaccttgcctcagacaaaatattcactgcatatttgtgcaaaaggaacacctttactctggcagaaggaatattgcaattacagggtacagagatacaaagtggccattcttagacatttacacagagccagagagaaataatgaatactactctaagaattcttgatgggttcactaaactgaagaagctgaagaaatgaagccttctagcaactcagcttccatggatatcatatttcttaagaaattaggatctctggatgaagaaggtgatcaatggcagacaagttgggactacttcaaggcctttggtgcatttcaacatctgagatcagactgctgaagattcagctgccaccatgagtcaattgggtaagcacacataggaaaaagaatgctacttgaaatttgggaaaggtaggtaagtttcctagcaggcattgggactgagaaaacaagaggctgagtcatttttagagcatgccacagaaatgatgcccatgtgaatgacaaacataagagagaaatgctgctctctaagcaggagggactgggctgtactaggtatt

SEQ ID NO: 845285 - DNA, 589 bp, Homo sapiens
ctttatcttggaagatgaagggatacagtgaggaatctgaacaaacagaccttgctaaattwcctcctgtttattacacttacctcatgttctttgccctattatatttctctgcaactgtacactcttcatcaaacctactataaaaaaacatatgggtttaagtgtttctttgggtcttcatttcctatgaagactcctgtgtcacaaacggtgacctttggttcttagcctggttcttggtggcttctgcagcatcagaatgataggcttttacataggcctaagggtagggcttattggtgctttaaaccaaacttgtgtgggaagatggatgaatttgagagactgagggagaccttgtacatgaggcagccttaaactttaaggagtaagaagaaaatcctcttttccaagatactttcctcgcctccacacactgtcagtagtagacataattgcttagtcatagcaacagaaattccactaattagggattcacttatgttaacaagcaccctttttaagatgcaattaggatttaggatggcaattactaattaacaattcatgcaaattttcttaatca

SEQ ID NO: 845286 - DNA, 536 bp, Homo sapiens
gtgtatcttagcttgctgggctccatggggtgggatccactgagctagacaacttggctccctggcttcatccccctttccaggggagtgaatggttctgtctcactgacattacaggtgccactggggggggraaataacctcctgcagctaactcagtgtctgcccaaatggctgcccagttttgtggttgaaaccctgggccctggtggcataggcacccaagggaatctcccagtctgcaggttgcaaagaccatgggaaaagcatagtgtctgggctggagagcaccattcctcatggcacagtccctcacatcttcccttggctgaaggagggagctccccaaccccttgcacttcccaggtgaggtgacaccccaccctggttcggctcaccctccttgggttgcacccactctctaacctgtcccagtgagattagccaggtacctcagttgggaatgcagaaaccacccgccttctgccttgatctcgctgggagctgcagactggagctgttcctattcggccatc

SEQ ID NO: 845287 - DNA, 637 bp, Homo sapiens
tgcaggtaagggtttttaaaggcaagggtaaatttcaggaaaggaggaattataggcaaaatcataaatcaatataaggaggttacacattggttttgacctaaaagcgtgggatatcttgaagtgagggcttacaggtcataggtatattcaaagattttctgatttgccattggttaatgaagagaagctttgcttgaaaatttggggtcagcagaaaagaatgttagctctggttcatgaatgtgactttcttcaggctcctcaggaagaaactgagaacaaagaatgacggtcagagttcagtccccagttcccttttatctgaggtctactgtggggacgagttgtttgttggggatctgggttcctgaaaaaaaaactcagagacatatgtgaagatgttatctttagtctctattggggaaccaaacatcttgtgattctagcttccttggctattgttttaggttactattttaccttcatgcttatcaagttgcttaacttctcaaggctagctaggtacctgcaatttctcttgaaagagctcaatattttcccttatttccatgcttggsaggcctgcaggccactgagaggaaagtctctgctgtgtctcacaagcactttggag

SEQ ID NO: 845288 - DNA, 279 bp, Homo sapiens
cacagtggagttgtctggtttctgctctgcaatgtcacggcctcacatggaagatgccaggatgggctggactcatctgttcctccctcacatggctaggacyagcactggggagattcacacagagaggagctggaacactgggggctccctgggcgtgtgtatctgtagatggcctctcagcatggcagcctcaaggtagggaggcttcttccctgaaggctcagggctcccaaggtgggggtctcaagggagagcaggccagctggaaacatcaac

SEQ ID NO: 845289 - DNA, 603 bp, Homo sapiens
acccaagaaggtgactgtatttggagatagataggatcttcaaagaggtaactaagtttaaatgaggtcatttaatggatggggcctatttaatattaggatgcagacacacacagagagaagaacrtgtaagatgtccatctgcaagacaaggagagaggcttcaggagaaagcaaccctgctcacactttgatcacagacttgtggcctccagaatggtaagaaaatacatttctgttgtttaagcctcccaggctatggtactttgttatggcagccctagcaattgaatacagagagtaatatacctattagacatacatgtcaatgttccctttacaggaaatgatgaactcagcagtaatttaataagagatgacttagaattgtaaattcttgcccactcatatgatgaatatttattggggaccctctgtggatgagctgtggcacacatgatctgctccctcacatgtacacctataaattcacccaacacatggtgatttgggttgctagatgagagtcaagcaaattgcttttgagagaggaggctcagtgaagtggcatttaagctgggtttggatgggagagacagaaga

SEQ ID NO: 845290 - DNA, 603 bp, Homo sapiens
acccaagaaggtgactgtatttggagatagataggatcttcaaagaggtaactaagtttaaatgaggtcatttaatggatggggcctatttaatattaggatgcagacacacacagagagaagaacgtgtaagatgtccatctgcaagacaaggagagaggcttcaggagaaagcaaccctgctcacactttgatcacagacttgtggcctccagaatggtaagaaaatacatttctgttgtttaagcctcccaggctatggtactttgttatggcagccctagcaattgaatacagagagtaatatacctattagacatacatgtcaatgttccctttacaggaaatgatgaactcagcagtaatttaataagagatgacttagaattgtaaattcttgcccactcatatgatgaatatttattggggaccctctgtggatgagctgtggcacacatgatctgctccctcacatgtacacctataaattcacccaacacatggtgatttgggttgctagatgagagkcaagcaaattgcttttgagagaggaggctcagtgaagtggcatttaagctgggtttggatgggagagacagaaga

SEQ ID NO: 845291 - DNA, 614 bp, Homo sapiens
gaatggaatgggatggaacggactctaattgaactgcagggaattgattggtctcaaatggaatggaatggattccaattgaatggaatggagtggaagggactcgaatggaatggaawgaacttgactgcaatagaatggaaaggactctaatgcaatggaatggacttgaatggaatggaatggagccgaatggaatggaatggaatggaatggaatggaatggaatggaaaggaatggaatggaaaggaaggtaatggaatggaatggattggaatgcaatgcactagaatggaatagaatagaatggaatggaaaagacaaaatgtaatggaatggatttcaaataaatggaatggactcaaatgtaacggaatggaatttaacgaaatggacacttgtggagtgggatggaatggactcgaatggaatgggtttcaatggaatggactagaaaagaatggaatggaatggtttcaaattgaatagaacggaatcgaatggactagaatggaatgcaatggaatggaatggactcgaaggaaagaatgtaaaggactcaaatggaatagattagactagaattgagtaggaatggaatggaatggaatgg

SEQ ID NO: 845292 - DNA, 614 bp, Homo sapiens
gaatggaatgggatggaacggactctaattgaactgcagggaattgattggtctcaaatggaatggaatggattccaattgaatggaatggagtggaagggactcgaatggaatggaatgaacttgactgcaatrgaatggaaaggactctaatgcaatggaatggacttgaatggaatggaatggagccgaatggaatggaatggaatggaatggaatggaatggaatggaaaggaatggaatggaaaggaaggtaatggaatggaatggattggaatgcaatgcactagaatggaatagaatagaatggaatggaaaagacaaaatgtaatggaatggatttcaaataaatggaatggactcaaatgtaacggaatggaatttaacgaaatggacacttgtggagtgggatggaatggactcgaatggaatgggtttcaatggaatggactagaaaagaatggaatggaatggtttcaaattgaatagaacggaatcgaatggactagaatggaatgcaatggaatggaatggactcgaaggaaagaatgtaaaggactcaaatggaatagattagactagaattgagtaggaatggaatggaatggaatgg

SEQ ID NO: 845293 - DNA, 548 bp, Homo sapiens
gaatggaatggaatagaatggaaggaaatcaaatggaatggaggcgaatggaatggacccgaatggaatggagtcgaaagcaatggactggaatggaatggaatcgaatggaagggattagaatggaaaagaattcaatggaagacaataaaaaatactgggctggaattgaacgtactggaatggaatggaatagaatggaagggaatcgaatggaattgaaaggactagagtggaatggattcgaatgcaatggactcgaatggaatgcagtcaaatggaatggaatctaatggaatgcagtcaagtgcaatggaacagaatggaatggactcgaatggaatggacttgaacgcaatggactggaatggaatggaatctaacggaaaggaatcgaacggaatggaattgaayttaatggaatggaatcgaatgtaattgaatggaggggacaggaagtgaatggtatcgaacggtatagaatggaatggaagtcaatggaatgcaattgattggaatggaatcaaatggaagggaattgaaaggaa

SEQ ID NO: 845294 - DNA, 601 bp, Homo sapiens
gaatggaatggactcgaatggaacgaatggaatggcctcgaatggactcgaacgtaatggaaygggatggaatggactggaatggaatggtatggaacggaatgaactcgaatggaatagaatggaagggactcaaatggaatggtgaggaaaggagtggactcgaatggaatagagtggaatggaatcaaatggaatggaatagaattgaatggagatgaatggaatggaattgaatggaatagaatgctctccaatggaatggaaaggaacggaatgaaatttactcaaatgaagtggaatggaatggaatggaatcgaaagaatggaatggaatggaatggaatggaatggaatggattctaatggaatgcaactgaactgaatggacgcgaaaggaatggaaatgaatggaatggaattgaatagactagaatggattggaatggaatggaatggaatcgactcgagtggaatggaaaacaatggatattaatgaaatgcaatggaaaggaatggtctcgaatggaatggaatggaatggaatggacctgaatggagtggaatggaatataatggaatggaatggatattaatggag

SEQ ID NO: 845295 - DNA, 601 bp, Homo sapiens
gaatggaatggactcgaatggaacgaatggaatggcctcgaatggactcgaacgtaatggaatggratggaatggactggaatggaatggtatggaacggaatgaactcgaatggaatagaatggaagggactcaaatggaatggtgaggaaaggagtggactcgaatggaatagagtggaatggaatcaaatggaatggaatagaattgaatggagatgaatggaatggaattgaatggaatagaatgctctccaatggaatggaaaggaacggaatgaaatttactcaaatgaagtggaatggaatggaatggaatcgaaagaatggaatggaatggaatggaatggaatggaatggattctaatggaatgcaactgaactgaatggacgcgaaaggaatggaaatgaatggaatggaattgaatagactagaatggattggaatggaatggaatggaatcgactcgagtggaatggaaaacaatggatattaatgaaatgcaatggaaaggaatggtctcgaatggaatggaatggaatggaatggacctgaatggagtggaatggaatataatggaatggaatggatattaatggag

SEQ ID NO: 845296 - DNA, 621 bp, Homo sapiens
agactgtgccaaacagtccgtgggyggccagagtcctggagtgcagtgaccaggctgttgtctagcataaaggcggagcccagaagaaggggcgtggggtggaagaaacctccctcactccccccgcaatgcggcatccgctggtcctgctgctgctcctctctgccctggtgacctccttcactgcagcctctatccacgatgctcatgcccaagagagctccttgggtcttacaggcctccagagcctactccaaggcttcagccgacttttcctgaaagatgacctgcttcggggcatagacagcttcttctctgcccccatggacttccggggcctccctaggaactaccaacaagaggagaacgaggagcaccagctgaggaacaacaccctctccagccacctccatattgacaaggtgaccgacaataagacaggagaggtgctgatctccgagaaggtggtggcatccatccagccggcggaggggagcttcgagggtaactggaaggtacccaggatggagtaggcggcggccctggtgtccatccggaaggctatggacaacttccatgcagagctccatccccgggtggccttctggatcatgaagctgc

SEQ ID NO: 845297 - DNA, 527 bp, Homo sapiens
tgtgacttggatatgagatatggagtcaaaggggatcattttggacttttaaggtttaatgattgccctatcaattttcasaattgcatggggtctgtagcccctttgtttcagcaactttctcatttggaatgagtatatttactcaatgcctgtacctccattgtatctatgaagtaactaacttgtttttgattttataagctcaaaggtggaagggacttgccttgtctcagatgagacttcgaacttggacgtttaagttaatgctggaatgcattaagactttgggtaactgttgggaaggcatgattgtattttgaaatgtgaggacataagatttgggagggtctaggcttggaatgattaggtttggttgtgtccccacctaaatctcatcttgaattgtagttcccataatccccacatgttgtgggagggaccaagtgggaggtagtttaatcacagggtggttatattcctattgttttcatgatagtgagtgagctctcctgagatgtgatggt

SEQ ID NO: 845298 - DNA, 637 bp, Homo sapiens
aaataatggatgtcaccacaccccgaccctaattagtgaggactttcatgttctacttgtcttcatttaatcatcattgtataagagttttacaatatcaaattagtagatgtatattactgaaagggaaggactgttagaaatttacttgaggaatgtctgccactgggggctgaacacaaaagatcctattgtgacctgccagattattcattcacttagcaattcaacaaccatcgctgaatgcctactataggccaggtgccatgcaagacagatgtgctcccaccctcaagggttcacagtctaatagaggagagagatgttaaacagataactgtacagatggcatagctaattatattcgtggaagttcgttgtggcaaagacaggcatctcaatatttcaggagctcccctatattttctagcctcccttacagtcacatgactagttctgaccagtggggtgtgtgtaggagtggcaggctgaagcaatggagagctggtgagcctcatccctctcttcccctgccacagccaccttgcgcccacragttcccttagctacaagctggaggagagccaccagatccaccttagatttcactgagcaagaaataaagcttcttgtgtta

SEQ ID NO: 845299 - DNA, 591 bp, Homo sapiens
gatttctggaatcttttaggtcattccatgaccacaggttccatgatgctaygtctctatgtaggcgtattttcagtctttgatatgttctcagcatattatgggctatttcaatctagaaacttgtgtccatcagctctgggaagttttcttgtattaatattttaataattctgtgcactctattttcttatttcctgtttctggaattcctgtccatcagatcttggatttcctcattcaattctgattttccagtttttcattttctattttccatgtctgtttttttaaaaaaatccatttccctcttctaacctttgtaataaaatgctgtaagaggagatattctagttttgggttttttgtttgtttgtttgtctatgacagagtctcactctgtcgcccaggctggagtggagtgacgcaatcttggctcactgcaacctccatctcctgggttcaagggattctcttgcctcagcctcccaagtagctgggattacaggtacacaccaccacacccagctaatttttttgtatttttagtaagacggggtttcaccatgttggccaggctggtctcaaact

SEQ ID NO: 845300 - DNA, 601 bp, Homo sapiens
ggcaaggaacaattggctattgaactctccacataaagawagacaagcatgagcatgtcagccccagactcaaggaaaggccataaatgactgtctcctgtgagaggccatcttgggaacaatgaggaacttgtcctggtctggactagctaagtgccttccagtagtagtgactgccaggatgggctgtaggagcaacaaagagggagtcaatcttctcagttattctgttggaatttccttatgctgagaaaatgagctgggaatctatcctgaggaggcaactttgctgcagtcagaattaaatattcagaaaagcagagagggaaggactagtctatgacatgaattctaagaaattcctgaaaatggggaaggagtgggcctaagtgctaactgattttgcaattgcacttacccggaaccagatatattctaaccatttgagatttcagagtctgaaaacttgacacaaaataatcattgggtatttatgtatgtatgtatgtatgtatttatattcatttagagatagagtctggctctgtggcccaggctagagtgcagtggcatattcctagctcactgcagcctcaaactt

SEQ ID NO: 845301 - DNA, 601 bp, Homo sapiens
ggcaaggaacaattggctattgaactctccacataaagatagacaagcatragcatgtcagccccagactcaaggaaaggccataaatgactgtctcctgtgagaggccatcttgggaacaatgaggaacttgtcctggtctggactagctaagtgccttccagtagtagtgactgccaggatgggctgtaggagcaacaaagagggagtcaatcttctcagttattctgttggaatttccttatgctgagaaaatgagctgggaatctatcctgaggaggcaactttgctgcagtcagaattaaatattcagaaaagcagagagggaaggactagtctatgacatgaattctaagaaattcctgaaaatggggaaggagtgggcctaagtgctaactgattttgcaattgcacttacccggaaccagatatattctaaccatttgagatttcagagtctgaaaacttgacacaaaataatcattgggtatttatgtatgtatgtatgtatgtatttatattcatttagagatagagtctggctctgtggcccaggctagagtgcagtggcatattcctagctcactgcagcctcaaactt

SEQ ID NO: 845302 - DNA, 616 bp, Homo sapiens
gtattcaagtgcatatgttccaaagtgctgttctgttgatataataggaaaaaaaaccctattatcacaaaggaattgggctgtgtgtacagttaactcmaaatcattattttaccctatatagcattatttttgagatttgacacaattttccagaggaaaaattttaaatgcaagaattagatcttaccctttaggacaacctgcttgctgtctcccagacagtgtatcttatttcacatgtgccctgtatattatggaattgcctcccttggaaaaacaaccagaaagccccagaagcacgtggtagaggtagtcaggttcatctccaagtaacaaaggaagctgagacctgggttaataaaacaagcccaatttagtctgctcttgtttggaaatttcaccttcaaaggtgttttctggcttgagttagatttaagtttctgggtataagtagtggaagttgtttagatatccagcatttagtagactcctttgtgtatttgaggaattccctaattaggtctttgtattagtctattttcatgaagctgataaagacaatttacaaaagaaagagaggtttaatcaacttacagttccacgtggctgaggt

SEQ ID NO: 845303 - DNA, 616 bp, Homo sapiens
gtattcaagtgcatatgttccaaagtgctgttctgttgatataataggaaaaaaaaccctattatcacaaaggaattgggctgtgtgtacagttaactccaaatcattatttyaccctatatagcattatttttgagatttgacacaattttccagaggaaaaattttaaatgcaagaattagatcttaccctttaggacaacctgcttgctgtctcccagacagtgtatcttatttcacatgtgccctgtatattatggaattgcctcccttggaaaaacaaccagaaagccccagaagcacgtggtagaggtagtcaggttcatctccaagtaacaaaggaagctgagacctgggttaataaaacaagcccaatttagtctgctcttgtttggaaatttcaccttcaaaggtgttttctggcttgagttagatttaagtttctgggtataagtagtggaagttgtttagatatccagcatttagtagactcctttgtgtatttgaggaattccctaattaggtctttgtattagtctattttcatgaagctgataaagacaatttacaaaagaaagagaggtttaatcaacttacagttccacgtggctgaggt

SEQ ID NO: 845304 - DNA, 607 bp, Homo sapiens
caacctccttctcctgggttcaagtgattctcctgcctcagcctcttgagtagctgaaattataggtgtctgccattatgcccagctaatttttgtatatttagtagagacagggttttgccatggtggccagactggtctcaaactcctcacctcaagtaatctgctggcctcggcctcccaaaatgctggaattataggcatgagccactgcacctggctgatatttgttaatttttaagagtgagagactaaaatgctgattaagcacacgaacggggcttaccaattgtgacattgacagtgaggtgatttgactgggccatttagtggagaaatgccagtgtcagtttttttaggatcttttctgcttctctgctaatctcctgctgggaattctgagagctaagtggagaatgaagcctgggggctaaatagtttctcagcaaccaatatacatgcttcagctaatcctcccattttctgcttactaagtttatcttcagtgatgcttggaatccccaggttcagagagcctctgttttacccttgctayaaaagccgttaagtctttttttttttcaggattggggtagtatagtatgat

SEQ ID NO: 845305 - DNA, 543 bp, Homo sapiens
gatataaatcattaaggtacttcyttaggggaaactgggattggcttccagttagctgtggaaggatgtgaaggaattgaggctggggtgttagggcaatctaggtgtatgcatggagtgagcaaagacacaagacagaaatagcaaggaattcagcttggctggagtgaagggtatgtgaagcaaggatggaatgtgatgttcactgagtgcttactaagtgccaggcacatgtgctagtaggtttcacatatttaaggttcaagaagaactagaggaaatgagtttggagaggtggtctggagtgtgatcgtagaggaccttacaaagcaaaatggtggttctgagaagcaaggcagaattacacaagagtcaagttcagcccacagttcctccatttttcctaggccctctgcatcatcccatcaagcagctctgctagagagtgagcaggggaccatgaggtgacagaaggtgcattcttattccagaagtctcactgaggcaacaggcatgccagggaccgctgataagggtaaactg

SEQ ID NO: 845306 - DNA, 503 bp, Homo sapiens
tcctcaactgggaagtggagtaacaaactgtggtacatccatacaatasactactactcagcaatgaaaaggaattgactactgatacactcaacaacatggatgaatcttaaatccattatgccaagtgaaagaagccaaattcaaaatacaacatattgtatggttccattttatatgacagtctggaaaagaaaaaactataggaatagagaacatatcagtgttgccagggcttaagggtagggaaggctttgactacaaaggggtaacaaaagggaatttgggaaggtgattaactgttttatttttttgtttgtgtgtggtggtgtttacataattctttgcatttgtcaaaactcacagaactctacaccaaaatgtaaattttactgaatgtaaattacaattaaattatatgtatgcaaatctattatgtgtatgtttgtgtatatatatatatatatatatacacatatgaatatttttaaaagctttttccc

SEQ ID NO: 845307 - DNA, 631 bp, Homo sapiens
caaattcctagaaaaacgcacatgaaaaataaaatataatcatataaatgttaaaaatattgaatcctactttttaaaacttcccacaaagaaaaccccgttaatttgaaataatttatgaattccttcaaacaattaaaaagtaattattccaatcatatacaaaccttttcaaagaatgggggaaaaaaaagtacccaactcatttttgaaagcagccataacagggtacagaaacaaattatcacacagtcacctaatttcccaacacaattctgtgaggaaaagacttcctttcaatagagggcaatggaccatttggatatccatatgaggaaaaaataaataaatgttgacccctatgttacatatacaaaaattaatctgagcttgataagaaagctaaacatgatggataaaaacaataaaattacagaaagaatgaagattatcttcataactttgaacaggcaaaaacttaaaatacaaagagttaatcacaaaagaaaaggttgctaacttaaacttcattaaaatcagaaacttctatkcatcaaaaaacaccattaagagattgtaaaggcaaaccatagactgggagaagatatccataatacatgtatcttacaaa

SEQ ID NO: 845308 - DNA, 635 bp, Homo sapiens
gtggataggtatgagggaaatttgagagtaatggaaatgttatacatcatgattgtactggtggttacacaattgtatatatttgtcgaaacccatcaaattgtacactttacattgatcaattttgttgcatgtaaattatactccaataaagctgacaaaaaagtagtatacctattacttgacataaactaatcagcctatatactaacttgccccttataaataataaaatcacttttggaggctgagacaggaggatcactcaaggtcggcggtttgagaccagcctgggcaccacagtaggaccccatctctccaaaaatttttttttaaatagctgggcatggtggtgcatgcctgtagtcccagctgctcgggagggagatcagggagactgcttgagctcaggagctctaagctgcagtaagctatgattgcaccactgcgctccagcctgggcaacagagtgagacctttctctaaaaaaaaataataataaatttaaataatttaaaatmatatacataaactttttaagcggtcatctgatcttctgatgtaactcattttgcgtaattaataatcatgtccagtaagtagccagtgctccttttaaaatctgtcagactctg

SEQ ID NO: 845309 - DNA, 490 bp, Homo sapiens
aaggaggaagaatcacatttttcttcatgtcccataattgtcagacaacaactcctcaatggagttaaacttcacatttttatgtggaaggtcactggctccttccttttctctcaaccttccccttccccttgtatacctgggtccactgggagtagaaagtagcactatctcttagtaactgtcccctcagctctgctaagattgacattgaaaagctttgcaattgccacatgaaggctcaattaaagtcttggccaagggctaccctcttttgcaatctaggatggggagagtatgtggttttcctcttcctgttccatagcaatatgacagaacaaatgagctggaactttcaagttcagtgatttttttttttttaatgaaggaaaaaaaaatgggggctgctcttctagacatgtgttcaccaraaagtgtgggatgtggtttggttaaatgtgtgtatttccattgccatccttcttttcca

SEQ ID NO: 845310 - DNA, 563 bp, Homo sapiens
tgggtgttctagagtcctgcccactgccagttcctctccatactaccacagctgatgctctctggaaagcgccacctcccagcaggaggtcaaccagcacagaaatagagcattaaaccaccaaagctaagaaccctcacagagtccatttcacccccctgccacctccaccagaacaggtgctggtatccacaactgagagacccacagatggttcacatcataggactctgtgcagacaaccaccagtaccagcccagagcctggcagacttgctggatggctagacccagaagagaaataacagtcactacagctcagctctcaggaagccacatccatagggaaagggagagagtactacatcaggggaacagcccatgggacaaaagaatctgaacaacagccttcagccctagaccctctttctgacagagcctacccaaatgagaaggaaccagaaagccaactctggtaatatgaaaaaaygaggctcttttacacccccgcaaaaatcacactagctcaccagcaatggatccaaaccaagaataaatccctga

SEQ ID NO: 845311 - DNA, 483 bp, Homo sapiens
ttatccagctttaacaagcttcatcttattttagcaacatcatttggcatagtgaagtgttttagtgaaaacagcacaggctttgggtcaaacaggctgaataaatcctgggttttccctggattggctttggggtctgagatgaattattcaatctccctgagatttatttcctcaaatgcaacctggaataagatgatacttactttgcagggctactgtgaacactaaatatggcaatttttgtaaaatgctttgtgtatagtaggcgttcaataaatacttgtgtcctgttattattcttaagcatcctattataccaccttgggtttccatcttgtcattctgcccaagaacatacaatactctcaragctcttcattccaaatagctcacggtttaggtgaaggaagggcttatggcccccagacagaggtgggagcctttctcagggcagttggcaagaatttgcttcccctccca

SEQ ID NO: 845312 - DNA, 483 bp, Homo sapiens
ttatccagctttaacaagcttcatcttattttagcaacatcatttggcatagtgaagtgttttagtgaaaacagcacaggctttgggtcaaacaggctgaataaatcctgggttttccctggattggctttggggtctgagatgaattattcaatctccctgagatttatttcctcaaatgcaacctggaataagatgatacttactttgcagggctactgtgaacactaaatatggcaatttttgtaaaatgctttgtgtatagtaggcgttcaataaatacttgtgtcctgttattattcttaagcatcctattataccaccttgggtttccatcttgtcattctgcccaagaacatacaatactctcagagctcttcattccaaatagctcacggtttaggtgaaggaagggcttrtggcccccagacagaggtgggagcctttctcagggcagttggcaagaatttgcttcccctccca

SEQ ID NO: 845313 - DNA, 525 bp, Homo sapiens
tgctgaggaagagattccaggaggatcccgaggaccccccatttgcagtcatgtcgagactgatgctgaggaggaccccaactgtcacaagcaacacccgttgaacacagccacccacctggggacagatcaagaagctgtcatagatggtggaagaaaacctgaggaaagcaggacaaccagttacaatgagtaatttaatggtagctatgatagcggtgatcaccattgccatgagtattccttcaacaacggctgacacagagaacaattatacttcttgggcatatttatcaatcttggctggcaataatgcctggatataatcactctatgatgcagttacacatgctttctgatctcagtatttaccgtaataaatctgctcctataattgaggcataccaccctcaaaaaactacttgtaaacaaaatagaacctggccagaaataatgaacrtacttgtttaggaagattgcattgcagaacgggcagaggtgctgcgcaacgaatcctatggaatc

SEQ ID NO: 845314 - DNA, 629 bp, Homo sapiens
cctcacattgtaacaaccaaatatatctccagacattgctggatgttccccagggggcaaaataatccccaattgagaaccactgatttagcagaaatgagaaatctgaatccgaaactggccatcctcaaaaagctcaggattggtggccttaggtgcccctgaaattggggtagagaattgggtgttaagacagttaagaggaatctgcatattccctggggactccctctcactctgagaagctgagtggacttctctgttccccagtagaagactagaagttattctctggagagggtaaaacagaagggctctgttgggacaggtgaaggtttcttaaataggatacccaaagcactgcacaaaaaaacatagatacactggacttaattaaaattagacatttttgttcatcaccattgagagtgaaaagccacgctatagcctgggaggagatatttgcaatatgtacatccaataaaatatgtttacccagaacacagaagaactccgacatatcaataagaaatggcactctcccccaaaaggcaacagacaaaatccaaatggccgctggatacawgaaaagacactccacattattaacaaccagaaatgcaaattaa

SEQ ID NO: 845315 - DNA, 660 bp, Homo sapiens
accccatcttgcctctaacctcacaagctggctgttttyactcattactgggtgtaggccaagttaactgtgggaggaatttagctgatactttaacttgaaagcaaggatggtaataatagcccctccctagaactaacccccttcttgctcaaggacctaaaacagcctttgtaagactaatgaaaggccataagattatgattatggaaagggcctgaattctgctaaaatgtaggtataatttctataatccctaactgctcagaagttatgtagccagaggtcacaagatttgtgacttcctcagttgttcctatagataacatcactgctgtagacctacaattggtcttttgagatgtttttcagatttttgcattctggcaaccccacctggattcacataactcatgattcaactggtcttgtggccaccccaccaccacccagaagtgggctcagtgcacaaggactgttttccacacccctatcattgaattcctagccaatcagcagcacccattccctatttccccacccaccaaactatccttgaaaaaccctaactcggagattttggggagactgatttgagtgataactccagttcttctacatggctgtcctcacattaattaaactgtttctttactgcaa

SEQ ID NO: 845316 - DNA, 612 bp, Homo sapiens
cccggctaattttttgtatttttagtagagatggggtttcaccgtgttagccaggacgatctcgttctcctgacctcgtgatccacccrcctgggcctcctaaagtgctgggattacaggcgtgagccaccgcgcccggccttctttttctttttaatttttttgtagaacaaattttattttaaaaatagggacgaggtcttgctatgttgtccaggctgatgttgaattcctgggctcaagcagtcctcccaccttggcctcccaatgctagattacaggcatgtgccaccagtagttttctttaaatcaacagaataataaatttggtcatgcttccagcccacccacacaggtagacacagcttagttcagtctccacatagagaagactcctatatacgaaaaatgtaaagacgaggcattcctccgcttgctttctgaggacaccctaccctgtatttgagtagccgtcaataaaccttccctccccactgaactctgtgacttgcctggaattccctcctgcacgagatccaagaactttctcttagggtctggattgggacctcttttttttttggcaacacaaggacatgccaattgtaactt

SEQ ID NO: 845317 - DNA, 496 bp, Homo sapiens
ccggaacatggtgcagctgggagcagcctgggctgcgcggaaggctcagatytggggacggcccttgccagtgactgtgagctggggtgtcttggaaactcccagtctcagcttctccatttataagatgagaatgatcataccagactcaggcaaggttgtttgtgcattagtgaaatcagacgtattaaataaagtaccacattgatcgtggagttgttgaataaccaagaacacgcctatctgtctccaaaaaataaatgttgaaaatgatgagggcgtggctctacgttgggaagggaaatagggtgcttggatgagagaatcctgaggcatgggacagtggagggatccaggatagttccataagaaaatgtgcttgcactatcgtttctttgcagaggctcttgtgtgctgggaggctggctgggatggggagttggtggcagagaatagtgtctgttttcttcctggtagctggagagctctgcgacag

SEQ ID NO: 845318 - DNA, 496 bp, Homo sapiens
ccggaacatggtgcagctgggagcagcctgggctgcgcggaaggctcagatttggggacggcccttgccagtgactgtgagctggggtgtcytggaaactcccagtctcagcttctccatttataagatgagaatgatcataccagactcaggcaaggttgtttgtgcattagtgaaatcagacgtattaaataaagtaccacattgatcgtggagttgttgaataaccaagaacacgcctatctgtctccaaaaaataaatgttgaaaatgatgagggcgtggctctacgttgggaagggaaatagggtgcttggatgagagaatcctgaggcatgggacagtggagggatccaggatagttccataagaaaatgtgcttgcactatcgtttctttgcagaggctcttgtgtgctgggaggctggctgggatggggagttggtggcagagaatagtgtctgttttcttcctggtagctggagagctctgcgacag

SEQ ID NO: 845319 - DNA, 673 bp, Homo sapiens
agctggggtctgtgcctatactcactctttcaatgaatctacgtcggatcccaggcaggcccccacaatgaagyggtgttgttcaactgaggtaatacccaaggttcgttgtctcatggccacagaaaactaggactcggacacaccagagtgaggttaagagcagaagtttaataggcaaaagaaagagaaaagctctctctgttgcagagagaggggtcctggcgaaaatgggttgcccccaagttcattcttgttgttcgcaatgttcagcgtcttgcggttgtgggactgaccgtaacagacgatttttttgttggctagaagccacctgcattccttgatgtgtggcccctccatcttcaagtgagcaatggtgttttgaatcctccttatgcttcatgtctttgacttcctcttctgtgaccaaccgggaaaaactcactgctttaaaagggctcttaggattagatcaggtactgtgttagttcacttttgcattgctataaagaaatacctgaggctgggtgatttataaagaaaagtggtttaattggctcatggctctgcaggctgtaccagcatagctctagcatctgcttctggtgaggcctcgggaagcttctaatcatggtagaaggtgaagggagagcaagtggtgtcacatggtgag

SEQ ID NO: 845320 - DNA, 596 bp, Homo sapiens
tacttgtgagcacaccacttccctaaaatatgccacaagagtcgacatctagccaggcacagtggctcatgtctataatcccagcaatttgggaggccaargtaggaggatagcttgaatccaggagttcgagaccagcctgggcaagatggtgaaaccatctctactaaataattttttaaaaattagctgggtgtggtagtgtgcacctgtagtcccagctacttgggaggctaaagtgggaggattgcttgagcccagaaattcaaggctgcagtgagctgtggttgtaccattccacttcagcctgggcaacagggcaagaccttgtctctaaaaaaatttaaaacaaacaaacaaacaaagaataaatatctagccttgaagccagccttgggggtggggtgggaggaggactatttgtgtgcaggagttcaaacccaggccccatcactccccagatgtggaaacttagacatgttatttaattgtcctatgcctcagttccctcaactgaaaaagagaataataatagtacccatctcttctagttgcattgaggactgaatgagttaaaaagtacccaacacaccata

SEQ ID NO: 845321 - DNA, 465 bp, Homo sapiens
tccactacacttcccagcctctggtaactatctttctactctctgtctccatgagttcaattgttttaatttttagctcccccaaataaatgagaacatgcaaagtttgtctttctgtgcctggcttaaatcacttaacgtaatgacctccagttccatctatgttgttgtaaatgacaggatctcattcttttctatggctaaataggtaagtctatggttacctttgtaagaaactgctgaaccatcgtcttccaaagtggctgtgccattttgcattatcactagcaatgaatgagagttcttgttctacatcttgtcagcatttggtattgtcattttaaaattttagccattctaaaaggtgtttagtggtatgcaattgttttaatttgcagttctctaatgacatatgatgttgaacatcttttcatatgcttatytgccacctgtgtatcttctttg

SEQ ID NO: 845322 - DNA, 620 bp, Homo sapiens
gcatggggaatgcaggttggggcatacaaccagagcctcaggaagatggagcasaggagaggactgagctaggattggtttcattggggttttttggtgcaattttttttattgtggtagaatatacacagcataaaactggccattttaactatttttaagtgtacagctcagtggcattaagcacattcatatcactgtgcaatcgttaccatcatccgcatgcagagctgttttatctttcaaaaccgaaactgcacccattcaacacgaattcccccgtcccccagccccattctactttgcgttgctatggatttgactactcaagatgaatcatataagtggaatcatgcagtatttatctttttgtgtctggcttatttcccttagcataatatccttgagtttcatccatgctgtaccgtgtgacaaaatttctttcctttttaaggctgaataatattccattatatgtatataccacactttgcttatccatttattcatctgccagtggacacttgggttgcgtcctcctttcggctattgtgaatgatgctgctatgaagatgggtgtgcggatacttatttgagacgctgctttcagttcttttggg

SEQ ID NO: 845323 - DNA, 611 bp, Homo sapiens
aaggaaagattattttgatgacagagtggaagatgtgttaggaaggagaagactggtatagaaacatctctgctaggaacagtgtttggctgttggtagcaaaaacaacaacaacaacaacaaaacacctaaccatggaatagattttagttggtcctcaatacccatgctccccttcttccttagtcaacaaaatccctaattttcatcagaatacatggcttgcctcctgcaataaagattacagtttccagtttcccttccatatcctaggtatgcccatgtaagttctggccaatggaaaatgttgtgtgtgacttccagaaaatgtcttaaaagggaaggtaaacaccttcctccaccagtcctccacactttctggaatttgagacatgatgactacatctcaagcagctcggaccatgtgataatttaaagatggctgtggattctttgatcctcctccctttgagaggagtcaatttcccctgtacttaaatctgggctgacctgtgacttctttgaycaatagagtatggtggaaatgatgtcacgcccactccaggcctaacctctaggaggactggcagtttctgctatggcctctggga

SEQ ID NO: 845324 - DNA, 559 bp, Homo sapiens
gagcagggacaaatggttaaccagttaaataagccaaacaaggtgtcagaagatcaaattctggtttgatccttgggtagccttgggaaagaatttttgccttgctaggcctcgggctttttacgtgtctgttagcatggagagcttgaggtggaaatgcaaacagaaaacagtgcacccgggtagaagttgcatgtggttgccttgcagttagaactgggtcacacaaacaaaaagcctgatcaaatatttcctgaacatataggaagtataattccttaacctctgcataaaagaggattgccagccatattctgttgagacaagaggacattgatacaattcctgatgcatctgaataactgaaagaagatttagaaaatttgcaaatttcaggatgaataagagaaaagtaaataaaaactaaaaacaagacaatattaagttgttcaagagaggaacatttatcrtaatatactgtgtatttcagtgatgaatacaatattggcatgattgcaatataatcatgtagagaaaatggagacatagtcatatagag

SEQ ID NO: 845325 - DNA, 628 bp, Homo sapiens
cattgattgttccaggttcccatacgaatccatgaatttgactaatacttggaaactaaaaatatattttattgacagtacattttgaggccattccactctctcagccattacgcccacttgcgtactttaatattcccaactcaactgttgtgtttggaacaagttcacaccaacgcatggactcatccacatgaagcatccattaacatacaaatatgctgttggcattaagcagcattgagacacaatatgttttttccttaattattcaaggaaatagtcattgagttacacctggcatgttgttagcataaatatgccagagaatgggaattcagaaggacaggcaggaagcaaaataagtagtttacaggatcagggtgtgaattgaatgtcaagatttcaccaaagctaatactgccttatacaaaagtgcaaatcgacatcattcatgctcttatggtttaggaggtcctgcagttctgctatgacttggagtggtgatatttgtaatagccacacgccgtacttaatgttttgtatacatatcttcccatttggagctcatcatgccccccatgaggttcactaagatcarcctattatacaaatgagcgactgaggc

SEQ ID NO: 845326 - DNA, 571 bp, Homo sapiens
tggcaaccactatgaaactctttaaaygacaggtcctgtatgaattttactcctcatgatttgaagattatgcataaattccttcttcttgttattttgtttccaatttagtctttacatagacaaaactcctataacagaaaaactgaaaacaaagagagtgcattccttcgcttgctttctgaggatgccctactctaaaaggcagtagctttcaataaactatgtcttcttctcactgtactctgtgactcaccttgaattctttcctgtgtgaggcccaagaaccctctcttgaagtgtggatcaggacccctttttgcagtaacactagtactgttataattaggtaaatgttactcacacctgaaacatggagcataaatgattgaatttcatttctacacgatattttttttcccttaaactgacaattttttaaaatttttgtttttttcgtttttctatgtatgtatcaaagtaccaactccaaaccctaccccagttttctaatgagtctcataatacattcagaagcattagacattttatcagatttatctttttgaat

SEQ ID NO: 845327 - DNA, 205 bp, Homo sapiens
agtgggtagctcctctctaggttgttctgtcaagtgttcagctctcagcagaaagggaagccctggagagggttgcttccatctgcagctgttagttcccagacatctctgtaggtctctgaagcattccgcagagaaagtagctggccctcccattgtctccagctatcagyagaaaggataactccttcctgcctctagtctt

SEQ ID NO: 845328 - DNA, 530 bp, Homo sapiens
attttacttcaggttgaggaacagataatcttggctatattttccctgacaatacagtaagatgaaagaagccttgtgcaatagcaggaagaattcagggtagacagtgggatcttggctaatgctggagactaaagtgaatggagagagaccctgaagcacccttctcccatacttggctatgggctatgggagggatgcctggactctgagacttggtcaccatgttgtgttttgccattagaagatttggacatgaagttgaataaggcaggaacgacctcatggcatcaaccacaacccccaatgtggctggagaatgagggagagagggcaaagaatatcttcctcttactcagattgtaagtggagaaactgaagtccattcactcaaattgataagtgtctactgagcacctcctatgtggcaagcactatataggccctaaggayccaaagatgatcagggcatggtccctgtcaacatggtgctcacagtctagtgggaaatagagttcactcgtcattct

SEQ ID NO: 845329 - DNA, 335 bp, Homo sapiens
gttgctcccccaaacccatgactgactaatctgatatgacaaaagcccatgatggatttggtatatgttaattcacaatgccctttcctccagaatttaactataagttaatacacaccggaaaccacgcgcatrcacgctccttaatgggcttaggtattagcgagtcctaacgatgcatacaaatgtgctctgcgctctgtagaaccctcaagatttatgtgccttgagctctctgaagctgtaaacaaggagaaaaaaaaaaagagaaagcgaaagcgactggggggaagagacagaggcctgactcgcccctccaggttgtggagagaagg

SEQ ID NO: 845330 - DNA, 572 bp, Homo sapiens
ggaggcctgtagtgaaaaactgaatattatacgatagaaactatagaagctatatgtgaaaatgctttgcaatttgcrgtttcatctcatacagtttaaaatttcttttgattcagctaagttggaaacactctttttgtagaatgtatgaagggacatttcggagcccattgaggcctacagtgaaaagctgaataattcgtgataaaaactagaagcaagctatctgagaaatagctttgcaatgtggggatttatttcacatagttaaacttttgtttctacacagtaggttcaaaactctcttttagtagaagctaagaggggacaatttagagccctttgaggcttatagtgaaaaattcaaagttttgtgattaaaaactagatacaaattatctgtaaaaatgtttggtgatgtgaaaattcatctcacagtgttaaacatttgttttgattcagtacattggcaaaaatttttgtagactgtacaaagggacattttggagcccattgagaccaatattgaaacaatgaacatcctgctataaaactagaaaagttcttggtga

SEQ ID NO: 845331 - DNA, 542 bp, Homo sapiens
actttaagaaggaagatagtacagtgcttaaactcttgttccaagtgcctaggttcaagycctggctgtgccacttgctagttagtagtcctggaaaagttatgttactgctctgtgcctcattttctgcatctttaattatagtgtctacctcattgagtgattttttagattaagggagttaagaccccacttagaacaatgtatggcacatggtacattctcaagaaatatttactagaattattatcacaacttgaccattcttctacaactgtcagtgttcatagactctccatttctgggtcttttttctatttaggctcagataacactttattcttgttatttttctcataaatctggcactgttcaatgcctgggaggtctgtaggcattcctccttctccatcttcccttctaacgtgggcccctgttagtcatcttttcactgcatacactctcccttcaacagctgccaatgcactgataactccaaagcccagctctgcaccctagacctttcacccacacatccgtct

SEQ ID NO: 845332 - DNA, 555 bp, Homo sapiens
tcttccctttctcctgtgaaatcttgaccctggccttgacccctttcctagcttcccaaacacccagtggttctcaagatcaatgtactaaaattgcctgctgtttcctgggccccatcccagtgccacatgttrggataggacccaggaatctgctttttaaaaataccctcggtgattctgatgcagatgttcagtctacctgctcactgagacccaaggtctggtaagcatcaaacactgggccaacactttcacttgctaagaacccagtattgtgggcacagaggtagggtctctgcatgagcatcctggccatttttagcacacctctataggtatgtgtgtaatatacagatgaggaaatggaacccacgtggcttggctagagtcacagaacttcaaagaataggcacctgactccacacccaaatccagtatctttgttcatctctttcaccaagttttcttgagctcaccgatacctccaacccccttttcctcctccccatttttacagctaacatccccattcatgcctgatcagttccctcc

SEQ ID NO: 845333 - DNA, 444 bp, Homo sapiens
gaaatgtaaacacatttaatatctcaacctttttttcagggcagtacattgacattctgttcccctgggaaatctaatttaatgaaatgaccttgaaatcagccctgaaaaatatgtatttcagtcaaagcttaatacatagactcagagtttggtcatttatttattagagaataattatggctaccagaataggaaatactcttcctattaggtctaaaaataattgtaagagcttaactgttctcatggatatgacaacatcaatctcattaaccgctgcaacttaccacactagggtgcatagcactgatttttcagccagggtctatggtggtgactttgacaggcattactcacgatgactgatatgagtcataggactatgactgatagagaacactcccagaaygtttctgcatggatccataaagctgttgttct

SEQ ID NO: 845334 - DNA, 523 bp, Homo sapiens
acaatttatctgggatcagggcaataaaagaaactgatcttttgcaaatacagtttgctcttatgtataggaaaagttagasagaataaaagccattaaagttgtgtataaaagatacattggagttacatttatatcattgattacactgtttctcaattacacagttttgaaaaaaacacaagcaattaatcatggtagattacactcagtttgtatttggtcagcagtagcaagtagttatcaagaagtctgagttccaattgtttctctaaataatcctttgtaatatcttttgcttatgggatttctgtaataccctttagtaaatgtgattatttatatctagaaaacattttaaaatagctctcattcttttttataattatacttttaaatatattttaaacgtattatatttttaatatgatgccattacgagtcctgccatttgtcttgtttaatctgaatatgcataattacaaaccataccaattaaaatcactatacatgcattattaac

SEQ ID NO: 845335 - DNA, 493 bp, Homo sapiens
aaacacccacataaaaaagaaagatctcaaattaacaatctaacatcacacctagagaaactaggaaaacaagagcaaacaaaccccaagctggttggtttgcttggagctaacagaagaacaaaaatccgagctaaactgaatgaaactgagacacacacaaaaaaaacatacaaaatgatcatcgaaaccaaaactttgttgtttgaaagaataagtaagactgagagactgcgagctagactagcaaagaaaaaaagactgaagacccaaataaacacaaccagaaatgacaaaggagacattaccattgaccccacagaaatacaaaaaagtctcaaagactattaatgcctttatgcacacaaactagaaaacctagaagaaatgggtataaatttgggaaacatacaacttcccaagaytgaacaaggaagaaactgagtccttgaatagaccaataacaagatctgaaattgaatcagtaagtaaa

SEQ ID NO: 845336 - DNA, 549 bp, Homo sapiens
agctggaagcattccccctgagaactggaataagcaaatatgcccaatctcatcagtcctattcaacattgtactggaagtcttggtcagagcaatcagcaagagcaagaaataaaaagcatccaataggtagataggaattcaaaccactgctcttcacaaatgatataattttatacctaaaaaatcccatagtctcttccgaaaagttcctagatctgataagcaacttcagtagagtttggagatacaaaatcaatgaagaaaaatcccattttgggaggccgaggcaggtggatctcctgaagtcaggagtttgagaccagcctgggcaacacggtgaaactggtctctactaaaaacacaaaaaattagctaggcatggtggtgggtgcctgtaatcccagctactcaggaggctgaggcaggagaatcgcttgaacccaggaggcagaggttgcagtgaaccaagatcaygccattgcactccagcctgggtgataagagcaagactccatctcaaaataaaataaaataaaaattaaaaaa

SEQ ID NO: 845337 - DNA, 617 bp, Homo sapiens
caagggtaccaaaaatacacaatagagaaagggtagtcttttaaaaaatggctctgggaaaaccagatacctgcatgcaaaaaaaaaatgagattggacccttaccttacactatacacaaaaattaaccraaaatagattaaataattaaatgtaacacctgaaacagttaaaatcctagaataaaacataggtggaaaaccttttgggaattggtcttggcaaataatttattggatatgacaccaaaagcatagacaacaaaagcaaaaatagataactggtactaacatgtgtctgaacagcaaacaacaaggacaacaactaaaacctacaagaacagagcaaaaaggcaacctacaacatagaataaaacatgtgcaaaccaggtatctgatagttaatatccaaaatatataaggaatttcttcaacttaatagcaaaaaatcaactaacctaattttttaaatgggcaaaggatttcagtagacatttctcgaaagaacacataaaaatggtatatattatatataccatttatatatctatatctatatatataccatatatatatttgatgcccaacatcattaatcatcagaaaactaaaaatcaa

SEQ ID NO: 845338 - DNA, 518 bp, Homo sapiens
aggtgaaagatccatacatggaaagctattaaacactgctgaaataaattacagatgacacaaacaagagaaaatacattccagactcatggattggragaattaatatcatgaaaatgacctcaccgcccaaagcattctaacaattcaatgcaattcctataaaatattaagatcattttttacagaattagaaaaaaaattctaaaattcatatggaaccaaaacagagcctgaatagccaaagcaatcctaagcaaaaagaacaaatctagaggcatgacattacctgacttcaaattatactacaagtctatagttaccaaaacagcatggtattgctataaaagtagacactggaccagtggaacagaatagagaacccagaaataaagccaaatacttacagccttactgctttatctttgaaatagataacaaagataacgaaacataaattggcaaaaggacatcctacttaataaatggtgcagagaaaactggatagccacatgtgg

SEQ ID NO: 845339 - DNA, 300 bp, Homo sapiens
aaggtaggaagatacatctgtatatatacgtttcagaaccatatatgaaatgatatttttattattaatgataaattaatatcgttcattaatgtcattaatgatgttaacattcgtaaaaataagggttagtgytgcattgataaacacaaaaaagggcttaccctaacagcaagggttgcagcaaacatattcaaaagccctaaggattttggtatcttgtatgaaatctgatgaggaaaggacagggtatatacagaatgaaaagttatagcataagttgagaacaagtagtcattt

SEQ ID NO: 845340 - DNA, 565 bp, Homo sapiens
tttttgagtgaatgaaagaaaggaagaaggagagggaaaggaaggagagaaagagcaagtaaggagaggcacaaagaaaggaagaaaaaggaagaagaatgrgagaaagaaaaaagggaggagttttctctcctttcaggaaagctatataggaggatgcaagttgatcccttttccacatatcctagctagaaggtatatttacacagtgtttaaagccagacagactgaaggctttaggctttactacctattaactgattgatcttaagcaaattatttaatttctccaaacctaaacctcatcatttgtagactgaaggaaataattttactctcacatggttgaggtgagaataaaataaatatacattaataaactagtaaagtacttacacaaaggaagaatctataaacatcatttcttcccttccttctctaagaatatccatatagagaggtatcagttaagattttctcagggttttttatttcaatatttgtgctttctactttggtaaacctgaatagattactatcatggttgtaaaataaagagacatag

SEQ ID NO: 845341 - DNA, 603 bp, Homo sapiens
ttttttttttttttgagacgaagtctggctcttgtccccaaggctggagtgcgatggcacgatctcggctcaatgcaacctctgcctcctgggttcaagcgattctcctgccttggycccccgagtagctgggattacaggcgcctgccaccacgcccggctaatttttgtatttttagtagagacagggttttaccatgttgaccaggctggtgtagaactcctgacctcaggtgatccacccgccttagcctcccaaagtgctgggattacaggcatgagccaccgtgtccaggctccactttgcactttttatctccttttactggttttagcagttctttgtataagagggatttaggccttaatcatatatgccacaaatttttccccaagttgattgtctttagattttgcattttacttcggaaaaagtaaaacttcatttgcaatcacatatatgattctttttcttggagggggtggtccacaacctgcctcctttggtaggcatattaatatattttttagaatcaaatgcctttagctaaggaatacattctctgtttccctacaggatccagtactatcccataaatgggc

SEQ ID NO: 845342 - DNA, 613 bp, Homo sapiens
tcatagccttgttgccccttcacccccaaaaacggcagtgagtactcmggaaaaacagggaagctctcctacacacccacagtagagcagttaaactctggacattttaatcaacacagtgctgttgtctgcaaatcttttcagtgtcaccagctgtcctgcttaataaatacaaataaaatgcaataatacaattgtaaaaaatacaaataaataattgggagaactttagaagtcttttcagattatatcttttattattattattattaaacggatcaaagctttaagccatttggaaattcaaagcatcctaagacatgcagcaaataaccgcaggagataggagctggctttttctcacccatgcagaatggcattcttaggatacggtgaagggaagagaagtgaacacagatttagaaaggtaattggacagtaagagaagttcggttaacagtgtcttcaacagtaccttgagtaggaatgacatgtaattttaggtataggtaagtggcatttctcggcctacaaacagttaaaatgaaagattaaagtagtgtttaaaaacgatgactggtagctcactaggtataaatatagtttgacacgg

SEQ ID NO: 845343 - DNA, 613 bp, Homo sapiens
tcatagccttgttgccccttcacccccaaaaacggcagtgagtactccggaaaaacagggaagctctcctacacacccacagtagagcagttaaactctggacattttaatcaacacagtgctgttgtctgcaaatcttttcagtgtcaccagctgtcctgcttaataaatacaaataaaatgcaataatacaattgtaaaaaatacaaataaataattgggagaactttagaagtcttttcagattatatcttttattattattattattaaacggatcaaagctttaagccatttggaaattcaaagcatcctaagacatgcagcaaataaccgcaggagataggagctggctttttctcacccatgcagaatggcattcttaggatacggtgaagggaagagaagtgaacacagatttagaaaggtaattggacagtaagagaagttcggttaacagtgtcttcaacagtaccttgagtaggaatgacatgtaattttaggtataggtaagtggcatttctcggcctacaaacagttaaaatgaaagattaaagtagtgtttaaaaacgatgactggtagctcactagktataaatatagtttgacacgg

SEQ ID NO: 845344 - DNA, 563 bp, Homo sapiens
ccacctcaagatgtttgcaactgcagggccgcagtgggmgttgccaaagaacacgaggccgacgttggggaaaggttgtcaaattccatcagactcagagagcttagagccactttactacagtaccaatcaagtgcaaattttcttcctctttctccctgctttccctcctcatgctccatcccagatgggccagaaaccagaaacagaagtgagcaaaccagggaggaaaaaggagggagagaaggacactgtctgctgtccccaaggggggtgatcttcctgcaggtggctgtggcaagagcaggggcagaaggctcatctgtgagtcaagacttaagcgtggattggactggagatttgattttctgagtggagaccatgtttgcaaacaaagctagcttcaggtgaggcgcagcggctcacgcctgtattcctggcactttgggaggctgaggtggatcagcctgaggtcaggatttcaagaccagcctggtcaacatggtgaaaccctgtctactgaaaatacaaaaattaccccagcatggtggccggtgcctgta

SEQ ID NO: 845345 - DNA, 609 bp, Homo sapiens
tgggaatccttttgatttcaccacatggttagtgatgtaacatgtataaaatgtgaaaaatgatctatcatgtatcatttataaaatgacacacatacatatggaatggcattgaaaagtacaaagtgtaaatataaaatgcaagagttttacccaggtagatttatgcaggagcttattcagaaatacacctaccttggtcaggcacggtggctcatgcctgtaattccagcactctgggaggctgaagcaggtggatcacctgaagtcaggagttcaagaccagcctggccaacatggtgaaaatcccatctctactaaaaatacaaaaattagctgggatggtggcgcatgcctgtaatcccggctactcagttggctgaggcaggagactcacttgaacctgggagtcggaggttgcagtgagccaagactgcacactgcactccagcctgggtgacagagcgagactccatgtcaaaaaaaccccacaaaacaacaacaacaccaacaacaaaaagcctacctggtggcaagacagggctgtcagtgttttggsataagggggccagcagatggatctatagtcaggcttgattaatttacaca

SEQ ID NO: 845346 - DNA, 404 bp, Homo sapiens
cattatctgatgggtttttaaaatcttttctgaatcagttattacattataaatatcacttcartgatgatgtcaaataaattattccagtctattcttgactattttcaatgttgagacctcactacaatgttgagacctctacctacctcctgcagttttcatcaaagaagtgagaagttactatagatattctacaaaagtcctcatggaataagggaaattgggcatccagcttttcaactcaactgccataaaatgttacttattctgagagaggccagtggctatcttgaaagaagtgagttgagagagataagaggaggtaggactgggtcacaagtttctgtaaatgtagatattaagcccaagaatcccaatagaggataatatttgaaaactat

SEQ ID NO: 845347 - DNA, 567 bp, Homo sapiens
catctcagaaacagcaatagtaatagtacctccttcctgggtttgttggaaagacgaagagagttcatcagtagaaagtgtttagaacagtgcctgrtatgtagttcctctcattagtgtattgttgaggagatcaaagggcaggatttcctctcactcccaaaccttcacaaagttcaagaggtatcttgggtaggcagaggtgttaaagcaaggagtcttctcctacagcacccactgggtggaggctgaagatcctaccttccagcagtgccctgggcagggaggccaggaggaggtagctgcccttccagtcctaggcccacagcacctagggagcaatgtccagggaacaatgtctgattttgcctgaccacaggtgcagcagttccaggacgtggccacccgtctgcagacagcatatgctggggagaaggcagaggccatccagaacaaggagcaggaggtgtctgccgcgtggcaggcgctgctcgatgcctgtgccgggcgccggacccagctagtggacacggcggataaattccgcttcttcagcatggcccgtga

SEQ ID NO: 845348 - DNA, 621 bp, Homo sapiens
agagggagaggaaggatgttccttttttggtgatggattgacagaaaaattaccagagaaacttcaggatttaatctcctgaccgggttgccacaataccaaattgttaaaagcaggtttgaggtagcataaaggggcaggacaaactagaaaacaggtgagggggtcaaaccttacagctagagagaagataacaatacagtggaaggagcaatactgtttaagaaagacagtgtccttgctatttcaacagcctgctcctcagccctgcgttgccctgtattcccccggtttcccacttcggaagtagatctttgtgctttgttgcttctcacttttgtatgacccagggaagaggagaggatgctgtttactttgttgggggactagaggatggagaaaagagaacagctgcctcttctgctcggggcttcggcgagggctgacatgggtcctagcttgggctccgtcagcaccctgcaggctgggagaggagctgctaccactkctttctcagttcttaaccaacccagggagtaactggacatagcacatgaggttgaggctctgagcctagcatcggacctcaaaggcggatgtgaaggttggagctgtgggttg

SEQ ID NO: 845349 - DNA, 621 bp, Homo sapiens
agagggagaggaaggatgttccttttttggtgatggattgacagaaaaattaccagagaaacttcaggatttaatctcctgaccgggttgccacaataccaaattgttaaaagcaggtttgaggtagcataaaggggcaggacaaactagaaaacaggtgagggggtcaaaccttacagctagagagaagataacaatacagtggaaggagcaatactgtttaagaaagacagtgtccttgctatttcaacagcctgctcctcagccctgcgttgccctgtattcccccggtttcccacttcggaagtagatctttgtgctttgttgcttctcacttttgtatgacccagggaagaggagaggatgctgtttactttgttgggggactagaggatggagaaaagagaacagctgcctcttctgctcggggcttcggcgagggctgacatgggtcctagcttgggctccgtcagcaccctgcaggctgggagaggagctgctaccactgctttckcagttcttaaccaacccagggagtaactggacatagcacatgaggttgaggctctgagcctagcatcggacctcaaaggcggatgtgaaggttggagctgtgggttg

SEQ ID NO: 845350 - DNA, 621 bp, Homo sapiens
agagggagaggaaggatgttccttttttggtgatggattgacagaaaaattaccagagaaacttcaggatttaatctcctgaccgggttgccacaataccaaattgttaaaagcaggtttgaggtagcataaaggggcaggacaaactagaaaacaggtgagggggtcaaaccttacagctagagagaagataacaatacagtggaaggagcaatactgtttaagaaagacagtgtccttgctatttcaacagcctgctcctcagccctgcgttgccctgtattcccccggtttcccacttcggaagtagatctttgtgctttgttgcttctcacttttgtatgacccagggaagaggagaggatgctgtttactttgttgggggactagaggatggagaaaagagaacagctgcctcttctgctcggggcttcggcgagggctgacatgggtcctagcttgggctccgtcagcaccctgcaggctgggagaggagctgctaccactgctttctcagttcttaaccaacccaggkagtaactggacatagcacatgaggttgaggctctgagcctagcatcggacctcaaaggcggatgtgaaggttggagctgtgggttg

SEQ ID NO: 845351 - DNA, 612 bp, Homo sapiens
tcctatttctccacatcttctccagcacctgtagtttcctgactttttaatgatcaccattctaactggtgtgagatggtatctcattgtggtttttgatttgcatttctctgatggccagtgatcatgagcattttttcatgtgtctattggctgcctaaatgtcttcttttgagaagtgtctgttcatatactttgcccactttttgatgggtttgtttgattttttcttgtaaacttaagttctttgtagattctggatattagccctttgtccgatgggtagattgtaaaaattttctcccattctgtaggttgcctgttcactctgatggtagtttcttttgctgtgcagaagctctttagtttaattggattccatttgtcaatttggcttttgttgccattgcttttggtgttttagtcatgaaatccttgcccatgcctatgtccggaatggtattgcctaggttttcttaaatcagagcgcctcttctcctccaaaggaatgcagctcctctccagcaatggaacaaagctggacrgagaatgagtttgatgagttgagagaagagatgaatggctaactagagtaaacagcatagagaagac

SEQ ID NO: 845352 - DNA, 584 bp, Homo sapiens
taacctaagattataaggctattaaaaaaggaaagccaaacacattgagcattaaaaaatattattaataacaaaatggggaaaatttccttggcttgtgttactttacatacttttacttgttcctttayctgcttgagtgtctactatgtgccagactttgtttttggtgctggggatgtaatggaaagcaagacacacttccttttctcaagaagcttgagagggctgggtgtgatggctcaagcctgtaatcccagcactttgagaggccgaggcgggaggatcatttgaggctaggagttcgagatcagcctggtcaatatattaataaaaagaccatgtctccaccaaaaaaaaaaaaaaaaacaaaaaaacataaaacaaacaaaacaaaaaacaaaaaatgtagccagacatgatggtgcacacctgtagttccagctacttgggaggctgaggcaggaggatcacttgagtccaggaattcgatgttgcagtgagccatgattgtcactgcactccagcctgggagacagcgcaagaccctgtctcttaaaaacaaaacaaaaaaagaatgggag

SEQ ID NO: 845353 - DNA, 492 bp, Homo sapiens
cctctgtctggaccagtcttcacccaggctctgcaggaccagccctccctcagttctcatcagagaggtctttcctaatgaaaggaactgccccttccttcattcatttgttcattcatttattgaacaaatgtttaatcagccatgtgcttggcatggttttaagtactagggagacagcatagaaaaccctatcctcatggagcccacgctagggtgctgacaaagcaaaaagctgacaatgacgataaagaagcaaagtatttagcacgttgcatagtgatgcttgctgtgaaggaaaaaggcaggggaggagcatgaggaatgcaagagtggagggttgcagtttttgttagggtggctagaaaagaggtccctgagaagataacacttaagacctgtaggaggtaagggagggtgccacayggctacacagaacaagagccgtatgcacagagaagacagcaagtgcaaaggccctgaggcagcagt

SEQ ID NO: 845354 - DNA, 635 bp, Homo sapiens
ccctggcagggagttacaaagttatttctgcaaaaggcctttggccaaaagcaataaagtccgacttgaacagagtcattattcacgcctaactgtgggctggttctcagtgtagactgccacagtggggactgacaattccacctttttaaccccctcctccttttcagccccacattttcttagccctgcttacccccacagaacatgtatttatgtttccagagattgtcgtttccttccagaagaatataaaaggaataaaaggtattttgacggcttggtattaataatccaattacttctttccttttcacccaatccacaggcgagcgtgccgtcctcagccagcttgcccctgctattagcagatgagctgttcattagttcaccttggaaacagcccgacacttacaattattttagaagctgggggaaggagtcagaatcaacttttaccaaatcacctgctacatttggagatgcgagtggagtgcctttggaacgacaggtcggcttcccaaygtggcttgctgtgcaatctaattagcagccggaaatagaccggcaagtgggaggaaagcccgggtcagaggctctgcgagctgagattagtctggatcagtttttcctac

SEQ ID NO: 845355 - DNA, 490 bp, Homo sapiens
gggagaacatcttcaacttgataaacagtatcttcaaaaaacctacagcaaacgtcatacttaacagtgggaaactagaagctttcccactaagagcagaaataagccaaggatatccccactcaccactctttccaacaccggactggaagtcctagctaatgaaataaggcaagaaataaaaagaaaaataaaactgtctttgtttgcagatgacatgatcatccaagaagaaaatcaaaaaactgaaaccaggcagtgattacagcaagactgcaggatacaaaagtcaatcactttcctatataccagcaatgaacaagtggaatttgagattaaaaacacaataccatttacattagcacccctcagaatgaaacacttakgtataaatcttaaaaaaaattagaatatctatatgagaaaaattaaagaagtgattaaagaagtcagagcactaaagaaatggagagatattccatgttcatag

SEQ ID NO: 845356 - DNA, 603 bp, Homo sapiens
agtctcttacattgctaaaaaaccctttgtctttaaaagcatcaatcaatattaacagtgcttttaaagtgagattacattattttagaaagtaatcatgattcagaaaattaataaatgcttatgaatcatgcttatgtatttcattttaatctgtagtttggaataaagttatttcaaagagtgtttttggttattagaatgtttagctatgttatgatataacacttaaacttaatttcagtaacaacaaaacaagaacccataattttaggatctgtaatacagcctaggaaatgaggtctggtgggaatgcttccaatttagtatctttgtttttcagagaaggttatgaactctcttcaattaatccagatacagatagcttcgattactactgaatttatgtgaatgattatagtagactaatgagttaatctgttagcaacccattctgacctgtgatgtactaggccagttgctttatctgtatgagttagttttctygcttcttttagtgagagtgataatttctgtttgttgcaagggtaagtctgttttaattatggcaatttttttctgaaatacttacttttaaaactt

SEQ ID NO: 845357 - DNA, 501 bp, Homo sapiens
aagcttttcacaatgaattgtagactagtttcctgcagattatttattgtttcatgaataagtatcacaattttttctcctttgtgtctctgctcatccacctgaaatgaactccttccctgtctctacctgctgacatcttccccatcttttaaggttcatttcagataggtagctcttcacacatgatgcttacctcagtgcccatccaggcgaggcctttcttcctgcctttggctccccatcacgtggtgtggcaaggatttcgtagtggtaatgcccttgaataaaaagctcatgctcatttgtttgtttgcttgcttgttcatttatccatttatccatccacccatatgtccctccatctgcccatccatccatccatccatccatccatccatccatccatccatctatccatccactcacctgtccactacctactcatccmatacctttatccagcagattattattgggtgcttgctctgtgctggccct

SEQ ID NO: 845358 - DNA, 611 bp, Homo sapiens
taaacttgaaattattaatctcccaacctttctactaagtttttaattttggcaagcaatttttaatatccatgaactcattttttatcataatttctgctttttcatagtattcagttttttytttttgtttctgttttcttattttgtttttaggggtattatgttttcttgatgttctctgaagatacatactaactgaacttttaaaatactcatttctgtttgctgaagtagcttttttcccagagtcagttctgtttattctactcagttttttcttttgagctctagatgtgcccccacatatctcgatgtctttggctgtctgttcatattaagaacactggccagggtagattaacataagtaatcataagtagttggtagctttttttttttttttttgagacggagtctcgctctgtcacctaggctagagtgcagtggcgcaatcttggctcactgcaagctccgcctctggggttcacgccattctcctgcttcagcctcctgagtagctgggactacaggtgcctgccaccacgcctggctaattttttgtagttttagtagagacggggtttcaccatgttagccaggatggtctc

SEQ ID NO: 845359 - DNA, 658 bp, Homo sapiens
agggcttgctgtggggctggggctggggctggggctggctggctgtcagccggtaaaggctggccttggctgggacacctggacaaygagatctgttttgttcagagctccttggggtctaggctcaaaagtgccacactgtttcttctgcaacagtctgttgactaaagtaagtcacacagtgaaacccagatcaaaatgaaacccagatcaccaattaaataggtgaaaaagactccacctatttaatgaaagaaactaaaaacttatgtggtgaaaagtgtagctatggagagaggtgaagaatcagggctgttaatgaatcacattatcacaggggtaacatgcccagtacccctttgctaattctgacacctatttttaaaacttaatcagagccttccttctgtagctagaggtaaagtgaatgagtgactacttgggcaactctatttacttatgtggcataaagaatgcagagctaggtttaaccagggtgactatgaaatagtttaggagagacattctgccaggtgggcgttctcgctagtctttcagacccatctggggaaccagagggaaaaggctggtgcttctccagcacatacccaataaatgtcatctaccatctgagaagcacagtcatgcatgcacttca

SEQ ID NO: 845360 - DNA, 667 bp, Homo sapiens
tacacacatatccatgacagcacaatagccgaaagatggaaacagcacaaacccccatcaatagataaataaataacaagttgatatatatacgtaaatggaatattattcagccataaaaagggatgaagtattgatatatgctacaatgtggatgaacctccaaaacattatgctaagtgtaagaagtcaggcacgtaagatcacatattgcatgattccattcatatgaaatatccagaagagataaactcatagagacaggacacaaattagtggattttggggaccatagggaggaaatcatggggagaaacaacttattgggtaagaggttttactttggagtgatggaaatgtttcaaactaggcaaaggtggtagttgcataatatcatgaataaactaactgccgctaaattgttcactttaaaatggttaattttatgctgtataaatttcacctcaataaattatcttaaaacagaaaaagcaagagctaaggatttgggattgttgaaccattgcctcctgtggtgtagtatataatacgtaacaattttttaatccacaaamcaatacctagtggcaggtcagagaacttccctgattttaaaatagtgatgagcataaacaatattttgggacagctgtaagaaccataatac

SEQ ID NO: 845361 - DNA, 635 bp, Homo sapiens
tctcactctgtcacccaggctggagtgcagtggtgagattttggctcactgcaacgttcacctcctaggttcaagcarttctcctgtctcagcctcctaagtagtgggattacaggcatgcaccaccatgtccagctaatttttgtattcttagtagagacagggtttcaacatgttggccaggctggtctcaaactcttgacctcgtgtgatcctcccaactcagcttcccaaagtgctgggattataggcgtgagctacaatgcccagccagtaatgcaatttttatgtaatagaagttataaataaaaataacagctaatatgaattaaactctgcgtcataagatgcacttggatttcctcattcagttatcacaactctatgcagtaagtgctgttatacccccatttcaccaaagaaaaaactgaggctgccagatcacaaaggagaaattgtggctatagacaacagcagggaagctgagagctgggactccaaccaggtagtcagactccagagccagcttagaaatgatctgaagccactggacaggccaatttggaagacaaaggaaagagaaatccgagagcccaggacggagtcaggcagaggaggaacctgcaaaggaatgg

SEQ ID NO: 845362 - DNA, 500 bp, Homo sapiens
ggggggctgtcctatgcattgtagatgttcagcagtatccctggcctctgctcacttgatgctggtagcaacacccttccccagttgcaacaataaagaatgttctcggccgggcgcggtgctcacgcctgtaatcccagcactttgggaggccgaggagggcggatcacgaggtcaggagatcgagactatcctggctaacacggtgaaaccccgtctctactaaaaatacaaaaaattagccgggcgtggtggcgggtgcctgtagtcccagctactcaggaggctgaggcaggagaatggtgtgaacccgggaggcggagcttgcagtgagccgagatcgcaccactgcactccagcctgggcaacagagcaagactctgtctcaaaaaaaaaaaaaaaaraagaatgttttcaaacactgccctagatgtccccaggtacaaaatcatcctaggttgagcactactgctctgcagagtggtgggcggaagccaaat

SEQ ID NO: 845363 - DNA, 611 bp, Homo sapiens
ccgggccaggctaatggttggatccattttgattaacgttttaattggggattaatgcagcctgacccgcctctgagtcggctcggccagaagccctaatcctgacagatgaagctatactggcagtgaaacgctgcagggcctgggaaagagtggcatggagagagacggacgggtccccgagacacccactgggagtgagggaatggcacaggttgagaggcatggtacgagagagagaaaccaaagcctgcagagtacaggagagaaatgctttccttctggaaagttgccttggaagctgtgttaatttcctcctttcacatacttgcacacatttagtggcttaaagcaatataaatttattattattattattattatttttgaagacagggtcttgctctatcacccagctggagtgcagtgtcactatcatggcccaccacagccttgacctcctgggctcaagtgatcctcccacctcagcctcctgagtcactgggactagaggtacacaccaccatgctcagctgattattttttaattgtaraaacagggtctcactatgttgcccaggctggccttgaactctggaactcaagcagtt

SEQ ID NO: 845364 - DNA, 609 bp, Homo sapiens
agaaaacttaacactgcactcactgtaaaggaatgacgcttaaaaggaactccgcccattacgcaaagcagatattgaagggtgactttggagctgagaggcaataaattgatagctgacacacaccgtcaagcctggcactgttgaggcatctgcctggtcaggagctgcagtcagagagaaactcacagctgcagcccagagcagggagagaacagggagtaaatttcccagcacccatctgctgctggtatctcccgttgcaaactgaaccagaaggccaaaggcagggccgaagccggaaggcagggcccttgagtgatgcaatccctaaagtcggtctctcagggtagagaatgggtcgggggaacaaacaggtaatatccagctctgtaggtacaatcattattcctatttcacagaggcggcccagataggatgagaaacttgccaaagccacagctgacccagttccaccatggttgagccgcccagtcctggagccatccttccyaagcagcagtgggagggagcaggcctggaggcagtgctcctgctctccaaaagaacattcctagaagctcaaatgccaacattgtcccttccggc

SEQ ID NO: 845365 - DNA, 502 bp, Homo sapiens
gagtaataaacagatacaacaaacttcatcattgtcctagtttaagaaatttccatagccaccccaacytttggcaaccactacccttatcggtcagcagccaacaacactgaggcaaaaccttccaccaggaaaatgattgactcactaaaggctcagatgatcatcaccatgttattttaaagcattttaaaattaaggtatatacatttttagacataatgctattgcacacttaatagatgacaatattgtgtaaacataacttttatatgcactgggaagcaaaaaaactcatgtgacttgctttactgtggtggcctggaaccaaacctgcaatatttccaagctatgcctgtacctcagatggggctctttgtgacatcttccttatccaaatcctggatcaagtatgttgctgctgagaatctaagacctgaacagaacaaggaagaattttgctgccagttcttagaaatttctgtaacccacttggatagat

SEQ ID NO: 845366 - DNA, 533 bp, Homo sapiens
atcttgacctcactgtaccttgacctcgtaaatctttcaggagagacatattaaaatattcatacacagaagtgtgtaattataacttagtttaatatgatgaggaaaaattcctaggaatgctaggaaagtataacaggcagattaagatttgtggtaagggaagaggtgtttctctgagaccagaagtataaataggaattagccaggagaaaaagccttctgtatggaagccaaagcaaataacttggcttgttggagaaactgaaggaagatttttgcagcaaaataatggtgcttggagcaaaaaaggaggatggagtagtatgcagagtcagatcttatagaaccatttaactttcgttgtggtttttatctgttatttcccattttttgactttaycttacaagcagtggaaattgttgatggatttcaatccgggatatattctgatttgcatttttaaaagactaacactgactgctatgtggaagataattggaatgagacaagagtagaaatagactcacta

SEQ ID NO: 845367 - DNA, 529 bp, Homo sapiens
caaaaggtacaattctaacagattatttacttgtaattgatctcaacagggagcctaaaatgtcaaagaagtggctcaatcagataatgtgaaaatttaggacaataaagtttaaattactatattcactatagtgtgtttaatatttgtgattagggctaataatacttccaaaattcttaagtctgattttctcttttagaaagttgagctaatcactctttccacttgcaataaataaaacataccaggcaaatgttatccaagccaagtttacagaagtgtatctgaacttggtaccatcctcattcagatcagtcgtcagagtagaacacagagacttttcaggtggcctgcttggttgtccttagcccagaagcactttatgttattttgaatttcrcaataaagtgtagcaacatgttacagctcttgctaaatatgaattttgctttgttttgttttgagacagggtctccctctgtcacccaggccagagtatagtggtgtgatcatagctcactacacc

SEQ ID NO: 845368 - DNA, 642 bp, Homo sapiens
acttaataaacatttattggtggctctacaataagatctctttcaatgcttacaacaactctatgatgtatgtttacagataaggaaaactgaggaagargaagtaaagaaacttttaagtggtagagtcaggattccaacccagttaatataattccacagcttttctgcttaacttttacactttacattactttaaaaaaaaaaaagttccaaaaccacataaaacatttgttatcatctttcaaaatatgcttatttttacctacacgtttactgtaaaattctttttaagtagctaattgaccagtgagttaaaactaacaaaaaaagaacaagtgcaaagctaatcaatcttatttttatttttatcaattccaaaaataattacctccagttgctccttctgggtaaaacccttcgtgcttttccctgaggcatggccgacaaaagtcattactctaataattggctgatgctgtgaaagcatttctgcaatttcttgaacactatctcgaaatgaagagaagatcataactcgggtctcatcacgtttcttttcagtagtgttttcagctatatatatatataaaaactttaattacaactttttacaaagcatttagacaagaaatagttcaa

SEQ ID NO: 845369 - DNA, 486 bp, Homo sapiens
tatttatggatttacaatgattaaaaaaaaatactgaagctgattattgaaacctattctgtagctatattggaaagataaggaatgagaaaacaaagtgtaagtgggttaaaattctcacttaccgtaacagatacataatgtctacagctaacagagaaagaaagaaagcaacatagatctactgttaaacacatggtggaaaataccagaagaaagagctaaaatatttgaagggaggtggaggtggtactttttgttacaagcagtttaacattagctaacttcttaagcaatatgcacatgcttttttttgaaaaccaaaaacaagtacattagcaaactactgtaatcaaraaaaagataatgtaatagaaaaatgagcaaataatatcaacaggtaatttaaaaaatggcttatataagcatatgagaacatggtaaaccaggatgagcaatcaagacataaacaaattaaaagagatg

SEQ ID NO: 845370 - DNA, 670 bp, Homo sapiens
aaaaatcgtaagttgaacgatcctaagttggacaccatgtgtactaaaaaacattgaattgcatgtcttaaatagatgaattatatagtaggtgaattacgtctccgtaacactgtwatttaaagaaagacataccatgcaaatcttctatcaaaagaaaactaaaatagtctactaacatagacttcaggacaaagaatattaccagcgataaaggtacttaataatgacaaaaggaccaatttatcagaaatcacaactatcctcaatgtatttaaacgtaatcacagtggatcaaaatacatgaagcaaaaagtgatacaacagaaagcataaataaatccacaaatacattggggatgtcaatactcctatctcagcaattgatagaacaagtagaaaaaaatcagtaagattatagaacacttgaataacaaccgacttaacctaactgacattttatagaatactacattcaacaagagcagaatgtacattctttcaagtagatataaaatagtcagtaatatagaacacatgctgggccataaaacaagtctcaagaagtttaaaagaactagaatcctatggagcatgttcaatgacagagcagaactaaatttaaaatcattaacaaaacgatatttagaaaatctccaaatatttgaaa

SEQ ID NO: 845371 - DNA, 483 bp, Homo sapiens
aacaatataatgatcataaaagcaaacatcttaaaactcaaatttctaattctatattttcttcaatttgaaacataaattctcaatacacttgagttttttggtrttcattcaaagtaacacaacactgcaagataaagcatcaaaacacaaagataaacaaaaaaaaactactttgaatttaattccagtaaaaaaaatctaaatgggtgtcaaaatacttaatttttttctataaagagaatgtatagagaaatctacattgatgtaaaaccaattatctttactgataaaatgcatacatatttaaagaaactaaaaaaaagattacctttaagtgactctgtctctttgggactttgatgcctcttctggcattcccgttacaaaccttgaagtcttctaattgtgaacatggtttgggaaaattctcactctcatcactagatgataattctgactataataattcgacaaaattct

SEQ ID NO: 845372 - DNA, 635 bp, Homo sapiens
aatgtaaaattggcagtatctggtgattagatatttggagttgaggggatcctcagagggaaagrccagtgaatgccagatggagagtaatgaggtcctgtggagggggagatttggttggcaacatttcaatagcatctttcattgacagagatttattattgcctgaagtaatacaagacacataggtgggacccagaaattagagcccatatttcaccctcttctaggcaaggtgagctaaggctctgtttaggtgggagattggcaaaggccattctctccttttgcaggtagccctttgccaaggggaccccaagtatacctatcccatgggagcagctcagtgtccaggtaggctgggctctgcccctacagatgtatccaagaatagggacagagaaaaaaatatagaagaaaatagattaaaaaaaaaagatttaaaaaaaggttaataatagtaaaaataatagaaaaacataggttaaaaagaattgacaaaactttaggcataaatgagcgcctcctctgcctcattgcagctgctacaagctccccaccccagcatcctcaacatccccatcctctaagtgtcctggctgactttgttctcaggggagcctgttagtaaggca

SEQ ID NO: 845373 - DNA, 519 bp, Homo sapiens
aattgctgaagctgacaactgcagcgtggttatrcagaagaacaccctaattttagaaaatacacataatgtacaccacttactcttaagtgattcaaaaattatatatatgtgatgtttatcagagagagaaaggcaacaaatgatagcaaacaagtgaactgttaataataggtgaatgtgggtaaagggtatatgggtgctgttttttctatttttcttgcaatttttcagtatgtttaaagttatttcaaaataaaaagctaaaagagagggtgaatgcctttaaaggtctgacccaaagcttgtctgactcaaaactcttttgccctggggtaagtaaaaattctgactttgcttttttggtgtcagcgaacaagtattcctgtgctgcttccttcctgttgtcctctttctgcaaagagtttactgggagaagatatcaaatatcagttgttgatgaaacagatgttgaattactctggatgcactgcaagagcagaagtatttttgctaaag

SEQ ID NO: 845374 - DNA, 525 bp, Homo sapiens
attgtatggtttttaatgtccacgagggaacagcattccccccacattctgaaccacaatttattattgtttaaatgaatgcatgactctttgcataccagtctgtactgtgggtcatacgaagtaacctcagaacaaaatcactttgttcaataaaaaacagggcccctctagtcctctggacccctttcgatgtataccgtatgaaaaaaagtttatttgactgtgtgataacctcaagcataattcctcatagaaataaacctgacaaaagtcttacccaccctgccacagaggggaacttaatgtcatcttcagcattaactcctgcaaggcaggtagacagtacttttaaagacagtagtctaggagagtagacccaaatgcttaacaaaatgcaatataaaaattctcatatttgtgagaagttcttttacatatattctctattttatcctcccaatartgcctcctctctcccaattattatgccaccaaaaacatttcctagaattatggaaatga

SEQ ID NO: 845375 - DNA, 575 bp, Homo sapiens
ttagaagttcttgtcagtgaggtgggaaaggccagctagtgttttgatatgccaacagccacgtagatccctcacactgggacaggccggtaggagaagaacaaattaaattcattctcttttccagcctgcactgagattcaacccagatgcctcggtctgttgaccacagtctgtgtgccccagtgccttggtggggagaaggcacgttgctggaatcgcttgagggatggaaatggccaggggttttggaataaaggatatttgcagtagaatgaaaatgattgttgacttgctttgctagtttttctcaatacttaaataagaatatgggtgtttttaactgattttaaaagtttggaggaagaggagcctcactaggcacgctgtttacagcgttaatttcctgggtaccattgttcttcctcagaaaacccagatgatacaaacaaaatgaccattttttttttcactgytgctgagaaagaatttgatttgtaacaagaagtatactccacttataggtgacatttttatttttgtttttcccattatacaagtaattttatagaaac

SEQ ID NO: 845376 - DNA, 584 bp, Homo sapiens
aagctccactgagaacttaggatccctttctaacccagagtcatgagaactaaaaatatctcaaatamctctattttgaaacattggaattgagtcaagaagtaatatattttgggactgccaagtgactccaacattattcataggaacttaagagcatttggagaaaggctgtgatttatatctaaatcacagtgcttatgtgataagctaaataaggttcctcaaactctatggtaaaagacaagaatgttttacaatttccaataaattatggaccaatagttttagaaataaaagtgttgcagtgatgttgacttgctagaaaggtttctatacatacactttcactttctccacagagacagctaatagtttgtagactggcaccagcctgtgggtcactctttgagcaaccttgattcagagcactgaatctggagccagactgtttgtgtttgaatgctggctccatcattgttggctgggtggtccttttttttttttttttctcatcattcaacttgaaagctgggtggtcttaagggagctttttgattcggtattctcatttgtaaaatgga

SEQ ID NO: 845377 - DNA, 661 bp, Homo sapiens
aaggtgtccccacagcctcatcttcccagacaaggtgggcacagcccaaactccagaatgcttctgggatagaaaaaagccttaatgccaagaccgaaccaccaggattccatcagctctgtagcgctgggcttattccctgtcttcatctccactcagatatcctgcacgttctgcctcagaaagagctttcaaatcctgccccttctgttcccttcccaagcaccaatgccttcattcaagcccacatcatctcttcctggagtgtcatcagagcttcctctcttcgtcatgccatcatgccaacaatcatgctcccagcttacaaaccttcttgctttccctaacctcaggatcaagtgcaagcatcccagtcacacaaggccctttagacactggggccagcccccattcatcctcatctccttttgttcctacccagtagctgccatgtcaggcaactgacttgttctgtggtacccctgtgcctttgcacatgctgtttctctgccaagaatatcctctctccagcatagtctctacgtggaaaaattgcacccatccttcagaattcaactccagtgccctctrtgcatgggcctgtgttcgtgtctccatggtagggcttctttgagccgtaatgatcatttgcatatctatc

SEQ ID NO: 845378 - DNA, 634 bp, Homo sapiens
tttacaatcggggaattattataccattagaacttatgagtataatcagtaagttgctctcaaataacaattataaaagaacagcatgttgatatttttataattttagaacttagagaaacatcatttttgatttatagtgaatctggaacatattactgtccaatacgttgtattttgttaagaaaccatgctgaattctgactattgacctagatacagccttcaaaatgatgaaaaattagaatgtgcttttgtatttccttaaaatgtcttagtttgaatacattatttttaaaaacataaataagattatgtattcacaggcctctgtgttggctagtacatataatttatctgaaactttataaaccaaagaacccaaatactcaagtgtcataattttgagtccagttttaaaagttaatacatgtagtcaaaattaagttgttatatccttgagaactacaacaacctcactcgtgattctaatcaaatcagaatactaagcgtgcagtaggggactactgtgtttatggggtwtaaagaaagaaagataagatcaagttgttaggaatccagaaaaatatcacagagaaggaggcacctgaggttgtccttgaagaacaggtta

SEQ ID NO: 845379 - DNA, 638 bp, Homo sapiens
ttgtgccaccctaaaatatcagaaaatgaagttttgaaactttattatagtcacacaaatcaactgatgttcctttgtttttatagtgcaaaatatttctccttkttgaaaatgagtgcatcagcataaaagcctcttgagcgagaaaaatgtatattgatcactgtaagtgcttttctgtaataccttgaagttattgaaattgaccctaaaccatgttctatttctgacaatggattcttttcatgtgttatttattgatttacagcttaatagagatgcagaagtaatttctgttatgaaaaacacatgtaagaccttgtcttactatttgaatttgtttgtagctttaagaaaacatcaaacacattatactcaatataagagctaacagattaaccaacataactcttataacactttcatccttcaataatgtgttgaaataaatacacatactgaatcatctattggaccacaaagtacaatctggctagtgcacatgtggagaaaataaattctagagtaaaaggttgtttgtgttataacctgaattccactctttctcagatttagtatatcattcctttgcacctcagcatttccatttggaaaatagtgataacattagtcttctt

SEQ ID NO: 845380 - DNA, 603 bp, Homo sapiens
ttgctgcctgatatgaacaaggagaaggaggagagctgagtacaaccaggattgtgagtgaggagttgtcatgagtaaacaatatatgctatgtgatatacattcacatagaaataacttcaaactaaaaaaatacccactcatacatatatgtttaaaaggaaaatagaatctactaaccttaagattaaaaacaacaaattaaccactctttctttggccacatgatccaaaataatcagatttaaaataatatatgctttatatatacatacaggcactgacatttagatgattgtctttttagcacaagtcaattcccacccccctgcttgtctctttctactcacacctcttctctgctacccacccacagcaccttatttatttatctatgatgggaaaataaatggtgcctaggtcctgatcaggcatcaagagtaatccttatattttcatatttgagaactacaactgcttctagtggaagtgagttgttttcttcatttaaagagagacatacaacaaagtaccattctttttaactggrgacatagtcactgttcttacagcatttaaaataatattttccataagaaccat

SEQ ID NO: 845381 - DNA, 627 bp, Homo sapiens
tagatggtatttagtttctgggcattgaaaagttgggtatctattatggtcttcacagtctggacttactkgtagccacctttcttggaaaggctttccaggatttaagtgttgatataagttgtttctactttagaaggcaacccaggcccagtaatgctgtgttttttgtagacttgcagaggtaccaccttgatggacttggacaagatctggagacttctcttgattgccaggcagagactcttgtcctttacccttcctttctctgaaatatatacagtcttattttctgttctgagccacctaacctgggggtggagtgacacaaacactcctgtttgtgccaccactatgactgtgctgggtcagacctgaagccagcacagcactgggtctcacccaaggcttgctgtaaatgctccctggctactgcctatattttctcaaggccctggggctctacaatcatcagatggtaaagccagtcatgcctgtgtcagttgtttcagggcagcgaggttccccagggcttgggtgcatccagaagtgccatctgggactcagggactagattaaaaaaccttagaagtctacctggtattctattgtatttcagctgagatg

SEQ ID NO: 845382 - DNA, 543 bp, Homo sapiens
tcacatgataaatatgtacaattctatattttaattaaaaataaatttgaaataaatgcacatgatagctgtgttgtgagctctaagagaaagtacaagtgagaaacctggtgaatacaagtgagcaagtaragtttctcttgctgttctttgtaatcttgaaaaatacctggcaccttcatattaccaaaggcaggtcctggattcctcaggaatgccaagtaaaggtgacacccatgaatgcttgataatcactccaataactcacaactcaagccttatctgataaaccaccagaatgcaacactctgtggtaaagattggcaaactacaccccacaggccaaatcccatctctctcgttttgtaaaaaaaaaaaaaaaaaaaaaaaaaattattttggaatacacctgcactcatttatttgctattgtgtatgactgcttttccatgattatggcagaggtaaaaaagttgtgacagaccgataaccaatgattcacaaagcctaaaatatttgctatctgacccttcatagtgaaag

SEQ ID NO: 845383 - DNA, 491 bp, Homo sapiens
acagtggcctggttgcagcctggcagatgaggggtacatcactactcagaataaacggccccctctgcacccacctgtctagaygagggtgacaggcactatcacagggcccccacctgacgccttcccacctggccatgcccccccagaactgtcatggagcccaggaggcgcctgtgtggagcacggggacctggcacgctgctgcccctagatctcagactcccatctaaggaccagacctgctgcctgtgcccagggaggggccctgacaccctctgtccccgtcagaacagggccccaagccactgcattgctccgtcctcacatgccctccctttcctcgcaggggagcctggagctgttggtcagatgggcagccctgggcagcagggggctagcacccagggcctctgggagtgacaggtgagcccctgctgcctgcatctatctgccaaggctgagggcatccaggaaggaggagctcctga

SEQ ID NO: 845384 - DNA, 491 bp, Homo sapiens
acagtggcctggttgcagcctggcagatgaggggtacatcactactcagaataaacggccccctctgcacccacctgtctagatgagggtgacaggcacyatcacagggcccccacctgacgccttcccacctggccatgcccccccagaactgtcatggagcccaggaggcgcctgtgtggagcacggggacctggcacgctgctgcccctagatctcagactcccatctaaggaccagacctgctgcctgtgcccagggaggggccctgacaccctctgtccccgtcagaacagggccccaagccactgcattgctccgtcctcacatgccctccctttcctcgcaggggagcctggagctgttggtcagatgggcagccctgggcagcagggggctagcacccagggcctctgggagtgacaggtgagcccctgctgcctgcatctatctgccaaggctgagggcatccaggaaggaggagctcctga

SEQ ID NO: 845385 - DNA, 639 bp, Homo sapiens
ccggcaggcccccaacccttactcgtcggaaatcaaggcctttgacacccggctgcagagaggggagctcttctccagggaggacctggtctggtaagtggcaggggccagggggtggagctgcctgcagcatgggggccctggggtgacaagcagtgtccccggcaggtacaagaaggtcttgtgggaggctcggaagttcgagctggaccggcatgaggtcatcctctgcacctgctcctgtgcagcctctgccagcctcaaaatcctggacgtgaggcagatccttgttgacgaggcaggcatggccacggaacctgaaaccctcatccccctggtgcagttcccacaggccgagaaggttggtcggcggggggtgtgggcagcatgagcaggcgtccctggcacagtctcccacctggggtgccctgtgtgtgcagacgcgggtgtcgtgtggggctggggtccctctgggtctaggggtgtcagggccaggcctgcctattcctccaggtggttcttctcggagaccacaagcagctgcggcctgtrgtcaagaatgagcggctgcaaaacctgggtctggaccggtctctgttcgagcggtaccacgaggacgcacatatgctggacactcag

SEQ ID NO: 845386 - DNA, 287 bp, Homo sapiens
cacctaccccatgcctcctgctcagggcctggcctgagggctccagcaggcttcagtgtgggggagaggtgagcaggggstgagaaggtggctcatcacctctaatgatgtcagaaaactaggctgtttctcctgcactctcacagcacagctcactgctgacaccaggtgggggttctgttccaacaacagattagtcagttttgcagccgacgccggctgggcgtgctccagtttaattccgataccatctacctgaagacaccatctacctagagacgtctact

SEQ ID NO: 845387 - DNA, 570 bp, Homo sapiens
ggacatgagctgctcctctaagggaggctccagaggcaggagctcctctgctgccatggagactgtttaattcgctgcctcaagggcatgctcagtcccctgggagccagccccaaggcatggccgcgggggtgggccttgtcctggtggccgtccagggggcccaggtgggccagcagacgagatgctccgtgaccggaaaatgaatccacacctgctctggggccaggccagggctgaggtcatcctgtgacactgggggccagagagcggccttggccttgctccccaccctgcctccaagcccctgtctgcctctgggctgccagcctccacctgcctgcgacggtggccccggggtgatggcctggctgtgccccatgcacaggtggttcgttaggcactcggcggctattattaacccagcagtgacgtcaccggcagccaatgggaggcaggtttatttccagggytgacagcttgatagcggttaattttagctgcatcttctttcccgaggctcgtgaaaccctagccagccaaagaaggggttgcctgtgtctccccaaa

SEQ ID NO: 845388 - DNA, 623 bp, Homo sapiens
attgttccaggttcccatacgaatccatgaatttgactaatacttggaaactaaaaatatattttattgacagtacattttgaggccattccactctctcagccattacgcccacttgcgtactttaatattcccaactcaactgttgtgtttggaacaagttcacaccaacgcatggactcatccacatgaagcatccattaacatacaaatatgctgttggcattaagcagcattgagacacaatatgttttttccttaattattcaaggaaatagtcattgagttacacctggcatgttgttagcataaatatgccagagaatgggaattcagaaggacaggcaggaagcaaaataagtagtttacaggatcagggtgtgaattgaatgtcaagatttcaccaaagctaatactgccttatacaaaagtgcaaatcgacatcattcatgctcttatggtttaggaggtcctgcagttctgctatgacttggagtggtgatatttgtaatagccacacgccgtacttaatgttttgtatacatatcttcccatttggagctcatcatgccccccatgaggttcactaagatcarcctattatacaaatgagcgactgaggc

SEQ ID NO: 845389 - DNA, 616 bp, Homo sapiens
cagtcaggctcttatgaattgactcacatcagccaaattcacaagaatttgatgtctaggatagaatgtcaacagatggtagtaacagatggtaagatatataagggctgtgcagaaagcrtgtgcttattttggatgatatgttctctatattcctggagaaatatcttatgtgggaattattttgggcatcctatgaccatcctctaattcagggtttcaggagtactcacagattacattcatggctaaggtttattatagcacaggatatgggataaaaggagctggaaaatgaaatgcatcaggagaagcccagcgtggtcagctgcaggcctctaattccttccctaatgagtcacacaggaagtgctttctcccttgcaggaaacatgcatgagatgtctctatccagggaagtccactggaggctgaggcttttggggagggctggtcaagtaggcacattcctgctgcatgaacagccatgatgcctgaatctcagaaccccagcatagataccaggtagacattataaagtttgggaaatgatcgtgacaaattggtacagcatggcctatcgcttctggggtacaaaccaatgtcatcaattgta

SEQ ID NO: 845390 - DNA, 598 bp, Homo sapiens
aacggaagacacagaagtaccttgtgtgcagccttcatggacagaactgcagaaccactctgcggtcagtggtcacttatcaggaaggaatgccttgtcagttgtcgtgtggaaactgcaggaggggagggaagttcccctgcagcattaagcaattggctaaagtcagcaaaggagtgtcttgtgttctttgtctttctaagtttggtttctgtttaactcttaggaaagtctggcgagtgttagtgaggaagggggttcagtgaggcatgactgaccttcccatggctgggagacatagtttttaaagtttttctggggtcaccttggccaagaggggttcattcagtcaggcacttaggatttttcttttatttttatttcaatagctttgggggtacaagtggttttttgttacatggatgaattctatagtggtagattctgagattttggtgcacctgtcacccgagtagttttttatccctagccsccttcccaaccttccctttcaaggtctcttctaagtccattatatcaccctgtatgcctttaggtactcacagtttagctcccacttataaatgagaacatacag

SEQ ID NO: 845391 - DNA, 637 bp, Homo sapiens
actgggagatagatagtagatgtgggattagtgctgagccttaaccctgctgcttggggaaggctctactcacaggcatttttagcccacctccatggcagagacagctccagcgcaagattcaaarggaggaggcttcaacatctgttgcttttttcttttaggggtcgtggttgttagattttcccttcacctcacacccctggcagtaggaaatatttgcaaaaattttctctccttatgacctcgcagactctgatttcccaagaggccagatgacaataacttcaaagtctctcctccacctggcagctcagtttcaaatgactgctagtaattaaaagaaaggatcaaggcagcgcttcctctgactgtgataaggacatcttcagtcacaagaaacctgggggagctggactcctagaatgctttcaggccacaggatttcacttgggtgctaccaccctcccctgtagctggagggcgtgagctgttggagtggcagagctgttcaacatcactcagctaaacaacactgacacaccctggtggtgctccttctataaggagcactttcccacatgttgatctataccttcgtggtggtcagcatcaacctgtgaaaggtattccatgg

SEQ ID NO: 845392 - DNA, 628 bp, Homo sapiens
tcacactttatcttctttatctgagtttgtgataaaatgttcccyactgcttaaaaaaagctgcagtgaattgaagagctaaactctctccatcaagggactaatgattctcctgttaaaatgtaaatggagcggccttgagtggtttaaagcttgctaggaaagactgtggaattgtcattatcctgtcattactgtggctccccacaggagcaattgtaaaggggaaggagggttgaactgaacttctaagtgccagggacacttcttgtagcattgaggcagttaagagaagagcctggtattccagagatggcaagtgaggaagcaagcacaggaaagcgttttagaaggtgatatattaatagtttggatatttgtccccactcaagtctcatgctgaaatgcaattcccagtgttgcaggtgggacctggtgggaggtgtttggatcaagggagtggatttcttatgaatggtttagcaccatttccttggtgctggcctccagatagtgagttcttgtaagacttggtcatttaaaagtgtgcggctccccactgccccactctctctcttgctcctgcctttgccatgtgatgtgcctgctcccacttcaccttctgcca

SEQ ID NO: 845393 - DNA, 495 bp, Homo sapiens
agcaatactctgacaggtccacagataattgtttattgcttgctgaaaaaaattccacagtttgttttaccaaattccatcatgatgtataatgagtatctgggtcttatagatccttttacgatgtacctggggtttatagtgtaacctaatccttaatacaaataatatgaggcttgtcataagactataggagaagcctgtaaagtttatggaagtctcctaccacaggccaggaactttacaacagacctttcagtgaagacatatggaaaagaaaaagaaacagaggtagaaagatagatagtgttatcaaattgtattaatttatatgtaatgattccttcacttctgaattagkctttgcatctagctaatccctgaacactcattgactttcaatgtataagaaagtacttggtaaaagactgcttctaaatctgaaaaggttcaaatagtctacaattcacaatttctttatatgtataggcatgg

SEQ ID NO: 845394 - DNA, 372 bp, Homo sapiens
tttcagtgaagacatatggaaaagaaaaagaaacagaggtagaaagatagatagtgttatcaaattgtattaatttatatgtaatgattccttcacttctgaattaggctttgcatctagctaatccctgaacactcattgactttcaatgtataagaaagtacttggtaaaagactgcttctaaatctgaaaaggttcaaatagtctacaattcacaatttctttatatgtataggcatggatatgatatgcaaatgtttttaaattatagtgtttarccacactacttgactccttaatctcatttccaaaggagctgagattaaagagtaaatccccagcattcttcagaaacagtaccagccccaaga

SEQ ID NO: 845395 - DNA, 506 bp, Homo sapiens
caaggtaataaatcaaccgtggaaacatgcttgctcagttcacctcagcatatctccctcaagtaatgttgcatacctgaggttaacaacttcttaaaatgttttcaagaactgctaaaataatttacctaggactggagttcgacatgcaactggagatgatgtgtctgtgtaaaacgagctggtctgttttctaccactgtcatctaaaatgttaagtggatcgtggatgtcactgtaggggggcagtgaacgaatgctgctgatgacagaaacgtgctgattcaccattgatccgagcctgtgagactctgggtagtttatgttgcttccatagtatcctgtaacagaaaatgttgagaatttgctgttaacttactacaaagaactttcaggaaggaaaaaagtgacaaagyaatgaggtgacgtcctaaagatatcaaactgtaagtattacatgtgtatctatacatgctacagaactggatttgtgcttgtacatggat

SEQ ID NO: 845396 - DNA, 641 bp, Homo sapiens
ttttatcctgtgatggaagatgaggagtaatttacctttaaaagcacactgctgggcacatacaaattactaaaaatgtatgcatgcagttgagttgcatcagtgatgtatgttatcctgaaaccatggatgtgacagaatatgtatgcagtggttcttattaaattgatatgaaaagacaaacaaaaacttcataaaattttgtcctatttatgtttaagaaaactatatatatataattttatttttaatacaatgcatttataagtgtttataaaaattctgtataaaaagcatcatataaactcacaaattaggggcaaattgggatatataactatcctaattgatagcaaatttatagaaaatcatgaaaaatgtaaaatatgtaggtttgaaaaggaactaaagctaacatgagaaaaagaattccaaagaaatgaaaattattttggcaatgtaggtattcctattcactgcctacgcattctatacaataaagaattctgctgggtgctgtggctcatgcctgtaatcctarctactgggaaggctaagtcaagaaggttgcttgagtccaggagttcaagaccagcttgagtaacatagtaagaccccgactctactaaaataataatttt

SEQ ID NO: 845397 - DNA, 501 bp, Homo sapiens
ttacatgttcttctattgtcatttccacctctacctttagagaactgtctcaccctttggccttcacagcctgggaaattagggaaggggggacagcgaactgcatggtattaactctggtaccttgtgtttgctgggtggtggctttttgcctggcattgagggccaatgattcatcctcctggctcaacctgaccttgctgactatagctgtcatgtgtataaacttatttccttccccatcccgcagtggggtgaaaaataaatgcaagaacaagattttaattactttccaagtgtgttagatatagtaaatgacatttaaaaaattctcctcttccagactgtacgctgatcagagttgcattccacaaggacttagtaataagactgtggttggcccaactgtttcagaatgatgcctggaaagatgggcgataacctagtatgwtcctccaatctcagcttacaatggcatactctcacttgggtccaaactct

SEQ ID NO: 845398 - DNA, 542 bp, Homo sapiens
aacaaaacaaataacctcatgagaaggtactgtaatgcatctatgtgtataaagacaaaaatgcaagtttgtcttgttattaataaaacaaagtatrattagtctggatgtacaattaggataattatgtggattccatccttaggacatgtttatattgttaccctgggtctacatcttcatcatgatagtggacctgtttaattctcggagggatgagatacaaggatagcctgtgggctcattgtaggatattttaagtatgatagagaccgaggaagagtgctgagtgatttcagatctctgttagcccctgcactgaagctctttgtgtaagcctacacaccctgcctcaaattcctcttgctctaaaaaggggagaatctaaagatggtgcttgaaagggttgccaaaatcttagctttgtggtggagatgtcttccacccaatctcatcacatgaaaccagaaccaaaggtgtttctaaacgaaggttcagaagaacaaatgcatctggactgatatctgggcaaggcatcaggc

SEQ ID NO: 845399 - DNA, 575 bp, Homo sapiens
tttgagtttgtggttattgcctacttaaaagaaagtttaggccatgtcactgccttcaaaaagtttaaagtcttctacattaacaatgcaccacagagcaaagacaggccagcctacrttcagaatttaaatttaaactctcatgggcctaagacaggttactaaagagaatcatgattcatattctttgttctctaaggtggaacaagtgtctagactcttgagagctggatgtcagcaggctttaacacagtgattctcagtgtagaaaaagtggtagaaagctgcctcaacgactgaaaaactgagggggaaaaagctgtctcctaaaacacaggagacccagagaagacgaggtatggcagagaccttgtggtttccatctgttcaagaaaaacttgagtaaacattttagttggtttccattccctgccccatcttggtgtttgtataccattctctgcatctgcattctatattcctattaactgacagaaatcttcttttctgtgatttgaatgtgattctacagcccacttgtcatatatgataataacaccatcattgattaatgt

SEQ ID NO: 845400 - DNA, 619 bp, Homo sapiens
agctggacagaatgccaatgttttaaattatagctgggaatcaaagctggagagcaaaaagacctccttagctttaaaggtagccaattaagttgcaaacactattgataacagttgctttattcagaggcttattatataaaacaccatgctgtcttgaaactgaagaggttgccttgcaatcgtctccataatccataattgaaagaatcataaatgtaacaattatttcccacaatgattgctttcacaatttcttgttctctgcaggatccttgttttttgtttttttttctttcagctcattgcaacaatcacacaattatagtgtgattcatatttaagattaaattttgcatgtctactgaagtatataaaatctctattttcataattatgaactatatatatcagtcaacttttaaagtaagtagtattaattgcaatatatgctctataagtgttatttatttagcttaaattttacaagcctaatcaatgacataaagcagagtgattaaaagtaattttaagatggacataaatagtacaatatttgaattgggaaacttaatctgtatgayggaaaagagataagaaataaaaacaattctcatgt

SEQ ID NO: 845401 - DNA, 615 bp, Homo sapiens
tactttgatgacttgtgtttttccactcaacattgtaatttgcwatatatccattttggtacaggtagatctaacttattcatgattaatgatatttagtattccattaaattatctttagtttctccatttctctattcttgaacaattatgtttgttcaagttttgctaacacaacaatgctgcactaccgtatttaagaatacctcctcgtttaagaattcaacaagtatatatagcttaaaagtagatttgctgccttgtaagttatacacatctttaattccatggatattgttaaattactctccaaagtggaagtacctaatagtagccgtttttgaaagtttctatgttcccatggtattgccaagactttatatgatcagagtttttaagttttgccaatctgctggtcatggaatgctgtcccattttgttttaatcttaatctcccctaatgatcaatgaggttgtgcaacactttatgttttaaaagatttcttcttaattgactcatcatgtcctttgttctttctctattgaaatgtttcctttttattgttttttaggcttctatttaatacgtattttgtttactaatcctttactggt

SEQ ID NO: 845402 - DNA, 607 bp, Homo sapiens
gactttgcaatgcaggctactgaggctcagtcccgctggggaccactggagacaatgtggaacaggcaagagttgtcccacctgtagggagttaatcgcccgactcccatccatcattggctgaggtctattctggatcaacgcgtggacactttcagcctgtcttgcgggcctcatgggtgggaccctggggcggggggtcaaaggtgctggatgtagggagcagtaggcagggactagaagagagagtgtagcgggtaggggcaacagtacagacaggacaaatgatattcatgctgggaaatgtgtatgtcttttcttctggctaggcctttccctggggattgagtcaatccaagcaggagtcgagctggacttgggttttgtagttgccctatgctatggtttgaatgtttgtcccaactcatgccgatatttaattgccattgtaacagtgttaagaaagagggcctttaagaggtaagccacawgggctccacccacgtgagattaatgccattatagaagggtgagtttggctctctttttctctttctcatcttcccgctttccatcatgtgctgatgcagcaagaaggcccccaaac

SEQ ID NO: 845403 - DNA, 641 bp, Homo sapiens
atttagaaaatctttttaaaggataaaaaagcaatctgaatcgtrgattcaatatttaatgttattccattacaaacctcaagtttttgtgaatgtgtatgtgttcatgtacatgcagatacgtgcatattcgtgcatattcctgtatatgtgaaactttacaagataatttaaaaatttacatcaacatcccggaggggtggctcatgcctgtaatcacaacactttgggaggcctaggcggaaggatggcttgaggtcagcagtttgagaccagcctgggcaacgtagcaagactctgtctctataaaaactaaaataaataaataaataataaataaacaaattagccaggtgtggtaatgtgtacctatagtctcagctctgctggaggttgaggtgagagggtcacttgagcccaggagtttgaggttgcagtaagtcatgattgtgtcactgcactccagcctgtcttaaaaaaaaaaattacactgaagaacaaaggatgaataattatttgcctttccagtgctagagtaattatgaccatgtgatattgaccatgtgatattggcatgtgtaatccctgaacatatcaacatattacaactaaactctacttatgacagggtggattgcaca

SEQ ID NO: 845404 - DNA, 601 bp, Homo sapiens
gccacataaatgtattctttgagaagtgtctcttcatatccttcacccactttttgatggggttgtttgttttttttcttgtaaatttgtttaagttcctggtagattctggacattcgccctttgtcagatggatagattgcaaaaattttctcctattctgtaggttgcctgttcactctgatgatagtttattctgctgtgcagatgctctttagtttaattagatctcatttgtcaattttggcttttgttgccatagcttttggtgttttagtcttgaagtctttacccatgcctatgtcgtgaatggtattgcctaggttttcttctagggtttttatggttttaggtcttttgtttaagtctttaatccatcttgagttaatttttgtataaagtttaaggaaggggtccagtttctattttctgcataaggctagccagttttcccaacaccatttattaaatagtgaatcctttccccatagcttgtttttgtcagatttgtcaaagatcagatggttgtagatgtgtggtgttatttctgaggcctctgttccattccactggtctrtatatacctgttttggtaccagta

SEQ ID NO: 845405 - DNA, 629 bp, Homo sapiens
tccaccagggctctgcgcggctcgggctggggcagtggaacggcttccaccagggctctgtgaggctcggactggggcagtggcctccgagtcgggggttggccagaaatgtgcagtgaccaggcctggaagggaccggccaccaccactgagctctaggaactgatgtttccaacccactgcaacatgaattgaatgtctttacattaagggaaaaaaattgctcaaaatataaaaaccaattcaacttcatacaacctgttgctgtgggagtggaacaattactattgcaaaagcgaataactcggctgacctaaaatgggttttctctgtacctggctgagttgagggtgggagaggagggcacatggagagcaggtgccaccaaagtgcctcctcggaggtgcccgggctcatctgggccgtggccacgcacacatgggtgtcagggacaccatgccccaagtgtttggcccagttgccccagacaaagctggccaccctggtgtcttacctgagctgggggaggctgtgccggctccctgggctgggtctggcggttccccagagctcatcctgtggctctgrgggtggagggtggaggggcttctgttctgccatcagcgacc

SEQ ID NO: 845406 - DNA, 529 bp, Homo sapiens
agttctaggagaatatttgaatttacatttcaaattcaataatctctcagcatcagaaatctgctcgtggggccacgtcaaccccactgtggtagaagagcagctgcaaccccaaaacagaagcacccggggctactcaggctcgacacgcaagcagcggacttgagctcacaacccgtattctgtgtgggaagcacctgccctggcctggaggagcacaagatctaacggacacacccctggccacaggacacacctgtgggcagacagctgcatccacaggacacacacctgtttgctgggcacacctgtggctgcggcaaaggctcacaagcacttggtacatctcaggtccccgtgtggcacccccgtgcgcgaggtgccccttcagagaggagctcccgatccacactggggcacaggtgccaagtctccaaagagtgggtgctgcgggctgcagggacyaaggggcacccgcggctgcactgatgtcaggttgcccaatagctaccctagaccctcagaggga

SEQ ID NO: 845407 - DNA, 526 bp, Homo sapiens
tacctcatgactatcatatgagagagaaacaacttctattgtctctgagccatttgatccatctctctatataccatttctataaatagtttaatgaaatataagaggaaaaaggaatacagagcaaaaatagaggacctctgtgaattcacattgataaatctaatcattactctaggaaaagtttggatttctcttttctgaagtttaacaaaatattgataataactttaaataaaagcatactatgttctaggcactaagcttttggcatacattgccccatttaaactcaaaatatttctgagggagatcctagtcaggcatgagttggagatactgtaggtgtggttcaagactaccacaataaagtgaatattgcaagatagtgagacacacaaattttktgttgccctgtgcacataaaacttatgtttatactacattgtagactattaagtgcacattcctaaaaacatgatgcatatatcttaattaaaaatactttattataaaaaatgctaat

SEQ ID NO: 845408 - DNA, 586 bp, Homo sapiens
ctatcataaactttgaacttaaagccaattcacgttcatacccttattttttttccagttcacatatatcttttytaaaaacagagatgtaaaaattagccattttcaaaactaatatataacaagttccaggaccacaataaaaaatttagtattttaagcatctcaggttaaaaagatactcattaaaaaaaattaagtccctggctgtggcacagtggctcacgcctgtaatctcagcacttttggaggccgaggtgggcggatcactaggtcaagagatagagaccatcctggccaacatggtgaaaccctttctctactaaaaatacaaaaattagctgggtgtggtggcacgtgcctgtaatcccagctactctgaaggctgaggaaggagaatcacttgaacttgggaggcggaggctgcagtgagctgagattgcgccactacattccagcctggcgacaaagcgagattccatctcaaaaaaaaaaaaaaaaaaattaagtccctaaagagtatttgatagacttagtctatcaaatacacttcctcacattctcaaagtattaaaacagacagctt

SEQ ID NO: 845409 - DNA, 612 bp, Homo sapiens
agtactccacaaagaagaaacaaatacaaaggctcgaaggtgggagcattcctggtgggttcaaggagagggaagagaaatagggagtgaggtccaaaagctacatggaaaccagatcgtataargccttgtagaacactgtaagatcactttggcttttatcatggttgaaatgggaagatgctggaagattttgagcaaacatatggcatgatcagtttgggtactgtgtgaaaaataatgaaggagaacaggattgtaaaagcaaagagaccaaataggttactgcagaaattcatggtggacaggacctcggaatagcaatgacaacagtcagatcctggatgtattttcagagtagaactgacaagatttactgaaagatcttacatgagacatgaaagagacaagtcaagaaaacttcaaggtttttgacctgaacaactaaaaggacggaactgccattaactgatatggagtagactgagttcagatgggacggccagactagggatataaacctgggaatcatcaacatacagataatactgaaagctaaggcgctagatgagaacactaatgggaccctgcaatgttgagaagctgggaaga

SEQ ID NO: 845410 - DNA, 635 bp, Homo sapiens
aaccttaatttttataatttgtttttgaactctaaatgggccttaaaattctgtagttgtatcaacacrttttaatatgtagtatttttgtggttgttcaacttattcattttaaaatatttcctaatttataacttattgggttaattagaactgtgtctcaactaagcccagtgtgggcttttgaattgaaagtctgttattgatttctaacttacattgtgattcagatatgctcaaaatgatttcagccatttggcttgcttcatggtaagatcagattttaaaaatattccatacctgcttcagaagattatatgttctgtaattgttgagtacaggttcactgtagtcaattagcaacgtttgttaattgtactttcaaatattttacatctttattttttcctgtttgtgaatgccatgtaagaatctcccagtataattataaagttattgatgtaaaatacacataaaatgtattttaaagtttacaattcagtgtattacatatattcacaatgtgtaaccatcaccactatctaattccaaaactttttcatcaccccaaatgaaacatcgtacccattaagcagtcactccccaccctctattcccctaacccctgcaaccac

SEQ ID NO: 845411 - DNA, 548 bp, Homo sapiens
tgtaattactagttgccattttcagatagaaattttaaaatgttttaaaacctattacactctatagaatatattattttaattttaaaaattctaaatattttgctaataaaaaagtaactttcctcctttcccatcatccaaagaatataactaatgcttcctttttaatggctttattaagatatgattcacataccatacaattctcccatttaaaatgtaccattcagtggtgtttaatatagtcacagaattgtgcaaccatcaccacagtttgtgttagaacattttcatcaccccaaaaggaattctgtacccattagcagactctctgtgacccccaaatcccctatcccaaggcagtaactaatctactttctgtctctatagatttgcctattctggatatttcatataaatggaatcataygatatgtaatcttttgtggttggcttctgttaaagaaaaccagagccagacaataggttcaagctgcgaacagcgattttatccaggaactatgacaacggggaaaaagagacct

SEQ ID NO: 845412 - DNA, 526 bp, Homo sapiens
ctggataccagttaaatttagaaaattgtgaaacttatttaaatttagaacctttaggggtcagtgttccctaagaaaggttacaaaaggttactgtgcctaccaaaattaaatattaaatctgctatattgtaaatatatatatattttttaccaatttaaggtaagaaatgatgagaattataccttgaagaagcttttgaccaaaacctttcaatttaatgagtttgttcaatattgtttttaggtttattatttggggggatcatcatatgtaatatatattttacacacaagtagttatttttatttatgtattatctaaatttagatatagattacatatttttaatttatctttaagcttaaaacatgatcatgattctaaatcaggaatcattgtacttatttgaaataaggtraaaaagcacttatagaatggctgtgtaaatagaattcttacatttttcagtttattggaggctagtaaatatttaacaattttttatcctactgaatttaagta

SEQ ID NO: 845413 - DNA, 637 bp, Homo sapiens
gtttatggagcacatactcttgagacattcccttgcttgattagatgaggcaaaaatacaatgtggatgtgaattctaaacagatggggaaaataaccatagaaaaggaactgctggctttggccaaattgttaaaggttctcctaatgggctagcagaatatgcttcgtggagaaagaagttagaggggatctggccactacaaacaaaaagccaaagttaaatgccccaccactgggaaggagggagaagatgataatcagagagaaaaacaaggggtgtttcagagttgctggtaatctatttcttgactagtgatgactaaacacgtttgcacacttttaataattcagcaaactctacacttataatttgtgcacctttccatatatatgttacatttaaatttttttaaaggaaaggaagttaaatgccggactccctaactgagattcatatagactaacctcagaatctgtgggtttctgtgaaagaagtaacaaaaaggaatttgttcaatgttaacactaaggcatatyattgagtgagacacatgttgttgtggtgacatttcatcttatcgggtccgtttgtgaacattctggtgtggcattagtccaaactcattgctgcatac

SEQ ID NO: 845414 - DNA, 607 bp, Homo sapiens
gcgcaatttggctttgaccttccccctctatagagtctttttttctcaaaggtcttctacacagtgcttctaaactttaaagtgcaaatcaatgacttggggcccttccaaaaacgcagattccgatatggtagtgaaactgccattgcaaaattgtaactgagacagtgaaataaatctgacctaagcaactccatcttgcttctaacctccaagctgtccttgttcattcctgggtataggccaaactaactttgggaggaacttcatttatagtttacagtttaaaacaaagatggtaacagccctttcccaagacagaaccccttcttgcctggagactagactgcctttgtgggactaacaaattagccaaaagattagaaattatggtttaggagtcatgcagctggaggttacaagattctgacccttcccaagtcgctcctggggataacatcactattgtgaagcctaagatcagggcttgagatattttgcagaccctgcgyttgatggatcagctggcatcacctagatctaactggttcttgtgatcttgtggcccccacccaggaactgactcagcataagacagcttcgactc

SEQ ID NO: 845415 - DNA, 517 bp, Homo sapiens
tttcatggaatgtaaattatacctcaatcaaacttttttaaaatgactcacagctaactaggaatagaaggaacctccttaatctaatacagtatatctacaactaacatcatacttaatatgcaagattgaatrctttttctttaagactatggaaaagacaagcatctctattctcaccactcctatttaatatcatgctggaaatcttacctggcgcaataacactagaaaaataaaaggcatacagaatataaaagaaggaataaaactatatttatacacaacaaaattgtctctgtgggaaattccatggaatctacaaaagaactattaaaactaataaatgagtttatcaaggtctctgaataaaaggtcaatatacaaaaattaattgcatttctgtataccagcaatgaacaattagaaatcgaaagttttttttaaaagtacaattttcaattataccagaaaaaatgaaataggtagaaaactaataaaagtgttcaagatatgt

SEQ ID NO: 845416 - DNA, 623 bp, Homo sapiens
ttgctttgtttatgtgggctattttttggttccatatgaattttagaattttttttctaattctgtgaagaatgatggtggtattctgatgggattgcattgagtttgtagattgcttttggcaatatggtcattttcacaatattgattctacccatccatgagcatgggatgtgtttccatttgtttgtgtcatctatgatttctttcagcagtgttttgtagttttccttgtagaggtctttcaactcttttgttaggtatattctgaagtattttttttttttggcagctattttataaggggttgagttcttgatttgactctcttcttggtcgctgtatagaagagctactgatttatgtacattaatcttgtatctggaaactttcctgattttttttatcagttctaggagctctctggaggagtcctcagggttttcaaggtaaatgatcacattgtcagcaaatagtgacagtttgacttcctctttaccaatttggatgtcctttatttctttctcttgtctgattgctctggctaggacttccagtactatgttgaagaggagtggtgagwgtgggcatcctcgtcttgttccagttctcagaggggatgc

SEQ ID NO: 845417 - DNA, 584 bp, Homo sapiens
catatatgaattttataccctgacaccttactgaattttcctgttgttggtattatttttaaattgtttatgatgaggctgckcacagtggcacatgcctgtaatcttagcactttgcgaggccgaagtgggtggattgcttaaggccaggagtttgagaccagcctgggcaacatggcaaaaccctgtctctactaaaaatacaaaaattagccgggtatggtggtgcatgcctatagtcctagctacttgggaggctgaggcacgagtgtcgcttgaacctgggaggcagaggttgcagtgagcggagatcatgcactccagcctaggtgacagagctggactctgtctcaaaaaaaaagtttctgatgaattttccagataaataatcgtatcatctatacataatgagaagatatccccttcttccaatgtttacatctttattttgttaaattgcactattgctttcagaacaatattaaatattagtggggaaagtgggcacctttgccttgttcttgtttttaatgggtatacctctagtgttttgccattaagcacaatattggcttttgacttta

SEQ ID NO: 845418 - DNA, 651 bp, Homo sapiens
atgttataaggaagatctatatagcgcagtgcttaagaatgtatctctggattcaaataagttgaatttaaaccacaggtacactttggctctttgaccataggtaagctacctgtcactctaaacactgctgtagcagctcagacagtggtttttttttttccatagtgggctgttgagcctgtcccattcagagaagacactctgaaattttaagaataaaaagcctggataatggcaaacccactaactgatgtttcacagatgactgtaccaagaggtgctgaggcttcaaaagtaatttctataagtaaaaagcagagaatggggaaaagtagcctaacacctttgaaccagctcaacttctctcttttttcacacctcgcttgaatggtcatactgacgagtactttctatatgttacctctctcctgtccctttttctgtcacttgcactttgtcttctccgccattctcttcttacccatccctcttctgtgtgtattgcctttcccctactccccatattcctatctctgtgtctcctctatcattcatgactcttctctttttggcatgtgtaatattgaattygagtttagttaaaatatttgttaacatcatcaaaacaaaacacttttatgtataacc

SEQ ID NO: 845419 - DNA, 501 bp, Homo sapiens
ccatgttggccaggctggttttgaactcctgacctcaggtgatccacccgccttggcctcccaaagtgctgggattataratgtgagtcaccgtgcccggactgctgttgtttttaatccttccatactggctggataaatagacaaaacatgggctgacacgtgtgtatatgatgttgaggaggctgtggcaggagcttctgaaatggctcccaatgatcccctcctcctgatattcacacccttgtgtaatcccttctctccccttgtgtgtgggctggacctagtgacttcttctaacaaagagaatacagcaaaagtgatggtgtcacttccattattaggtttgcagaagactgtgacttctgccttgctactactcgttctctctggccgtatttgcttgtttgcgctgataaaacatgaaataagttgctatattgtgaactgaccaatggaaagttccacatggcaaggaaatgagggcagctattggtcaac

SEQ ID NO: 845420 - DNA, 602 bp, Homo sapiens
aatttaaaatccgtgccaaaatttccattgggcatgtagttgattttacttgtcattgattcaaaataacaagcagccacttagtagatgtgtgggaagacatttgggtattttgtaattaactcaaaggcttttgtatgaaaaaagtgatgtcaaaaaaatctgaaaattatgttcatgtgtattgagatgagtgcattgggaaatttatgaaaacagaatcatttgcaggattaagaaaaaagaataaataaaatgctacataatatgatctacatttctgaatgtttatgactaatcaaatattgatgcttgttaaatgagcctttaaaaaaatacaaatagagcaaaggaagagcaagattgtgaaatataagcctaggctgtttatcccccaaaaggaataccaaattttaacaagtatctttacacacacacacacacacacacacacacaccactgtcataagaaccaaaatttaagtgagcaatcatagtacatggttttaatatcatatcattaaaagaggcactgaggaggggagaagagacagtcttgaattactgrtgccacctctccttcatctaatagcagaggtctt

SEQ ID NO: 845421 - DNA, 473 bp, Homo sapiens
taccaccccataggtactttttcaatcctcacctccctcccacactccaccctccagtagcccctggtgtctattgttcccttctttgtgtccacgtgtactcaatgtttagctcccacttacacgtgagaacatgtagcattttgttctctattcctgtttagtttgcttaggataatggacttcagctccattcagattgctgcaaaatacatgattttattctttttatggctgtgtagtattccatagtgtatgtgtaacactttttttttaaatccaattcacccttaatgggcagttaggttgatttcagtctttgcattgtgaatagtgatgcartgaacctacaggtgcatgtgtctttatggtagaaagatttatatttttctgggaaatatttatattcataggattgctatgttaaatggtagttccatttttagttatttgagaaacctccaaactgcttt

SEQ ID NO: 845422 - DNA, 614 bp, Homo sapiens
taaggccaaaacacaaaaattaatcatattcctaatatgtccacattcagtggacaattgaaaatcagaatctaaagataacatataccacttacaacagctctcaaagtaaaatatttaggtataaatctaccaaaatatgtgcagggcctatacgttaaaactacagaatgctgatgaaataaacataaggcgtagatgtctgactagacagccaggaagtactgctcccaccgagagaccaaaatatggagtaaaccaacatgcttcaaacacatcttcagagagaaaacactgagaatctatagagagacaatataaatactgaggccaaagagggaggaagtagggaaccctacatggaactgcagaggaccaggatgaattcccggccctgaatggctcctagggaagagatgagtgaaatgatggcagggcagcccacactcgctgtggacttctggaatcctagctgcaaagatcctatgmtccctcaccaccataggcatttgaattgtaagggatatctgcctgaagagtaggcagagacagagctccgagttccatggagaccaggaaaatttgcatgccagaccgaggcagcacagcacagt

SEQ ID NO: 845423 - DNA, 640 bp, Homo sapiens
aactcacttctattaaagcatagaacaaagaaatgtatcagaaaagattgaggatatggcacttttttcatattgtattgatcacctagtcagctagaggaatactgaaatattaaacaattcctaaaagctggacttacaagtttcttttagaaggtataggagacccttaataacagtccaaaattttaaaaattacttgctaagcaaaatatgtctcttatcttactgacacatcagatgagatatttataataaaacaaagtgcaccagtgggcttggaaaattttttgcaacagcgtgaattgtattgaataaatgcaatctcaagtttatcaacaagttgcattcccaatgttcattggcttgtttgaaatttagaaagcatttggtcacagaaccagtgttgtacatggtaagtaagtccccaagacaaccaaaaactcatatttaatacagagaaaagctgtattatgatcaatttcagtgaaaatatagaaaaaaatagagtcaaacagaggcatctgaagatttttttgtggttgacttagagtcgaataacataatataaagttkaaataaagtttctttatttgtctatagtatggatacatatcgtaacaattatttgtaaggcttt

SEQ ID NO: 845424 - DNA, 591 bp, Homo sapiens
aattttcagtcccagaaacttgctataccccttccaaccacagggtcttggcatgtgctgctccctttgatgtggatgttctaaaatttattagtttggcatcagtcattttccgttcctccaacaaacacctgttaacaggtggacctacctaagttaggagcccaattctccttgtttccctttgtgttactgcagtttgaagctattttagtcttttcaaggaaaaaatgatcccaaagggacttaaaataacaaagcaagtgattgtcaattatgttactttgaaaggcaaattttggaaaacaaaaagccaccctttgaagaactgtaaacattaaaacacaattaataacaatagaaggcaatatcatctaatggtttagaaaacaggcactggggccagtgcagtggctcacgcctgtaatcccagcactctgggaggccgaggcaggcagatcacsgggtcaagagatcgagaccatcctggccaacatggtgaaaccccgtctctactaaaaatataaaaattagctgggtgtggtgacgcgcgcctgtagtcccagctactcgggaggctgaggcaggaga

SEQ ID NO: 845425 - DNA, 611 bp, Homo sapiens
ccaaacttcatatttggtatatatttttcagttcattctttcagatagatcagtaggtaggtatgtaaacagccagccaaccagatatgtttagaatatttttatrctaatgatgatagatcaatattatttattatttttcttatttcaatgaagacagattgttcagagaatgaggttttaagttacttttatagtaaactgagagatgaacacaaacaccatttgttttaatgctttgcatggaaagatccttcaaatatgccattataatttttggtgcaataaaccagtgatgaagattcaagtagactagtctagactaggatatttaaaatccttatggtccttgatatctgagatgatatcccgttcagggaatggaagtagttgaggaaggtataatagattggtactgaattcaggatgacccctaaatcttgaagcttcacataaattcatttctcttcatgcctcctgagctggaattctctccatagcatcattttcacaggtttttaagttcatacttgaatgcctctaacaacagaagacttattacctcttaagctacaacctgtcctttttaaccaactattaaaaaggtcttt

SEQ ID NO: 845426 - DNA, 519 bp, Homo sapiens
ccccaagctcaatggcactgtggtttgtgcagacttacaraggtactgctttggtggtcttggataagatccagatgtatggctgggtgcggtggctcacgcctgtaatctcagccctttgggaggctgaggtgggcagatcacgatgtcaggagatcgagaccatcctggctaacacggtgaaaccccgcctctactaaaaatacaaaaaattagccgggcatggtggcgggctcctgtagtcccagctactcgggaggctgaggcaggagaatggcgtgaacccgggaggcggagcttgcagtgagccgagatcgcgccactgcactccagcctgggcaacagagagagactccgtctcaaaaaaaaaaaaaattagctgggcgtggtggtgtgcacctgtagtcccagctactcaggaggctgaggcaggagaatcgcttgaaccagagagtcagaggttgcagtgagccaagattgcgccactgcactccagcttggtgacagagtgagattccg

SEQ ID NO: 845427 - DNA, 576 bp, Homo sapiens
attactatggaaactatagagttcacatattaatatatagctttttcttttttccttatgcttatttccttattctgattgttaataagaataaggaaaacctacataacaatgctcagggcttggaataagaataaggaaacaaaacctgtataacagtgctcatggcttggtatgaaactattgctacagttatgagactatctcaaggctgggtgatctcagagtaaaaaaatcactgaagcaattatttcaattttgcatttcaaagagctgaagaatttttctcattcaatataatagcttttcctttggcataacttatcttaggaatcaacataatgtagtgtagacttaagtggactgggaaccagatctgatatctagttctagctgcataatttgattgtaagtgaatttacatacctgggatctatacatcaattcaacaaccagttttyttatctgtatatgaaaggaatgaattagaactactgactcactaacttctctctaccactctctaaactggaaactaataaggaaaaataatatataacaatgtgtgattaaagg

SEQ ID NO: 845428 - DNA, 584 bp, Homo sapiens
ccaatttaaattttatgtgtttctatcagattttagcttaatttgtagtaaattatatgtctaaaatattaatattcccaccaagaaatataaaattatatctgtccatggatgcaaatattctgttatttttccagtaaaggcttgtatatcaccaaatttcatgctaaataaattcacagtaatttcacattttgaacttctgtggaaaatgatagctttgattttcaataggttgttaaaagagaaattagcatttagaaaaattacatttaattaatatttaattatttctaggttttttcttttcttaatgagctttgggactaatttttcccattagttataatagttgtcattgttgatttacttagtaccaagttgacaatatcatctattaatatgaataatttgacttttttccccaatacttatacttcctgtttcttttacttggcttctttcactgactagaatatgcaaaatagcatttaaaaagagcagttttgrtagtcattctagttatatttctaattttaatgaggataccttcaatatttcaacattgatcacagagttggctc

SEQ ID NO: 845429 - DNA, 644 bp, Homo sapiens
ccagattcttgtgaaactacagagaatggattagacagtccaaaacataacagrttgtacttgtgtttgctctggtaagtggagctttagtttgatgtagagaaataagaggaaccggcatttctttcacctggacattatgaaagagaggtatctgaatcatccaattaagtgagcaggaaatctggaatattgtaggtgttttacatgctcattctttctttctacctgcttaattgtatctgtgctatttctgttaaatgcatctgcggtgaactttgcagttgctaaggagagcgtttgccaattccatatgcctagtctaaggtaggctgaagctaatctgtcattctggagaagcaagagaagctaaggttttcataatatttagttgataagggatgagaactttagatacatgttatctcttactttgctatttttccaaaaatgtatttgaaacactgttaagcagagcaataatatttatgcagcattttacatttttaaagtcctttaaatattacatcatgcatcaaaaattatcgataccaagatgtgattgtctcaattttagagacgataaaattaaaaataagaggttctcaaaatgtcattattttataataactgaacaaaagttt

SEQ ID NO: 845430 - DNA, 455 bp, Homo sapiens
agccatcacggtggctaccggcttactgagaggactgagctcctgtagggagggcagcagccatcactgcagctccagtccaccatttttccccttcaggtttgagggagactggacagtttgaacccaggaggaattccctgcagtacagcacaccagctatggcaaataatggccagattgcctcattaggccggactctgacccatccctcctcactgggcagggcctgcttgcaggaattccagtaactccagccaggggtttagggaaagaactccgattcccctggacctgagcccctagggggaggggtggccatggtctccgcagatcagcggacttagtctttaccctgctggctctaaagaatccgggaagcccagacaagtgggattccccsaggacagcaaaccccctcgaccaaggggcagccagagtgcttccttaagtgg

SEQ ID NO: 845431 - DNA, 499 bp, Homo sapiens
tggctaagttaagcaacttgtctgcagttaggttagaaacatgggttgctgctcatttacrcctgtggaaggaggttggagaggagagatgttcaaatgatgactcatcaggtacaaagagaaaatgtcatagatcagccactaccacaacttcattttataaattaatcataagccatatatgaccagttattatgaagtatctaaggtgatatggattggctgtgtccccatccaagtctctttttaaattgtagttcccataatccccacatgttgtgggagggacctgtttggaagtaattgaatcatggggtcagttatcctcatgctgttctcatgatagtgagttctcaggagatctgatggttttataagggacttttttcccttttgctcagtacctctctcttgttgccttgtgaagaaggatgtgtttgctttcccttccaccacgattgaaaatttcctgagactttcccagccatgcagaactgtg

SEQ ID NO: 845432 - DNA, 610 bp, Homo sapiens
ctttctaactctccagcccaaatgttagctttgtaacattgcatccactcaatttaaatggaatgtgtaraaccccttccatgagtacctaccagaagccaagctatagtaaaggtctgaagcttaaaatgtgcacaggctgtcctttctcttgagagagaaataaaatggtggaggaagtgtgatgaggacaagaatgataaggaggatgctctggaggtggagggggaagactccagccagaagggccatgtgattctacttatcatcaattagtgtttggtgtccaagctggtgctgagccctgagcatttaataaattgatttgacccttatcttcccaacacagggtcaggcctgggggttggggcaaattgtggaataaccaaatacctggagcctccctgtccaaggagggcgtgttcaggaaaagtttcccagcagagataaattctgtatgttactagtccagagtccagggaccactcccaggtgtggtttcactcgggacactgggaatcctctctccaggggatatctgttggtatgatgataactggagaggaaatgtgtggagatcatcagattccatctggcactagggtgatct

SEQ ID NO: 845433 - DNA, 539 bp, Homo sapiens
gaccctctgcggatgtcgcctccatcctcatcaggaccctccatggtgtcacctccatcctcactcaggacactccatggtgtcacctccatcctyactcaggaccctccatggtgtcaccgccatcctcactcaggaccctccatgagtgccacctccatcctcaccaggatcccctgtaagtgtcacctccatcctcaccaggaccctccatgagtgtcacctccatcctcaggaccctccatgagtgtcacctccatcctcactcaggaccctccatggtgtcaccgccatcctcactcaggaccctccatgagtgccacctccatcctcaccaggatcccctgtaagtgtcacctccatcctcaccaggaccctccatgagtgtcacctccatcctcaggaccctccatgagtgtcacctccatcctcactcaggaccctccatggtgtcacctccatcctcactcaggaccctccatggtgtcacctccatcctcactcaggaccctccatgggtgtcacctccatcctcactc

SEQ ID NO: 845434 - DNA, 539 bp, Homo sapiens
gaccctctgcggatgtcgcctccatcctcatcaggaccctccatggtgtcacctccatcctcactcaggacactccatggtgtcacctccatccttactcaggaccctccatggtgtcacckccatcctcactcaggaccctccatgagtgccacctccatcctcaccaggatcccctgtaagtgtcacctccatcctcaccaggaccctccatgagtgtcacctccatcctcaggaccctccatgagtgtcacctccatcctcactcaggaccctccatggtgtcaccgccatcctcactcaggaccctccatgagtgccacctccatcctcaccaggatcccctgtaagtgtcacctccatcctcaccaggaccctccatgagtgtcacctccatcctcaggaccctccatgagtgtcacctccatcctcactcaggaccctccatggtgtcacctccatcctcactcaggaccctccatggtgtcacctccatcctcactcaggaccctccatgggtgtcacctccatcctcactc

SEQ ID NO: 845435 - DNA, 649 bp, Homo sapiens
agcatgatgctgaaaatgattcaaagattcagatgggaatatgtgtactcgaggaaacagtcctgtttgcagcgaagagactggcaagctgttcagagttctatgcaccrtgagctaagcagatccagttccccggaagatctggtacagactgtttttatctggagagaaacctaggctgaaacctagcgtgctgagcaagtttactagcataaagggagcagcggacaaaatttgaagatactggctcagggtgagcaaatgcgagctctgtgcacttggagagaggcgctctgcacagcccaagggtgtggaagttaactctctggtcttggagttagactgtcttgctccatccctcaagtctgccaatgacttgttttgaaccttcaccagtttcacagcctttcagagccctgtctccatgttcctgtagcactgatctccacctcctagggttgaagatgacctgagatcagcaaactgcctagcatgtagttggcgctcaatccacagcagctcagaccccctatagcagcctttggtgcctagcttctcagatccccatccagcagctaggccctcaaggaatgacacaaaaatgaagtgaatgcttcaccttccgtcaacatggcatgcatgcagtggg

SEQ ID NO: 845436 - DNA, 571 bp, Homo sapiens
ccctcgcaggccagagcagctgacatcacaccattttcggggctggcataacggcggcttcctctggatgaaaagtctccatgtcagtcactcttgaatgcttacctctcaagacccgcttgttgcttggtaacaattttcacggctgcattaaaaggacagttctgaaaagaggatgcttaaaacctgacagcaattacagagaaggcagaccacttctttcatttcagaaaccaatacacaagtggatcttcccattcagttagtattttattattatttaaatgagcttcccactctacatgaagcccagctttttgtcagcactagtttcacacccctcgtctctgagcctcttcagagaaggaattgcagccatttctggggagagaagcttcttccaggtgacttttgagttccttttggcttcagagtttgtggtgaacaggggaggtggtaattctacaaccagagcacagcctgagaggaagagctctcccawgcccacctccttcctgcaagaggccacccccaacagccatctctcctttaccattgtggctaaaaacag

SEQ ID NO: 845437 - DNA, 559 bp, Homo sapiens
tttttttttttaatctttactcttgtgtaaagtgcttcagctctggttggcttatccagccaacttcatgagaactggctgatggagyaactgccacctccaaggaagattccagagtcatcctcacatcagatccatccaggtgtagggggtgccagtccaaccatggggaaatcctagtgtgtctgggcatagtattataaccaaattcaggacacagaggaaaccagcgatgattgggattgaactgtgggagggtgcctgacatgttatcacaatctgcaccaccttagcaatcatttgcctaacaaagccattcagccaagaaatctcagccctcctgtctgtagtcaggtgcaccagaaccatccttccactcacctctcggccagtgaaagagaataaaatcccggcattccccaagagaaggaagtcacacagattaaagttcctagcaactggtctattgatagaacaacaggacagaatttttagcctaaaataatcatgatcaaccgtccttggcatttttcactcattgagtaatactcattggaat

SEQ ID NO: 845438 - DNA, 503 bp, Homo sapiens
gctgtacatgaagcatggatgggagacctcaggaaacttatagtcatggtgaraagtgaggaggaagggagcacgtcctgcattgctggagcatgaggaaaagagagagatggaagggggaagtgctacacactttcaagaaaccagatctcatgagaactctatcaccagacagcactaggcgggtgttaaaccattagaaatcaccccattattcaatcacctcccaccaggttctcctccaacactgggatttacaagttgacatgagatttgggtagggacccagaacaaaactgtatcaaatcccaaactccacttccatagccaagaacttggtggttattgattgagggcctcctaggggccagccccttgctacatactttgcatgaactctcttgtctcatgtgtaagtaccacaggctaatgtctgcacctgtgcaccctctataatgatatctctcattttcatgattgagcagactgtaatggttgttgtg

SEQ ID NO: 845439 - DNA, 320 bp, Homo sapiens
catgtttgccaggctggtctcaaactcctgacctcaagtgatctgccctcctcggcctctcaaagcgctgggattacaggcgtgagccactatgtctggcctcagtgaggggtttaaaccagctgggggctggtgctttgagctgtttcagtcccagatcctccactcactagctcagtttccccatgaaccagccagtgaggaacctctgtttcttccactatgaaatggggaaatgggactgctataagaactcagtcyaatagggatgtgtgtgaaagcctcttgtcaaaggatcccataacaaaaattattcatgt

SEQ ID NO: 845440 - DNA, 572 bp, Homo sapiens
caagtagtcattttaatggccaattccaatggcttctggtaactctgtggagaaggagggaagccactgaaaacacccctcgcagtggcagacctctycagtggaactcaactccttggtgaggccagccagccatttatgcttttctccctgacagtcgtggccatgtaaaattgttagcccgacagggatagggtcaccctctgggccccttttgctgtcaaaatcagtaggagccacttgcaggagccaggcatactaagcgtcctgcaacatctgagtggatagttgctgcacagtgaagatctgtcatgggccttgtaaatgtctattatctcagcttagcccctaactcagttttacatattaacacaaagtatttttaaacatggttttcatatatgctaaattttctaggaggggaacttccatgtaagccagaggaaggtcatatattgttttgttcagacctttaccaagagatgcccaccatttctgaaaatcacatcaccgagagcaaagctctccacctcggtcagtctgcatttgtagcagtctgcattccacatgcg

SEQ ID NO: 845441 - DNA, 663 bp, Homo sapiens
attattttgattaactctgactttgtgcaaaattagttcaccttctgaaacagacaggagctgagaagtctcagatgcattayagctgtgaacacggtattctggtcttagctgtaggaaaactcgcatgttttcaaaggaatcaaacacttctacgtcctcttcatcaactcctgtggccctgggtgagcccagctgcaatgtactggccttagaggaagaagtcttgctgaattccaaacctgggtgggcactgctggttgtcaggattctccgagaagagaaggtgctacatatgttcttaacttttttggcagaatggcagaggctaatgtgttctggagggtcctgtcccccatgctgtgtgctgctcacattccagtatgacacacttcggactgcaccaaaggcagaaggactgcaaaatgctcggtatcttacaagttttaatgacttgagagtagctgccattctggtgtcagtattgatctctttggcagtcagaatacagtcctcacagatttgaccaggcaatttcttgtttatatggtgcttgattagagctggacggggaggtgttccacaaaaactgcctggaaatcttcagcatatcacaagagccagggatcacaaatgactgggtcagaattggtgccagatact

SEQ ID NO: 845442 - DNA, 559 bp, Homo sapiens
gggctctctattcttgtccattggtctacatgcctgtttttatgctagtaccatgctgttctgattactatatgctgaatatctctaatctgaaaatctaaaatctaaaatgstcctaaatccaaactgacctatgtgatgggtcacagttgaaatgcagtcaaaactttgtttcatgcactatgttatttaaaatattatataaaattaccttcaggccatttgtataacgtgtataagaaacataaagaatttcatgtttagacttgggtcccatcatcaagatatctcattataaatacataaatattccaaagtccagaaaacctaaaatccaaatacttctggtcccaactatttcagataagtgatactcagcctgtatagctttatagtagctcaggaagtgtgatgtctctggctttgttctttttttttttttttctcaaaattgatttggctattcagggtcttttgtggttccatacaaattttaagatttttttctatttctgtgaaaaatgtcagcaaaattttgatagggattgcattcaatctg

SEQ ID NO: 845443 - DNA, 597 bp, Homo sapiens
tgatagctctccacatagccttagttgacaggaggctatgcacataagcaacataaaccagagtaggcccaagccacccacacmgccctggctgatgggaactacacatagagaactgcaagagagctcggcatagagtaaaagctggggctggaaaacagccttgagtttcaatgttacccagccaacacacagatccatcagcagggagtggaggctttcctggatggagctgcctgtgtacaatctctggccaactgaacactaagatatgctgacccaaaggtaaacatcaggcttaaatataagagaaaggaaaagctgctgctctactatttacgacagcaaagtcttggaaccaacccaaatgcccatcaatgatagactggataaagaaaatgtggcacatatgcaccatggaatactgtgcagccacaaaaaagaacgagttcatgtcctttgcagggacatggatgaagctggaagccatcgttctcagcaaactaacacaggaacagaaaaccaaacactgcatgttttcactcataagtgggagttgaacaatgagaacacatggacacagggagaggaacatca

SEQ ID NO: 845444 - DNA, 593 bp, Homo sapiens
tgatgctcccagaacgcacacttacaaccccacatgaggtcacatgagtagaggcctggctcatatccacctattctaccccctaagatccaggttgtttcccccaccccagctggcccttccttggggaaccagctaaggcattcaccttttgagttgaaaactcaaacgtttttaaataaatattttccctaagctgagcacatctgaaatactaacagtacctttcagaatagacacttagtggacacagagcagaatggtgagaggcataaagaatgaccttattttttactctctcttgaaagccttattaactccttcaaactgcatagtcagtcattaaattgcctcttcattttactactacttgcagcttctaaggaggcctgctttacagcatttggccaccagagtattgaggttcttaatttttaataattgagatgacttaccttgatagaagtggcctggcaagtgtgacaacattttataaagaataayaacgtgcatatactccatttgcagcacacactttaaaacaataataatgtgcataaaggggttgttttgtttcattttatttgttataa

SEQ ID NO: 845445 - DNA, 537 bp, Homo sapiens
caaaatttcttaaaaatgctgaaaccatcctgacagggttaacaagattacaagccagsctttaggcaggttagttaggcactgaccagggtgcattggtgcccttcaattcacttccctgcagctgctaactaaccaaaagccttgcagcacactgatcacctactccctgattgctcctatccacagaatctctgacactagctctttgtacccaggaattgcttaaggtatttttcagatcctgaattcccacaaaacagctgatgccaaactgtctagggatccccaccaggaagggcacagtggctcacgcctgtaatcttagcactttgggaggccaaggtgagaggatcgcctgaagcccggagtttgagactagcctgggcaacaaagtgagaccctgctttacaaaaaaaaaatttttttaaataaataaataaagacctccaccaagaaacaacactggaatgaagtttcttcatctccctgtcccatgacttcacctctcacttcctgaccaatcagaaatcccca

SEQ ID NO: 845446 - DNA, 624 bp, Homo sapiens
aaattggagtcagtcctctcaaaccttgtcactgctttatcatctaagtttacataatagtttaaatcctttgttgtcatttcaacaattttcacaacatcttcamcaggagtcgattccatctcaaaaaacggctctctttgctcatccacaagaagcagctcctcatctgttcaagtgttatcatacgattgcagcaatccagtcccatcttcggctctacttttcaataagtttttatttatttgcattattatttcaatagcttttggaatacaataggtttttggttgaatgagtggatggatgaattatgtagtaatatagtaataaaacagttcctggatgaattatatagggtgaattctgagattttagtgcacccatcacctgagtagtgtacattgtacccaatacgtagttttttatccttcaccccccatcccagcctcccatttctgagtctccaaaatccatcatatcactccttatgcttttacatacccatagcttagcttccatttatgagttagaacatgcagtatttggttttcttttcctaacttacttcacttagcataatggcctccagctccatcaaagttgctgcaaaagacatgattt

SEQ ID NO: 845447 - DNA, 610 bp, Homo sapiens
tctccatacttattgttaataagtgacctatggggagatgcttggagacattataaaataccctgtgcaccagtcactccccccagtggttttagtgtctactgatgactccattcaagtatgttattgttctgtggttgcttccaggcttttaaatgtgttctttgattcagcctgcagcaggctgttagggaaggctcttccttcctaacacagagtcccaaaacactgggcttcaagggaggtggtggtatatccctgtctacaaaatattttgtgcacttcctttttcctgagcaagatataaggtattctgggcatgttttgttaggacacctctttttaagacctgaaggtcttatggaaaatggcagccttccgttttagctgtcaaagtctacaggctttaactgtgctggctggtggctggaagtgggtccaggcaacagttcaaagtcagaagcctgagatctgtgtccttcagagsgctggtggcagcttgtgcctgggcatctcagccctggaggggagtcaggaaggagcccctgaaggggcgagccagtagctgactctgggccagtccaaggcccccacacacgacccaggccca

SEQ ID NO: 845448 - DNA, 614 bp, Homo sapiens
gaaaggaaatggaatgtgtggacatagaggctcctgagacacctctaaattgtctccttctctaccaaggccgtgttagccttggccacaccaggaaggacacagacatatatcaaagaggcttcatgcagtrtagcttgcccttccaccttctaccacgtgaggacacagcagggaggccctcacaagatgctggcaccttggtcctgggcttcccaacctctagagctgtgaaaaataaatttctgtttcctgtaaattaaccagcctgtgttattctgttatagcagcacaaacagaagaggacagttcctttcctgggctcagcaggggccagggaagaaccagaactccaactcacaggaggtatgtggacatgagggactctgggtcttgggacctgaagtggagatttggagtgagtgggagttgtcctgagaccacatacagggccaggactgacagctgagatgtttccttgtgtatgtatcccggcagttccctgccctccccaggctccaccccatcttcccttcctctgcctcaaggagagaggtttggggagtctgcaaaaacctcacattttcctcatcactttgtgttcattattatgg

SEQ ID NO: 845449 - DNA, 596 bp, Homo sapiens
tctccttcccactccattctatgtcattccactccatagactccctccccatccagccaggaccttgcacagagtctttccagagcttaagctctgtgcggcactggggtccctctacccttctttcaggttcttggtgccgacagaggaagagcaatgctccttctccctctaaaccatacgttctccactaggagggcattttaattgtttgtgcctgcagcccagatgaatggcacattcctgaatcatttaatgattccattaaaaggagaacattttaggattaaggaccatggactgtggaagagtgtaacacaacattcaactcattaagtgtagatgcagggaggagcccagagcaggtggaaatcagagaagaactgacttcacagcggcctctcagggccgatggtgcttcttttttacttctgaattatcagctctctttgtctctctgtctctctgtctctttctgtctatttgtctctgtctctctcttccctttcttttactctgattrtctcttttcctaattatctcttttttaatttctttgaaatgtttctcagtttctgtctgtggacgtttttttg

SEQ ID NO: 845450 - DNA, 611 bp, Homo sapiens
gatctgtttaggttttctgttttttcttggttcttcttggtatgttatatgtatccaggaatgtattcacttcccctaggttttttgccatatatttgttcctaatagtctctaacaatcctttacatttttgtattatcaattgttatgtctctgtttttgtttctgattatatttttttgagcattctctcttttttccttactctagataaaggtttgctgattttatcttttcaaaagaataacttattgttttgttagtcttttatattttttaaattctcaattctgatatttgttacttctttccttctactaattttggatttggtttatttctgcttttctaatttcttgagctgcattattaggttgaaatatttgaaatcttaatacatttttggtataggcatttattgttataaacttgcctcttagaactcccttagctgtagattttgatatgttgtgtttccattttmatttgttttaagtaatttttaaacttctgtattaatttctttattgatcaatgatcctttagaaatgttgcttaacttccatgtgtttatataatttccaaagttcctcttgttattgatttctagt

SEQ ID NO: 845451 - DNA, 306 bp, Homo sapiens
tagtcccagctacaggctgtggcaggagaatggcgtgaacctgggaggcggagcttgcagtgagccgagatcgcaccactgcactccagcccgggcgactgagcaagattctgtctcaaaaaaaaraaaaaaaaagatttttatggtatgtaaattacatctcaataatttctgaaaatgcagattcccaagtcccatcctgcagaaattctgaagcagcaaatccagatgggacctgagttctgaggcacactcagttttaagtaacattacctgtaagtgacagcattgcgattagtacctgga

SEQ ID NO: 845452 - DNA, 618 bp, Homo sapiens
acaggtgcatgccgccatgcccagctaactttttgtattttactagatacggggtttcactgtgttgcccaggctggtctcgaaatcctgagctcaggcaatccaccctcctcagcctcccaargtactaggattttttattttaaaaatccgatttttgaatttaaaagcaacattaaattcatgaaataaatcacatttggtcatgttgtattgtgctttttatatatctctagatttattatgttaatatttgtttagtatttttgcatctacatttatgtagatattggcttataatttttcttttttgtaatgtaaagtgagtcaggaaatattcataaattgagtcaggaaatattccctcctttactattctctagaagaatttataggattaatgttctttattctctaaatatttgggaaaattcaccggtgaagccatctaggcttagataatttttgtgtgtgagaaggctttaaattagagattcaatatttaaaaataggtatagggctgttcaaaatttttatttcttcttgtatccttttggtaagtaatgcttttcaaagaatttgtccattacaattaaattatccaagttttggcataaa

SEQ ID NO: 845453 - DNA, 622 bp, Homo sapiens
cccagcctgtattaaataggcctaggctttgtacaatacagaaacaggtacttgaggctcactgctggttcgttcttgggccagtcttattttctttcatcctaattgcgcagacagcatcggagctttgtcagctttacctgctctgaatagaagcacttttggccccccttgtcaaagactagggaagaaagcccgcgctctggttggcagcagtcttggattctcgcccccggccatactgtgcaatcacgctgtttattccactgtaacaatcagacagcgagagcagagcacctggtactccccggcccgggccttccttggcagctgacgggcaacctcactgccaggtggtcgcgcttcaattacattagctagccattctagggttaacgaggacccactttcttcagaatgccccgggaaaatcagttattcataaaagacagtatgccttttgttgatcattgaacaatgttgctgaaaatccattaaattaaattctctttattgggctgaataatgcaatagcaatagccccagctagaagtttgcatgtttatttaccaaatttctgaataatttatacatggatcckggctcttttatcagttagtgg

SEQ ID NO: 845454 - DNA, 567 bp, Homo sapiens
aaaagaacaaagggatgaagaagcacgaagcctaaagtggtgctaaacaaggtgatcgataattccctttaaaaccctcgagaccatctacgaaagcacctcgaatcaagtttcagttactcggtctgtggattcgctggctcctgacttcccctgcctttctccacaccggcttcttatcagatttcttgtcggtggcccactttcactaagagactgggaaggaggggacagatgaaacataattacgagtgtttgctctgcatcttgcatcaggcccacacatctgtggtctagagacacacctgtgctgcttaaagcaacagcctgattcctttctgtcctcctttctattcactcctgttgcatgtaggaaagaaatcccatgtaccagtctctaaagaatttacagtccattatggagaggagacacacacgcaggataaaggcttacatatgctaaggaaaatcaagatatatgtaaycacaagtcggatggcactaaaattaaggcctaaatatttcagagaggatttagggcagtggttctcagtcctgcctgcacgt

SEQ ID NO: 845455 - DNA, 686 bp, Homo sapiens
ggagatgtttggatcatgggcacggatccctcatgaatggcttagcgctatcctcttggatgaggggttctttctctagtagtttacatgagatccggttgtttaaaagagtgtggtatgtcccctcttctctctctctcagtcccactctttccatgtgacaccacctgctccctcttgattgtaaacttcccgaggcccttaccagaagcttatgctggagccatgcttgtacaacctgcagaactatgagccaattaaacctttctttataaattacccaacttcaggcatttctttgtagagataccaaaatggactaacacaccatcttaaccatttttttaaattagtttttgaaatagaatctcactctgtcacccaggctggagtgcagtggcgcagtcttggctcactgcatcctctgcctcccaagttgctggaattacaggagtgtacctccatgcccagctaatttttgtatttttagtagaaacggggtttcgccttattgaccaggctggtctccaactcttgacctcaagtgatccacccactgccttggcctcctaaagtgctgggattacaggcrtgagccaccgcacccagccagtcttaaccattttttaagtgaacagttaagtgacattaagtacattcacagaattgcacaaccatcattacta

SEQ ID NO: 845456 - DNA, 325 bp, Homo sapiens
taggtgaattcactcagtgttctttcttcctagtatttggctctccattcttcatcaggaaatgattattataatcaaccaaaattttgcaaacaaggtgggcatttaggtatgtaggtgttcagcattatttttggagaacagagcaaatccggtcattatttctttttattgaaataaaagtaatgactccttttctgtaggaaaaartaatttttcaaaataggctacatggtactgatgagaagttaggaagctgcatgatattccagtcagatcaggatcccagactcccatctttctggtccactatcttgatctttcc

SEQ ID NO: 845457 - DNA, 663 bp, Homo sapiens
ttataacatatctaaaggtaccatgtattagcttatggactacacttccttccaactatattattactcaacagttggaacttagttttgatgrtattactacccagctctgaattaatcgctgttgaaaatgctgttctacaagtaactgtcaaaacagaatttctaactccatttgatcactgggtgcacatttaaatctgtcggaataactctacctttattttgcaaatgcatacccacgcagaaagctttgttctaaaatactctattggaagttttatatttatatgcctgaaaatgtgagtgatgttaaactgcttacatgtcctggaatcgtgaggcggtgtgtttttgccttatgagataaagaaatatggtagttgaaaaagtgttacaggttaccaaaaaccttttgcaggaaaagattttaaaaatttgtatcacctctgaaatatttcaaccacagcagagtccattcagtgcccgtagcacagctagtttgcctttcccaagattacacacaactgtctttagattaatgtatactgctgactttggcaacatgggacagttatatttggcaatttcagtaaacatggtattttcctaagataccactaacttcattttggggtttgatttattaagaattgaaatgtt

SEQ ID NO: 845458 - DNA, 634 bp, Homo sapiens
atccacattcagattccagatttccaaaatagaagcttgcgtcagtgtccwctgggtcaggattctgcacctgagccagggatccacagagaggcagcatcacctggcaataagagcccacacctgtggaaaggagggcaggtctcagagaaggtgtaggctgggcagacatcccaaaagatgtctaatccagagtcaggaatctttggaacatcattgactgtgaagaggaccattgaacatcctccctccaactctccacaacttggccctattctcacctcctcccatgcccactgacgtcttgtgaattccccttgcacacagagaaacataactgaattactgttttctacacctatctaatcaccatctctgcaaatcctgcctcccaagcacaaatggtttttagtgtccacgtcattaccttgcctgggccactgtcatctcctcgctgcaatagtctcctaactggttttccttctctaatcttgtttgcctgcaatcccatctaaaaaggcaacccgtgtagtgttcttaaaacacagatccgatcatttgcttcaaatccacagctccctgctgcctacaggaaattgaaccaactcctcaactggccttcaacgttatccta

SEQ ID NO: 845459 - DNA, 502 bp, Homo sapiens
aagcttttcacaatgaattgtagactagtttcctgcagattatttattgtttcatgaataagtatcacaattttttctcctttgtgtctctgctcatccacctgaaatgaactccttccctgtctctacctgctgacatcttccccatcttttaaggttcatttcagataggtagctcttcacacatgatgcttacctcagtgcccatccaggcgaggcctttcttcctgcctttggctccccatcacgtggtgtggcaaggatttcgtagtggtaatgcccttgaataaaaagctcatgctcatttgtttgtttgcttgcttgttcatttatccatttatccatccacccatatgtccctccatctgcccatccatccatccatccatccatccatccatccatccatccatctatccatccactcacctgtccactacctactcatccmatacctttatccagcagattattattgggtgcttgctctgtgctggccctg

SEQ ID NO: 845460 - DNA, 604 bp, Homo sapiens
agtctcttacattgctaaaaaaccctttgtctttaaaagcatcaatcaatattaacagtgcttttaaagtgagattacattattttagaaagtaatcatgattcagaaaattaataaatgcttatgaatcatgcttatgtatttcattttaatctgtagtttggaataaagttatttcaaagagtgtttttggttattagaatgtttagctatgttatgatataacacttaaacttaatttcagtaacaacaaaacaagaacccataattttaggatctgtaatacagcctaggaaatgaggtctggtgggaatgcttccaatttagtatctttgtttttcagagaaggttatgaactctcttcaattaatccagatacagatagcttcgattactactgaatttatgtgaatgattatagtagactaatgagttaatctgttagcaacccattctgacctgtgatgtactaggccagttgctttatctgtatgagttagttttctygcttcttttagtgagagtgataatttctgtttgttgcaagggtaagtctgttttaattatggcaatttttttctgaaatacttacttttaaaacttt

SEQ ID NO: 845461 - DNA, 486 bp, Homo sapiens
gaacatggaatatctctccatttctttagtgctctgacttctttaatcacttctttaatttttctcatatagatattctaattttttttaagatttatacmtaagtgtttcattctgaggggtgctaatgtaaatggtattgtgtttttaatctcaaattccacttgttcattgctggtatataggaaagtgattgacttttgtatcctgcagtcttgctgtaatcactgcctggtttcagttttttgattttcttcttggatgatcatgtcatctgcaaacaaagacagttttatttttctttttatttcttgccttatttcattagctaggacttccagtccggtgttggaaagagtggtgagtggggatatccttggcttatttctgctcttagtgggaaagcttctagtttcccactgttaagtatgacgtttgctgtaggttttttgaagatactgtttatcaagttgaagatgttctccc

SEQ ID NO: 845462 - DNA, 636 bp, Homo sapiens
ccaacattcagctggactgtggtgggatccagatatcattccataaggagtggttctcggcaaatatctcacttgaatttgaccttgaattgagaccgtgagtcatacagaagcagaatctgagagktgctggccctcctcgcagggaacctgggaaattcagatctttctgatcccaacctaaattcaaatcctggcttccaaagccacttgctgtgtgaccttgggcaagtcacttcacctctctgagccttggtttcttcacctgaaatatgatgacaatcattagtcagtggaaggaagtcatttgctcattcaaacctatgagagttcacaacaactgggcttgattaaagagagaaagggagaactgctgtaatcatctcatcgcccctgctcaccatcctcctgttcaaactatcctttgacatccactgcccccaagaaagggaggatgcagctaaatgggaaagatttttgaaacagagattaactctcaacgtttgaatttccaaaggcctatttaaggggttttcagagtcactctggctacagctgttttctctttaatcactgacttcaggatttaactgggcctagtttgttgaaaggactcagagtgccaggggaagccct

SEQ ID NO: 845463 - DNA, 602 bp, Homo sapiens
ttttcaaacgtgtaacaatgcactgtgtgaggtttgtttttgttgttgttattaaatcatgatctcattttcattttagatcacagtcccctgggcgcccctccacaagaaaagttytgtgctttggtttgacttttgaatctgccagtgcactctgacaaataaaaataagcaggaacgcttgtttgtaactgcaattggaattcttaggcacatactttaagctgctttcctgaagtggagggaaggatttggaaaagttaatggggagtcccccaagataaaacagtagcaatggaaacttataaccttccttattgaaagaaaaaaataataaatgaagacaaggggaagggcttcctatagtttttgcaatcatgaaaatgacacttgtgacacatagtacactgagcaaaccaatttgtggattgagatgttttaattttctatgcgagaaacacataacaaaagtaaaaggccacccttgccttccggaggagcaaagggaagtttgtggggtgaggatgtgagctggaaaccttgctgggctgaagctgatgctgccatgtagcttttccagggtacaaatctcattccaagaa

SEQ ID NO: 845464 - DNA, 478 bp, Homo sapiens
cataagcagtaagatccccagtaacyggcccagcttgtgttattcttaaatcactgttgcagtggtgggagaagtaaggtgccctgatcagcagccctgtgttaattgtccccctggatctggggaagagtcaactcctctcacaccacatgaaccaagagtgaggaagacttactcctccagagacaaatggggatggtgtttcactatgaaggagaatgatccaagcaggcaaaaatgacagctctacaattattcccattttacaggaaattgtctcagtaagatgaagcaattttcacacggaaacaaagctattaagtgtgagaataagaatttaaatcatgacttccaaatatccaggaacaatttagtattttaaaaacctatatcaatagatcaaaagaaaaatgacagtgtcatcataaacgctgaaagacttttgatgaaagtcaatatcttttcttgatagataatc

SEQ ID NO: 845465 - DNA, 592 bp, Homo sapiens
tttctttttttttttttttcaaaaaaaaattcaaaagtaataatagatgttttgataaatgaatagctaccctgattgaaggcttgcattggcacagttaaaagcccttttactcatttaattcacacagcagcactctgaactaagtactattattattcccatctttcaagtgataaaactgaggcagggatgtgaaaccacttgcccaaagttaaacaggtaggaagaagcagagttagccctggaggtcattttgccttgctccagaacccattactttaacaacctcgctctcctgcctctccgcaatttaagtctttttagaattaaccatatgaaattgccaatcttgagtcattttctatttacaaaaagtggcaatttcacgtgattcaacctaatgcaaaattatagaaagtatgaaattcttcctcctgctgtcaaaaaatgtgtatttctagaactttccagtgcacacacctacaatggcactsctagacagacgtccataattttatattgtgttgtttacaagactgggaaaatatgctcaaaaatattccttggacaacaatgcacagatattctt

SEQ ID NO: 845466 - DNA, 590 bp, Homo sapiens
catctacaggtaccaactaggaagggtagtcttgaattaaatggctttagaacacgttataagagcaaattgaagcttccaggtattagaaccacttcaatcacagagcatctctgggttctatctgtggccagcatcaggtatctgtctgccctccccgaatggttcctctcatcatgtggatcttctagatggttttattcttccccagccagccaacctgaccaacaagcctgggtatattatgtatgtataaagttggttcttaaataaagtccatttctatatctaggtaagtaatgtcttcagactggcaatttcattgttatctagaaagagtgactctagttagcttctagtgtcagtttttctagcagcttctttaaaaaaaatcctctctggaacaaagcttccttgcaagcattgctgttggcaatattcctctttactgaaatgcttatccrgtgaaacttgggctgtgccagtgagcctgcaggttgacagtccttttgttcaacttctccattataagcaacctctctgatcacccttttaaaactaaagatcaaagaatcaaatgaggtcaggaa

SEQ ID NO: 845467 - DNA, 622 bp, Homo sapiens
gttgcgaaggcagacttttcatacaatactgaatagaagtgatagtagattactttatttctgattttcaaaggaatgctttccgtttctctctgttgaagataattgcgtattgtttttttttttaaatagtaacttttatcaggttaaggaaggtttcttctatttctatttaaaaggattttttaaaatcttgaattcatatgtttttatctaatgcattttctacatcagttgaaatggttgtatgaactcttttaatatgggtgaattatatttatagattttatgttaaaatatccttgtatatcttggataaactcaactggatcatgatttatcttttttatatgctagattcaatttgttgatactttgttatgatttttgaatatatattattgtgtaaaagtgagcctgtgattttctttcttgtaatgtttctgtccagttttggtgcctggttttgctctctccttagaatgagctgggaactagtcactcttgttttctcacctrtaatagcatctgggtccagtgttttttatgtgggacaaatttgaacttgtggtcaacctctttaattgtaagaatattcaggtcttttgttcttcctgggcta

SEQ ID NO: 845468 - DNA, 488 bp, Homo sapiens
gctatagtgctaactttatagagctgcaggagctacagtgagctacagtgatcaccgcactgccctccagcctcctggctaccagagtgagactctgtctcaaaaaaaaaaaaaaaaaaaggcttagctcctgagaggaatgggataggagagaaagaaaagagggaaagaggtgaagccagtgaaatagtcagaatctgtgcgatgtgagatgtgaccttcctcaggacctcacatctcttagattgccaggtgaagaaggcatgtgtgtgtcactagtgatgggactgagtgtggcatctgagttgagatgggtgaaatcgcctctacattgatgagttgtcccaaaataagtgaatcagagtcacagtcctgtgggaattagcaggaactgtgacaagggctttggaattccactgtccagagagttgggrgtttgcgttttgcaaggggcagaaaagatgcccgctgacatctgggttttacat

SEQ ID NO: 845469 - DNA, 631 bp, Homo sapiens
acataaaccttttgtaagttggattggaattacattgaacttgtgggtcaatttaggaacaaataaaatctttaaaacattcagtaatttggtctgtgaacatggtatatcccaccttgtatttaggctatttttcttttttctcaataatgtattctatgtataggtcttatgcacatctttggctagatttattctggagtattttatgctgctttaatgacatttaagttatctcgtttaaatataattttctaattctttggttctggcatatagaaatacaatttatttttgtatatggacttcctatgtaagaaacttgctaaattattctaattaagattattttggattttctaaaaacatttctctggagaaaaaaaggaaagcttcattttttcctttccgatccttaaacattttattccttgttgttctggttaaaacctctaatacaattttaaataaagaccttcttgtctcattcccaatctcggagggaaagatttgaatatttcatccttaagtatgggtttgcaatarattttttgtatatattcctcatgaaattaaagaaatttccttttattcctaatctgctggcagtttctaatcataagtgtgttag

SEQ ID NO: 845470 - DNA, 548 bp, Homo sapiens
tctgtcaatttttacctcatgtattttgacgtctgtcattaggtgtgtacgcgttaaggattattatgtctttttggagaattgactcctttatcrttatgtaatgccctttgttgtccctggtagcttctcttgctctgaagtctgctctgcctttcttctttacttttatttttttactcttaattgtaagatacctgttgaaaagtgcacataccataaacgttcatcttgatgaattttcaccaagtgaacacacctctgtaggcagaacgcagttcaagaagcagaatataacctggatcccaaagccgcctcgtgtcctctcttaacaaaacccctcctccatgggtagctattctctgcagtctaacatcatcaagtagtgttgtctggtttttatttttctttgttttcttttttcggacagagctcactctgttgcccaggctggagtgcagtggcatgatcttggatcactgcaacctccacctcctagattcaagcgattctcctggctcagtctcccaagtaaattactacaggca

SEQ ID NO: 845471 - DNA, 306 bp, Homo sapiens
agaaagaggatgattattccaacctcacaagattataaatcaatgcatgtgaggtccttggtaagctctaggctctayaaaagtgctgtcagcattaatcttgttacctcctcctcttcctttcatacttcctcctcctttatcatcatcatcaagtcagtgacttttcgggggacccaacaaaagcatgaggttcctgcctgtgtgagttggggtatatatgatgcaataacagcctgagctctggagctgaggacatgggatccagtcctggctttgcaggtttgtgacctggggcaagtactt

SEQ ID NO: 845472 - DNA, 598 bp, Homo sapiens
ataattcacttctttggtttacaattcagtgagtttttccacatgcacagcttcttgtgtccacccccacagtccgcgggcagaagcattccaactctcctgtgctctccccacctcaatctgtagcagccrtggatttattctgtgttcctacagttgtgcttctccaagaatgtcacatcaacgggctgatatagtaggcagccctttgtggctgcattctctcacataccgtaatgtactcagaattcaattcgtgggggtgtatgtaccaacacacaatcctctctcttgctgagtagtattccatcctgtggatgtgccacggtctgcttatccagtcactcactgaaggataactgggcgtttgtgattatgaagagtactgtgttctgcagcgggcaggcctatgcaaacagacctccaagtcagaggaagctgagaggccaagaggctgacaaatccagtttctcagaaagaaacatttactaggggcttatgaacacaagtcacatctgtgtttcaggtggcgttgagaagagatggtggatccctgtgctgcgccttcccagacacagggctcatagaccataggaaa

SEQ ID NO: 845473 - DNA, 598 bp, Homo sapiens
ataattcacttctttggtttacaattcagtgagtttttccacatgcacagcttcttgtgtccacccccacagtccgcgggcagaagcattccaactctcctgtgctctccccacctcaatctgtagcagccatggatttattctgtgttcctacagttgtgcttctccaagaatgtcacatcaacgggctgatatagtaggcagccctttgtggctgcattctctcacataccgtaatgtactcagaattcaattcgtgggggtgtatgtaccaacacacaatcctctctcttgctgagtagtattccatcctgtggatgtgccacggtctgcttatccagtcactcactgaaggataactgggcgtttgtgattatgaagagtactgtgttctgcagcgggcaggcctatgcaaacagacctccaagtcagaggaagctgagaggccaagaggctgacaaatccagtttctcagaaagaaacatttactaggggcttaygaacacaagtcacatctgtgtttcaggtggcgttgagaagagatggtggatccctgtgctgcgccttcccagacacagggctcatagaccataggaaa

SEQ ID NO: 845474 - DNA, 598 bp, Homo sapiens
ataattcacttctttggtttacaattcagtgagtttttccacatgcacagcttcttgtgtccacccccacagtccgcgggcagaagcattccaactctcctgtgctctccccacctcaatctgtagcagccatggatttattctgtgttcctacagttgtgcttctccaagaatgtcacatcaacgggctgatatagtaggcagccctttgtggctgcattctctcacataccgtaatgtactcagaattcaattcgtgggggtgtatgtaccaacacacaatcctctctcttgctgagtagtattccatcctgtggatgtgccacggtctgcttatccagtcactcactgaaggataactgggcgtttgtgattatgaagagtactgtgttctgcagcgggcaggcctatgcaaacagacctccaagtcagaggaagctgagaggccaagaggctgacaaatccagtttctcagaaagaaacatttactaggggcttatgaacacragtcacatctgtgtttcaggtggcgttgagaagagatggtggatccctgtgctgcgccttcccagacacagggctcatagaccataggaaa

SEQ ID NO: 845475 - DNA, 473 bp, Homo sapiens
cgagcagggtttgttcttctgtgtctggcctatttcacttagcgcagtgtcttctgtgttcacttatgttgctaggggctgagggagggaaatggggaaatagactcaagttccagttaggagaggtgaataagttccagagatctgctgaatcacacagtggttagtgttaccaatactgaatagtgcactttagaatatgttaaggggccagatctcacattaagggtttttattgcaaaataacaaactcccacacaggaacacaccagaatgtttagaggtgatggacatgctttgtcttttgattgtggtgatggcatcacaggtgcatacatatgtccaaatttatcaaaatrtataagttaaatatgtgcaatttttatcaattatacttcaaaaaacttctaaaaagtatagttaaagaatcaacttttcctgtaggaaggggaggaaagggactttatcatgat

SEQ ID NO: 845476 - DNA, 522 bp, Homo sapiens
aagtattttagctcctgttggaacgttttataccttcaataataaaaggctaaggtttttcactacctacaatatgcgtctcttgataaaaatttccagcctttatctcctcctcaaaggaacataatttaaatatgaataatgaaaaatacttccagaaacgtaaactcaataatgctttctgaggtgcaaactgcttaatgtgaaacttggatgcaacacaaaagaactgaatgttagcaaattatgcttcctgacttggcatgtaataaaattctcaatgggcctggcagctggtggcaggagggacgatggcagtgaggagagcatgactttttaggctatttgcgagggtgagtgcaggcaagatgttctggcaagcctttggaattaaaatggcaattctaaacaccttttcatcacatgctttaatattatacacattcttactcttttawggagatgaattttcagagagaatcaatgtgttaaaaagccgaagtgtaaatttattcctttgct

SEQ ID NO: 845477 - DNA, 562 bp, Homo sapiens
ggagcactttccaactcataaggccactattaccctgatattaaagccagacaaagatattacaagaaaagaaaactgtaacttaatatttcttatgaagataaatacagaaaatcctcaaccaaatactggcaagcgaaatccaacaatatataaaatgcattatacaccatgacaaagaaggatttctcctaggaatgcaaggtaatggttgcatctgaaaaccaactaatatgcacattatattaatagaataagggacaaaaatcacatgatcatctcaatagatgtaaaaacgaaatctgacacaaggcaaaacttattcatgattaaaaaaaaactcaaagaactaaagttaaaatggaactatctagccttacaaagggtgtctacaaaaaccccatagattatattatatttgatggtgaatgactaaatgttttcccccaagatcagaacagaacaaggacatttattcttaccaygtctattaacatcatattggaatttctagctaggttaattaggaaagagaaaaaaaaggcatccaaattgaaaaaga

SEQ ID NO: 845478 - DNA, 375 bp, Homo sapiens
aacataatacctactacatggtttaatccagcatttcttgagaaaaagaaatagggtttagtgtgaaattgctatttctcagtgaattcatgctagcttcttgtgatcacagattccttttaaaagtgaagcagaatgagtaatgtattccagagtcttgcctgtaacaggcatttgaggtgtctgctcccctcgtcaatgtttgctcggaagcaaatggaatttgagggattcccttttctgcaagttgttcatcagctttccactgtggtttcccagcagtgagmtgctccctgtggccatcctctgccttccttatgtgatcaaggacccctgtttgtctaacatgcatcgcagtcccctgcccactcagaa

SEQ ID NO: 845479 - DNA, 590 bp, Homo sapiens
atctctagttctgcttacacctttgagactattgaaacagaaaatctctctaccagagggctgagtaattcttaatgctgtctttaggttttattaaaaaggtctttgtcatcttttcttattagaattgtgattttttttcactcactaccttataaataagcctattgatttatttatgtcaagaagagcaaggtcttctctgatctttggccaaaaatttccctataacataatacctactacatggtttaatccagcatttcttgagaaaaagaaatagggtttagtgtgaaattgctatttctcagtgaattcatgctagcttcttgtgatcacagattccttttaaaagtgaagcagaatgagtaatgtattccagagtcttgcctgtaacaggcatttgaggtgtctgctcccctcgtcaatgtttgctcggaagcaaatggaatttgagggattcccttttctgcaagttgttcatcagctttccactgtggtttcccagcagtgagctgctccctgtggccatcctctgccttcyttatgtgatcaaggacccctgtttgtctaacatgcatcgcagtccc

SEQ ID NO: 845480 - DNA, 526 bp, Homo sapiens
aaaaaaaaaagatttgagaagcatctgtcagtatccaaaacagacagctgctcccataacgaggcttcccaggtggtctctgcggaggtgctgtcaccctgggctgacaagggctgctgcgggaggggctcggaattagggtgggaaggccggacagtctctgcctgaccctaggagcacagatactgcactgggaatgggtggggcagggaggggcacctgaccacccctccacgtgccctggctgagggccccaaggtggcatccaggcaccagacatctcgcttcctgggccttccctctcctggcctggaggtaggggtggggtggggggggtagtacatggagccaggcatgcaggctgccctgtggcacccaccggtccactgtctctccttcactgggccactccagggaggaaggtgtcttctctrggcctccgtggtgcagcacagctaatgggctggcagatgatggttctgagtgtgctgtctcaccacccggcctcaagccccaggatccacac

SEQ ID NO: 845481 - DNA, 473 bp, Homo sapiens
tggcatttacacaatggaggctgcactgccagcaggcaaaaataaccagttaattcagtggcttaaagaaaccaaacctacccacaacgcttgacctcccattgatccrtctgcgacaccggcagtggctaccatttattgagtgctgatggtgtcacctgggattgacttagtggtctctggcgctagttccgaagttgattctgtctggagagcttaatgcagtgttcagacctcagggtccgaacctgagggtcacccaaagatgagtgggacatagctgtgtgacctcggctgagtgctttcacctctccaacctcagtttcctcttctgcaaaatggggtggcttcatggcaccttcacgtggtgtgattgcgaggaatgaagggatcgatgccttgcaagtagaggagaaggggccggatacatcttagttgttatgttatttaatcatcttggcaaccccgggagg

SEQ ID NO: 845482 - DNA, 473 bp, Homo sapiens
tggcatttacacaatggaggctgcactgccagcaggcaaaaataaccagttaattcagtggcttaaagaaaccaaacctacccacaacgcttgacctcccattgatccatctgcgacacyggcagtggctaccatttattgagtgctgatggtgtcacctgggattgacttagtggtctctggcgctagttccgaagttgattctgtctggagagcttaatgcagtgttcagacctcagggtccgaacctgagggtcacccaaagatgagtgggacatagctgtgtgacctcggctgagtgctttcacctctccaacctcagtttcctcttctgcaaaatggggtggcttcatggcaccttcacgtggtgtgattgcgaggaatgaagggatcgatgccttgcaagtagaggagaaggggccggatacatcttagttgttatgttatttaatcatcttggcaaccccgggagg

SEQ ID NO: 845483 - DNA, 651 bp, Homo sapiens
aaataaacagtttagcaacctacatggaaatagaaactctgaacaagaagatttaaatgagaaaaagaaacttattttctgaaataaccagaagtccagagagagggaaggcttcagtcctgctgcgatagaggctctggttccattttagctgcaagtctctcggctctgccctgcttcatgcgttggctttgttctcaagctggcatccctcacatcataagatgctgccagcagcagcaggcgttcttgttcctctctaaggggagaaggagaaaacctctcctccaaccatggaacccaagtccccctttgcttagggctgactatgttaatttatgtcacatgcccatcactgaaacagaaatagttgcccagtgattgctatgagctggtgggctaaactgaaccaacttctggcaagggaaataggattaccacaactggcttaggtagattactgagggactctcccagttactatatctagggaggggctcagcttttccccagttasagcagtggcaggggtcctaggcaccaaaacaaaattaaggttctattgagaaagaagaaagggcaacagttactactaggcagccaagagggtccactgtgttactctttacacgaagtctcttgttaacatgg

SEQ ID NO: 845484 - DNA, 680 bp, Homo sapiens
tctccatctacaccttcaccagggatccatatcacccagtgcctcagctctaaatgccttcatgaggaccactcaaagtgcrtcttctgccctagtctctccttggactgtcagacttggatatccaaggatttgcccaggatctcccaaaaatgtctgccaggcacctcaatcctaacatatccaaaactgaacctcttcccttctccacttctcacctccctgttcatgggtgtgccctgagctcaggcctagaatgacttctccatctccaattactccctagccgagtacatccagtctctttgctttcagtaccatctacaggctgaggactcccaaatattcattcttcagcccagacctctcccctgaactcttgatctacattttctactttctatgcaacatctgcacctgattatctgagcggcatctccattctaacatgtcccaaacagaagtcctaatctctccccactctcacctccccaaatctagtctctagacatcctcatctcagtgcatggcaaacccatcctgtcagttgctcaggccaaaagccttggcataataaccctttacgaggttctctctcgcaaacccttcatttaatccaccagcatattctgtaggctctgccttcaagatcactgctcaccacctctactactaccacc

SEQ ID NO: 845485 - DNA, 630 bp, Homo sapiens
ataggatggagctctgtagcagatgtggtcagtaacctgctcatgcccaccggctctcactgttgctgtatatacccagggcatctcactgtctgagggctttctctgactgttgaaccatgctagggytatgtgcggggcagaccagaagtcttaaggagttaatagccccaggcatgaccctcaacaagagaggggcagagatgataaatactccaggttcctcatctctcaggtgggcaccaccaagttcccagcatgactgagcctcagctgcccactaatctgctccttagtcatcctgtagggctgccttcccttccctgtctcacttccccactcccccaccagaaacttctaagatcatctcccaaataaactacttatactcagattcttatctcagggtttgcttataggagatcccaacctaagataagtccttgaccaggtggcagtggggctacagagaagcctccaatgtaagacatatcagaggttggtgatgtttcttatgggaagccatgagacagctgggactatggtttcttgtactttcaaccagcgaaggggccacccaagatccacaagagatctaggttgatggacactcaaggaaaatgagcctgg

SEQ ID NO: 845486 - DNA, 601 bp, Homo sapiens
gacattaacattttccaattttttcttaaaaatgctatgatgggacaggtgcagtggctcacacctgtaatccctgcactttgggaggctgaggtgggcagatcacttgaggtcaggaattcgagaccagcctggccaacatggtgaaacctcatctctactaaaaatacaaaaattagccgggcatggttgtgcatgtctttaatcccagctactcaggaggctgaggcaagagaatcacttgaacctgggaggcagaagttgcagtgggccgagatcacaccattgcactcgagcctgggcaacaaagtgagactccatctcaaaaaaaaaaaaaaaagtacctattatgaactacgtgaaataatccttgcattatatattaggttgaactccatcaaattgatgtcttcatggctcaaaactatattatcaatttcatatgagtcaattaattaatattaacattattcctggagttatgttttctctaccacttttccatcagcccctagtccagattcataytgttctatttagtacagctttgtgatatgttttaatctggtataagtttgccctcattttaaataaaatgttc

SEQ ID NO: 845487 - DNA, 601 bp, Homo sapiens
gacattaacattttccaattttttcttaaaaatgctatgatgggacaggtgcagtggctcacacctgtaatccctgcactttgggaggctgaggtgggcagatcacttgaggtcaggaattcgagaccagcctggccaacatggtgaaacctcatctctactaaaaatacaaaaattagccgggcatggttgtgcatgtctttaatcccagctactcaggaggctgaggcaagagaatcacttgaacctgggaggcagaagttgcagtgggccgagatcacaccattgcactcgagcctgggcaacaaagtgagactccatctcaaaaaaaaaaaaaaaagtacctattatgaactacgtgaaataatccttgcattatatattaggttgaactccatcaaattgatgtcttcatggctcaaaactatattatcaatttcatatgagtcaattaattaatattaacattattcctggagttatgttttctctaccacttttccatcagcccctagtccagattcatactgttctatttagtacagctytgtgatatgttttaatctggtataagtttgccctcattttaaataaaatgttc

SEQ ID NO: 845488 - DNA, 600 bp, Homo sapiens
ttgtcttttttagtgtcattaacattggcctggtggttgcccctttcattttaatgttgtagtgtcttttgatttatgtttctcataaacagcatagaactacacttcatgtaattgtggcttttgctctaatccaaaaatatctggatatctagattaggtgactatgaggggtctatcacctatttattttttattgtgattaccattacattggacttatttctgtcacttagtgctgtgtttactacttaacctgcttcccctttgctgactttttttccttctctgacttctggtagattgcacatgctttctttttttatcttatttttattttttattttactttaagttctgggatacgcgtgcagaatgtgcaggtttgttacataagtatacatgtgccatggtggtttgctgcacccatcagcctgtcatctaggttttaagccccacatgcattaggtgtttgtcctaatgctctccctctccttgcccttcacccgccgacaggccctggtatgtgatgttcccctgcctgtgtccacrtgttctcactgttcaactcccgcttatgagtgagaacatgtggtgttt

SEQ ID NO: 845489 - DNA, 531 bp, Homo sapiens
ccaccgctgcctctgcattaaaactctttctaaaataaaaccactaascagccacgcggtcataagccaggatgctgctcctgcatctccctccttccagacagaactgccggaccctaatgttgctttccagaaggaatagggggaaaatgcattttcacatattttttaagtgtttttccctaaatgggcccattaaaatcagccagatcactgttcctccatctctgtagcaggcagaatcaccacgcatggagataggagcaaatttgtatttccagttggctctgatggggagattgcagttgttctagggaaaggcgatctctatccctgcagtactgcctcacaatttcaagaccactgcctcctcccataagattctgcagatgttgcactttgcttgttaaacctcttgctaaatgtaagaagtaaagttgttttacttgtaaatgtccgtaattcacctactgcaaagccctaagtccttgctgtttcattaccagctgcccattaataaccatcaaatta

SEQ ID NO: 845490 - DNA, 472 bp, Homo sapiens
attggaatataaagttgaggaaattcccccaaaagtgaagcaaaaagaccaagaaacagaacatcacagcgaaaagataagaaaaatagaagattatactaggagatccaataacccaataagggcarttctagaaagagagagaagacaaaacagaagggaaaaaaaatcagaaataacaggtaagttcaagagttatattgtacaacatggtaactatagttaatgacaatgttttgtattcttaaaaattgctgagagtataagtgttcttgccaaaaaaagataagcctatgggctaatacatatgttattaataatctaatttagccaacctacaatgtgtgtatatttcaaaacaatgcattgtacatgaggaaggaaaaggaaaaaagaaaaacagaaccacatttttctaaaacctgaggacatgattcagattgaaagaattgattgagtgcccagccaatga

SEQ ID NO: 845491 - DNA, 381 bp, Homo sapiens
ctcactgcaagctccgcctcccgggttcatgccattctcctgcctcagcctcttgagtagctgggactgcaggcacccgccaccacacccggmtaattttttttgtatttttagtggagacagggtttcaccctgttagccaggatggtcttgatctcctgacctcatgatccacctgcctcagcctcccaaagtgctgggattacaggcgtgagccaccacgcccgcccaagcagtgcttcttacttgccgggttctttctccacatccccactggaagtctggggactgccactgagctcttgagtctgatgcacgataatgagtttttcttcccaacacctgagctgatgctgtagccaaaaaccaggtcccctcaag

SEQ ID NO: 845492 - DNA, 624 bp, Homo sapiens
ttgaaggccagttgaggagttggttcaatttcctgtaggcagcagggagctgtggatttgaagcaaatgatcggatctgtgttttaagaacactacacgggttgcctttttagattggattgcaggcaaacaagattagagaaggaaaaccagttaggagactattgcagcgaggagatgacagtggcccaggcaaggtaatgacgtggacactaaaaaccatttgtgcttgggaggcaggatttgcagagatggtgattagataggtgtagaaaacagtaattcagttatgtttctctgtgtgcaaggggaattcacaagacgtcagtgggcatgggaggaggtgagaatagggccaagttgtggagagttggagggaggatgttcgatggtcctcttcacagtcaatgatgttccaaagattcctgactctggattagacatcttttgggatgtctgcccagcctacaccttctctgagacctgccctcctttccacaggtgtgggctcttattgccaggtgatgctgcctctctgtggatccctggctcaggtgcagaatcctgacccagwggacactgacgcaagcttctattttggaaatctggaatctgaatgtggat

SEQ ID NO: 845493 - DNA, 618 bp, Homo sapiens
caggctggagtgcagtggcgtgatctcagctcactgaaacctccgcctcccggatttaagagattctcctgcctcagcctccagagtagctgggattaaaggcacctgccaccatgccaggctaatttttgtatttttagtagagatggggttttaccatgttggccaggctggtctcaaactcctgacctcaagtgatccacccgcctaggcctcccacagtgctgagattataggcatgagccactgtgcctggcctgaatgcttttaaaagggacagttagactcccagatcttccccatcactttggtcagctaggcatctacccttttccatcccaagaaaagacaaactaggatttcctctgaaggctggaatcaggggaacctggatttagagattccagcctaactgtggctgcaggtcatgccctgaaaacggaattgcaggaaagtctacttataaagcagcgaaatgctggcatcttcctggctcagcttcyagaatgctggtggccaggggcctgaggctggaggattcttctcaggtagggttgctggataaaataccggattcattgttacattggattcagataagcaacagatacttttttc

SEQ ID NO: 845494 - DNA, 610 bp, Homo sapiens
cattaaaaaaaaaaacccaagggtattctaccttcaggtacagctggatccgggactcaaatgatgcctgtatgtttctgtttgtctctccactcagctctgagactctctgctcttctttgagttttggcttcattcccattcatgcttagacagggtttctttgcatcgtgggaaacagggtcctttgcagctctcacttctaagaaagtgagaccctccccctcctggcattgaatatcaaatttcagtgaagattccgattagctcttcttgcggcacgtgcccactgcttgagccaatcagcatggaggggaaatagggtcttgtaattgggtcaagtgcctactcctgcagccctgcttcggatggggggagaattgatagcgctgcaagagaagtgtggggccaggcaagccagcagaggccaggccatcgattacaaagtagctctgtggcaatcaagtccttcatccacattcccagccccagggaaatcccagtctaagcaaaggacatcttggaggaggtggcrcctcacaccttctgaacctttccttttggctctgcatctgtgctacttggtgacaggtgcatctcttgtgacagc

SEQ ID NO: 845495 - DNA, 599 bp, Homo sapiens
gaaaaaagatgttaaactagacaggatccatcgtktccttgtggcattttgatggaggccttcacctcaacagtgagttaagcctagagtatgaggatgagttctgtgcattagccactttaaagtttgtttgtcgttactcagtatacaacagagaaaacctcaaaatccctcttcacttctcttccaactctgcttttcccagtgtgagtagaatcaaaccatatgtactgttcagggatctcctttcttttcaattcaaccatgtgttttgggtgctcttgttctgactcatgaatctgagaactcttcccacctcaatcattagagaggcagaggattgtagttgtgaaaagtttgtacattggagtctggctttgagtcccagttttcccgtggacaggtcatgtgaccttggcaaaataaccacctcccatgcctcaggtgcctcatctgtgaaatggggataataataacacctacttcaaataaaacaatgcaaggaatgccctagaacaaacgcctggcacatagtaagttctacccaagtatttattattataataattgtataaacatttaacgacttccttaaattg

SEQ ID NO: 845496 - DNA, 527 bp, Homo sapiens
taactgaatcttctttttacaaaaacttatctgttttgtaatggcaaataagtgttattccatattttagtatcagcatcacccaacctttagtagttgtcgggtgaaaggscaggactgagatctggaggaaggagttccctgatcaattaagaatggccgcagtgtgcacctgagcagaagcaggggaaatggcagggctgaaagtatgctgggagatatcgtttgccatcctggacttatgttgtcaaaatgtacaaaataattcaaatgcaagtgcaaaacactgaaaacacacccaacggaatttaaatctttcattgatgattcaaaggaaacttcaagatattataagataacaggctcatcatggacatgaacggaagaactaatgaaacattgtgtttggttgagttctgggtaagcaaacatttgctgtgtatcaaatggctgtgtgtttaaataaaagtgcctttaattgagaaagtatatacagaggaaaacattcccaccattttcgacagcat

SEQ ID NO: 845497 - DNA, 602 bp, Homo sapiens
cagtcttagtaaaagccagatgttttgagtgttaataaatgatctctgcttttaggattcaagggtacaaaatgaatatgaagtaacattctgttgctgtttgaaaatgccaraacaaacattttaatagacgcaataactgaaattattgtctggtaccagaaccactgttttcttattttagtagaaattcagatccagggaagcaaatctcttacagtgagtttctgttacagctagtcctcctcgctttgtgacagtagaagaacttctagagacagcgagaggcgtcaccaacatggctctagcccatgaaattgtagtaaatggagactttcagattaaaccagttgaattaccagaaaacaggtaaggtggttgctaaattatcttgcttagtagaacactgtcatttcccagttttgaaaatgtttccttcagttgataccaatatattcaaacgtatttttccttttgtacattattgctaaaaaatattcctgaacaaggaacaacctaaaaatcaaataaaagctctaaaaatcttttgtgaaagtctgcctactcagtaggatctagctgcctcatcttgtgttttcatt

SEQ ID NO: 845498 - DNA, 641 bp, Homo sapiens
ttttatctttgacccatttgttgttggtgagcatgttggttaagttccatgtattcatgaattttccaaaacttttcatgttactgatttctacttttattcatttgtgaacagaaaagatagctgatatgatttcaagcttcctaaatttgtttatacttgtttgtggcctaacattctcctggagaatgtttcatgtgaactttagaagaatgtgtatcttactgctgctggattaaattttctgtatttgtctattaggtctatttggtctaaagtgttgtccaaatccattgtttccctacggattttctgtctagataatttatccattgttgaacatgagtgtcttgaattcatctatcattattgtcttgcagtgtatctcatacttcagatctattaatatttgctttacatagttaggtgcgccagtgttgggtgcgtacatacttaaaattcttatgtcctcttgatgagttaacgtctttatcatcatataatgaccttctttgtctcttcttacagtttttgacttaattttattttgtctgatatgagtatagtcacttctattttcttgtggttatcatttggctgggatayctttttttaattatttctttcctctcagtttatgt

SEQ ID NO: 845499 - DNA, 636 bp, Homo sapiens
acatagaattattgtgacaatataaaactgatactttaaatatattcattacatttcagttgtgtgctagacatggtttattgtaaaaaattagaagcttcagattacaatatctacaagagatattgtatcaacactttgctaatcaaagactagaggcttattatcttgttagttatgaacttagctggatcaaggctgggttaaagtttcattaaaactttgtctatctctggttagttcctgtccccaagaatatggatttcaagggtttatttgaaatcatgatgatttcggctcctcagtacccagaaatctggacctttggctttgattctcagagaaatcacacaccccttggtcaactacctgtcaggggagactctgaaaactgcccatttgaagttagtccaactcattgattctagaacatacgacttatgtaattattgtgtggccttagagttgaggaatttttttttgtttgttttttgtttttaggtctatagtcttcctccatgaacagcttcagaatgtggcaaatgccttaaaggagatgcctgckgggagtttaaagcccctcaaatctctaattttgtcaattctagccaccaatggttctactatttctatctc

SEQ ID NO: 845500 - DNA, 610 bp, Homo sapiens
ttctagctagcagcctatcaatcttatttattcttcaaaatacaaacctctggttttgtcratcttctgtctagtttctggtgtctcaattttattctgttcagctctaaattggttatttcttttcttccgctagctttggagttgatttgctcttgttttgctagttcctctaaatgtgatgttaggggggcatgtgaccaggcactagtgtgtgtgcaccatcttctgcctcctgtccccctaaaaaataaaaattaaaaattaaatgtgatgctaggttgttaactggagatctttttatctttttgacctgcatgtgtagtactataaactttccttttaaggtggctttaactgtgtcccaggtactctgatatgttgtacctttgttttctttagtttcaaggaattcttggtttctgccttaatttcattcattgtttacacagaagttattcagaagcacattgtttaatttccacttaattttatggttttgagtaaacttcttagtattgatttttatttttgttgtgctatggtctcagagtgtagttgttatgatatggctttcttaaatttgctgagaattgttttatggccaatt

SEQ ID NO: 845501 - DNA, 608 bp, Homo sapiens
gagttttaatttgcattaatgaattaaagctccatagggagcttctcatcttatttgtttatatctgcctcttcacggataggtcaatttccctgattaaaagtaagaggcagccraaccctcctgtggccattcatacaagtccctatttagggaacaagtgattatgctacttttgcatggtcaggatactgtggctgttgaacaaatgtcactgggcaggcagtgcctcaaatactggtaatgctagaggtgtgtttttggtaaacaggcagagtatgatttgccgagttccttttactttttgtaatctttccttagagcatacctgtgttgggttaacagtgtaaataatagggtgtttattatattgtttattaatattaggctgttaactgtcagtggattattctggtctgatgtaagcttatgcaatggagaatgtcttcatgttacttatactaacattattgtgtctattaagtaatagattagtccagtgtgatgttaggagttcagtagagtgattagaatttaagatagatgttgaacttaaacatgttcttaattggtggctgcttttgggccaactgtggtggtaatatttt

SEQ ID NO: 845502 - DNA, 570 bp, Homo sapiens
tctccctgcctaccataggggcccagtcagatagtgagctcccatcctaccatcagaatgacgtgagcctggatcgagggtacacttccgactcagaggtctacactgaccatggcaggccgggcaagatacaccgatcagccacagatgccgatgtggtcaacagtggttggttagtggtgagtgacaatatgggcagcaattgagtctctcctgcttgacctgtgggaagaattcctggtcctctgcaaggacattcacacaggggccaagcctgtgtccccagctcctctgtgtactttacaggttgggaaggatgacgttgataactccaagccagggcccagccgcccaggcccttcacccctgatcaatcaatacagcctaacagtgggactggatttggggccacacgacactaagtctctgcttaagtgtgtggaatcgctgtccttcatygtgcgtgatgctgcccacatcacacctgacaactttgagctctgcgtcaagactctccggatctttgtggaggccagtctgaatggcggtgggtcagctgatgagggggca

SEQ ID NO: 845503 - DNA, 639 bp, Homo sapiens
tgtgcaaatatctgcagctgagcagctgtctctaccaacggtaaagatacgaaactcccagaagtagaaaagccatgttcagggaarctctttctacccgacaccttgagtcccaccaagtttcccagccttggagttcagacctgagagagagctcagggaggtcatttgctccagcccctgcttccaaccagccacaaggtcatctccattttatggaaggaataactgaagcccagagaagttaagggacatgaagccccccagcaggcagtggcaggtagaatgcggcttctaagaacagcagctccctcacacagtctgcgtgccagactggcctgctctggccacgggtggccgtggggagctggggtgcctgggccacctctaacagccatcagcagctcctcaggagagcaggcatctccccctttgtcaaggctccttcccccaatcctaggactccagtgtcccagggtcctgtagatgggataggaggggagagggcgcacatgccctgggaatcctggagtcttccagcaggatgacttcctcttgtgtgctctcatcttcagccatcctggccagtggctggcagcccccaaagacatgggggctcactacctcctgctgctcaag

SEQ ID NO: 845504 - DNA, 614 bp, Homo sapiens
caggttctggacatctgaattgtttttctttagtaagtatgcttacccaagtttggagacccctgggcctcacagcccctagcctagacctcagcccaggaggcttgatagataagataatgtgtgtagatgagtgagcatgaggtagttactctatgagattggcgtactgtgtataggcacatgtgagtaactgaatacacatatgttaatgcatgtaatgctgttggcttgtgagagcatgagaaatcatataaaaaacattggggacttccacctctgcaaagagaccaaatgaagatggagtgaaacataaataaaaaggaaatgaaaagcctgggtgcggtggctcacatctgtaatcccagcacttagagaggccgaggcagatgtattgcttgaggccagcagttcaagaccagcctggccaatgtggcaaatccccatttctactaaaatacaaaaaaatttagctgggtgtggtggtgcacgcctgtaagcccagctactcgggaggttgaggcaggagaatcacttgaacctgggaggcagaggctgcagtgacctgagatagyggcactgcattccagcttgggcaacagtgagattccatc

SEQ ID NO: 845505 - DNA, 592 bp, Homo sapiens
aaagtcagccagagcagaacaaagctttaatcaattctctgtttcttactgaggttggttttgcttcagtgggcagaaatctgattatctctaacaggctaatagaaaagtttctataaaccgataacagttactggctgcattgcttttcctatttcagtttcctcactgaaatatgacttcttcccttcttccactaaaaggctaaaaaagtgttagatttaactggaaatgagtatcaggatggatatgagcttagaaaatgaaattcaacatttattagttaattccacagaaactatgattgcttatgatatgtcagacattgtgataaacattgaggaatccaaagatatttagagacctctttaacctctagtgcttcccatccagcatgaagacaaatgaagaaaatacaatccagtgctatggcagaaagatgaaacaaatttcttctattttcgcattattttgattttaaaaaaagactacaacaaaaaagtgaygtaaatgacatggtttttccagctttgaaattacagtctctctctttactttttcttctctttattaaagttttagcaaacaaaca

SEQ ID NO: 845506 - DNA, 625 bp, Homo sapiens
ttcttcccttcttccactaaaaggctaaaaaagtgttagatttaactggaaatgagtatcaggatggatatgagcttagaaaatgaaattcaacatttattagttaattccacagaaactatgattgcttatgatatgtcagacattgtgataaacattgaggaatccaaagatatttagagacctctttaacctctagtgcttcccatccagcatgaagacaaatgaagaaaatacaatccagtgctatggcagaaagatgaaacaaatttcttctattttcgcattattttgattttaaaaaaagactacaacaaaaaagtgacgtaaatgacatggtttttccagctttgaaattacagtctctctctttactttttcttctctttattaaagttttagcaaacaaacataagaaaaatagattaagtgataatattttacacaccatgataaggcaactgtgtcaataatataaggcactggaatcatmaaaaatctctgaagttcaaacatacttcataaaataatgagaggagttacattttttaaaaatagtaacattttctttagggtttatatcttatctgaggtcaataaaatactagaaacatcaaacaagaat

SEQ ID NO: 845507 - DNA, 645 bp, Homo sapiens
atagtaagtgaactagtaagatgytacaatcaagtcaaagcagaatccaaagaacagatacattataaatcaagaatattaaaactgaaggaagagaaagaccctctcatactgttttatattgttttatactcagtatctgttttaaggaaaaaacaacaaggaagtaaaaccaaagacaggcagcccagcgccagggccgaaacaagacctggggctgcctggcctaaacccagtagttaaaaatcaactcatgacttagaaactgatgttattcatagattccatacattgtatagaagaatattgtgaaactccctgccctgttctgtttctctctgaccaccggtgcatgtagtccctgtcacatacctcttgcttgctcaaatcaatcacgaccctttcatgtgaaatctttagtgttgtgagcccttaaaaggaacagaaattgtgcattcagggagctcggattttgagaccgtagctggcagatgctcccagctgaataaatcccttccttctacaactcagtgtctgagaggttttgtctgcagctcgtcctgctacaaaatgaatgggtggatgtccacaactggggacaactgaacctccaatagatagaatttatatgtctataggtaagaa

SEQ ID NO: 845508 - DNA, 546 bp, Homo sapiens
ccatacacacctaaatgcctggtaagatctttgccagctcactcacatgattccaagatagggagcttcccttgattctgagagtaactcagcccacctaaatggaggaagcaagggccaagcacaacctcyttttttttttttttttttttttttttttaagacagagtctcattctgtcacccagtctggagtgtgcagtggtacaatctcagctcactgcaacctctgcctcccaggttcaagtgattatcctgcctcagcctcctgagtagctaggactacaggtgtgcaccaccatgcctggctaatttttgtcattttagtagagacagggtttcaccatgttggccaggaggctggcctggaactcctgacctcaggtgatccacccgccttggcctccgaaagtgctgggattacaggcgtgagccaccacgcctggcccaagcacaaccttttagggtcagccacctgaagtggaatcctgcattggccacttactccctatgaatcctagggccagttagggatccctgggttttc

SEQ ID NO: 845509 - DNA, 593 bp, Homo sapiens
ggagcctgcgcggtcccttggatcggtccgctcggcacagcagtacggggaagacggtctgagccagaaccgacccagggctcgcgagttggcccacaattcccagtctgcattcgagcactgagctgcgacctgcgggctggccttcctaaggacgatgctcctgaatggacgcctggagtcccacgggtgacaccatgaaatatatcaagttcagttcttacctgtagttgtctaacgaggaatgcacacattcgcaagtaggtgttacagactccagttaattgtctcccgtcgcgcgcattggctcagcctgtggttaaagctgctcaggaggctgaggcgggaggatcgcttgagcccgggatgttgaggctacaatgagctgagatcacatcactctgccccagcccagtgagctgagatcacatcactccactccagcctgggtgacagactgagaccccgtcttaaaaagaaaaaaggccaagcgcsgtgcggtggctcacgtctgtaatcccagcactttgggaggccgaggtgggcggatcacttgagttcgggagttccagaccagcctgaccaacatggag

SEQ ID NO: 845510 - DNA, 603 bp, Homo sapiens
ccatcagagaatactataaacacctctacacaaataaactagaaaatctagaagaaatggataaattcctggacacatacagcctcccaagactaaaccaggaagaagtcgaatccctgaatagatcaataacaagttctgaaagtgaggcagcaattaatagactaccaaccaaaaaaagcccaggaccagatggattcgcagccaaattctaccagaggtacaaagaggagctggtaccattctttctgaaactattccaaataataaaaaaagagagaatcctccctaactcattttataaggccagcatcatcctgataccaaaacctggcagagacacaacaaaaaaagaaaattttaggccaacatccctgatgaacattgatgcaaaaatccttaataaaatactggcaaaccgaatccagcagcacatcaaaaagcttctccaccaagatcaagtcggcttcatccctgggatgcaaggctggttcaacatacacaaatcaataaacataatccatcacataaacagaaacaatgacaaaaaaccsacatgattatctcaatagattcggaaaaggcctttgataaaattcaaca

SEQ ID NO: 845511 - DNA, 614 bp, Homo sapiens
ctccccactgaatggctctttctccccttctttgagctgggagtagaggaatgcagtgactcccagcacacctaccatcctgcccatgaacatcacaagaccstgttcacagggtggactctaaaaataaaattccttgtgccgctgcctgtgcctcagtttttctgcaggcattctgcatgtttccgctgcttgtttgttcaaagccttccagctacacacacagaagaagggcccgtggacatgaaaaagagctcacatctgtatctgctacttaacaatattttcaataaaggcatagataatgtcttttttggtagcaagaaatttaatctagataattccgaggagagttagcataacccagagatttcttagtcacgttccaaagtctcatcctaacgttagcttaatgtctaacattgcttctcccttaaacccagattgattctgcttatgggatgttagttggtaaggagcatgcatagcctggaaacagggtcaagagaagaagcaggaagactagttaggagacagctgcatgggtccaggtgcgaaatgctgatgatgtttgaactaggatggtggcagttttggaagagtgtcagatactt

SEQ ID NO: 845512 - DNA, 613 bp, Homo sapiens
caggtaaaggcaaagacaggataccttcaattcgttcggatcctatctttcgttcacctttactgattaggtgtcctagatattttacctcagattctatgaattggatkttgttctttgagacccgtaatccttgtccccttaggaaatttaggaagttaactgaaattgctgttacttgatccttgttatctcctgaaatgagcaggacatctacgtatttgagtaggcatatggatgaaggcagggagaagttttctaggacttgctctaaaatatgaccaaatagatttggggactctgtaaaccttggggcaagactgtccatcgaccggagtgagggtcctctcactcaaaggcaaatttgtcccagctgtcctctgctaaagggcaagcccaaaaggcatcatttaaatctgtcaccgtgaaccattggtggttatgcgggattctactgaaaatggtgtaaggattgggaacaacagggtggatggtctgaactatttggtaaatagcccagaggtcttgcactagctggtatgacccgtctgacttccttacaggcaatattggagtgttataaggggacatacagggttcaagtctttcaatt

SEQ ID NO: 845513 - DNA, 439 bp, Homo sapiens
gctcctccccgtcttctggacctctaaagccgggaaggcccaaggattccgatgaccacgctttgctctcctccatcctcactccacacagccggtctcttgacttccaatttcctgtctctccagatggaatctccagtaggtgccagtcctatggatctaactgcccctcaacaaaaccacctgaatgtctgctcacatgcagaaattaacttacccagaaccaaaccttgatttttttaccccacaaacctgctactctctgaggcttcctcagtctgagtaaacgaccacttcattcttccaggtctttgttaggccaaaggcctggagctttccatggctgtctttctctacactggcatctccctagactctacctttaaagaacatccaaartctgaccacctctcctgccaccatgaccaccctggtacaa

SEQ ID NO: 845514 - DNA, 529 bp, Homo sapiens
tactgtcctctacaaccaaatcaagagtcttttagtccgaattcccctccccaatctttcacgccattgtgttggcttctgccaggatttttactctaacttgattttcaccctcagtattagttatgattattaccgtggtgtttatgtaaccagtgtttactttaaactttctaaatttatgcagaatttggggctcttctttcttatattttgggcctttcttcttggcacaatttccttctacttgacgagcatgaggagacgggggcaatcagcccttttggctcatctgaaaatgtcctttgttttgccttgttcatgagtggtcgttcgtcctgatgcaccttctgacccctcatcccatagctattacatggccaccctgtggcaggcattgttttagggctagggatmcagcagtgagcaaatttgtgaaaagttcttatttcatgacattttattggagggaagcataaaataatcaggtaaaaataaatatcaatataaaaatcagtctctatgaaaa

SEQ ID NO: 845515 - DNA, 563 bp, Homo sapiens
tttgtggtactgtttgggacttgttttaatgattacattattactcgtatgcttcctatggtgttattcttgaattttttatactctaatttcactaaagataaggcccagcgaaaaggctttcaaagtactctctgtgggttcccctgtttgagcctgtgggagtaaggcagtggacagcacactctgagaactgtgcgttacaaattctatttaatttgatattcacaactatccccttaggatctgtattaccttcattatcatcatctccattttgtataaggcatgaggaagttagggaagtcatactactagtgagacatagattcaaaggtggactaagtggctccaatacctctctgtgttctttccattacatcatacatacgagtaaatagcctgtccatgttgctgtaacttctactaccaaaattcattatttacttttaaattgtgttcaaaagggtctatgtatacaattagttcaatacatatttactttttaggaagcattacagtacagttactgttgaaamacatgccacagaaattggttcttc

SEQ ID NO: 845516 - DNA, 564 bp, Homo sapiens
tacatacgtgcatgtgtctttatggtagaatgatttatgttcctttgggtatatacccagtaatgggattgctgcatccaatggtatttgtatctttaggtctttgaggaatcaccacactgtcttccacaatggttgaactaatttacactcccaccaacagtgtataagtgctcctttttctcttcaacctcgccagtatctgttattttttggctttttaatcatagccattctgactggtgtgagatggtatctcactgtggttttgatttgcatttctccaatgattggtgttgttgagctttttccatatgattgttggcgctgcatgtatgtcttcttttgaaaagtgtctgtttatgtcctgcaaagcactttcatactcactttctcataagattcttagaaccactggtgagttaggatgtctattattatcatctctatttaacatcaaagwtattgaagttcagtggggcttaatgccttgccatgagccaaagctaggaagtggtgcctctggcttttaattccaacctctttctccaaatccccacctga

SEQ ID NO: 845517 - DNA, 593 bp, Homo sapiens
gcttaatacctgggtgataaaataatctgtataacaaaccctcatgacacaagtttaccaatgtaacaaacctgcacatgtacacctgaacttaaaagttaattttttttcaaagggaaaaaaaagtgggtaaaggacctgaacagacatttctcaaaagaagacatacaaataggtacatgaaaaaatgctcagtatcactaatctcagggaaatgcacattaaaatcacaatgagatatcgccttacacatgttagaatggctgttatcaaaaagatgaaagataacaagtattggtgggtctgcagagcaaagggaacccttatacattgttgttgggtatgtaatagtacagctattatggaaaacagtatggaggttccttacaaaaaccaaaaatagaactatatgatccagcaatctcatatttgagtgtatatccaaaggaaatgaaatcaatatgttgaagggatatctgcactcccatgttaattgcrgcattatttacaatagccaagatgtggaatcaacctaagtacccatgaatggatccacagatgaagaaaatgtggtatgaatacacaatgagaca

SEQ ID NO: 845518 - DNA, 569 bp, Homo sapiens
actggataaaatttctatctggttaagatttcatcacttcaagctaaagcggaaggaggtttttatattgatattggaaaagtccttgrttgtattggatgccattattcttatctctaaacatgaactgatgtcaccatttctttatatcagtctcagttttgataacaaattgactctcttaaacttcttaagcagattgataattcatgcacttccttgtatccagtgactctaatcttaaacaaatggaacataaaatactgaaccaattagcaaaatgaactgtttcttaaacgtttataacaatctatggatcttattgtgcctaaatagattaatcattttaatttttttaaaaatttaaaatttctctaaagttttcttttgctttctagatacacaaattacacacacacacacacacacacacacaaacacacacacagtggcaattaaatattcgtgccttgaaaagtgagaaaggatacagatgtccttctgcctagtagacctgtttatgagaggtcctgtagactccctgtactcacttgactcccaaattcatt

SEQ ID NO: 845519 - DNA, 312 bp, Homo sapiens
agtcccagtgtgagcaagaaggaagaartatgacctgggctacagatcaaattttatgttaactaaaatttttccctcacagccacatgtcattaacatcctaaataattatattcaactggtagaacatggatttgtatgacaggactgccgcattgtaaatagtcaggaaatctaaactgaccttgatgagcaagtggtaaaggcagggaacaaaatcaaggttcctgtcctgagtctgctattgacctctgaatgagcctcagtaagtcccatacaattgctgggcctcagattactcaggtcccaaat

SEQ ID NO: 845520 - DNA, 579 bp, Homo sapiens
tgggaaatcacccctagagaaataggaggaagaatgaagcaactccatcagcatctgtctgaatacggtattttttaaagtarcatcatctgctcaaattaattacaataacaacgaagacagccatcctacagatacttcgataagtagggtgaccgtaatttaaattaaaattagacattttttttagtgtgaaagggtatgttaattagacagaatgctgggacaataggtataaacaaactacgcacccaaactaggatatatcgtcatgctatatagcacatgtctttcttgtatatttaagtcattcgtactgaaaattattctattcatctcaatacaaaggtaacattggctgtgagagtaccaacacacgtacaggtatgcttaaaggaaaaaaattccttctgatgataaaaagttcttccagaaagtaatgtttattttaggatgtgactcacagataattgtatgccaccaattatatatgagtggaaagtctaacaatggacaggccaaattctttaaaagtcttaattcctggccaggcgcagtggctcacgcctgtaatcccag

SEQ ID NO: 845521 - DNA, 530 bp, Homo sapiens
atgcataggaatgcctagttcttgtttttaattcaggttttagtttagttcttttgttgttaatttctctcacttaagaacctgctgagcagattcgttgagtaagaagtrgaataaaatcatacttaacttgcctcaaaattaaatgaagcttactctagttagttgaagcccactccagcttaaaacttcaataatatttaaattatataaaggtgaaagaaaatactctgagtcagtaaagttcacggcacatgcaagggtgtgtttgcagtgagaactttgacaatgaggagtggctttcatctgtcagtatgtaaggatgtggatgacatcctggaattggtatactaagagtggggctgatggcagcacttatgagtgggaggcttgttgttattttagcagattgttaaacacatggaaacatgatcttttgaggccttttaggaaataaatggctaaaggatgacatttcaccgtgtcttccccattttctgtgttaaaatgtaccatcatgtgttttccac

SEQ ID NO: 845522 - DNA, 346 bp, Homo sapiens
actgctacgtagaaaaggaatggaagatttggattactattagatgaatgttattattmggttatttaacatttctgtgtctttacttaagttttaactgttgcatccatcatagcctaagtaggtgcattacagttgtctacctctagtgtgtttctgtttctgcttgcgtcttctgtttcttttatgattgttgttatatcatttggttcataagtattcctaatatatttagtgtgatgtgcaccccatagtattgtaaactgccctttattgtggcatttatttttggctagctttcaaccttgctgatattaagattcatacatctgctttccctttgata

SEQ ID NO: 845523 - DNA, 664 bp, Homo sapiens
accagatgttcaaagaagaactggtactaatcttactgaaagtattgcaaaaaatcaagtcagacgtattcttctctaackcattctgtaaagccagtatcatcctgataccaaaatctggcaaggacaaaacaaaaaggaaactacaagccaatatccttgataaacacaaacacaaaaatcctcagcaaactactagcaaaccaaatccagcagtgcatcaaaaagataatttatcacaatcaagagggttttattcctgggatgcaaggatgtttcaacatatgcaaatcaataaatgtgattcatcacataaacaaaattaaaaaccaaaattatatgatcatctcaatagacagaaaaagcatttgataaaaaaatccaatgtctcttcatgataaaaaccctcaacaaactaggcattaacaaactaggcactgaaggaacatatctcaaaataataagagccatttattgcaaacccacagctgacatgatattcaatgggcaaaagcttgaagcaagcattccccctaagaactggcacaaaacatggatgcccacttgtaccactcctattcaacatagtactgaaagttctagctacagaattcagaaaaaataaagaaataaaaggcatccacataggaaaagagaaagtcaa

SEQ ID NO: 845524 - DNA, 722 bp, Homo sapiens
tttaaaaaggatcttgaatcttttattataattgagccttttctattgtgaatatagattttatccatccagctaccaaaatagtgtatgtcagaatcaaaacatattaggactgaaagtttatttagaaagcacttacattttatgaaagaggcattttatgagagacgaggacataggggcttggagaagttattgccctcctgaaggcacaggcaaggaggggttcctccagcctactgctccctggtcgctgttgcagacactctcatggttctgtgtgcccatagagcagtattccgaagttttctaagaaagtgagggggaaattttacaggcgtgaggaccctacatttttaaaaaactgactgagactaagagtaaagggaatacctgaagtgttgaaaaaaaatttgtgaagacatctgccagactactgctttcttttaggcccagtagttgaacaagtttaagaggccagtgcagcagagtggaggtggctgcgctgagatggtctcctctgtccacatttaccagggcaaaggatataagagtcttctgggaccagatgacagccatgttgaggagaggggaaaaaagagccaaatgagatggactggagcagtttcaagtcctgtcctagaggaccttccacacagggtctctgtttggktggatagctagagaaccaggatccaaggactgagtgacaactacaggaa

SEQ ID NO: 845525 - DNA, 504 bp, Homo sapiens
gtgtttgcagatgtagtcaagatgagattattagggtgggccctagtgcaatataaccggtgtccttataaaaaggggaaatttggacatatatatatagatgtgcrtagaaggaagaatatgtgaacagatacaggaataacaccatgtgaagacagagtactggcgaggtccagtggctcacgcctgtaataccagcacattggaaggtcaaggtgggtgggtcacctgaggtcaggagttcacaaccagcatgagtaacatggtgaaaccccgtctccactaaatacaaaaaatattagccaggcatggtggcacatgttgtaatccaagctacttggaaggctgagacaggagaattgcttgtacctgggaggcagaggttgtggtgagccaagattgcaccattgcacaacagcctgtgcatcaagagtgaaactccgtctcaaaacaaaacaaaaagacagagtactggagtgatgcatctacaagccaaggaatgcc

SEQ ID NO: 845526 - DNA, 504 bp, Homo sapiens
gtgtttgcagatgtagtcaagatgagattattagggtgggccctagtgcaatataaccggtgtccttataaaaaggggaaatttggacatatatatatagatgtgcgtagaaggaagaatatgtgaacagatacaggaataacaccatgtgaagacagagtactggcgaggtccagtggctcacgcctgtaataccagcacattggaaggtcaaggtgggtgggtcacctgaggtcaggagttcacaaccagcatgagtaacatggtgaaaccccgtctccactaaatacaaaaaatattagccaggcatggtggcacatgttgtaatccaagctacttggaaggctgagacaggagaattgcttgtacctgggaggcagaggttgyggtgagccaagattgcaccattgcacaacagcctgtgcatcaagagtgaaactccgtctcaaaacaaaacaaaaagacagagtactggagtgatgcatctacaagccaaggaatgcc

SEQ ID NO: 845527 - DNA, 578 bp, Homo sapiens
ctacaatttggatttgtttgattgtttcaccatgattagaatcagactaaatattkttggcaagaatattatacagatagtattgtgtacttcccactagatcacatgaggaagcacataatttgtttttcctattactgataatggtaggtttgaccacttggttaaaactggtgttgccagacctctccactataagtgtaactttgaccctgtaagtatcaagtaatctctgggtgactctttcagaacatgtgaatgccatgttatccaataacttttcacccaatgattttagcttccatgatgaacattgctgaaatgaattattacattggtaatttcaaaattgtaattttctatgtctattctcctttatattaattagtattcttctataaagaagagcttcctccttctcctctttttctcttttatgcaatatttctatgggcttattgaatccctttttccttatttgaatttctattaccattatgtcattattattttaacactccatgtattcctaatttggcctgttgatgccccattcaagcaggatcctgtgtcctttt

SEQ ID NO: 845528 - DNA, 578 bp, Homo sapiens
ctacaatttggatttgtttgattgtttcaccatgattagaatcagactaaatattgttggcaagaatattatacagatagtattgtgtacttcccaytagatcacatgaggaagcacataatttgtttttcctattactgataatggtaggtttgaccacttggttaaaactggtgttgccagacctctccactataagtgtaactttgaccctgtaagtatcaagtaatctctgggtgactctttcagaacatgtgaatgccatgttatccaataacttttcacccaatgattttagcttccatgatgaacattgctgaaatgaattattacattggtaatttcaaaattgtaattttctatgtctattctcctttatattaattagtattcttctataaagaagagcttcctccttctcctctttttctcttttatgcaatatttctatgggcttattgaatccctttttccttatttgaatttctattaccattatgtcattattattttaacactccatgtattcctaatttggcctgttgatgccccattcaagcaggatcctgtgtcctttt

SEQ ID NO: 845529 - DNA, 487 bp, Homo sapiens
aatctttcaacaaatgatattgggaaaactggatactcatatatgaaataatgaagttgaacccttacccctgcataaaattaaaatgtaacaccatataaaacaaactaaatataagagctagaatgctataaaacttcaaagaaaacacgggaaaagtttcatgacattagatttggctataatatatatacatttttggattacaccaaaagcacaggcagcaacgacaaaaaatagataaattgtatttcataaaaatttttgtccatcaaagaacactatcaacagatttttttcccatggaatgagaaaaaatatttacaactcatctctgataaagaattaatatctagaatayataaagaactcttacaaatctacaacaaaatcccaaacaacccagttgaaaaatacacgggattttagacatttctccagagaagacatacagatggcccataagcacatgaaagatgctcaacaa

SEQ ID NO: 845530 - DNA, 555 bp, Homo sapiens
tctgtagcatatccccttttgttactctctactccagcctctttcacagctctgggatgctaaggactctgatgcctgggaactctgtgagcacactgccaatagttccaggtctcacaaatgagtttctgttttgggctccccggatgcctcccatggctgccattgcctcatcagcccccactgcctttgccactggccaccaatgctgcagtgataaagatggacacttcatatgagcagcatgaaatggtgttttctgaaatttcctctaacttaaagtcacactgtgttcctttagaaagtcgtaagacagcatttccgccctttggtgttacactgtatcattttatgaatcatttttatgatcctaaggaaaggttgtctctgcagtgactggagatgtctatgtccttatttcctacttctaaaattatcaactgatgaaggcagggactcactttgttcactggtatttccctgacagctctgtttatctytgtatgttaaaaaccataaattcataccgataccaccaatttcaatagaacacca

SEQ ID NO: 845531 - DNA, 603 bp, Homo sapiens
tattttgcatggctctctaaattcatttcagccttaagtaaggttaaatcyttctcccatgatctggattttcagcttcctcagtgaggatgtgtgtttagaggcagattttcttccctcacgctttgggccctcatagtgtttcagctatctcacagagtttgtagcgtcaagccacttctttcaaatggtctgtgaattctttcagttttcctgccatgctcctgcagtggttcttggcacaaaagttcatgatgtgaatctccacatattgttctgtttatccaagtggcaactgcaagttagtcctgcctcctatctgccatttcccccagcaagggaacttttaatatgatttgtatagacatatgaataataatattttataactacaagcatacaaatttaaaaccttgagatatattcattcacatttgatcaggctgcaaggtagggtaaagctggagcccatgattcatcttaaattttatggggcagttttccttgacatggtatctgcctttaaggaaaaatgtttaggcccagttgaagtgcatgtctgcattcagtactatagtgaaaccattatacctattatgtagc

SEQ ID NO: 845532 - DNA, 540 bp, Homo sapiens
tctagacttcttggatccagatgaatccatgacccctgtcttcttgtaatcttacctgctggagacctccctactgcacccagtccagtttctgtctgacacagtataacatctcaaaaaaataaataaacttcgaaacataggttttaactgacatttttccctgagtgtcctaatcagtaagtgaggaagaaagatactgagttaaaactcagtatctttttattagcaattctccattacatggaaatataatttgttcatctattgtctggatagaaaaagcagaatggaaactagaagcaaaccgaagctcatacaagggaagaagtaaataaatgcataacaaaacaagatcagagtattttgatgtcagattttctacttctgccatttgtagaaaccagggtattgcagaaattaataagrcagtattttatggattgacttgttctggtaagaagagacccccaactctttcattacagagaagcaatgtaaactaagcactgaactccgtatcactacaaatagctattc

SEQ ID NO: 845533 - DNA, 482 bp, Homo sapiens
gtaattaggataaatccaaatagaagtgaaataaaagrtatataatcagattagagtacttgccagaaaagcaatgatttttttaaaaagctatgcagcatggggaaaattttgctatctgttattataaatattatatttatatagtttgtttagttgcagactgaatgagaggtaagattttgttgttacatttttcttttaaaccatctctagacctctttgcttctaggtagaaagtcttgttttgtagtatggttcgtaaatgttgtccggaaggtgtcacaggttaactcttattaatgctttttttttttttttgaggaaaggagtgggcaggcaccaattctgtctataaactccttttatttcatactgagaataggcgagatttgattgtttcacattgttatcttgttttgattgatagtcacatccttcccatttgggcattagtgatatggaaaagttagactcttttg

SEQ ID NO: 845534 - DNA, 537 bp, Homo sapiens
ccgtgtgggaaggtaatcttcccctggagtccggccagggacagactcttctctgaagctgttccaccaagctgtccatctgaagtcaagcagcttccctcggacatcgaactgtagtcccagatgtccagttccttctcctcgctctgccagctgagccttgggtttttatgggcataggatgggggcagggcaggccatgggtggttttggaaaaggcaacattggagtgggaaaacagagatgtaggttctcactttgagttgtggtcccaggctttgcggcttgagggtggggccctcactggggacctgccctcttctgcccagaatttccctgcctgctgtaactatcagagatacatctcaacatgttgaggtgagaaataaataaaataatacatgtgaactctctagcatggggcctgataaaaaccagttgttactaaatactagtttccctttatctctccacttatggagtttttatctattccrttccattgtccttttctaagccacaaaaaaatttttggtc

SEQ ID NO: 845535 - DNA, 637 bp, Homo sapiens
aaagtttaagggtaattcctctgcaggtgctttgccttcatgttggaactctgccataaacagtggatgtggccttctgggtttgatccaatcagtctcaaaatccacaaagcttgtggctrtacacatatgcttttccacaaaagaaaatttcctacatttttcctttttcacccctcccagaggtacaaagcggaatagaccaaatgggtgagtgattacataaggcagttcttgcctattcagtggggagaaacaagcctaagtggttatgcttgtttaaacaagtttcatgtttttaataatctatctgccatatttctggcccaaattgtaagatgtcttaaaataatttataaattgtttttgctgtgaatattcatcattttttaaatattgagaattttattaccacaaagaatttttctttccttttaattgatttccgctcccttctctactcaaaactgctactaaataggaaaatggtctgacattcagctaactgtgatgccagccttctctggaatgttgtgttgtgttgggctgtgacttccatggaattcaattcctgtttaccaagggctcccacttattttattttaatatagtatgttgaaaagagtggaaaaaagaa

SEQ ID NO: 845536 - DNA, 628 bp, Homo sapiens
catacaaaaagtaagaactggctctatagtattgttgaccaaatatcagcaatcagcaaacatgaaattattacagattctgaaacaaaaagtacaaatttctcaaaagtaaccttaacctaaattggcttttttggaaagcaggttggttaactggaggaaaggtatgttgagtttgttcctaacctcaacggacaaatttgtttggatttcccatgtatacatttgagagaaactgtttctttctgaaactttcttctgcatctgtatttcaggaaactcagagagaagggatagattaccgcccaacacacaaccttggaaactaaagatttcagtggccttgttaaacttcgcagaattcgcagtgtgcaatggtagcacaaagcaatgtttttgtaggggcaacggcgtaatctcataaattctagcagccactgacctctaacaccattccttgaagagaaaaatcatatttcctcagttttctttaaaaggctaagtaayagcagattcaagccctcccctcgggttcccactctccatccacgctgccaaccctgacagccagcccattctttgcctatataagaattttgaaaccactactaaaaataagaatataaac

SEQ ID NO: 845537 - DNA, 531 bp, Homo sapiens
aggtgagcccactgctgcccctwcccccaggtgctgggtcacagggagatgggagttttatctataagtctctgtctggggctgctgcctttctttcagagatgccctgcccagagaggaggaatctagagatgcagtttggctacagcggctttgctgcactacagtgggttccacacacagttcgaacttcctggaggctttgtttacaatgtgaggagaaaaccacctacttaagcctcggctctctccccaccaagttcaaatatcccaggtcgacttcagactgcagtgctgcaattgagaatttcatcccagtggatctcagcttgttgggctccatgggggtgggatctgctgagcaagaccacctggctccctggcttcagcctcctgtccaggggagtaaacagttctgtctcactggcattccaggcatcactggggtatgaaaaaaaactcctgcaggtagctccttttctgcccaaacagctgctcagttttgtgcttgaaacctagggccctggtggt

SEQ ID NO: 845538 - DNA, 521 bp, Homo sapiens
tatatatatatctgtataaacaaactcgatgacctggaaagaaataccacaccatattaatacctatgtgcagactattttatttttcraaattgtatacatttcccaaaacattattttagaaggaaaaaagaattcattaaattttctacttaaggaggcagtatgtaaaattggaaagagcatttagtttagaatcaaacttgcctaagccccaataccacctcttctgtttattaatcttctagtgtttaaagccagttgcaaaagtatagcaaattatagaatagttatatcttttttcatgaaatagaaatttcatcttatcataatattaatataaattgatatgtagatttttaaaattattttctttctctattttgttccattgcaccattgtgtaattctgagcaaataacaaataatcaatttaaaactaagcgttaaatgagcttaataaaatattagggataaatcagcatctcaattagtttctcacactgtacgttaacaaaaat

SEQ ID NO: 845539 - DNA, 627 bp, Homo sapiens
cacttaatgtcattgctttatgacaagcatttaaatactgatgagacctggtctgaaaactgaaggatgttaggagtttaatttcccagagaaaggagcaggcccatccttgggaaagaagggtggattgaggtyatgcctcactattgcgcattttgtgcttctcagtgcctagatatctctgtgcgtatttctgcattctgcgtaactgcagttcaaatgaagtgagttgtctaaaccagcggtgccaagaggagatttgggtcccagtgttcctgctgccgttggagaccttgtgtgggttcctgtggtctgcagcccgggcctggttctggtgactcctcacgtcgctcacgggccctcccttcagtgtggcagccttggagtgcttctgcccctcaggtctttgctgagagaaacgtgtgtttatttcagtgatgagaagacttggaacttgggtctgagtaatgcgaagctttcatattatgatgggatgatccaactgaactacagaggcggcacaccctataacaatgaaagacacacaccgagagctacgctcatcacctttctctgtgatcgagacgcgggagtgggcttccctgaatatcaggtaggaatgtttgt

SEQ ID NO: 845540 - DNA, 511 bp, Homo sapiens
ttagttaagcaatgtggagatgagaggagggataaggaaagagaaagctcatgcagagatactgttttgaagataactcgtggggaagaaatgggcagtcatctgggcagccagcaaaacctattccatgaasccttggtaagtaagtggctttgatgacatagtggaaaaatgagcactgttactggctgtcttgttgtttagctgtcagaaaagattgtgctgcttcctacatctgctctcacatgctccttcacctgctctgtcttactgagatggataaaccttgtagttcaggactgtcaagggcactgcaattagtactaaatcatcctcactctgacaagttctggcaacagaagtttctggcagatgtgtaagtgcattttcagtgtttcctgagtgtctgaaggcatagcagagccctccatacactgtgcaacttaattcgatagtgaattcaatgcaagtttagaacaggagaaatattagaaataaagatgggctgttg

SEQ ID NO: 845541 - DNA, 453 bp, Homo sapiens
ataaagtggttaacttttaaaattttcacttaatacgttataactaggtaataaagtagaaaattgattttcatgactccaattttaagtatctgcataatagtcaatcaagaatagatatatctacttttacttagccattaccattttatcagatatgtatagcttttgggattgaataaacctgtggcaaaaaattatagaatgtgaacagtttctgtgtgttcagccaaagtaactgagaagaaatactgtagtaactttatgtagaaggaattgcatcatagatgttttccagcagatcagatggagataagaacaaagaacagcagcagcctaggtrgtgtatagctttgaaaatacagggaagttcattagtctaaaaatgccatcttgcccaagtgagaaagtggcagatttcttaacaagtgaacgagtgacttgaaataggtg

SEQ ID NO: 845542 - DNA, 631 bp, Homo sapiens
aagtgaacgagtgacttgaaataggtggaattgaggaagccagatgttaaagcttattagcgtgtgtagattagagcctttatagccattttttcaaacactccyttagaatatttaaaaatcactcgtgtcatatgtctgtgtgcgtaagtacattgtatatatattccctgatatttagcaatgacactagcatttttatataaagaaaataaaaagtgaccagtgtattagttttctattccagccttaacaaatgccacacatttagtggattaaaacaatgcccatttattatctcacagtctgtaggttagaaatcggacatgggtcttgccaggctaaaatcaaggtgtcagcaaggcttatattccttaccggaggctctggggaagaatttacttccaaggttatttaagttgttggagatcctgtttttatgctggctgtcagttgaagcctggtctttcctcctagaggctgcccacattccttctcatgctttccatgatttcctagaggcctctgaagtccttgcctgtgggtcccatctcagagccttcccatgcttcagatctctctaacttatgctgctgtgtcacactgcctccaacctgagaaagttttctgc

SEQ ID NO: 845543 - DNA, 631 bp, Homo sapiens
aagtgaacgagtgacttgaaataggtggaattgaggaagccagatgttaaagcttattagcgtgtgtagattagagcctttatagccattttttcaaacactcccttagaatatttaaaaatcactcrtgtcatatgtctgtgtgcgtaagtacattgtatatatattccctgatatttagcaatgacactagcatttttatataaagaaaataaaaagtgaccagtgtattagttttctattccagccttaacaaatgccacacatttagtggattaaaacaatgcccatttattatctcacagtctgtaggttagaaatcggacatgggtcttgccaggctaaaatcaaggtgtcagcaaggcttatattccttaccggaggctctggggaagaatttacttccaaggttatttaagttgttggagatcctgtttttatgctggctgtcagttgaagcctggtctttcctcctagaggctgcccacattccttctcatgctttccatgatttcctagaggcctctgaagtccttgcctgtgggtcccatctcagagccttcccatgcttcagatctctctaacttatgctgctgtgtcacactgcctccaacctgagaaagttttctgc

SEQ ID NO: 845544 - DNA, 519 bp, Homo sapiens
tagtttataacttttggtggatttctctcttagaaccctttgtactctgtggagcaattttgcattcccctggagtctagggatttcaaacctctaggtcagtctttattttattttatttttttgtcttgaggtttccataccacagatgcagtaaacatttagaatttacatcctgcaaggctgaagttttgatttatctcactcaagaaattattttcttttattctcttcccaaaggctccatcataggacaggcttctttgctgaatctgatggtgggccgagtttttctatcccccctccaataaatgtgacaaactttttagactccttcctctgtggattgcctcttgcttttgcttcctgcccatcgccataaaagaagataatgacaacaaaacrataacaacacaaatgtaaacgtaccttttcctcttaacttttccatatcatcaatttctcatgaattaaggtgtgatacctgaaagtcacatttgccttatcagttatattcat

SEQ ID NO: 845545 - DNA, 467 bp, Homo sapiens
gaatgtaggttatacctagcaatagctcccttcatactgtgaaatatattgtatttttgtattcaagcagagaatgagcaatatttattatttttatagcttctataatatctttatagattgaggtgttttataatcctattttggtggtccgggatattacttcagattttttctcatccaaaacattcatatcaacatgagatggagtctggcctaaattaatgatcaagccagcaggtttgaaaagaaatatattttattaatgttaagtattgtatgttataaagtaaaacattcgtgaatattaagtaaaactaagtaaaatgaataagttacagyaggattgctttccctaaatgttatgcattacgggcctgaacattcatatgtatttccacattgttactaaatcaattcacttatattgttggtggcatgattttattagtgacatctaaattaac

SEQ ID NO: 845546 - DNA, 552 bp, Homo sapiens
actgtcagatattttaaaatgtttgccattctggatataaaatgacacctcaactggatttccggattgctaatgaggtgagcatcttttccattgttggttgatcttctgggagtttcttttaygaagtggctattccagtctttcctcttttctctacttgcctatttgcctctttaaaagtcaatttgtagaaattctttatgcattttgagcactaatcctttggcaaatagagatattgcagatactgtcaaccattttgtagtttgtcttttcactttctgtttgctgtttttcatagtaaaattctcagttttaatattgttgaatttataaatattttactttttagtctgtgttctatatgtcatatttatgaaataatttcctgagtcaaaggtacaaagatattcactaatactgtctcctccttcttcttcttctccttctccttcgccttcccattctccttccccttccccttctcctttgtcttcttctttttttttcaaataaggtcttgctctgtcatccaggctggaatgcaat

SEQ ID NO: 845547 - DNA, 552 bp, Homo sapiens
actgtcagatattttaaaatgtttgccattctggatataaaatgacacctcaactggatttccggattgctaatgaggtgagcatcttttccattgttggttgatcttctgggagtttcttttacgaagtggctattccagtctttcctcttttctctacttgcctatttgcctctttaaaagtcaatttgtagaaattctttatgcattttgagcactaatcctttggcaaatagagatattgcagatactgtcaaccattttgtagtttgtcttttcactttctgtttgctgtttttcatagtaaaattctcagttttaatattgttgaatttataaatattttactttttagtctgtgttctatatgtcatatttatgaaataatttcctgagtcaaaggtacaaagatattcactaatactgtctcctccttcttcttcttctccttctccttcgccttcccattctccttccccttccccttctcctttgtcttcttctttttttttcmaataaggtcttgctctgtcatccaggctggaatgcaat

SEQ ID NO: 845548 - DNA, 552 bp, Homo sapiens
actgtcagatattttaaaatgtttgccattctggatataaaatgacacctcaactggatttccggattgctaatgaggtgagcatcttttccattgttggttgatcttctgggagtttcttttacgaagtggctattccagtctttcctcttttctctacttgcctatttgcctctttaaaagtcaatttgtagaaattctttatgcattttgagcactaatcctttggcaaatagagatattgcagatactgtcaaccattttgtagtttgtcttttcactttctgtttgctgtttttcatagtaaaattctcagttttaatattgttgaatttataaatattttactttttagtctgtgttctatatgtcatatttatgaaataatttcctgagtcaaaggtacaaagatattcactaatactgtctcctccttcttcttcttctccttctccttcgccttcccattctccttccccttccccttctcctttgtcttcttctttttttttcaamtaaggtcttgctctgtcatccaggctggaatgcaat

SEQ ID NO: 845549 - DNA, 532 bp, Homo sapiens; identical to SEQ ID NO: 843345

SEQ ID NO: 845550 - DNA, 626 bp, Homo sapiens
gcagtaactgatttaaaagtctcctgttctttaggctagagtttagcaaactaagccagcagcttgtttttgcaaataaagttttattggcacacagccactcccactggtttaggtactgtatgtggctgctttcctgctacaaaagcagagttaaatattaaaaacagagaatgtatagcccacaaaacctaaaatattcactgtctttaaagttctaacccttgctttagggaaacaacagtatttagaatgaacaagtggaaaaaccctgactacctcaactttcctgagatcaacaaggtcacttacttcagagcttttaaaactgtggctgtttgtaaatattgactgcagaagttctagcaaatttagtactgtctttttaaaataaaggcaaaatgaaggtaaattatgttttaagttagccttaaaatctaccttgcttttttttttaagtgattttttaaaaatctagaacagtaataataatgatcrggatattttaataaaagtattaatggtgaagaaattttgaattgccttcttaacattacatggaatttttgtaatgtgaactgtatgaactttcaggaaacaaactactcttaagcatacaacattaa

SEQ ID NO: 845551 - DNA, 618 bp, Homo sapiens
ggtgggaggagggagaggattaaaaaaaaatacctatcaagtactatgcttattaccctgggtgataaaataatctatacaccaaacccccatgacaaacaattttcctatrtaacaaacctgcacctgtacccctgaacctaaaataaaagttaaaaataaataataaagatactgaagaataaacatcataataataggtgaatttctcagtgcagccaaagttgtgagggtgtgtctgtgagagtgtgtttaagctgccacatacaatataaatcctaagaggctgcatgaaaattaaattaccaactcaaaacatagcttggagaaataattatcaatccaatgtgcatttatgcttagaaatgttttgtctattgtgaatgagttgttagggtattagattgcaatattttcagaattagagaatgattcatatgaatccctgtgcttcaaagaataaacatgttagcatgaagtagaattataggaatatctagtaattgactgtatacaacatatttttatataaccacataataacagtgataacaagtatttgattaaaactttgttgcgttaaaaatctctttaatatactttaacattaccttattg

SEQ ID NO: 845552 - DNA, 404 bp, Homo sapiens
tgcatgaatttctcttttcaaactctcagcaggtatctaaccactaaagcacattagrctatttacacaaatagatcatttttagcttctgggctctataatggcacctaagaatgttcttttaaaattttttcaagaggaatgaggtacagcaaggtggtggtggaaggtgccctgactaaacttctcggcacttttcccatttctaccctaaaaggatgaaggattagaagaacaggaaagtcagtatcctgccagaacagggggtgaacacattagcccagtcgctggtgttttccctcagtgggctctctcgccaacagcttgtcacatcagaaatgtaactcagttaaacattaggccaggggatgtgcataataaactagtttccttgtctgaaaaat

SEQ ID NO: 845553 - DNA, 749 bp, Homo sapiens
agaaggactaatatccagaatctgtaaagaagttaaacaaatcaaaaagaaaaaaaaccayaaaaattccattaaaaagtagacaaacggatatgaacagacacttctcaaaataagacatacaagtgaccaacaaacatatggaaaatgctcaacatcactaatcatcagagaaatgcaaattaaaaccacagtgagatgccatctcataccagtcagaatagctattatgaaaaaagccaatagataacagatgttggagaggatgtggagaaaaggaaatgtatatacactgttggtggaaatgtaaattagttaaacacttttggaaaacattatgggcatttctcaaataactaaaagtagaactaccctttgatccagcaaccccaccactatgtatatacataaaggaaaataaatcattttatcaaaaagatacctgtacttatatgtttattgagcactattcacaatagcaaagtcatggaattgacctaagtgtccatcaaaagttgactggaataaaaaaaatgtggtatgtatacactgtggaatactacacggccataaaaagtaatgaaattgtgtcctttgcaacaacatggatagagctggaggccatgatcttaagtgaaacaactcagaaacaaaaaaacaaatatcgcatgttctcacatataagtgaagtacacatggacataaagatggaaataatagatattggggactccaaaaggtgggggctg

SEQ ID NO: 845554 - DNA, 672 bp, Homo sapiens
tcaattcaattcagtcaaattaggtaaggtctcagcctcagaaatctgcctaggtactttttaaacrtcatttagtgtttaccatctagaactggctgtagagaatgttggaataaaagaggggatgggttgcaagaagtgttacacagggtagtatagtggaaagtgttctggactgaaaaagaaaatttagatgctgtactgattctgccataatatatttttgtaactttgaggaagtcaccacatttttctgggcctgtggttactcatgtaaactgactgaacaagatcatttaaggtcttttccagttctaaaatgaaaacacattcatgttttccagtatttaactgttttctatagtaagcttagcagttctttaaagactgatcatggtctcctatagaattcagttggtgaccaactaatcctgggttgacagggcaaatgatatcccattgtacagatattgacaagcagtcatagagtttgacttgccagaagccgcatgcctaagtaaatggtaaagctgggaattgaatatgagacttctcacttgtgagtcagttgccctttccactggatttacagtgtcactcagtactttctgaagtactctataaccaaacctaatatgggaaaggggaaacaaaatactgatttccttttta

SEQ ID NO: 845555 - DNA, 667 bp, Homo sapiens
tcccttttgttttcttctttgaccaatgagttatttagaagtgtttttcaaaacaaaagatttttaaaggttttgaaatcagtataaaaagtaattaagttatgatactgaaattttttttaactttgagatttgctttatagcttagtacataatcagttttcattagtgtcccatgaatgcttaaaaagaatgtgtattcttcatttgctaggcgtaaagtcacttatgtttagattaagcttgttttttatggagttcaagttttactgtgtgtgttttgttttgtttttttggtctccttttatataatttacagaagaatattaaaatatattactgtggggctgggcacagttgctcacacctgtaatcccagcactttgggaggccaaggtgggaggatttcttgaagccattaggtcagcctgggcaacataacaagatcccatctctacaaaaagtttaaaaattagccaagtgcaatatcatgtaactgtagtcccagctactcaggaggctactcaaggaggatcacttgagcccaggagtttgacgatacctccttgagcttttttactttatstgtttatatgtacagcatataaattttgaattgttggccaggcacagtggcttatacctgcaatcccagtgctttgggaaa

SEQ ID NO: 845556 - DNA, 582 bp, Homo sapiens
cttcatgattctctgggaccgttacattttgaaatatgcaaagaaagactttttttttaaggaaaggaaaaccttataatgacgattcatgagtgttagctttttggcgtgttctgaatgccaactgcctatatttgctgcatttttttcattgtttattttccttttctcatggtggacatacaattttactgtttcattgcataacatggtagcatctgtgacttgaatgagcagcactttgcaacttcaaaacagatgcagtgaactgtggctgtatatgcatgctcattgtgtgaaggctagcctaacagaacaggaggtatcaaactagctgctatgtgcaaacagcgtccattttttcatattagaggtggaacctcaagaatgactttattcttgtatctcatctcaaaatattaataatttttttcccaaaagatggtatataccaagttaaagacagggtattataaatttagagtgattgrtggtatattacggaaatacggaacctttagggatagttccgtgtaagggctttgatgccagcatccttggatcagtactgaactcagttcc

SEQ ID NO: 845557 - DNA, 609 bp, Homo sapiens
attaaaatccacagccagtttcatcagtttcctcatccatcctgcaaataaaaatgttaacaaggagccaaacttattcgttctggttttacaatttattttgaccgttttttgggtgaaaattgcaaacagccaagcaagtggctggaatgccccagtctaagaaattcaaaaacaatcactgagtaagccctaattacattaattacattttactcttgactccaggaaaagaaagcaagcttttatctaatctagagggaagtattcgtgagcaataaaaatcacttttttgagttgaataataatcagttaagaatatttaccgcatagcaacacaacatataaagatttgttacaagttgtttacggatgtttgactatttttgctgaagtattttagagtattgaatgtcttctctcttcaagtttctttcatgttcctaatttcagctcctgtagccagagatcacaggtcttccctgtgaaactttggtttctttctataaatgtgtgtggttttcagcgctcaactcctgtcttcaaatrgtagtaagttctacttctacttctgtcattcagaacattttatgtcaaatgatgtaatgc

SEQ ID NO: 845558 - DNA, 353 bp, Homo sapiens
tctccaattttgttctttttaaaaaattatttagcaatttctgcaaaamttttaatatcagcttgttaatttttaccaaaaaaaaaatgtctattgggattttgattgggattgccttaaatgtatagacccaagttggggaaaattgacatcttaacaatgttgaattttccaatctatgaacataggaattttctccatttagttagatcttttctaatttccctcagcaatgttttgtagtttttagtgtagagatcttggacttgttttgttatagtttttacttagaaagtattaatatattattaattttgttacatttattatatattatatatgatagtagatat

SEQ ID NO: 845559 - DNA, 583 bp, Homo sapiens
acacccacaacactttcaaaatgccaatttgaatttcaacttgtaacatcgataaatcgttggactagcgaatttatataaaaagtaatttttaaagtttatttttatcctcaacaacagacatgaagcacarggaaacaaggtgggtggtcaggtactctactctttttgagatgctttcttaatttttattttatttttcttgtgtgctgaatatagacaacaggattttaaatgcaggtgaccttcttgggtcatttctgagagtgaaataaacattgcgagattactgtttattgccattctgctacccctcagctcagcctgggggtggaagcaagggacctaagcagacagcagtgatggccaagttaagagagaaacaaactaacaaattaaaacaaaacagaacccggcccgagaacgtttaatcggaagccgctctcaagtgatccgtgcgtctctcttctgctcggtccgctctctggttaaaccctcaaaagagcgcgtatcccttcccgctcggagcagagtgccgacctccctttgcgcccgcggaggcgcagtccctcggctcacccgg

SEQ ID NO: 845560 - DNA, 565 bp, Homo sapiens
acttattttgcccaagataaaataattaaaatgatatgtatatgattctttttgttatctcttgtccaaatgattagattctttctaccttggacactaccaatgtgtactgataaattgtgttttcattcctttttaaaatatatgtcctgaaaaattactactccttaacaccacatttttccacattatttgttgttaacatctccaaatagtgagataccttgcatacataaagagtgtactaaatatatatttgtgatcaataaaataatagttaaataatcttgtaactaacatgcagagtaagaaataaacattgcacatgccacacacagaagacctatgcctgtctccttatcacatccctctccttaactcctagaaaactactgtcctgacatgagacaattatttatttgactttttaaaaatttwaacaaatctgtacttactgctatacaaaatgttttagtgttcaaacttttttttttttcagatggagttttgctcttgtctcccaggctgcagtgcaatggcgcaatcttggctcactgtaaccccc

SEQ ID NO: 845561 - DNA, 616 bp, Homo sapiens
aacagagattggagtgatgtggccacaatccaaggaatgccagcagcccccagaaactggaagatacaagacaggatcctcccctaaagcctctggagggggcatggccctgccaacacmttcacttcagacttccagcctccaaaactgtgagagaataaatttttgttattttaactcaccaagtctgtgataacttgttataatagccacaggaaactaatacaacaagaataatttaaaaagtgttactatccttttccaaacaggcataaaatataagtgttatcacatgccagaagtccagtgaaaatgagcacaccataactattaataactggaatctctgttgggttggtagttgcagatattgtcagaaaagtgtattgctaattcttaagactgcaaatcaacccacacctctgctctaaaaaagcaattataacactaacaatattctgtgctataaccaataatggttaccagccattaagatattcctgctaacattaactactgaaattagtgactacttccaaagcagacatgagagaatattggctgtcttcattttctctgtaaaatcctttctgtgtctaagatggagtgaagccac

SEQ ID NO: 845562 - DNA, 508 bp, Homo sapiens
tgcttacaatgaacattctttctatttccaatatttttattcatctcaaattcagtatggcttaagatgggagrtgcgtttctaacttgattagcttgccaatttattttcaaaaacgttacccagttaccatgtattaaagaatcactcttttcctctaaagaccccaaggtttgtcttttctaatctatttatttgtgtttaaattaacccttgctgtataagaaaaccccacaaagctcagtgacccaaacactaagaatttagtcttgtttaggagcctgaaagtcagttagagtgctttctgatcactgctgagctcaatcacatacctacagctagcttcaaggtgggtggaaaactcgaggatcctgggtgagttctttcatgtactgggggtccggtggtcctagaatagcctaggatggctttggttggaaccaaagagaagaaagagagcaagcacaaaaggataagtcctaatgtgtaagaatccctcaagtctatg

SEQ ID NO: 845563 - DNA, 653 bp, Homo sapiens
ttaaaaacttattggactatcataaacattctgtgaggaagatgcagtgtttacactcattttatagttataaatactaaggcttctagggtttaagtcactatgatggctaaatactatatttcrtacatttgcatatgaagtacacatacaagcagtcataagacagtgggtaaaataagagtttattatttactaatatctatcaatggatcttgaatttgatagatttattaaaatcatgcagtcatgaagctctcattccctttagatttttgctacaaattcagaagtttagagtataactgaagcaaccacagggcatccgtagaaaacgaggtttgagactatacagcagaaaagtatagactataaatgataacttttgctcattggccttgctctgcggacacaagcttcagtctgcctgactctgtacctatatttctcctgtcaactgaagagatactctgtagactcttagtttcctaacatggccatgttaatacattttacaaagttgcatatcttgtcagaagaaaaaaatcattacatagttaattcctagtcttctgtcatactaacaggccagataaggtctaaggtctaagaacttgtttgtaaaccgtatcatctatgctactataaatgtt

SEQ ID NO: 845564 - DNA, 590 bp, Homo sapiens
ttcctcccagttcaggaataaagaatttgaagctcagaaaagcagatataacaagaagagaaaaacaacaaaaccaaaaacaaaaagagcaaagggaagataaataaaatggaaatggttcttctactcatatcraattatcagggaggatgtcagctgagacagctgttcgacaacttttgttgaatgaatgaatgaggtagtttttgttttctgtatcttctgaagtttctgctgtatccacacaaggtgggaacttggtgaatgcaaggaacaataaggaacaaaggcagggagcccatactttttctagacttctgaatcatgtggtcctagcagagtccaaggggctctaagacaccagctttgtgctgtggctactattcgctcttaggagtccattagcgcttaggttagttcaactgggctcagttttaaaatccttggacagaaaagggtgtttgtggcagcttctttgtggtttgtggtttggttgctctgtgtatgtaggcatctctgccacctaccttttcaaacacaggaaagtatctaattatagccttctgggccatgttaaccacttccttttg

SEQ ID NO: 845565 - DNA, 563 bp, Homo sapiens
gccacccccaaatcataggtcaaattaaagatgacctccaggaactaaaggaattaactttaagaaagcaaatgcaggctttagaaatagccatacaaagtgttcataattaaataaataaaaatgcctataagcctgacacccctttaaatctagtaactctgttttaagttaaaaagtaaaatctaatttttctaggacccatataggatgggccctttactgtaatcttgtccactcccactgctgttaaagttgcaggtgttgtgtcttagatccatcacagtcagctaacactggcagctcaggacaagtagaccagccagcaggacacagatcatccaacccagctgatcctgagacgagaccaagctgctgctgaggacgacagccctgctctggtcactctggaggctgaccagtctattcacggctgaagcttgaagaaacaacaagccctgctctagtcacacaccggcagctgactagtctatgcacrgccaaagtttgaagactcatcaagcaagtaaatgtagtttaaaatcttaagattaatagttttc

SEQ ID NO: 845566 - DNA, 667 bp, Homo sapiens
actgtgaatagtcacagtcctgcttcctggtcttacattttatgggggaaacagacaatggacaaacagacaaataatgaatcaggtgctggcaagtgccatgaagaaaagtaaaaggtaaagggataatgatgtctgctattttagaggagttacaagacttgtattgagcacttaacccttcatctggacttcttcatatatgctggatagtgagcattttcagtgaaaattgttgattaatactgtccacctcttgatcattttcctacaacataacacaactgaatataaagaaaactaggcctcccagcaggacacctgggttctagtcctggctctaataagtatcaaacagcaaagactgtttaaacttctgggttttgttgtctccatttgaaaaatgaaaagaatacgcataaaattatacaactttgagaaagagttttttacaactgaaagatgctatgcaagtgtaaaacattattatataggaattttatttccttaaaaatatgccgaggatctggattactgaaaatgctcttttatttkctctctttccactcatccaggaatggcacaactagagaggagcgccatctctggcttcagctctaagtccaggcgaaactcattcgcatatgatgttaagcgtgaagtatac

SEQ ID NO: 845567 - DNA, 604 bp, Homo sapiens
tcatcaagtcattgaatctattctgcctagtggagctgtattacattttctatctatttggtctaatcaagctcctccccagagtacttcaaataatatttttgaacagtaaaytgtaagaatcaccatgaatatcatttctttcttctcccataatgtgcatacatcaagttgtagaataaggttaccagtgatatagtctgctttgtatccactcaacattccaatcatgggtatgccactgccaggggaaatacctgcttgatatcacacgcaacagtggtgtgttgcagcgtcatactctggataaagtcaatttgctgcatcttgtattttgaaacttctcatggtggcaaaaccttttttttgagaaggagataccagggtattaaaaaatgtaataattgatctacagtaaaagcaagtttgaaaaagtttgcatttgaatattatctattggattaaaatggaagataatgaacaaattgtcacctaggaaattacatgaagagaaaaattgggttagaggcagtaaatattaacattaagaacatacacatgcatatttgaaaaagactcaaatggtgaaggcttaaaaacacac

SEQ ID NO: 845568 - DNA, 264 bp, Homo sapiens
aatacatgtagtgaatatctgggaaagygcattgctatcctgcatgtcgaaaccaagataaagacaaataaagggaggataaagtcttttctttgaagagtttatatttttgtttagagacaaagcacataaataaaatgctaagagaataaagcagcatggagacttacaatacagaagacgttactgaagagtgaagatacgtgctggggctgcaaaactatacacattacagcatgatctccactactatgtaacaataaa

SEQ ID NO: 845569 - DNA, 636 bp, Homo sapiens
tctcattcagtccagctctgattttggttatttcttgtcttctactagcttggtgtttggtttgctcttcatcctgtggttcttttggttgtcaygttaggttgttaaattgagagctttctaactttttgatgtggacatttagtgttataaatatccctcctaatacttccttggggtttgtcccagagattctagtatgctgtgtctttgttctcattattttcaaagaacttcttgatttgtgccttaatttcattattcatccaagagtaattcaagagcaggttgtttaatttccatgtaattgcatcttgtttggtgatttttcttagtcttgatttctatttttattgtactgtggtctaagagtctttggtataattttgattgttttgtatttgctgaggattgttttatgtattattgtgtggtgaattttagagtatgtgcattatggtgatgagaaaaatgtatattctgttgtttttgggtgcagtgttttttaaaggttcagcagattcatttggtccaatgttgagttcaggtcctgaatattgtcattaattttctgcctcaattatctgtctaatactgtctgtggggtgttaacgtctcccaccattattgtgtgga

SEQ ID NO: 845570 - DNA, 636 bp, Homo sapiens
tctcattcagtccagctctgattttggttatttcttgtcttctactagcttggtgtttggtttgctcttcatcctgtggttcttttggttgtcatgttaggttgttaaattgagagctttctaactttttgatgtggacatttagtgttataaatatccctcctaatacttccttggggtttgtcccagagattctagtatgctgtgtctttgttctcattattttcaaagaacttcttgatttgtgccttaatttcattattcatccaagagtaattcaagagcaggttgtttaatttccatgtaattgcatcttgtttggtgatttttcttagtcttgatttctatttttattgtactgtggtctaagagtctttggtataattttgattgttttgtatttgctgaggattgttttatgtattattgtgtggtgaattttagagtatgtgcattatggtgatgagaaaaatgtatattctgttgtttttgggtgcagtgttttttaaaggttcagcagattcatttggtccaatgttgagttcaggtcctgaatattrtcattaattttctgcctcaattatctgtctaatactgtctgtggggtgttaacgtctcccaccattattgtgtgga

SEQ ID NO: 845571 - DNA, 614 bp, Homo sapiens
acctttccatgaggtaagtgctctgtactgagggtycagacaagaccctggtcttcacagactctccagagcctggagatagcactggtgagggctatgagacagcaaagacgtcaacccacccctcccactgggagctctgtcccgtggaattgcagagctgatactgacttgatagccccagtggggagtgggtgaagacccaggctgtgtggacccatccagtgaggagatatgggatcagggacccatgtaaaaaacagtctggctacttttccacagggctgctgtagtatgcaggggatccagtccagtccctaatcaccttgaattttccagtacttgaaggtatcaacagtgaaggctgcgaaacagcaaagatggaagcctgccctccctctgggagctccatcccaggaaggtttggaactgctgccagctggaaaacactggcaggggtggttgtagacctcagttgagagattctgacgagtgaagagaaataggatccgggacccacatggaaaaacagtctggttacctctctgtgtagctgctgcactttaccagggtaactgctccagtccttagttgtcttggattcctcagagctc

SEQ ID NO: 845572 - DNA, 355 bp, Homo sapiens
tttctagatattcatccaaggacatcaaaaacctgtattctctcaaacttctgtaaacaaacgtttagagcagttttattaataattaccaaaattgtatattcttcaagtaataaataaataaactgtgatatatccatgcaatggaatattattttttaaaaaaagaaaagaaacaagctatttacttacacaaaagccctggataaaacttaaatgtgccttactaactgaaagacgccaggcaaaaaaattttgtrgttattgtataattccatttgtatgacatttgataaaaggcaaaactatagggatggaaaacatatcagtggttgctacaggttaagagagcgtg

SEQ ID NO: 845573 - DNA, 618 bp, Homo sapiens
taataaaacctgtgtattagaccatatttcactgtcaagtatgggtacatatgcaaatacagactgtatgatgtaacytcatcttgccaggaaattaacaacctctggagagttttgagcacattgggccatacagagccgctacatatccctgcttgcaattttccactcctgttctttgatctgtatcagtttacactgctttgacatcattttggccttttgcgcagcatctttactccagttctatagaggaagagtaaatatcaaactcatgatcttattaaaatttccatgataagtctaggttattttttaaaaccacatctagcaatatcctcaacttataagctaaaaatttaaataatgaaattactcttttatttatggtagaaaaaataaaacatagttcgttaaattcacaaattcaaaatttgataataacaatcagattagcctctctttctgatgtagtaaagacttaaggaaatgctttcagtagatctaccaagatagaaatccatcacattatttatttgtagttttacctctgacacattattttatctcgatatctcagtttctttgactcatagttcatattaaaacatttgttcc

SEQ ID NO: 845574 - DNA, 307 bp, Homo sapiens
tagttttattttttttctttccaactgtatgccttttatttatttttcttgccaattaccctggctaggacctctgctacgrtgtttaatagaagtgatgagagtgtgcattcttgtcttgttcctgaacttaaggatagatacatttagtctgtcactattaagtgtgatattacctattggtttttcatagatggccttttatcaggttaaggaagcttctttctgtttctcgtttgctttttttttttggttatcaatgtgatatagcttggatatttgtccctgtccaaatctcatgttgaaa

SEQ ID NO: 845575 - DNA, 602 bp, Homo sapiens
ccattatcaattccattctagatcctgatctcttatgcttactctyacttgaaacccttaggaatatcagtttgaccatcttccttgaggatgtaaataatacaggaggaaatgaaaagctcatgtcagagaaattttaatattagagttattggggagaagcagggatgaataaaggataacagtgggatggtgaggcaaaagctaggtcaccccaaatagtcctgagctgaagagcttgcttataccttaggatcagggttaattttaaggcagaatcagatagataaagaggtaacaccaaagatagtcattaagtctctctcctccctctgttctctctctaatctttagtgtttgccaaactttctctctgcacatattaaacattcagattttgtggccaaggcctcagactgatggaagcagagtatgcggaaaagatgattcttaggactggcagggttagaaaatactgcccactaagacaccactgtgtgtgtgacttgccttgctatttctgatcctggccctcacatccataattattctgctggagaatttgaactcaacttctgtcatatgtgtttgcttagctttgg

SEQ ID NO: 845576 - DNA, 495 bp, Homo sapiens
tcttggttctggtttttctctctctacttaatatttcagattggcattaaaccgagtgaattccctttctgattaatcttgccagagcagcccagaaaaaaatgatctcaataccttctcctaatatttgagggaattggatgttaaatagattcacagtaactgaagaatagttgtggaagggaatttttaaaaatagttaacacagaattcaaaaagtacaaaaaaagcaataactaagaagtataattcttctctcctgtttctgccagctacaaagttctcctgcatgaaggccactggcattttatgaattgttctggagatactctaatgagtttacaaacatttgtgtaatatttgtgtgtatatttcttttacacaaacgtatcatgccatctactctgctctgcatgttgttgttgttttacataatttatcttagagattgttatagattgaattgtatcccccyaaaaagtatcttggagtcct

SEQ ID NO: 845577 - DNA, 540 bp, Homo sapiens
ttgttggcgcccctcgctggatcctctgagggacctgggacaagcaggagagaggcgtgaacagcggtggctgccgcggcttccggagtgcaaaaaccggccttttcgagtctagtcgtctccagtctgtcccagagacctccttccaaaagcccgccccggcctcgcctccccaacccctccggtcacttttactccggagggggacgcgcatccgacacccagaccgcaaagtcttccttcttccctggcccacactaaataaacccgaccggcctcccgccctccgcctttcccgaggagactcgtctcccgcgtctaacttaccgcttaatccccaattccttccctaccaaacttctccctctcccgttccttcctgcaccgcctcggcggaaggtcggcctccgggtgtctccgcccccgcccagacctctccaccmggtcccggttaggatgcgagggaagtttcaggttacaggactttttgatctctttttgtaccttctcgcattagcaggaagtggagctacaactgtc

SEQ ID NO: 845578 - DNA, 554 bp, Homo sapiens
tgatctgcctgcctcggcctcctgggattacaggcatgagccactgtgcctggcccatcactgcaatcttttaaagycatctctggtttttttattttttactttaaaaaataaaactactttagaaactctagtcaattatttttccaaactttgatttttttaatcattcaagtaatatttaaattattgcaatgaaaattacaaaagtcaaaatgatagaaattaagaatcacccataatcccaccatagaaacaatcattgtagatatattttgacctattctttcatgtgtaaacacaaaatttttttaaaaatcaaacaaaatggctcattttgatttcttcctcccttaaccacatctacaatatatttttcatttaattgtatttcatttgtactatttcctaattattttaatattttgtcttgcaaataaccagtaagtacttttgaaagcatctaactttcctgggaaaaggggagcaattctacattcctttgactggaatgttatttctttcctgcttcatctacttatctcctcgttatc

SEQ ID NO: 845579 - DNA, 418 bp, Homo sapiens
gtgcattactctccatgtgtatccagcaggaaaatttccaatgaacactaacatggacacacgatcaaacagagggcattagtagggaaacatacattattcaagcctagctaatacagtgyggcagggggatagccctctgattcactatccctgggagaacaggagcagttccagcaccacaacaacaatttgagcctgatagccctggtaccccagcatcagggcagcagtgggtgaggggtctctatgacccggtgcagcccatttgtggtcaggtctgtggagatggctcagggcacctggccaagtgggaggtgaagaaagagtcttcatcgtctccttgtctctggctctagtgttgctagaggaaggggaatgaggaaggggaccagagcaccacagaggccattcccag

SEQ ID NO: 845580 - DNA, 635 bp, Homo sapiens
gaagatctcagcacagtccctggcaataacaagctgtcagtaacggcagctgctgttccattcttcatcttgatttccagcttctaacaccatactggacacaaagtaggcatttcagggttccagcagaaaacaggtgtcacagtcatgtaagaagagtcccaggagtttgatgagtgactcttttgcataggtccttataccctttctctatactctttcacataggtccttatatcctatgtgaaacagtcattcatcaaactcttggaactataaaggtgagggccgactatgggggaaccacccgggaggggcagtatcctggggctggcaactgagggacttgttaccactcccaatcctggagcagagagaaaatagttatctccaaacagggggctgcatgtaagaagacaccatataggacccagatcttctttcacaatctggggctatagccaatttgtgaaaagcccatcaagaggaggcaaagaatgaataygcagaactcactctcttccttcccctcctccagtctcccactgattctcctgttgatctagcccaactggaagccagagagcaagagagcatactgatgcagccccttaggtaagtattctcaggcatgg

SEQ ID NO: 845581 - DNA, 639 bp, Homo sapiens
ttgggaatgaaggaggagaaacatttggatagattgtaatgaactgtagagatgtttggttccagacacctagtggagatgtttaagaggttaatatgattgtaatgagttgtagggatgtttaagaggttaatgtgattgtaatgagttgtagagatgtttggttccagacacctagtggagatgttaagagttgtagagatgtttaagaggttaatgtgattttgagttctagtgtttggctacctctctggtagctcgtttctattctctcagttccacttctttcaggtacccattaaatgttggtatttctgagagtccatattaatcacttgtttccactccattcctactcatctgttcctttggcttcaacttcctgctctgttgctcactgtcaaattattgtctccagacaagacttttgtcctgagtgccaactgttcagtctaactgcctacatgttgtttcaatcagatattccccaggcatgtaaagataaatgtgtacaaataaggaccactcattttcttcccccatttcttttacaatgtagagaaaaatggtcaagagcacagatgctagagttagactccctagatttgagtcccmtatgtcacttactagctttgtgac

SEQ ID NO: 845582 - DNA, 592 bp, Homo sapiens
attttaataatgacatttacacgagctttagcatgtacatgctttctgggcacttgtctaagtgttttccaaatgtggggagagaaaggaggtgatccctttgctcctcatcataaaggtcatggctgacactcctataaaaaaatgacaggttaacaagagaaaagcataatgatttattaatgtgtataagcatgggaaccataaaaaataggaaaactcaaagaagggccacatggttgatgctaaagtaccctcttcactgggttaagagaagtagaggtgtaggagtaattggtttttagggggaatgaatgagcacaaagaacaatgataaatcatagtcaggatgaagttcctgtgagctctgagggaggcagtgggaacacgaggggctgaacttcactgtgaacaaaagttgtcttattatgcagatagcatctcccaggtaatctctggagctgccctaacaatagatgagaagtctgtctggacatgstgatgactcctagtctcttcattgggattcctagaaacggggggtcttaaaataattgcatttctttgataaagaagctttcttggtcatata

SEQ ID NO: 845583 - DNA, 640 bp, Homo sapiens
tgccaatgcattatcttctatctggcctttaaggttgcatctgcccaaggctcctttttggttgtcatttcatattcttcttttgacaatctcttccacacggtggcttcaattacaacctgaacattacaackctcacatgtatagttcctgggctaaactccagactcatttttaactgactgtttgaaactctacttggatatttcaaatgtatttcaagctcagcatgtcaaaagccatatttataatcattttttttcccttatccacaaacctcaagcctcctccaaggtttatttgttgattccttcagtcatctactcattcatttatttattcatcaattctacaaatatgcaactggtttagttactggaaatacagcaggggtaagacagataatgctcctgttctcatggtgcttatatgccagtggatgaagacagacaataaaaaacaaatacgaaaaacttcagacagtgaccatgtgcaccgaagaaaaaaactgggcaatgtaataggatgtgattaagagatgctacttactttgtccagtcagggaaacctctctaaagagatgatattttggatgaggaaatgacaggaaggagccacacatgcagagatcagagggaca

SEQ ID NO: 845584 - DNA, 605 bp, Homo sapiens
agttcaccatagtataaaaccgtggtaaactatggtatactatggtttaccatagtatactatagtagaagacacacatttagcagctattaaaagatccagctattgatcagytagtacaactcgttctatagagtttgacttagatgctagaatttccttcatccccaaactacaattatcatcatagagacaagaggacacagatctatgagtctctggagctaggtagaagacagattacaggtagccctttcctgaaaagccaggtcagcttgttttgctgaattttccatcctgtaggttgaattcttttccaggaggctctttggtttccgtagaaaaaagtactttgtggttcctgccctatcggttttccagataggctgggcaggtctgaaccccagtgatggacatagattagacccaaattgtcatccctgctgtgattactctgaggtcactcatttaggatcactttttgcatgcatgtgtgtgtttgtgtgtgtgtgtgtgtgtgtataatgcattttgtatttatacagtattatagtagtatataaactgtataatagtacttatacagtttaaccagtgagatggtt

SEQ ID NO: 845585 - DNA, 613 bp, Homo sapiens
gtctctgcctctttgtttaaaccattcactcttcctgtagaaccccgtggcccattraaatcctcccatttccacccagtcaagttcctagacctttgagttctctttttggttattgttcttcatctcttggtgcatgtgctttctaatattttaatttttttcaaaatactacatatatatagttataaaattcaactaatagcataagacataataaattttgaaaaaaaaaaaagcagcagtcttctgccacactacacccagaactgctgttctggcaactgttgtgctggcaaccactgtcaattatttgttttttctcatgatacttccttgatatttagaaatgatatatttgttctgtcctttcttgattttagacattagttattgacttcctgctatggagataggtatttggctctctcatccactgtcctccacactctttagccactcagcaacacaaaggcctttctgcccatcccgccagagtatgttgtaacatagctttttgctaaactgtatttaacatttatgacaataagtattcacattcgagccatgtagagtattcaatttccttcctaaccattctttgtttttccta

SEQ ID NO: 845586 - DNA, 613 bp, Homo sapiens
gtctctgcctctttgtttaaaccattcactcttcctgtagaaccccgtggcccattaaaatcctcccatttccacccagtcaagttcctagacctttgagttctctttttggttattgttcttcatctcttggtgcatgtgctttctaatattttaatttttttcaaaatactacatatatatagttataaaattcaactaatagcataagacataataaattttgaaaaaaaaaaaagcagcagtcttctgccacactacacccagaactgctgttctggcaactgttgtgctggcaaccactgtcaattatttgttttttctcatgatacttccttgatatttagaaatgatatatttgttctgtcctttcttgattttagacattagttattgacttcctgctatggagataggtatttggctctctcatccactgtcctccacactctttagccactcagcaacacaaaggcctttctgcccatccygccagagtatgttgtaacatagctttttgctaaactgtatttaacatttatgacaataagtattcacattcgagccatgtagagtattcaatttccttcctaaccattctttgtttttccta

SEQ ID NO: 845587 - DNA, 391 bp, Homo sapiens
tgtgccaacggctaaagtcagtagaaaggagctcaactccaaccgcaaccgggcagacgagacctcagaaaaagaatagcaagcagcaattgaacacatttgtgaagtacaaaatgaaacagacttcatgaacaagccagtgaggagaatttgaaagtagaacagaaatagaacaaactctgccaatcattttttcagaagaggtcagaattgatcattgatggcccaaatcccacatttttgggtaacatcatttgtcaaccacccacgagtgtctgcactgcttgtggaggaggatgaagaggcactgcattatwtgaccagagttgaagtgacataatttgaagatactaaattaggttacagaatagatttttattttgatgaacat

SEQ ID NO: 845588 - DNA, 552 bp, Homo sapiens
acctgtggggcacagcaaaagtagtattgagggaagtttatagcaagaaatgtccaaatcaaaagagtagaaatattacaaattaatcaagcaacacaacacagagaactaaaaaagatctaattaaaccccaaattagcagaacaaaaataatagagattaaagcaaaataaaatcaaatagaggctgcccaaaatacagaagaccaatgaaatgaaaaattgcttctttgaaaagataagcaaaatgggtaaaccactagatagactaaccaggaaaagaagagagaagattcaaagaaacaaaatcaaaaatgaaaatggagacattaaaatgaatatcacaaaaatacaaaagatcatcagagattattatgaacatctatatgctgacaaacaggaaaacctagaggaaatagagaattcctggaaatacacargcaactgagattgaatcaggaagaaatagtaaaccagagtagatcaataatgagtagtagattgaatcaggaataaaagatcttccaacaaagaaaaactgaattgcatggat

SEQ ID NO: 845589 - DNA, 552 bp, Homo sapiens
acctgtggggcacagcaaaagtagtattgagggaagtttatagcaagaaatgtccaaatcaaaagagtagaaatattacaaattaatcaagcaacacaacacagagaactaaaaaagatctaattaaaccccaaattagcagaacaaaaataatagagattaaagcaaaataaaatcaaatagaggctgcccaaaatacagaagaccaatgaaatgaaaaattgcttctttgaaaagataagcaaaatgggtaaaccactagatagactaaccaggaaaagaagagagaagattcaaagaaacaaaatcaaaaatgaaaatggagacattaaaatgaatatcacaaaaatacaaaagatcatcagagattattatgaacatctatatgctgacaaacaggaaaacctagaggaaatagagaattcctggaaatacacaggcaactgagattgaatcaggaagaaatagtaaaycagagtagatcaataatgagtagtagattgaatcaggaataaaagatcttccaacaaagaaaaactgaattgcatggat

SEQ ID NO: 845590 - DNA, 450 bp, Homo sapiens
tattctttttatgctactataaatgagattgttttcttaatttcctttcatgatagtttattgtgtatagaaacaccattgatatgtgtgtgttgatttttgtgttctacatctttactgaatttattaattctaatcatttttcttgttgagtattaagggttttctgtgtacatcatcatgtagattttataaatcatatcgattttgtagattattgctgcagacagataattttaccttttactttagattttgatgccttttatttctttttcttatctacttgctctgtctagggcttctaacactgtgttgaatagaagtagcaagagtggacattcaygccttgtcctggatcttagagaaaagattgattatgatgttagctgtgggattttcatatatgccctttattatgggatttttttttggatatgacaccaaaag

SEQ ID NO: 845591 - DNA, 600 bp, Homo sapiens
tgaaaattagcagggttgggcctggttaatcctgcgatgtttgagaatgtcagtataaaagmctttacaagattaaggctggaatggaaacagccagggcttgggacaggcttgtgttcaaatcccatcttctgccatagctagctgtgaccttgggcaccctcacctccgtgagcttcattcctcctgccttgcaagattgctgcatccgtctctgactgccttttcaaagatcgaatccctctctgcactctctgcttggtctgtcccatggcacttatcttcttttaacatactatataatttaattattttattgtttgtcatccccactagaaattaagttacacgagggcagggatttgtgtctttgttctccctactgttgtatccccagcatcaagcatagtgcctcccacatagtcagtgttcaaacgaacttattgaattgagtggatataaaataccaagcaaagtgtcaggattatacaaggtttcaatgaaatggtaatcatgattatgatgtggattgccatatgttttagtaagatagctccaggcagaaagcagggaacctggaatgcagaattctggatctct

SEQ ID NO: 845592 - DNA, 449 bp, Homo sapiens
aaaactgtgaagtacaatccaaaaataagttagtcattctagtccctgggcctctgtctcctaaaagcgtgagaagtctcctgagaggggctagctagtgtggttgggcatgggagtccttgtggctgtggkgggggagggaaagggcacattcatgaaatgaacccgaggggacaacccgcagcaaggagagagaaatgtgggttttgcatttcctcttgatctctgatgtatgaaaaggagctctccatggggttcctcttgtgatggacaggaaatgcccgctaggtcgcctgttgagaacaaaatcgatgcattgaaaggaacagcgggagtgcagaggaggccggactgtactgcccacagggtaagcagggtgggaaaccagtgcacaaaacgtggttacaactgttctgttcgtttgttcagttacattcaaaatatgctta

SEQ ID NO: 845593 - DNA, 501 bp, Homo sapiens
aatgtagcggcagctctgactaggacttgctatctgtgtcatccctacttcccaggctcccctgctcctctcttgtttccacggcaaccagtctggcgacagctccagagcatccccctcccctccccagtcctgggtaccactaggggttgatccaaaccacacgccatagctatttttagccaaagtccctcctcctggacaactcagagcttggctcctcaccccctcataggaaaaaaaaaaaaagaagaagaaagaaaaacaaagctggcacgctggctctttcctaagaagctccttcctgggggaaaatacaagccctcatgtatttgagaataaggtgctaggttccctggggtttcagagggccatctggtagctggcagctcaccaccttcaacatgggtctctgcgtgcaggtgctgctctcaggtcaggctgaccatcayggtctagttttggagaggccatggatccagaaggcggtagctagaagga

SEQ ID NO: 845594 - DNA, 606 bp, Homo sapiens
cttttcaaagatggccacaacaatagcgtccatgccatatgtttgtgtacagtgggaccttgccatgacccatcaagaggtggagtctaattcccttcctcttgaatctaggctggcttgtgactgcttcgactaatggagtctggtggaagaaatgcccttcttgaattccagaaccacgaatttgggagtaaaataaaatggtggtcattctacattttgggggtcatctattacacaaccataatacctggaacatttagctactgctcactggggaagacagtccagtgaaatgcagcagttttcaaccttgggatacctgagaatcaagtggagctctcatgaatgatgcagattcctgggttccacctctagaggttctgactcacaggacttagggtggggctgagaaatctgcattttaaaatgagcaccctggaaaattctgacactgggtaaccaatcgaaaactttggtgaatcatgtaagagcaaaagctaaggagccagaaagacttggatctgaattctggttccrtggctaccatctcgctgtgcctttgttcctcatctgtagagtgcaggcagtcatatttcctacttc

SEQ ID NO: 845595 - DNA, 699 bp, Homo sapiens
caccagtgtttctcaagcaacttatttgactacagaacctttctcatactcctcatagtgttctgttgataatgttcatcacaccatggatgggttcggtctcttggtgggtatcaacccagtgaccacaaccaagaaagatttagcaaggggattttattacatgtaacaaataaggagaacgccaggggtagtttccaaagcagtgtctccctgagctggggctgagtcaggttttataagcctaggataatgaggcgtgatctgtttggatcttgcaatgaggtgatgtcaggaggcgtgatctgactggaccctgccatgtagcatcagcttcttttttattgagatggagtctcgctctgtcgtccaggctggagtgcagtggcgcaatctcagctcactgcaacctccgcctcctgggttcacgccattctcctgcctcagcctcccaagtagctgggactacaggcacccaccaccatgcccagctaattttttgtatttttagtagagatggggtttcaccatgttagccaggctggtctcgatctcctgacctagtgatctgccctccttggcatcccaaagtgctgggactacaggcgtgagccrtcgcacctggccagcatcagcttctgaattcagtccccactcctcggactgagcccttaggatccccctgtggttgcacccttg

SEQ ID NO: 845596 - DNA, 566 bp, Homo sapiens
taatttttaaagtattgaaatcattacctggaagatattagaggtttttttagattttttttttttttttttgagatggagtttcattctagtcatccaggctggagtgcaatggtgtgctctcagctcactgcaaactctgcctcccgggttcaacgtttctcctgcctagcctcctgagtagctgggattacaggcatgcatcaccacatccagctgatttttgtatttttagtaaagacggggtttcaccatgttggccaggctgttctcgaactcctgaccacggtgatccacccgcctcggcctcccaaagtgctgggattacaggcatgagccatcacacccagctaaggggtttatatataggtagctacagttgacccttcaacaatgagaggatcaggggcatcagcgcctctgctgcacagtgggaaatccacatgtaacttttgactttctaaaaaacttaactactgatagcctactgttgactggaagactcaccgataacattaacagccacttaacacawattttgtgtgtatgttatgtgtattctgtac

SEQ ID NO: 845597 - DNA, 614 bp, Homo sapiens
tgactttcattttacctacctggcctagtccctgctaccatttgaatttctgacacttgacaggaggagggacaatgacattaaccctgggacaactgcagcattccgggggtaggtacaggagtaagaagtaatcagtgaagaaagatagaaggtcactaggaaaaaaatgctgttttggaaacaaaaggtctttcaatacagaggtgatattggtacagaaacttcaaatagaggccaggcacagtggctcattcctgtaatcccagcacttcaggaggctgaggtgggtggatcacctgaggtcaggaggttgaggccagcctggccaacatggtgaagccccatctctactaaaaatacaaaaaattagccgggtgtggtggcacgtgcctgtaatcccagctactcgggaggctgaggcaggaaaatcgcttcaatctgggaggtggaggttgcggtgagccgagatcacgtcattgcactccatcctgggcaacaagagcgagactccgtcttaaatgaaaacaaaacaaaacaaaaaacaacaacaactaaaagaaagttcaaatagaataaraacaaagcgttggcaattaggagattactggtag

SEQ ID NO: 845598 - DNA, 627 bp, Homo sapiens
ggagaagagacacaacatggtgactaactggatataacgtgtgaaagatcaatcatgattcttgtgtttcatgcttatgcctttgcctgatcataatgccatttatagaaacagggaagatggtatacttttaacagagaagaggattaatacagtttttggacatgctgtgtttaaagcctttgtattaaaaatgtggaccacagtctgtaggactgtaagaaatatagactctcaggacccatcccaaatttatagaattgtactctgtattttaagaagatctccaggtgattcttatatgtatattggtttaaggtacctatgaaatcatctaaatggaaatgtcccatggaagtaaaaaaatataagaaatacaatttctaacaaaactttatgtaaagatatagattggtagtcatcagataagtactgtaattgaaactgagggagtgggacaccattcggtagagtcagaagagaagaaaatctcaagataatagaccctgactaacaacaacgtttgaagtgcaggcagtagaagagatgccagaacagaagagaaagaaatgttaraagtagcagaaagctaggagataatgaagtcacacaagtgaagacagtttc

SEQ ID NO: 845599 - DNA, 511 bp, Homo sapiens
tttcatacagcagaaaaatacatcacacagaaactatttttagcaaaatttggtcagcgaattctcagggaaaatattatcacctaaaccatgtttagtgatctactggtgttttaaatttgctgttcatcttcaagtcttccccatactttctgattaatgacactttcatactcactttgagtgatggcattcttgcttagaaacaatggatgaatactgaggattaggggaaaaaaaatcagcgttataattttaacaaacaaagctggcaaatataattctccaatactatatctgagattaaattactactcatcttggagtgctttttactaaattctgaaaaaatacaaagcaatgagtttatgcctaaggaaactcactaagtttaaaacttattttactataccattaaagtgttattcctttttgtatctttagtttctgccttgaaactgagaagaaaagttatraaacaagcaagtaacatctaccttgatttaaacta

SEQ ID NO: 845600 - DNA, 567 bp, Homo sapiens
gcaggagaatcacttgaacccaggaggtggaggctgcagtgagccgagatcgcaccactgcactctagcctggcgacagagtgagattccatctccaaaacaaacaaacaaaamaaaccagaaatgagtgatcctgaaatagagcttgagggcaaggttggatctataggaagaaggatacaggtggaaagcccaagaggagaagagctgaaaggtgggaaagttacagcgtctttggagaacaagaagtcatcctgttacattggaatgtagatgacaagtagaaaagaagaaaaaataaggattttttgaaaaataatgaggccaggcgtggtggctcgtgcttgtaattccaacactttgggataccaaggagggaggctcatttgagctcaggagcttgagaccagcctgggcaaaatgctgagaccctgtctctatttttaaaaataaataaaaataaaaaataatgaaaaatcagggacatatagcagagagtgttgaatgtgaattggtaagtgtagcaagcaagggagatattatcaatagcttctgaacacagaattg

SEQ ID NO: 845601 - DNA, 474 bp, Homo sapiens
ctcattatttagaggatgaaaaattacaatcattccactgaactggaagttaagacagccacccagccactttgggctcctcacacctctgaatcaataggcaaggaagggagttacagtgttggctggggtaattgatcctgcccaagaggaactggaactgctacacaatggaggtaaggaggagtatgtctggcttaaggagatcccttaggacatctctgtaccctgccctgtgattacagtcgataaaaatgacaacaatccatacaggactatgaatggcccacacccctgaagaatgaaggtttgggtcaccccaccaggtaaaccacgatcagcttgcgagatgagtgcmaagggaatacagaatgggtagtggaaagaggcaaccatgaataccagcaaccaccatgtgaccagctacagaaacgaggactgtaattgttgtatttcttgttttgttacgaatgt

SEQ ID NO: 845602 - DNA, 539 bp, Homo sapiens
gaacactgacgccactaaatgctggggtggatgtggagcaacaagaactctcattccttgctagtggggatgcaaatgggacacacaytttggaaggcagtttgggagtttcttacaaaactaaaattttttttgtaagaaaaaaattcattcggtcaccatagagatgtcaaaaattgccaatgctggccgggtgcggtggctcacacctgtaatcccagcactttgggaggccaaggtgggcagatcacttgaggccaggagttcaagaccagcctggccaacagggtgaaaccctgtctctactaaaaaaaaaaatacaaaaattaggccaggcgtggatggctcatgcctgtaatcccaggactttgggaggccgaggcaggtggatcacctgaggtcaggagttcaagatcagcctggccaacatggtgaaaccccgtctctactaaaaatacaaaaaaaatagctggacgcagtggcacgcacccgtagtcccagctactcgggaggctgaggctggagaatcgcttgaacct

SEQ ID NO: 845603 - DNA, 496 bp, Homo sapiens
cgaaactctgtctctacaaaaactacaaaaactagccaggcatggtggcgcatgcctgtaagtctcagctactcagggggctgaggtgagaggactgcttgagcccaggaggtcaaggctgccctactgcactccagcctgggtgacagagcaagcccctgtctcaggaaaaaagaaaagaaaaaaaaaaaaaggaatgaagtactgatacctgctacaatatagatgaactttgaaaatattatgctaagtgtaagaagccaggcacaggaggacatatattgtatgattccttttatatgaaatagctacaataggtaaatacatagagacagaaagcaaactttggttgccaggagctggcaggaggaagtaaagtagatagactgcttaatgaatattggttttcttttaggtgatgaaatggtttggraactagatggaggtagtggttgcacagcattatgaatgtactaaacaccactgaattgtaaac

SEQ ID NO: 845604 - DNA, 408 bp, Homo sapiens
aacccaggagtgcaagaccagcctggtcaacacagcgagatgtgagacgccatctcttttttttttttttttttgattgatacagtcttgctctgtcgcccaggctggaggtcagtggtgcgatcttggctcacttctacctccgcctcccgagttaaagtgattctcctgcctcagcctcctgagtagctgggactataagcatgcgccaccatgcctggctaatttttgtatttattatttatttgtatttatttgtattaatttttgtattatattagctcaatatttaatgctttccctaataatttgatttttttccaaatcataattatacaatatgtagaaaacatcaatttttttcaccaaatctgatagggatccraactccccccagttaacttcagt

SEQ ID NO: 845605 - DNA, 632 bp, Homo sapiens
aaagttggctaactcttatggactatatccatgcaattgcccataatctattcctgtaattcactttttcatatgtcaagttttgtttttaattgctttttcttggctgggtgcggtggctcacacctgtaatcccagcactttgggaggctgagagggggtggatttcttgagatcaggagttcaagaccagcctgaccaacatggtgaaaccctgtctctacccaaaatacaaaaattagcagggcgtggtggctggcacctgtaatcccagctactcaggaggctgacacaggagaatcccttgaacccaggaggtggagattgcagtgagccaagattgcatgactgcactctagcctgggtgacagagtgagactctgtctcagaaaaaaaaaaagaaaaaaaattctttttcttttttgtttttttttctactgttttaaattgtattattttttatcattctatatgctatgtatttcatgttcatatcatttcccatactggaggtataaackgtgtagaattttttagagacttctgattctgattcatttcatgcattttttttttaaaaaatttgactccatgaaagtgtgttataatgttcactttgcggataagtattg

SEQ ID NO: 845606 - DNA, 624 bp, Homo sapiens
acttgtaacttgcattaaggtgctcaaaatatgacttggaccctgctgttataaaataaactgaacaaaacttgtggcttgtgttattttagcttaatcctgaaactttggctctgatagtcatggttcccaataaataagaaaagtggggaagccagaagtagtcatgccatcagtctagtaatagactaatcagaggagaaagaaattttacccatcttagtgataaagtcaggcagagaggctaacaagataggatagatgaatttcagcagtattgaccataacccaaagatatgtagttaagtgaatcagttttgacactgtccctgataataaaagtgtcaacaatatcctaaaggaaaaaaacaccttggggtcctaaattgagagcttttagtgtggaagagatttagatgttggttaagagcacaaggtcccaggtattttaacactgatgatgtttatgcaaaactcagacttttaaaggaaktttttttcttttgtccaatgctattgtccatgtccttcttgtcttcctcaaatcacagaagtttttcccttggctaacttatttgtttctttctttatactcgcagctatcataacccaaaggttaaggaa

SEQ ID NO: 845607 - DNA, 624 bp, Homo sapiens
acttgtaacttgcattaaggtgctcaaaatatgacttggaccctgctgttataaaataaactgaacaaaacttgtggcttgtgttattttagcttaatcctgaaactttggctctgatagtcatggttcccaataaataagaaaagtggggaagccagaagtagtcatgccatcagtctagtaatagactaatcagaggagaaagaaattttacccatcttagtgataaagtcaggcagagaggctaacaagataggatagatgaatttcagcagtattgaccataacccaaagatatgtagttaagtgaatcagttttgacactgtccctgataataaaagtgtcaacaatatcctaaaggaaaaaaacaccttggggtcctaaattgagagcttttagtgtggaagagatttagatgttggttaagagcacaaggtcccaggtattttaacactgatgatgtttatgcaaaactcagacttttaaaggaattttttttcttttgtccratgctattgtccatgtccttcttgtcttcctcaaatcacagaagtttttcccttggctaacttatttgtttctttctttatactcgcagctatcataacccaaaggttaaggaa

SEQ ID NO: 845608 - DNA, 645 bp, Homo sapiens
aaaaaaagtggacctatttataaccatattgtttatttgaatactttcaaaacgtctgaaatatcttagaattatgaattgcctaagaactaaatggtttcatatatactatgctttttatcrtaatatcagtgagataactatggttcttagtagaaatataagacataatcttatatccctgtatcttatgtcagaaacatgatgaattttcattttcaataaatatcaagtatgtttttgaaaaatttttggaggctgctaattctggagtgaaagcagagacctcttatgtgaactaataattactgagtcctttagcttgtatacatctaatttatcaaacgtttttggcttaaagtatggtatgaccatatggttttgctgttttcttattataaaattaacagagttttaaaactagttgagactagatgttttcatctaaccttcttttacagatgagaaaacagatccagaaacattaagtactcacataaattaattttaaggccaaatgtgatttatatctttatttcattttagtagaaaatgaataattattttgtgatcgtaaaactctacaatctgctttcagggaactaattaatatagttagttgaaaaaataatgaagtgtttgtaa

SEQ ID NO: 845609 - DNA, 606 bp, Homo sapiens
aggccataagtaccattttcgaatgagtcatttaattatctgtcctgatgcaaagtagacagtcagtaattatagactatttcagggattgctgaaacctatgttagggagcaccaacagtctcactttrgtaaaaatcatttctacttcctctggatccacatccctgtttaattaaagcagctttgatcttccttcatcctcggaatgccatcttcgttttatccctaagtataacttttgcaacattatcaagttttcatagtctccctatctaactttctttaatggaagcatcgttgattaattttgcaataagaagcatatcagcgtttgttgttgttagggttcttacaaatattttgttagcatttgatccaccatactctgtaatctgtcttttcttctccacctcttcctttttcatagtttttttaatctagtgtctagttaaatagattatctcctagtgttttaaaattaaaagccctttaactcctcaccaatattttgtgatattttgtaccatcgtatagtttcaaaatgtatatccttgttttcttctctttcatcaaggtattgaatataattttgttattgttacat

SEQ ID NO: 845610 - DNA, 629 bp, Homo sapiens
tggactcttgccagacgatgtgttgtccttcaaaggataccagcttccgaccaccctgggttcaaaccccagggccggcacttactatctatgcaaacacggggaaagttttcgggtcagcctgagcctcrgtttcttttctgataaatgagcataaccctacttgctcataatggtcaggtgctgtttctcaactgcccattcccatcagcactttcaattcctctgaggacaccacctctttcctattggaaacatttttgacagggttataaatgaaggtgacctgccctcccccagccaaaggggccaagaaccttaagttaggtcaactggactcccttttcctggactttgaatctggactacagtcacacatggatggaaatgaccaatggatggtggcaggtgggtgcatgcctgctcccttttgcctggtctgagcccttcctggatgtgtggactctgtgaatgccttcttctccctgcccagtcgtcacctctggacttcgacccaagccgacttggcactgggcctctttggtctggttaggtctgacaccttgactcccgtgaacttgtaccacttttcgtctataccaccaaccccaaggagtgacccttactgt

SEQ ID NO: 845611 - DNA, 621 bp, Homo sapiens
ctcaattttatcttccaaacttcctattgagtttaaaattttttrattttatttttaacttctgagaactcttcattattttctgaatgtttattttttagagtctcttattctcaaattcatggatgcaattatctaaccctattataaggataacatttacagatttctaaatgttttcttgttttcattactgtctccctctaagtttcttttatctactggtctgttttgatttctttcacattctaggtactctccaaatgtctgttaatctttgtccatttttaagacacgaaggcattatcagcatggtaaggcgctaaaatgctgatgcaaagctctgtgtgcatataaagggcttattgtctggtgacagtaaacagtggtgatcagatgggaaccaggctgttttgttaaagatctcccaaagcagcatccgtagacatttctcttgagctggccaatttccctattgaagaatctttgaggaatataaggttggcttctgatattctggagcagagtgtggcggtgcggggtggtgggagtgggcgggacttgggttctaagtattcacacgatccccgttttcggtagggaggctaatagccatcctca

SEQ ID NO: 845612 - DNA, 620 bp, Homo sapiens
ccatgataagattagcgtccttataagaagagaaaaagactagagttgtttgtttgtgtgtgtgtgtgtgtgtgtgtgtgtgtgtgcaccaaataaagcaggtaaagccatgggaggacataaccaagaagagggtcctcactaaaacctgaccctgatgacaccctccagaactgtcagaaataaatttatgtttttaagctacatagtttgtattagttcattctctcactgctataaagaattgcccaagactgggtagtttaataatgaaaagagatttaattgactcacagttctgcatggctggggaggcctcaaggaacttacaattatggcagaaggcaaaggagaagcaagcaccttcttcacaaggcacggagagagagtgcaaaggagaaactgccaaacacttataaaagcatcagatctcatgagaactcattcactatcattagaacagcctgagggaaagtgatcccatgatccaatcacctcccaccaggttcatcyctcaacacctggggattacaattcaagatgagatttgggtggggacacaaagccaatccatatcacagtttataatatcctgtcttagcagttggaactaagacagt

SEQ ID NO: 845613 - DNA, 616 bp, Homo sapiens
cattcaatcattgaaaaatataactaagagaataataaatgtggctacatataaattaaaaatkttgttgcacacaaaccaaacataaactaaataaaaaggaaaaaacagaaaaagatatttgcaaaaacaaaaaagaaagcctttagaagcttagtattgtagcacataaagagcttttgaaaaatcagtaaaacagtaacatccaaatagaaaaatagacaaaggagaagaatagataatttacaaaagaagaaattaaaatgcccaggagtttgagaccagcctgggcaacatggtgaaaccccttctctacaaaaaatacaaaaattggcctggcatggtggcacatgcctgtggtcccagctacttgagaggctgaggtggaaggatcacctgagcctgggggtgaggttgaagctgcagtgagccatgatcacaccactgcattctagcctgggcaacaagagtaagaccctgtctcaagaaaaagaaaattaaagaaatgaaataaaaatgtccaataataaaaatgttcatacttactagtaatgagagatgtaaatttgatagggatgagattcatttattgtctagtaagttattgtcagcagga

SEQ ID NO: 845614 - DNA, 541 bp, Homo sapiens
agatgagtaagcattggcctttttcctgtatactaaaaagagcatttgaggatttatttttgaaatcaggaggcagatatgctcagagatatgcttgagaagggagtctttaagaaccgcacgaagsccttaataagtgtgagaaagaccagcagcataacaaatgaaaggggaaggagaagaagaggaaaaagggttggaagtgtaggcctagcactatggcagtcctcgtgaaggactagtcacagattccagtgcctgtaggtgtagatagtcctgtgaaaattgtttcgagttcccagttattagtacaatgagttcaagatgtgggtggctctctttatgattgaaaacaaaatatctagcatatcatttctgcgtagacccaaaatttctttatttgtagacctttcttatttcaaaaccagatttgagccatcttagtgatacatgcaataaacataaaaataaagaaataaaatatataataaaaactagaagaagtgctcaggtataaacctataaagaatacatgggggaa

SEQ ID NO: 845615 - DNA, 576 bp, Homo sapiens
aatgctctcaaagcttagctattattattaaaaggtatttctatatttcttcttcccatcttaacaaataacaagtttttgaaaatgtgaaatccagatgtgaatttgaatgactgataatttaatttattttcagtcaattgttacgtatgttttctttttcttcccaggacatggtgacccaggcatctctgtatctgcttgaagctacaggaaagcgattttatttcaaaaatgttgccattttgattcctgaaacatggaagacaaaggctgactatgtgagaccaaaacttgagacctacaaaaatgtgagaatatcaagttcttctttaaaattccactttctcctgtaaccaagattttttaaaatcaaaatattctagaatcaaatgtgattgtttgaaacttactccagtacgaatatggttaattcatttgctgaaactttgtgatgataraaactttttcttaaatttcaggctgatgttctggttgctgagtctactcctccaggtaatgatgaaccctacactgagcagatgggcaactgtggagagaagggtgaaaggatcc

SEQ ID NO: 845616 - DNA, 606 bp, Homo sapiens
gaagcataaagtttttgtttgtttgtttctagtatttactatgagaacctggtcaggcttctggaggtaaaacttacataaatgttgcacctgccctgccscgcgcccatggctggctcaccctggagtttttaactctcagacttgtccacactgagcttccagcaagtagtcaattacagttcagatttcctgccttggcactggttctcatggtggtttccactcctaagtctatacaccagtaagctaagatccggtattcacctgtctgctcctattttgggggcagcagtttgccctgtgccctgtgtcctcacctctcttagatatctaagaagagttgttgatttttcagtgtgttcaacattttacttgttagaatggagtagaaacttcaaagctccttacctgtgaaatgggaaatgagaagttgatccccagctttttcataaataatgtagtatttttttaatgttaaaagaatgtcaggaatctacttccccaattcacatacataataataacagcctctatttgttgaacacttactatgtgacaggcagtgttctaagtgtctcatatatatatatatatatatatata

SEQ ID NO: 845617 - DNA, 652 bp, Homo sapiens
aataacggcttggcacttactaggtgcctgattaacatttgataagccaaaataagtatttatattttaagaaaacgtacagttatattagatctaaagaaatcaagtctttaatttaaaaaattaacacagcaaagcataaatattccaaacattgctttcttccagtgtgagaaggtaattttgccattcttattgtaatcagttttttaaaatactttctcacaggtagggcatttgtccatgagtgggctcatctacgatggggagtatttgacgagtacaataatgatgagaaattctacttatccaatggaagaatacaagcagtaaggtatgtatattttgatttaacttgttccaaactattttaaattgcaacctttttttcttgaattgattactttaaaaaatgtgtgtcctggcttattttctaattcaaattcattcttagtgccttctttttcagatttccacaaaactaccattttgtttactttacaagtgcttcagttaattgaattattcactctgcagctagaagtcatttgcctccttttttctttttttttaactgtaycaactataaaaaatctacagttgctgtgtttagtgtctccatcatcccataccagcatcagtgacgtaagca

SEQ ID NO: 845618 - DNA, 612 bp, Homo sapiens
attaaaattattttttattttattaaccttttaggttgttgaattttgtaacgaaaaaacccataatcaagaagctccaagcctacaaaacataaagtgcaattttagaagtacatgggaggtgattagcaattctgaggattttaaaaacaccatacccatggtgacaccacctcctccacctgtcttctcattgctgaagatcagtcaaagaattgtgtgcttagttcttgataagtctggaagcatgggggtaagatcactttttctggatatagggatgtaggatatttgaagatccgagaacacactgaactctgtctgcacctagattgttctaaattgcatggtggcataaagtaccatcactgcccatgatcatgacttcaagatactgcagcaaaataccatagtaaaagaaagatgccagtataattaaaaatacctaatccaagggtcacttcctccttggattcctcyagaaaatggactgggcttctaggctggttaaagcccttctactgtttcccaacaatgtcctgcgcatacctctgttactgtatattatatttatgttacacatttctcttccactagcctaggagatcctct

SEQ ID NO: 845619 - DNA, 571 bp, Homo sapiens
accagagcctctctcacttttaggctcacctgtcctaggttctcactccaaaaattctttgctttgctgggacctctgatcctttggtccttcagaccactgtctgtccggatctctcctaatagcgtcacttccctcccatctagtttagatttcatggcccattattataatttctcttcccctgtcacactcactagtcaaaaccccaaatgtagttaattctgcctctccacttccccaacccctgcatctgagcccctgactgtagctgcaaaacaacacaaggacatgctgatggatcttgctttaacattatgaacacagagccccaggaggtcctcatcatgcctcgagatcctactacactgtcctggccatgccacccctcctctccgtgatgatctcactttaagaaagtagaagctcacaggagaaaatgtcttcattcactcatcaccaaatccatatgtatcctgtggttccacagratacgtgttttcctttcactgtattgttacagtggatgacaataagaaaaaaaagagctaacatttattcattgtttcct

SEQ ID NO: 845620 - DNA, 602 bp, Homo sapiens
tggttgagacaagcaacaaggatgatgaaagggctgtagaaaagattaaaggagtcgatttgatagggaaagaataatggtgcatttgtagacagcatgtaagtgaagaggccaratctccagtgctggggaaggcttttttttttttcttgttggcttttgcccttctctcagacagtaccctcggatgcaagtgaaaaccgaatttggggcacggtgagcatacgaagacatcgtacctagtaaagaggggatagaggcttaaaaagtggctttaagatgaaccatcagaccgggtgcagtggctcaggcctgtaatcccagcactttgggagactgcagtgggtggatcacttgaggtcaggagtttgagatcagcctggccaacatgatgaaaccctgtctctactaaaaatacaaaaattagctgggcatggtggtgcacacctgtaatcccagctacttgggaggctgagttcagaggatggcttagcctgagaggcagaggttacagtgagccaagatcatgccactgtactccctgggcaaaaaagtgagactcgtgtcaaaaaaaaaaaaaggcaaattcaaaaataataata

SEQ ID NO: 845621 - DNA, 587 bp, Homo sapiens
caaaaaaatgaaaagaaaatcaaaagaagctagagacaaaaaaattgttttactcactgaggagcaaacctagaagaataaggacataatttacagtgggtttatcatcagaaatcatacaaaaaaataaacaaaataaagagcagagataagtgtttaaagtgttgacagaaaaaaacccctattcacctagcattctatagccaccaaattgttattcacaagtgaagtagaaataaagacttgctctaacaaacagaatctgagggagttcattggctgcaggttttccctacctgaaattgtaaaataagttcttcagaaaaatgtaaatgctatagaaccaaaattcatatccacatacaaaaaggaagagcttcagagaaaaagttaatgaaaatacaatagagtattgtatggttctcattctcggtggatcagacaggtaatgaatatagcacgtggggaagataaataacagtagcatcttacgggatgcaagggagaaagtgggaaacgctgtaagttacctataggacatgtgaaatgctatagygttatttggaagtggacttatattagttaaa

SEQ ID NO: 845622 - DNA, 578 bp, Homo sapiens
catgtgaaatgctatagtgttatttggaagtggacttatattagttaaaaatgtacatagaaaactagagtaaacactaagcatatcaaaaagaagtatcgccaacattctargacaggtgatacaatataatcgtatgaaattctcaattgagaaagaaaagtagagggattataaagaaacaaacaacaactgcaacagaaagaaaacacatacaaacatggtagacattagtccaaccatatcaataaccactgtaaatatgaatggtctgaatacactagttaaaaggaaaagattgttgagtggattaaaaaataagaccactagagtagaaaagataaataaacaagacctgactacatgttgtccacaagaaatccactttaaatataaacacttagataaattcaatgcaaagggatggggaaaaaaaagatacctcacactaacaccagtgaaaattatctggggtggctatagtgatttcaagcccagcagagttcaaagaaaggaaaactattgaggatgaaaagaagcttcacataataataaagggtcaattttctaagaaaaaa

SEQ ID NO: 845623 - DNA, 578 bp, Homo sapiens
catgtgaaatgctatagtgttatttggaagtggacttatattagttaaaaatgtacatagaaaactagagtaaacactaagcatatcaaaaagaagtatcgccaacattctaagacaggtgrtacaatataatcgtatgaaattctcaattgagaaagaaaagtagagggattataaagaaacaaacaacaactgcaacagaaagaaaacacatacaaacatggtagacattagtccaaccatatcaataaccactgtaaatatgaatggtctgaatacactagttaaaaggaaaagattgttgagtggattaaaaaataagaccactagagtagaaaagataaataaacaagacctgactacatgttgtccacaagaaatccactttaaatataaacacttagataaattcaatgcaaagggatggggaaaaaaaagatacctcacactaacaccagtgaaaattatctggggtggctatagtgatttcaagcccagcagagttcaaagaaaggaaaactattgaggatgaaaagaagcttcacataataataaagggtcaattttctaagaaaaaa

SEQ ID NO: 845624 - DNA, 648 bp, Homo sapiens
caatgacagctacaggctccacttctaattctagttctcttgctgcttttaccacatctgaggttactttctccactgaaatcttgaacccctcaaagtcatccaggaagactggaatcaacttcttccaacttcctctagtgttgatattctgacctcttcccatgaataatgagtgttgttaatggcatctagaataatgagtccttttcagaaagtttcaatttgaccagatccatcagaggaatcactgtctgtggaagctatagcctgacaaaatataattcttaaacaataggatttgaaagttgaaattactccttgatatttgggctgcagaatggatgttgcgttggcaggcatgagaacagtgttaatctccttgtacatctacatcagagctctttggtgaccaggtgtattgtcaatgagaagcattttttttttttttttttttttgagacagagtctcgctctgtctcccaggctggagtgcggtggcgcgatctcagctcactgcaacctccgcycctccaggtttaagcaattctctgcctcagcctctggagtagctgggattacaggtgcgtcccaccacgcccggctaatttttttgtatttttagtagagatggggtttcaccatctt

SEQ ID NO: 845625 - DNA, 621 bp, Homo sapiens
gaagtaatgatacctcattaataacaagaatattaagtgataataytttgatttctaacactattctccaatgaaaggaagtagggcttcttggagaaatgactgattatagaattaagttagaaaagatgtgattatcctagatcatcaatttagtatcaataagtgatatagtgctaaccaaacacagatacacacgctcacacaatgatgtggcatgtcaaaggaacacatgagccagcagaaaaagctccaaatggtcaaaattagaacaataaaataaataatgtaatataggagtcgcagctatttgggaggctgaggtgggaggatcgcttgagctggagaagcagaggttgcaatgagctaagactgtgccaccgcactccagcctggatgacagagtgagacccagtcaaaaaaaaaaaaattacaccatatcaatagaatcaaggaggtgaaaaacttcattattatcccaatttacacaaagagggaatttgacaaacacaatgtcccttcatgataaaacattcagcaaactagaaataaaaggggacttcctcaccaagaaaaaaggcacctatgaaaaatcccatagttaacttcaaacttaattta

SEQ ID NO: 845626 - DNA, 510 bp, Homo sapiens
gatgagaggaccagactaagctttcttccccatccaacattttcatcagcaaattaaaccaagagtgagaatctttcctccagatcttcttccaacctctraatacagcaactttgattgttgttaattacccaaacccctgcctagctgaaggatggatggctctgtgtttacaacttgaatgtcttcaaacataacgtattcaaccagggacagaacaatgccaccgcagactggaaagcaaagatattgtttatacaggtaagatgtcttgaaccagctgtctctccagacattttttgctttgtagaaaacaatgaggaacaccgttatagacataaatgaaagctcccaagatggttacagggagccaaaggatctgggagaggcacggctgggctgctgctaattggacaggtggctcttcctgccagctgtcctcattcaacaggcattttttaatgagaaatatttctctgcaattgaagtaatggtcctaatagaatatta

SEQ ID NO: 845627 - DNA, 510 bp, Homo sapiens
gatgagaggaccagactaagctttcttccccatccaacattttcatcagcaaattaaaccaagagtgagaatctttcctccagatcttcttccaacctctgaatacagcaactttgattgttgttaattacccaaacccctgcctagctgaaggatggatggctctgtgtttacaacttgaatgtcttcaaacataacgtattcaaccagggacagaacaatgccaccgcagactggaaagcaaagatattgtttatacaggtaagatgtcttgaaccagctgtctctccagacattttttgctttgtagaaaacaatgaggaacaccgttatagacataaatgaaagctcccaagatggttacagggagccaaaggayctgggagaggcacggctgggctgctgctaattggacaggtggctcttcctgccagctgtcctcattcaacaggcattttttaatgagaaatatttctctgcaattgaagtaatggtcctaatagaatatta

SEQ ID NO: 845628 - DNA, 605 bp, Homo sapiens
cttggattgcagtaattctgtgaagaaaaactaaatagaaatacatttcccttaatgtgattatstctctattggagcattatggctggatatagcctagaaaattctattacacattcattaaaatggattttgttcagggtttgagaatataataaattatcttaggacttagccccaatataacctgccacttatctcccaaggagctttcttaggctgctcagtaaatatattatcccttttcccccacatgcccatcctcaagggaaaagtaaagaaaaaataattaggtgcataaaacccttccatggaaacaacacaattttaggagaatcaaaaatctcacattttaaggaaatgaagaatgatatcaatatacatattatgatacaaattttgagtgaaattagccttcagaattgtttaacctagtttcctgcctcccagtagtatagcctgtaagaagacttaattgcctaaactccctgacaacttattttgtagttttggggtgaacatataaggcagaatgtgaatttttcctcagttgagaaatcaagaagtagatttttatgctactgcaatagcttctcccagtcttt

SEQ ID NO: 845629 - DNA, 505 bp, Homo sapiens
ttggtttccttttccttggagctccaagttcactaagagtaaagttaatttatgtctttaaccactctttctaattggtctgccaccaaatgggattgaatttgtgtttgttttcatttctgttctttggatactgaaatatccaccatcatggtaactgaattgaattaagttgttatctccatggccttcagaatgccaatgtgtattctgggtacaaggtagtaacaaaaggacccataactgccaatatgctaagatgtcttctgtcacttagtaaaacaaagagaatggaaagcaggactggtaagccctggcaagtactaaaaaaaattacatactatggggtgctggtgctagaaagaagaccaacatagggaagtgctgcaggtgtaagagcaggtgacagctatgtgagagctctagaaataaacatgttagggtttggacttggaatatatctatasttcagcttaggatgacaagcattgaagatgcaccttgt

SEQ ID NO: 845630 - DNA, 575 bp, Homo sapiens
ctactgccaataaagagaaaataagaggtgctcattgacaaatgaygctcttaaatcatccaggtagatcttctgctatcataaccaaaaataaatggagcaaaagatttactagaatgtcaagctaaaaaatgaagtaaatgtatgaattttaagttcatattactttatgtatatgagtaccaattttttgtaaaaaaaaaaaaaatgcctcaacgctacaacaaaaatgtgacttacctagattaaatggataaacttctaaaaacacaaaacctaccaagactgaatcagtaataaacagaaaatctgaataaacctataactagtggggagactgaatcagtaatcaaaaacttcccaacaaagtaaagccctagatcagatgattttggtggcaaattctaccaaacatttaaagaacaccaatccttctcaaactcttccaaaaaattgaagaggaggaaatacttcctaactccttctgtgaagccagcactatcttgataccaaaacaaggcaaacatattataagaaaactatagaccaatattctgtatgaatgtatactgata

SEQ ID NO: 845631 - DNA, 613 bp, Homo sapiens
ggagcttattctccttggcttttcttgaaataatgatctctgtcaagcctcaactattaaaatgaattgtattttgatwaattacctttattctgttaaaaaaataaatgaccaaagtatgtgtttatatatgcagagatgtataatatacatgtgtgtgtgtgtgtatctcatttgtgtttgtgtgtatacaccaagactgaaagagccagctgttttagccatttatatttgggggatgggtgggtaatacagtaagttctgttgaaaggaaattatgggagagaatctgatatcctgaatctttcaacaagacagggttcagagggcaagtgtggaaataaacttagaaaccagcttcttgtttctagatcagtttttaaaagtaagcctataatgtgaactctttttggaagtcgggttttgctgctgttgtttggggctttttgtttgcttgcttgcttggttttctaagttaatttttcttccataattcaattggaaaatgcatatgaatggggtattgttaagattcctttccatcaaaatcaccatattcagcaaacccccccaatactttcaataaccagtttgcagaattgatattcttctc

SEQ ID NO: 845632 - DNA, 577 bp, Homo sapiens
ttgtcacaaactctaggtacatttagaattgcaagaatgtttattaggycagaggatcaaggttatatttcttccatgctcactgtggtttccaatgcaaattggtcaaaagatatactgggtcacacataccaatttcagatgacttcctctgagagagctgttcagcttgggcttgttctaattcatgtctagaattaatcatgcttgtctcagctgacctgcacattctcatggagaaaaaaaatgatttcttacaaatatgaaacccagctaggtgaagtttcatttgtgaatttcaccagaggcatgggcaactttaacctaagtcatgggtaaataaactgaaaaggacaaggtgattacctgaacttgaaagtgcaagttggttacaggaccagaaagtacttgtgaattgcaatctcctactcctctaagccaacccaaaatggagagagaaattaattaaatcatgattttgataattatttaaaactgccatagacagtaaagctttggctacaaacgtttgttaatatatttgatgatgaataactaaactttcaaggttaacagt

SEQ ID NO: 845633 - DNA, 483 bp, Homo sapiens
atgtgctaaatgtgggagggcatatgcagaatttgctgtaactcctgctatccagagaggtgtaagatattcagtgggtgccttacagcaaagagaggactggggaaaggtatgttattgctgcatctgtatcagtcattggcttgtaaacgcctttatattctgcatagatcattcaacatttgagttggaaacttaacccaattgtctatggagctgtttctgatttgccctggttgagaggggtaagcaggttatatctgaattttttgatcatcctaattatgactgggagagacacatagcagatggaacccacagcacaaaagctggactcctgggttctgccaatagcttgtatgtggcctgcttttatctyaaagtgcccatttgtaaaaaagggggcaacaataacctccaaaggatactgccctaaatgttgatgagatcacatttgagaacccacagactttggaaagaaga

SEQ ID NO: 845634 - DNA, 595 bp, Homo sapiens
attggcactccagaagtatttactgaattagtgaacacattaactcatccgcccatcaaacattatgtttgtatcttctttgtattagacattcttttaggctctaaatatgtaaataatattgacactcaaataaataattacagactaaaaggtgagatgactgttccgttaagaggggggcaccaaaggctttaagaggagagaagaggggcacttaatcacagagtggaggggcaagagaaataaatgagagtgagtgctaccttgagctgaaaatttcagaagaatcacatgcctcataagtgctcccaaatatgtattcagttgaattaaacatgtatctttagcaatagggtaaatcaagatggcgattttcaaatgtgggttctgtaggctaaagcatatatagcagaatatactggaagctttataaaaataataatctccttccccttttaacacctgagattctgttttacaaggcatttattttggtaaaacactgatgtggtcgcctccctcaccctggtaagggaaccctaccctaayagaatggattttgccatctaagatggtgactttatatcctaaa

SEQ ID NO: 845635 - DNA, 518 bp, Homo sapiens
ctacaacacaccgtgtgtaagttgggtaagaattaagccagtagtacctcagtctgtccaaacgcctcaaaagcagcaaagttaacagccgtcagtctgtggctgaagtcctgagagcccccagcacaccgctggtttaagtttaagaatccaaaggccgtggaagctggagtcttccgtccaaagataggaggaacataaggaaccactcagcaccagagaaagatgaaatacagaagactcccacctacttcttcctgcattgttcttgctacgctggcagagactggatggtgcctacccacattgagggtaggtctttctttcctcatcagagaaatgcaaatcaaaaccacaataagatatcacctcacacctgttaggcaggctattatcaaagagacaaaagataacaagtgttgatgagggagtggagaaaagggaacccttgtgcattgttaatgggaatgtaaattggtatagccayatggaaaacagtattgaggttcctcaaaaaa

SEQ ID NO: 845636 - DNA, 588 bp, Homo sapiens
actccagcctgggcaacagagtgagactctgtcccaaacaaacaaaacaaagtagactatgccaaattaaaccttgaagcaatcactgatatggaaaataaaaattttagtgactaagccaataagtaaaataaaatgtaaaaatactcaaatagatgacagaaaaaaaggagaaaaaggaaaaatagaacagatgggacaaataaaaaacaaacagcaaagtggtagatttaaacctatctgtttaaaaaattacattaaatataaatgatttaaataccctatttaaaagttagagattgtcagattggaaaaaataagcaaaactcaactctgttgtctacaagaaatacactttaaataccaagacacaatagattaaaagtatagattaaaagtaaagggatgattaaaagtaaagattaaaagtaaagggatgaaaaaatttaaatgctaacactaatcaattcaaggctgtagtatctatattaatatcagaygaagcaggttttagagcaatgatgtcaatccatcaaaagaatataacaattccaaaggtttatgatcttaataacagagttctaaaat

SEQ ID NO: 845637 - DNA, 331 bp, Homo sapiens
tgtctggccaatttgagataagcagctgaaaatgagaggatttttgcccagcaaggtctaaggggccagagcagtcaggcccttctgatgacttgaaactgactcactagggctctgttctgggactgggccctgctacaagagaaactgctgagagcagagtgaaaattgatcaagaagtgatgtaagaggtgaaagaatgagaaaatagagatgaaaattggggagggggagatagccaggaattgtcatagaggaagctgctatatttttaaaagcagctttgtgtataattyacatatttaaaaaccctataataattatacaattt

SEQ ID NO: 845638 - DNA, 542 bp, Homo sapiens
ggtccagcctcattctgggcagggggasataggctttggacatgtggatattctcaactgtggagaaatgggttcaacagcgggactgatattgggggaaccagcccccaatatttcaacgtacattctttctattttccctaagtgtcggcaggtctgagaaataaagagaaagtgtacaaagagaggaattttacagctgggcctccgggggtgacgtcacctatcggtaggtctgtgatgtccgcctgagccgcaaaaccagcaggtttttattaaggactttaaaaggggagggggtgtatgaacagggagtaggtcacaaagatcatatgctttaaaaggcaatgaagatcacaaggcaaagggcgaagcaaagatcacaaggcaaagggcaaaattagaattactgatgaggctctatgttcagctgtgcacatattgtcttgataaacatcttaaaacaacagaaaacagtgttcaagagcagagaaccggtctgaccacaaatttaccagggtgggatcttttccccaccctaa

SEQ ID NO: 845639 - DNA, 511 bp, Homo sapiens
acaggtgagggatgctgagagatagagaaaaggctatatttaagaaagttgacagagaaaacttgaaaattactcaaacctgactcagcaaagatttctgctatgtgctgcatatccctgcatggcctgtagcccccaggactcgggggttaatctccccacgttaaatcctataccacttaatgagctgagtgaattgggcaaatatcatgttgccccggcctcactgctcttctgtgaaatggagattgcgatcacggtgtctacctgttagacactatggtggtctgaggattaaacaaaagaagctcagtaactttgagctcttgttattgctgctgcttatttgttagggaaggaagaaaaaaagaaaccagaaaactcctaactgatgcgcatcgtggagttctgstgagggaaaagagaagaaggtgtctgaaatgactcttgggcttcaaactctggattttctcatagaaaaattttatttctactgttcaagtgcagagtg

SEQ ID NO: 845640 - DNA, 454 bp, Homo sapiens
aagaaaatcaaggcgtcagcagatggaagccctagatagtctagggaggaattcttcattttttccttgcttctggtggctcccagcaatcttggtattccttggtttgtagctgcatcactccaatttttgccttcatctttccatgaacttatttcctgtgtgtgtctctgcatctcctctctttttatggggtgccagttattagatttaaggcccactctaacccagtatgagctcatcttaacttgattacatctgcaaagaccttatctccaaataaggtcaccttctgaggttcttggtagacatacattttggggggatactattcaactcattacaccacaacyccccaaactagagagataggcaaatacagagaatcacaggttacagggagcagaagcctctaaatgcaatacctgatagaaacacttaaacaataattgac

SEQ ID NO: 845641 - DNA, 590 bp, Homo sapiens
agctgtagaccggagctgttcctattyggccatcttggctccacaccttttttttttttttttgagatggagtctcattctgtcacccaggctggagtgcagtggtgcaatctttgctctctgcaacctccacttcccaggttcaagcagttgttctgactcagcctcctgagtagctgggattacagccacctgccactgcacctggctaatttttgtatttttagtagagtcggggtttcaccatcttggccaggctcatcttgaactcctgacctcgtgatccacctgcctcagcctcccaaagtgctgggattacaggccagcaccactgtacccagcccgtaaaccactcttaattagaaagactaaatgatgaactcatccaagataataactacaacttttcaagaaacaggcagtatgataagatagaaacagcaaaaagttaaaaagcagggggatgaagttaaggtgtagagttttattggttttctttttgcttatttgtttacttacgcacacagtgttaagttgttatcagcttaaaataatgggttataagatagtatttgtaggcctcatggtaa

SEQ ID NO: 845642 - DNA, 719 bp, Homo sapiens
acccagagaggagttctcgcatctgcttggcmtgatcggcagacctattagatttccgacgcttaataaacttctttttgagggtggcaagaccagaggttctcttttttttgtcttgtggtttctcatggccatggtcaaggctatacaactttgattcgcaaccatagccttgctgagaataggatgaggtccctaagaaaaaaattaaacaaatgaaaatttattttttcttaacattcattttcaacgtttaacatttttcatgttgaaaaattctgtaagcagacattaccgaaccactcaaaattgcatttgttttttataaaggaagacaaaaagttcaattaactcattttagttttcaattcaatttaatttttagagatggagtctcactgtgttgctcaagctggagtgcagtgggaagatcatagctcactgcagcctcaaactcctgggctcaagggattctccccaacctcagcttcccaagtagctgggagtataggcatgtgccaccatgcctggctaattaaaaaaatttttttttctttttttggtagagatagggtctcactaatgttgctcaggctggtcttgaactcctgtcctggcctcatgcaatcttcctgccttggcctcctaaagtgctgggattacaggtgtgagccattgtgactggcctacattttttatattaaataagaaatagggac

SEQ ID NO: 845643 - DNA, 629 bp, Homo sapiens
cattggtaagagaaaaattcgattcctgcaggggccactgtctgcgtggtgtttgcattctccccacgtctgcgtgggttttctcccatgtcccaaagctgtgcacgctaggctcattggtgagtctgcatggtcccagcacgagtgagtgtgggtgtgtgagcaccatgtcctgtccagggtaggttcccacctggcatcctgagctgccaggatgggctccagccacccacgaccctgaactggaataattgggtaaataattatcttgtttttctttctttcttctttctttctctttctttcttttttctttctctctctctctctctctctttctttctttctttcgagagagtgtctcgctctgtcacccaggctggagtgcagtggcacaatctcagctcactgcaaccgccacctcctgggttcaagtgattcttgtgcctcagcctcctgagtagctggattacaggtgcccaccaccacagtcagctaacttttgtatttttagtagagatgaggtttcaccaagatggccaggccrgtctcgaactcctgacctcaggtgatccacccacctgggccttgcaaagtgctgggattacaggcgtaagccagtgcacctg

SEQ ID NO: 845644 - DNA, 579 bp, Homo sapiens
cagtgtttaatattagaagtgttttgatctttagaagtttggtgatgtttttgtcaccagaaatatrtcacaggaattctattcatttatatcaattagcctatggtaaaattggttttgtttcccttaaagttgcagtttccaagagtctatcagcaacttaagtgagaacttactgtatttgttattatatatcttccacctgttatatataacaggtggaaaagtttgcatagcctgaggctatagcaaagaaaaaaaatacagcaacctgacttggcttttaccctggggaggactgccttggcctgggagagctcctaggtagaaagggaggacacacccctctctgagggacaggggcactggttgagtgttgccaggatgtgggctggggaggcctcctgggaagggcatttggttggaagcagagacacctggcttgcctgagagggttgggtgagatgggaatgaagactgggaggctgaccagagccagccagcgcatgtggggacccaggtgtgcagacagagtccactctgcgtgtgcacacttatacgtggttcacagagcttctc

SEQ ID NO: 845645 - DNA, 609 bp, Homo sapiens
atccctcttatgtccaggagccagactagggcctcagagatgcttttcctactgcaccgtgagcccccgcatgtggaacacccaaggggaaagggatggaggcaggactcagctggagaaagctttccaaggagaatgaccatgacaggtttgttgggaggctcctggttccagctctcaatcccacttgcaaacctgactcccaaaccaccccacccaccctctcccacttccgggacctgtgggttcaaccccagagcaagaggctgagcccgctccctaagcccacagcatggaggggaaagagcctgctattgaggacacctcaagtgccatctttaaagcgcccctaactaggccctggggaagagttaggagacaaagaacccttaccccaaaaaggctcttataatctcatttccactcaagaagcaaagccacatggagtgctctgtgccaggcactgaggtcgccatagctgaaagcccaggggttacaaggactccagtctggggacccygtgtggctgtgacccacgtcactcaagttcagaagacatcgagccacagccagagtgtagggattcaggttgaattttaaaataggtgg

SEQ ID NO: 845646 - DNA, 646 bp, Homo sapiens
ctgggctcccccgggctgaggtctgcaggaggccttcagctggaagaagctgtgcgggcccaggttggggacatgcaaccaggttggggacatgcaaagaaaaagcctatctctgaacaggcgagctggaggaagcgtgggggatttgaagagcatttgcaagctcagggctttgttcctactggaagattgcagaattaggggaattggctcggtggacctacatgggaaggcagtgccacagccaccacccagggctcttgtcttcctaaagaggtcttgctccacttcctgctgtgatgatgatgatactaacgcaggtgaccatttattgagcacttcctgtgtgtaagacactgttgtaagtatgtcaccccctttcatccacagcacaactctgggagggagattcaattattatccccattttacagagggaaaaactgaggctctgagagatgactctttcccaaggccacatgggtagctggtggcaggatttgaatccatgctcttaatagctggggaattacatcataggggcatcttggttctaggttsaaaaacaaaacaacctgtccagaaaaatgaataaataatatattttttaaatttaaccatttaacttctgaagaatggaggcttt

SEQ ID NO: 845647 - DNA, 620 bp, Homo sapiens
ctgtggatcatgccccctctggaccaacatggagcaggaatgacamtgggagccacagagtgctggaaggggcagaatgaccacactcaggccagtgagaagaacctccagacacctttcatctgcaggaaaatacaagcccatctccacttcctgtctgggggtggggaactggagagagagggagaaagagcagaaccagtttggccagcagattggtcagaagaaaggagaaatacgatcagcaatcttcagctctcaggctgggttatggctgcccggttccaagtgggacagcaggacgggaacaccattgaggaagaagttcacagcactggcagccccaagaccctggctgcgcagctccattaaaaacaatctggtttaaaccttaacaacagtccaaaaagagagcagggtgagggcaggaagcatgggggaattacccgctcaggctgttccctctcaggaagaaggggcagatgaagtccctgaggctggggtctctggctgggcacaggagcatccctgtctttggagagacctcgggaagatgacctttgaaccacagctgctagaatcctgggccatatatggagagctggcgggagggaaggact

SEQ ID NO: 845648 - DNA, 620 bp, Homo sapiens
ctgtggatcatgccccctctggaccaacatggagcaggaatgacaatgggagccacagagtgctggaaggggcagaatgaccacactcaggccagtgagaagaacctccagacacctttcatctgcaggaaaatacaagcccatctccacttcctgtctgggggtggggaactggagagagagggagaaagagcagaaccagtttggccagcagattggtcagaagaaaggagaaatacgatcagcaatcttcagctctcaggctgggttatggctgcccggttccaagtgggacagcaggacgggaacaccattgaggaagaagttcacagcactggcagccccaagaccctggctgcgcagctccattaaaaacaatctggtttaaaccttaacaacagtccaaaaagagagcagggtgagggcaggaagcatgggggaattacccgctcaggctgttccctctcaggaagaaggggcagatgaagtccctgaggctggggtctctggctgggcacaggagcatccctgtctttggagagacctcgggaagatgacctytgaaccacagctgctagaatcctgggccatatatggagagctggcgggagggaaggact

SEQ ID NO: 845649 - DNA, 589 bp, Homo sapiens
agggatcaataaaccccatgaagagccagacagaaactattgtaggcctcggtcaccatcgtgtctgtggmaactgctcaaccctgtcgcagcggcagtaaagcagtcagagtgaatgcgtaagtggatagatgtgttccaataaaactttatttacagaccttgaaatttgaatttcatgtcattttagtgtcatgaaatatgattcttctcgagtatttatcacacttttaaaaaatgtaccagccattcttagcctgcaggctgtactaaaacaggttgtgggctggagttggcccgcgggctggggtctgaagcaagcaggtctccctgctccaagcagcatttaagctacagggagacacgggaaaatatagcttctgtgctcaccttccctctcccaccccagagtaagttacctgccaagagaggggaacaaggtaagagagagatctgccctattcttcctgaggaacgtccgaagataaaaataaaagaggggccagtcctcgatgtgtgtttaataaacttttagcatcatcgagcaaaaggtgcagtcaagtattttggttcccaggagacaatgctt

SEQ ID NO: 845650 - DNA, 634 bp, Homo sapiens
tttataactctttatctttgcaaaggtagagtctctacttttctttcttccaagaatgctcatcctatcccacctccttcatctggctaacaattgctcatacttcaaagacaactcaagcacgctctgttccaaaaagccttctcaggggttgtttgtaggtttaagatatgcaccaatatgtcaccaaagcatcctattcttatctatattcagacattttcatactgtaaattttactttgaatgtgggtgttttctctttggactgtgagttcttgtggacagggctgtgttttttcagttgaactttctatagttcttaatactctgggcgcaaaataggcaatcaatgtgcattttcaaaataaatgattgacgcaattctacaatttatagtgttttagtgatatgggttcacatactgggatctcaattacatgaaaattcaaggggaggacaattctttcatattttgctttattgtgttttgcagatactgaatttttgcaaattgaaggtttgtttcaaccctgcatttagaaagtttatcagcaccattttccaacagcatgtgctcactccatgtctctgtcatatcttgaycattctcacaatatcccaaacttgttcac

SEQ ID NO: 845651 - DNA, 449 bp, Homo sapiens
cattgattttgtttcttaaaactttactatagctgtttatgagttctaggagacttttggtggaatttttaggattttctaggtatggaataatattttccgtgaggagaaataatttgacttatttcctatttggatacctttcatttctttctcttgcctgattgctctggctatgacttctaatactatgatgagtaggagtagtaagagagatcatccttgtcttgatcgtgttctcaatggtaatgtatccacattttgcccattaagtatgatattggctgtgagtttgtcagagatgactcttattactttgagttatgttcctttgatgtttagtttgttgaaggttctttatcatgaagggatgttgcattttattgaaagytttttcattgtctattgagatgatcatatgggttttgttttcaattctgtttatgtgg

SEQ ID NO: 845652 - DNA, 575 bp, Homo sapiens
atatataaaaattaaaaggctatccaccaaggtgacaaataattgttctctgtgtataataggattacaactgaactttttcttcctttttaytatctatatttaagtcaatttttcttctacgatgaacctatatactttatttttaaagaaataatttataaaatttgtatttgtgtcaaaaatgccaaaagtactggaatttgaagaggaagtgccccaagaataaaccttctggattccggtgttttcaagtcagtttccagtggcaaatagcacaagtttttttacttagtagtgggagatcctggatcttgaaacatgtgctgggtaaatggaggatctagtgggtggtcagggatggacagaaactactggatggaagaaagtccacttggcagatagaccatgatttctgaccatggcatcaagggacaagtgaaggtcatccaatagaacactttaagaagatccaacacagagaaacagggagtgccaaacagtgtgggtggtacccgggaccagcaaacggggagggaatcaaaagcattcattatgcacgttttatgtgacaa

SEQ ID NO: 845653 - DNA, 446 bp, Homo sapiens
ataattatagatccatattgtcacttttaatggctgtttaatagtctaaggtaaaaatgtgctgtggtttatttagtcaactgcctgtagttagatgtttcagctgtcactaggttattgatataaacaggkatctttatataaatatcaccaaatgctgctcagatcattcccttaaggggaattctttaaaatggaagtgctgggtcaaatcctgtcatcttctttaagggcatgttgtcaaaatttccctacacagtctcaatcaggataccaagcatccagcagcaaatgaaaacacccattttcctccttcaccctcaacactgggcactatgagtctttttaatctcttccagtctgatgattgtgtatggcatagctcatttgctgttttaacttgttcactgttttctcttctccctctggcaccttctgtaatctct

SEQ ID NO: 845654 - DNA, 457 bp, Homo sapiens
atgttaataattatagatccatattgtcacttttaatggctgtttaatagtctaaggtaaaaatgtgctgtggtttatttagtcaactgcctgtagttagatgtttcagctgtcactaggttattgatataaacaggtatctttatataaatatcaccaaatgctgctcagatcattcccttaaggggaattctttaaaatggaagtgctgggtcaaatcctgtcatcttctttaagggcatgttgtcaaaatttccctacacagtctcaatcaggataccaagcatccagcagcaaatgaaaacacccattttcctccttcaccctcamcactgggcactatgagtctttttaatctcttccagtctgatgattgtgtatggcatagctcatttgctgttttaacttgttcactgttttctcttctccctctggcaccttctgtaatctcttggag

SEQ ID NO: 845655 - DNA, 587 bp, Homo sapiens
attcataacagctgtaaaattttatgcttctatttttattttcttttttgaagaagtctggattgctgttaaggaatcagtattcatttctaaaagcccttctccttcattaaayaaagatcttaccctcacttagacatagtttaccagggattttataacttttaatgtcattgaattagggaaatcctagaattagaaatcagcagtacaagaacatccaaagcataaagaacatcttgttcccatttgaagctaggtgagattcaactgaaaaaaagtatacagtttgatgagctcaacaacatctgtttctcttgtttttaactgttcttgtgagttaatgaataaatgacaggtgctgaaggagaggaatgccaatagaggttgactaggaatgggctgctttccttaatggcaactgtgcaatgccagaaggcctagatgttcatcaagctggtggaagatactaagcacctatcctgtgtgtgatccaggacagcagcccctgaagaggagctgagaaccacatctaatgtgatacctgtgtgatatgtctgatgaaacaggaaaacaatcactctttg

SEQ ID NO: 845656 - DNA, 429 bp, Homo sapiens
ccctggccaggacttccaatactacactgaataggagtggcgagagaagacatccttgtcttgtgccagttttcaagggggatgctcctagcttttgcccattcagtataatgctggctatgggtttgtcatagacagttcctactattttgatgtatgttccttcaatacttagtttgttgagagtttttaacatgaagcgatgttgaattttattgaaagccttttctgcatctgagatgatcatgtttttttttctttagttctgtttatgtgatgaatcatgtttactgatttgcatatgttgaaccaaccttgcatcccagagataaagcttacttgatcgtggtggattagctttttgatgtgctgctggattcagtttgacagtgttttgtttcrtttgtttgttttttgatatgaagttct

SEQ ID NO: 845657 - DNA, 626 bp, Homo sapiens
cgccactgcattccagcctgggtgacagagygagactccatctaaaaaaacaaaaaacaaaaaacaaacaaacaaaaaaccaaaaatatcttggctggaatgctgtaaccagtgagttttattgcaacatgagtaaaaaagtcagcagatttaaagtaggcagaaaaacaaaatagagagatagaggacttaggaggcactgcatgatgactactgttgcagggtttttgttagagttcgaaaaataaccattggaactctaaattttccttgacgtaatttgcccattagtttaaaaatgtgcacaaagacgtagccagcgggagttccagaaaacttactgtgccttaatatttaaaaaccatcccccttcttattaatctttttacagtaaagaacattctacagatactatgaggccacgccggcagtttggactggtgctttagacggtggtgactgctgtagcagcttctaatgagacagcctgtgcccaccatttagaatgtttattttgctctccaaagatttttagaagcaagcagaggaaaagagccaggtcatttacagatacacataaccacagcaaaagaaggcaagataagggtgctcacaaatatgttcac

SEQ ID NO: 845658 - DNA, 586 bp, Homo sapiens
gtgcaaggcccccacactgtgcagacaggcccacatgctctcgagggctcagcctgcacctcctggatcccggtgaggcccacatgctctcgagggctcagcctgcacctcctggatcccggtggcgtgcaccacacatcatgaaggtttggggcaaggccaagaactgtctgggcttgctgggaagggtggcaaggtgacccgggcagttgtaggcatgtggagcacacacagaggcccccgaggcctgagccccagtctcccaattcaggctgtgcttggaggaccaggcctggaaccctctcctgctcagtccccttccttccatcaggctgggcatgccccgagtctgagtctggcccacctgcttctgcggcccctttcctgggcacgtggctttcctcgaaccccctgcgctggctgacccagcgctcttttccacagctccctttggaactggggtcccccttgagatgcccatgtagcakgaaagttttgaaaaagaaacaaaaaccctcaccagaaagcagtttcatggataaaatgtgcatatttatttcagggcaacaagcgtatacacagcaaa

SEQ ID NO: 845659 - DNA, 668 bp, Homo sapiens
atcatgaccaggtaggatttatcccaaggatctaaggatagttcaccatatgcaaatcgatctatgtgatacatcatatcaacagaatgaaggacaaaaaacatatgatcatttcaattgattctggaaaagcaaagcatgtgataaaattcagcattccttcatgacaaaaactctcaaaaaactgagtatggaaggaatatgtctcaacacagtaaaagccatatatgacagacttagagctagtatcatactgaatgggaaaaaactgaaagcctttcctctaaaatctggaacaaggcagggatgcccactttcaccactgttattcaacatggtactggaagtcctaactagagcaattagaaaagagaaataaataaagggcacccaagttggaaagaaagaagtcaagttatccttgcttgtagattatatgatcttatatttggaaaaacctaaagactccaccaaaaactattaaaccgataaagaaattcaacgttgtaagataccaaatcaaaatacaaaaagttagtggcatttctatgtgccaacagtgaacaatctgaaaaakaaatcaataaactcaatagcaataaataaaacaatatacctaggaataaacttaactaaagaagtgaaagatctctatgatgaagactata

SEQ ID NO: 845660 - DNA, 560 bp, Homo sapiens
acaatcaatgaaggaaaaagagcatcaggtggtgcgtaatgaagaacagaaggcggaacaagaagagggtaaggtggctcagcgagaggaagagttggaggagacaggtaatcagcacaatgatgtagaaatagaggaagcaggagaggaagaggaaaaggaaatagcgattgttcatagtgatgcagagaaagaacaggaggaggaagaacaaaaacaggaaatggaggttaagatggaggaggaaactgaggtaagggaaagtgagaagcagcaggatagtcagcctgaagaagttatggatgtgctagagatggttgagaatgtcaaacatgtaattgctgaccaggaggtaatggaaactaatcgagttgaaagtgtagaaccttcagaaaatgaagctagcaaagaattggaaccagaaatggaatttgaaattgagccagataaagaatgtaaawccctttctcctgggaaagagaatgtcagtgctttagacatggaaaaggagtctgaggaaaaagaagaaaaagaatctgagccccaacctgagcctgtgg

SEQ ID NO: 845661 - DNA, 306 bp, Homo sapiens
ctcagagagttggtgtgaaggttatatcagatcatatatttaagtacttacttaagacagtacctggaacatagtaagtacttactacatttcaactattgttcttaactaaataagttttaacttcatagtaacaataaggggtttttaaatagaaaagtggaatctttttaaaaatacttttcaccatatttcaaagccattcttttaacataaattattactctttttgcacacarctatatacgttatccactgaaattagtatttgcaggtaactacccttttgcggaggcctacttaaaa

SEQ ID NO: 845662 - DNA, 594 bp, Homo sapiens
gactccgtctcaaaaaaaaaaaaaaaaaaagaaaccaaagtctgaaccctaggtgtgctcattgcaattggaatgccatcrcttctaggccttaaaaagtatagacctgtgtatcaataaatatttctatatttaaccatctgcatctatcttatactaaatatgtgttaatctgatatctccaactgtaatacatttccatatggattattttagtttattccccttacctatctgtaagctccaacttcacagtgagaaacctggatcccaccactgtcatccattgacttaattgttcaactgcattattcaggtttagtaatttaagaattattaatacatatccccatagcaaacaacttatagtagtcttagagtacattattaatttatagcagtttattttgctttagttcaatacaccctactcatttccaaagttactgaggccagcatgttattctcctactctattcagtgaggttcttacatgtatttttaatacatttagattcttttgtcacactctaccattgaatcctgggatcatctaaattcctaaatgattttttaaatttacacatattaaaa

SEQ ID NO: 845663 - DNA, 503 bp, Homo sapiens
ataaatctgctatagatacttgtacgcagatattcatatgcatatgtgttcaaataagttaggtaaatacttataaccacaactgctagattgcatgctaattctctgctkagttttctaagaaactgccaactgtttcccaaaatggctataccatattgcattcccactagcaataaatgagtctctatttctctgtatcccagccaggaattattatcggtttctttttttaatattagctattctattggtgtgaactagtatcagattgttgttttaatttacaattccttaatgacaaatgatattgagcatatttttatatgcttatttgccatctgtatatcttgtttagtgaggtgtttgtttagttatcatccatttattaatttttttatttttgaattttaagagttctttgtctattttagataaaagtcctttaacagataactattttacaaatgctttctgccaatctggagcttgattttttattc

SEQ ID NO: 845664 - DNA, 591 bp, Homo sapiens
cttatttcctataccaccatcccatgccccctcccgcgcacacacagagcaatcaatctacaagctctgtgactgcagggcccttctgttctgtccaccactagattcccagcacctagtacctagtgcctggcatatagtagatattcaaaaatatctgtaaggtaagtgaattagtagctacggaggactcatgacatgccaggcacgtgctaaatatctggggctatcactgaggacccagcagacactggacaactgtgtacgactaacaaaggatcaagcattggtcaagtcattaattacatatttaaaaggtggaataactgctacaaaagaaaatgaaaaattcaaagtgagtgcatgtatgtgtgtgtgtgcatgtatgtgtgtacatgtgcgtgcgtgtgcatgtacgcgtgtgcatgtatgtgtgtgcatgtgcacgtatgtgtgtgtgtgygcatgtatgtgtgtgtgcatgtggatgcagggcggtatggtttccaaatgtaagcaactcctctgacactgctccatcaggggtggtgtctaattccccactgtttcaatatgaggcagccctggtcc

SEQ ID NO: 845665 - DNA, 466 bp, Homo sapiens
caaggtcaggagttcaagaccttcctggccaagatggtgaaaccatcttgtatttttgtaaaaatacaaaaaatgagccaggtgtggtggtgggcacctgtaatcccagctactcaggaggctgaggcaggagaatcacttgaacccgggagggagaggttgcagtgagctgagatcgcaccactgcactccagcctgggcgacagagtgagactctgtctcaaaaaaaaaaaaaggtgcaagacaacgtccatgaacatcagtgagtaaatgccacaggacagaatagcaatctcaggccctggggcaggaagactgttgggatttggggagggtggggagttgggttttttaatttgtttgtgcttttcttygcttttatgatgcacccccattgccagaaattcattacaaccctttggggtattaggaaattggataaataacaagactaatttgttaaggt

SEQ ID NO: 845666 - DNA, 609 bp, Homo sapiens
cacacatatatatgtgtataaatatatataagaaaaagaaatatatatctatgagaaaaggaatatgtatrtttttttctttcttagcagacaggccagatttgtccaaaagcccgagtttgcccaccccgatctagaacatctttctacaaaatcctcgcatcatgaatccccctgcaccagccaccctctctgctgctacagcccagagacctcctttcaagtgagtttgcataagcggctgaggaatccctgaggtcagtggcgggggcggggtgctgttttttaagaagacatttttcctggaaggaacagggctggtactggcacggtccttttctgatgatttagtcagaacagccctccagctcactggtctgtgcaccaaagctgtggtagagggcagtgaaagtggtcattgcggacgagggctcggagccaaaggccctctggggaagaggatgccaggacggcttgcaggaggtgcttggtgcttcctggaaaaagagggggaatgaacgatcagggggtccatgcagcatgggaggggtttctgaggccaggccctgttgtgggcaccaactgggtcattgggtcaggatttccaga

SEQ ID NO: 845667 - DNA, 588 bp, Homo sapiens
gggagctccattaaatttttacaagtataacttgacataataaaatctaaatttaattaatrtatttacccttcacctcaaaaatacaagggctttagaaactttcaatactaattaccccatattccttattaatgtttattgtttaaattctgccttttaaataccctccatctccaaattagccattgttccccattattgtagtgtataagagtgcttattcagatacagccagatgtttatacatttcttggtccaccatttcttcttgcatgtgactccttctttctgggttcagtgtccttaccattgaagtacatctttactgaagatgctgttggtgtcctgtccagaatctcttcaatgagctggcgtactcatcccttagctgctgagagtgttggctgctaatagttcacactctttccctgaggattccattcaagccaacaatttcagaaaatgcctggaaggtaacagccttcccccgtgggtagctcatagccaatgactgattgatatgggtgtacagaactgaggctccagaactccctgtgggatcagactgaggctagacttcagcta

SEQ ID NO: 845668 - DNA, 584 bp, Homo sapiens
ctacatctgggagctccattaaatttttacaagtataacttgacataataaaatctaaatttaattaatatatttacccttcacctcaaaaatacaagggctttagaaactttcaatactaattaccccatattccttattaatgtttattgtttaaattctgccttttaaataccctccatctccaaattagccattgttccccattattgtagtgtataagagtgcttattcagatacagccagatgtttatacatttcttggtccaccatttcttcttgcatgtgactccttctttctgggttcagtgtccttaccattgaagtacatctttactgaagatgctgttggtgtcctgtccagaatctcttcaatgagctggcgtactcatcccttagctgctgagagtgttggctgctaatagttcacactctttccctgaggattccattcaagccaacaatttcagaaaatgcctggaaggtaacagccttcccccgtgggtagctcatagccaatgactgattgataygggtgtacagaactgaggctccagaactccctgtgggatcagactgaggct

SEQ ID NO: 845669 - DNA, 493 bp, Homo sapiens
tgtatatacaacttgatttgtaataattttaatatgtttaaataattttatgagttttaaaagataygattcatcgtcttaactctggaaggtacctttaaaagtatctcttgcactctcatcattttacagatgagtattttcaaagaaataatttgagtagcagacagacttcagcctggaatccagttcctgagactcctagttcatcattccttttactaaaccctaatgtctcccacgcagattctaattatatcttatgaatttttaaacttccaagattagagaattgcaagattgaagtttttcatagactagttgtaatgagagcaaatataaattagaaggtgattggaagtgaatcagaagcctgaatttatagcttctaggatgctacttaaattaaaaagttaattataatgtgaatatgaatgaaaagtttattgctcattatttaaaatatatacacatttataagaaacttcataga

SEQ ID NO: 845670 - DNA, 471 bp, Homo sapiens
tgtgttttggctgcaagtgactcacagctgccctttttcaccagatagatacctgctctcagataatggaacctacttgccaaaaaaggctacaactccagctgctacaggcacctgcagccaaagactgactaacgtgggtgtacataagaccagctgtcttgattcaaagtggagacgattctgcaggggcaatttaggctccagagctctgataaatcaagccaaagctagattttgtctttgcttgaccctttcctctttcttaactatagtcctcactcccttaaatgatttcctgaagagcactccctcaatacattataatctacttgaatccaagaytatttttagggaacatgacttaagataaaaacgactacttagaaggtctatctatccatcttctcatatatatataagagtatatatatatactcttatatctatatgagtgcatacataaagagc

SEQ ID NO: 845671 - DNA, 620 bp, Homo sapiens
ttaatatttattaataatatatttttcatttgttgtaataagaattttcatgactacagggaaatgcaacagttatatgaatatttcatatacatagagagtgtttcaatgaatagagaaatttcaaaaagaaacctctggattgttaatattcagcaatttctatctaatttagccttaattaaaaaatctgtctccctctcttcttctcatttttctcaagtattttattctgtagtttagttcttagtgataaatacaattttataggttttggtttgcaggtcaacatttaacagtttattttttctaggttcttctcttacatacatacatacatacatcccccccgccacaaacacaccaagatacctctgcatatacaactcagtaacttaatcttgtacataatagtaatagcttataaatgctttttgctttaatagtttataaagactgcttactttatttagtctccgtaactatccagaatggtgggtattactgtcaccagtttgtatatcaggcaaccagtagcctaattggaactcaccagcttttttgcagaaacttacttggtggtacggagaagggatccragttctgggagaatatttgag

SEQ ID NO: 845672 - DNA, 546 bp, Homo sapiens
ctggattgttaatattcagcaatttctatctaatttagccttaattaaaaaatctgtctccctctcttcttctcatttttctcaagtattttattctgtagtttagttcttagtgataaatacaattttataggttttggtttgcaggtcaacatttaacagtttattttttctaggttcttctcttacatacatacatacatacatcccccccgccacaaacacaccaagatacctctgcatatacaactcagtaacttaatcttgtacataatagtaatagcttataaatgctttttgctttaatagtttataaagactgcttactttatttagtctccgtaactatccagaatggtgggtattactgtcaccagtttgtatatcaggcaaccagtagcctaattggaactcaccagcttttttgcagaaacttacttggtggtacggagaagggatccaagttctgggagaatatttgrgtcagggctccttgtggtatattgattgttagaaatgtttaccacttgataacatctcatataa

SEQ ID NO: 845673 - DNA, 546 bp, Homo sapiens
ctggattgttaatattcagcaatttctatctaatttagccttaattaaaaaatctgtctccctctcttcttctcatttttctcaagtattttattctgtagtttagttcttagtgataaatacaattttataggttttggtttgcaggtcaacatttaacagtttattttttctaggttcttctcttacatacatacatacatacatcccccccgccacaaacacaccaagatacctctgcatatacaactcagtaacttaatcttgtacataatagtaatagcttataaatgctttttgctttaatagtttataaagactgcttactttatttagtctccgtaactatccagaatggtgggtattactgtcaccagtttgtatatcaggcaaccagtagcctaattggaactcaccagcttttttgcagaaacttacttggtggtacggagaagggatccaagttctgggagaatatttgagtcagggmtccttgtggtatattgattgttagaaatgtttaccacttgataacatctcatataa

SEQ ID NO: 845674 - DNA, 569 bp, Homo sapiens
aatagcagcaccacattacaaccagaaattacagggtaactcaagcccaccttctataacaccaacctaagcaactagaattctagaaagtcagaaatgaaagtgggtaaggcagatcaaagattgtccaagcaccgagaaacctgaatccttcatttttaatatatttaatttaaaaaggaaaattttaattgtcattaaaataataaaataagtaaaaggatctcagaataaaatgacagactcttaattccataatcttatatctagactaacacaggaaacctcaaagcacacctgcaagctggcactgaaaagccactgttactgtcaaagctgaaatttcagctcatgagagtttcataaaaattgcttgaaggcattacaattaaattagaattattcagctaaagaacataaagccacttctctcccaaaaaaatattagcttaatattgtmcataatatttttatagacaagtgaaatttttaaatctttttttactaacttttatttttaattaaagaatcttaataaagcagaaacattttaaaattcaagataaggg

SEQ ID NO: 845675 - DNA, 615 bp, Homo sapiens
tatttatggggtacatgtgatattttgatacatgcatacaatgygtaataatcaaatcagggtatttaggatatccatcacctcacacattttatttctttatgttggaatatttcaaatctcttccaattattttgaaatatacaatatattgtttttaactatcattcactctactttgctatgaagcactagaactcactccttcgatctaactgtatgtttttacccattaatcaacctctttttattcccccttgattctttgcagcctctggtaaccttcattctactctctacctccatgagatcaacttttttagctgccacatatgagtgagaatatgcaatgtttgtcttttgtgccgggtttatttcacttaacatgatttccagttccattcatgttgctgccaacgacagaatttcattcttttttatagttgaacagtattctattatgcatatataccaaattttctttatctattcatccattgatggagacttaaattgagtccatatattggctattgtgaaaagtgctgcaataaacatggggttgcaggtatcactttgatatattgactttttttttcctttggataactactc

SEQ ID NO: 845676 - DNA, 597 bp, Homo sapiens
gttctattaatccagctgcttcaggatgatgggcaacatgataagaccagtgagttccatgagsatgagctgactgccacacttcttttgctgtaaagtgagtgcctgggcagaaacaatgctgtgtggaataccataatggcggataaggcattccatgagtctatggatggtagtcttggcagaagcattgcatgcaggataggcaaacccgtatctggagtaagtgtttattccattgaggacaaacctctaccctttccatgttggaagatgtccagtataatcaacctgccacgaggtagctgtctgatcaccccgaggaatggtgccatatcgagggctcagtgttggtctctactgctggcaaattgggcactcagcagtgaccatagccaggtcagccttggtgagtggaagtccatgttgctgagcccatgtgcaaccttcatccctgccaccatggccactttgttcatgggcccattgggtgatgaggggtggctgggtaaagaggctgacaggtgtccacagaatggtcatgctttccacttgattattaaaatcctcctctgctggggtcacccattggtgagc

SEQ ID NO: 845677 - DNA, 634 bp, Homo sapiens
gcatttgaaaaagtttaacatatcttcataataaaaaccctcaaaaaactgggtatagaaggaacgtaccacaacataataaaaaccatatatgacaggctcacagctattattktactgaatgtggaaaaactgaaagcctttcctcttagatctggagcacaaggatgcctactgtcaccactgttattcaacatagtattggaagtcctagctagggcaattagacaagagaaaaaaataaagggtatccaaattggaaagaaaggagccaaattatcattgtttgcagatgctaccatcttatatttggaaaaatataaagattccaccaaaaaactattagaactgatcaataaattcagtaaagttgcatgatacaaagttaacatacaaaaatcagtagcatttctttatgccaacagtcaacaatatgaaaaaaaaaaatcccaggaaaaatagccacaaatagaattaaatacctaagaattaacttaaccaaaaaagtgaaagttctctaaaatgagaactataaaacactggtcaaagaaattgaagaggacaccaaaaaatggagagatactccatgttcatggattgaaagaatcaatattgttaaaatgtccatactacc

SEQ ID NO: 845678 - DNA, 634 bp, Homo sapiens
gcatttgaaaaagtttaacatatcttcataataaaaaccctcaaaaaactgggtatagaaggaacgtaccacaacataataaaaaccatatatgacaggctcacagctattattgtactgaatgtggaaaaactgaaagcctttcctcttagatctggagcacaaggatgcctactgtcaccactgttattcaacatagtattggaagtcctagctagggcaattagacaagagaaaaaaataaagggtatccaaattggaaagaaaggagccaaattatcattgtttgcagatgctaccatcttatatttggaaaaatataaagattccaccaaaaaactattagaactgatcaataaattcagtaaagttgcatgatacaaagttaacatacaaaaatcagtagcatttctttatgccaacagtcaacaatatgaaaaaaaaaaatcccaggaaaaatagccacaaatagaattaaatacctaagaattaacttaaccaaaaaagtgaaagttctctaaaatgagaactataaaacactggtcaaagaaattgaagaggacaccaaaaaatggagagataytccatgttcatggattgaaagaatcaatattgttaaaatgtccatactacc

SEQ ID NO: 845679 - DNA, 641 bp, Homo sapiens
gtgcggttttgagtgagtttctggatcctgagttctaatttgattacactgtggtctgacagactgttttgatttccgttcttttgcatttgtcraggagcgtttgacttccaattatgtggtcaattttagaataaatgctatgtggtgctcagaagaatgtctattctgttgatttggggtcgagagtcctgtagatgtctgttagatccacaacagcaaattatttaatttccatgtatttgtatagttttaaaagttccttttggagttaatttccagttttattccactgtggtctgacagagtgcttgatgtgatttcaatttccttaaatttattgagactcattttatggcctatcatatggtctatcttggagaaagttccatgcactgtttaatagaatgtgtattctgtggttgttggatgaaatgttctgtatatatttgctaagtccatttgttccaaagtatagttaaatccattgtttcttcattgactttctgtcttgatgacctgtctagtgctgtcggtggagtattgatgtcccccactattactgtgttgctgtctatctcatttcttaggtctattagtaattgttttataaatttgggagctccagtgttaggtgcaca

SEQ ID NO: 845680 - DNA, 641 bp, Homo sapiens
gtgcggttttgagtgagtttctggatcctgagttctaatttgattacactgtggtctgacagactgttttgatttccgttcttttgcatttgtcgaggagcgtttkacttccaattatgtggtcaattttagaataaatgctatgtggtgctcagaagaatgtctattctgttgatttggggtcgagagtcctgtagatgtctgttagatccacaacagcaaattatttaatttccatgtatttgtatagttttaaaagttccttttggagttaatttccagttttattccactgtggtctgacagagtgcttgatgtgatttcaatttccttaaatttattgagactcattttatggcctatcatatggtctatcttggagaaagttccatgcactgtttaatagaatgtgtattctgtggttgttggatgaaatgttctgtatatatttgctaagtccatttgttccaaagtatagttaaatccattgtttcttcattgactttctgtcttgatgacctgtctagtgctgtcggtggagtattgatgtcccccactattactgtgttgctgtctatctcatttcttaggtctattagtaattgttttataaatttgggagctccagtgttaggtgcaca

SEQ ID NO: 845681 - DNA, 619 bp, Homo sapiens
cttgatactaaaacaaaccaaccttttttttcatctaaagcaaaaaggtattatttgtatgtagatatgtaggttatatgaatcttttattaatgagwtcatagataaactcatcatgtaacttgattgtgaggggcaaaaataaacttgaatagcctatcctaaactgtcataggaaggaatataggctcattttggtatcagagagaagaaaaatgcaaccataaggcaatatcatttcagaattttcttgcaaaaaaattaaaggtttctattttgtaaaggatgcaatggacaaaatttatagaaggatggaaagattgggagaagatatttgtaactcctaaacacacaccaatgtttgcaacatgtttgtatccacaaattcctcagaaaaatacagagaatgttacttaaaatgagaaaaataaatatgacaatcattcacagaaatccaaatgcttaacgagtgtataaagagctgtcaaaatttcttagtaacaagagaaatgcgaattttcagtgcaatgagataccaatttacagtgacgagagtggcaaaaatagttggataatacaacatttggtggtggtgttgggtcacaggcaaccttctgca

SEQ ID NO: 845682 - DNA, 610 bp, Homo sapiens
ttttatcaaaggccttttctgcatctattgagataatcatgtggtttttgtcacygattctgtttatgtgttggattacgtttattcatttgaatatgttgaaccagctttgcatcccagggatgaagccaacttgatcattgaggataagattttttatgtgatagctaagtactatttaaatggagagaaaagactgcttgtgattaccttattttgaagaataaggaaactagtatccaagtatgcaactctatgactccttaaccagcaaacaccatttggacacatggactgtaactcttccatagactgatactgatgatagaactatatcccttttattacttccttagttagtttttcttttcctgataaagcatttatcattctaagacctggtgtgtgttaggatggctgtcagttatgaccaagctcatgtgtctattctggttctaatctgtccccttactctaatacttaagattcaaggaagaatgtggctactccatttttcagcagatgctgttccaattctcacctgacctggtgtacggttctttggatcacttgcaaggggcttcacttgcaagaagcttggtaatttcaa

SEQ ID NO: 845683 - DNA, 547 bp, Homo sapiens
cattcctttgttactaaatatgttttctttaaatagctaccaaatatgtttgtatatgcaaacactatattgtttatttctgcatggtttagtactgtatttaaacraaattatcaagtatagcaaaatcttcttgaatttggcttcattgctcctattataagattcattcatgttgtatgtggttataattcattcattttactgctatttactgtttcattgtaggaatatcccacattttatttattcagtctactattgggttgtttccaggttttgctgttaacagacagtgcttctaaagacattcttacacatattttttggtatccatatgcatgtgatttgaggaatatatagacaaaagtagaatttccaaatcataagattgatgcatcctctgctcaaatggaaaacatcaaatgtttttgaaatgatggttcaaatttacatttccaccaagaacacatagtgggcagctggttctgtataccaggcaaaatatgatgttctcagattttagtacttttgccagtctggcaaa

SEQ ID NO: 845684 - DNA, 513 bp, Homo sapiens
ttagcagttttccttcttcccccaacctccctcctrtctttctcagcctctggtaaccacgaatcaactttacctccacaagatccacttttttagcttccacataagtgagaacatgcagtgtatgtctttctgtgcctgcttatttcatgtaatataatgacctctactatttatgttgctgcaatgacaggatttcattgtaattatttttgaggctgaataatattcccttatttgtatgtaccacattttctttgtcattaaatttttaaatgatattgatacaagagatagaaaaattatttaggcagatagtgagggtaaaatagtcctcagcagagctcctcttctaacaaaaagtggttcaatttttttttttctttttttgagatggagtttcgctcttgttgcccaggctggagtgcaatggggagcaatctcggctcactgcaagctctgcctcccaggttcaagcgattcttctgcctcagcctcctgagtagctgggaa

SEQ ID NO: 845685 - DNA, 650 bp, Homo sapiens
tgctcccatcagatccaaaggctcctcttctgggggccccggtgccccacacacctcggatgtgccagggrcctcatgtaggctttctcatgctattttataaggaaagaaacaaaacagaaaggagttatgctggagagctggcagaagtcccaggggaacctaaccccctggccctcacgctcccactttatttcacaaacagaacaagctgccactgcactccagcttgggcaacagagcaaggccctgtctcaaaacaacaaaaacaaacaaacaaacaaaaaacaaaaacagaagagctgacactcaaagagtaaaaacaactaacctaagccacagggccttcctgtgctggcttagaacaaggaccaatggccagttatgaagggctcccgcaacgctgcctgaagcaaggtttgttttatacacaatgctcttccctcaggctctccattataaaggccacagtggagaagccaggcatccttcccaggaaggaacatacctgctcagacatggctccagcctcctgcagagtaggcaagaagatgtcctacagtagcacaaaggagatagtaggtgtgaagaagtgactaatgacacttgctgttcacaactagttttttccagaaactatgaggaacccc

SEQ ID NO: 845686 - DNA, 524 bp, Homo sapiens
ttgttcagaaactgattccacaactcccaactctggagaatttgctgaacatctttatctcagtaagtaaataatattcctgtttgagtcacttgtagaatttgaaaataacattgcaagagtgaaaaagatcttatttccgattgcttctatagcatttcaaggtcatttaagtattacttttaaagattactcctacgtgttcttttagatcctttaaaatttaactcccagcccagcttgatggctcacgccccactttgggaggttgaggcgttacgatggcttgaggccaggaggttgggaccagtttaggtaacatagtgagatcctgtctatacaaaaaaaatgtaaaaactagccaggtgtggtagcacatgcctgtagtcccagctacttgggaggctgtggtggaaggagtacttacttgagcccaggagtytgaggctaaagtgagccatgattgtgccactgcactccagcctgggcatcagagcgagaacttgtctctaaaaataaaatat

SEQ ID NO: 845687 - DNA, 631 bp, Homo sapiens
aagaaaaaaaaaaaaacagaagcattttctctcctagatctttcagctggctgccagatggtaagcaaaagcataactattagacctgcaattgcactaaggtgaggcacccaaaaactgagagctccttcctgcctgacatttttgttcaggtaaccagagtttaaacttgtgtccctggtaataacacaactaacatctccattacattaataccagctacatccccatgggaaaatgttccatgtttcttattaaccaatcccaaggggaaatcctgggggtaaaacaagagaaaaaactatagcaggtggtttttttttttttctgaaaaaaaaaaaattataaagtattcaaggtaattaacaaaatgtttacaataaagtctacacttgatcttagccaaaagactgagaagcgatgcaataaaatttatatatggctttctgaggtttttttttttttaaattttactctaggaagacattgatgtaaaataagctgattcacactatcagtttaagtgataataacaatgcaactggcaaaacaagtaatccagttagctaatggcagatattttaagtataraaaagtatatgtggtataatgggatatcagttcttaaaat

SEQ ID NO: 845688 - DNA, 493 bp, Homo sapiens
gaattgctgagacaaaccccattttgacataatgtcattctgtttatatttagttggattcaacttgcaagtattttgttaagaattattgtgtccatgttcatgagaaatattggtctgtarctttcttctgtgatgttgttttccagttttggtatcagggtaatggcagcctcagaaaatgagttgaaaaattcttttcacttctatctttgggaagagtttctgtagaatggatacaatatcttccttaagtgctttggtggaattttccagaaaagccatctgggtctggaattttctttgtgaaaggtttttaaactacaaacgcaatgtctttaacaaatgtgtggctattcagagacctattaattcttgagagagcctcaggggtttgcatgcttcaaagaattttccagttcacctaggtcgtcaaatttgttggcaaaaagttgttcagaatattcacttgttatccttttcatgtctgtgg

SEQ ID NO: 845689 - DNA, 616 bp, Homo sapiens
cttcataaatatataaatgatatctgtgaaaaacatccagctaacattatatttagtattgatatactttttccttaatatcaacaacaaggcaakggtttcactcttatcacttctaataaatgctctactaaagcttctacaataagcaataaggcaaagaaaaagaaatgatataaagatttgaacaaaagaaataaattgtctattcatagatgacatgattacatgattgtagaaaatcctgtgaaaccagaaaaagatactatgactaatgaaagaatttagaaatattttaagaaaaaaggccaatacggagaaatcaattgatttttatatattagcaataaataattggaaaaataacattagtaagccatttagtagcatgaaaaagcatactttatatacttaggaatagacttaacaaaagacattaagtaaaactttgttgagagaaaactttaaaaagacttaaataataaagaaaaatggcatgtccatgaattggaaaactcaatattttcattctttcaaaattaatcgatatattcaaggcaattgcaataaaaatcttaacacagacattgaaaagctgattctaaaacttacgtag

SEQ ID NO: 845690 - DNA, 712 bp, Homo sapiens
tcttgttgatacacgctgcttggatcctgcaacttcttcagattacagtcccattcctaccttagccagcccagtgattccctggctattgttgtgacttaaccatagttattggtttggtggcaaggagataaggtggagatagatcctgaggttgggagaggtgtgtcacattttcattaaagacagagatctcagcatcttttttaaggaagagggggaagaatgctagactttaagggagaagattgggccacttctgcagtctcagaggattcaagggattctgggggttcaagatatttgagtacattgattagctagtcctacatcaagcctcagcgcctcactgtttccaatcagtgccttaattttgccatagcagacttgctagggctgaaaattcagccttctttgagcactgttacctttatagttgatcctaaacttagccaagggttatctgccctttggctgcaagagataaaagttaatttatagaattcccagaagaccctctgattttaacactttgtcttaaattggtgcttaatcaccctcaggttttctttgtttttcartgatatggcatcagcaacagctgtttaaattctagtgtccttatgattacctcccctgaacctctctagtacttgagccattgcagctgctaatgcatttccttacacagctatacaatctgagtttagca

SEQ ID NO: 845691 - DNA, 536 bp, Homo sapiens
gtagtagccactcaataaataattgtgcaataaattccagaaatgtgccaaaattattttttaattgttctacttttggaggattcatttattctgcagcctaattktggacaattgttccatttccttttgttacactgcttttaaaaaataagacaaagtgtatatggtaagagaaaaaagctcatctgaaatgcaatctctattcctccctttctgttttacctgaatataattatatacttttacattatttaacccaaactacatatatatatatgtgtgtgtgtgtgtatatatttgtgtgtgtgtgtatatatatacattcaactttgcattgctattttctacatcattttataatttcatatagtgtagtgcctgcatactgtcctttgtatatgacatttagtgttttgacttataaacacttaccttaaaacactaatacattatgcagtgtactagtgttcattgtacagtgtactaatacattgtacaatgtcctctgttttggaaatttccccagaagaatt

SEQ ID NO: 845692 - DNA, 532 bp, Homo sapiens
tcacctcaagcacttatcgtttctttgtgttaggagmattccaattccactcttctagttattttgaaatatatgattattactttttaactcagtggtgtttatttattcttaggcaaatttattttaggttttagttctggtttgggctaaattaattttctcccattttcctttgacttctttatttttctttctctttaaatttcagtctctgtagctaactatgataaataaagataattagatattccaagtagcttcaagttgcaagtaaaaataactaattaatttaattaaatagctgtaatgatctgtcaccccattactacttttttttttttttttttgccattacaaaattttctgtttcctttttaaattcttcagggtttcagattccatctttagatatggtcagaaatgatgaaagacaagttattggtcataaaaagggttggttgtaaaagaataatattcctataatagaaaattaaattgttatatttattgggagtaaagttctgtttca

SEQ ID NO: 845693 - DNA, 544 bp, Homo sapiens
ttcgacttgtttactttggaaagattttcttaaataatctgtttattgaattgttaaaccaacagtaaccagtctggtttgtccatttatcattatccaccaatgagaaatattatttgaatattatgttawttttaaaaatgtaattttatctaaatttttaccatcttattaatgaaaatataaaatagatttataataactctgacaggtagtctttaattttatgtttgagtgaagaggagaaaccaaaaagtttttgtgatgaactacagtgtttaaagccttttgtccacatgcccattttgcctttagtttgttgttaatgttgttcagataaagcagtgaaacactttctctaccatgactcttcgtttagattttttcaccttctccataatctttatttgtcttttaatgccatccaccatccccaaccctcagtacttctcattttctctctacaaagtatgtgggagccttttaaaagagagtatgtatccttgacctttgcaacttttaagtttcctttatcaagaatttc

SEQ ID NO: 845694 - DNA, 644 bp, Homo sapiens
tgtgtgatgatccccttctctttacctaaatgacattgtgctttagttagrtatttttccatttccattttttttttaactcaacggtatgtttttaagattcttccacaatgctctcagcaatccagttcattgcttctacaagctgcttgatatattaggatattgatttaatgccatttactcttgcctccatggtataatcaagctctggaaattgagttgtttttttttttacttcagtgaattcctggactgtcttataaacctaaataataattgaaaattgtattactcttaattctactaaaaaatattgaaatacaggcagtccctaacttatgatggttcggtttacaattcttttactttacaatggtgtgaaagctatatatattcagtagaaattggactttgaattttgaattttgattattgggctatgaatatgtggtatgatactgtctcttgatgttgggcagagacagtaagccgcagttcccagtcagccaggcaatcatgagggtaaatgccagtaccctatggtgtactgtgttgccagatgattttgcccatctgtgggctaatgtagtgttctaagcatagtaatgtaggctaagctaagctatgatgttcagtaggtt

SEQ ID NO: 845695 - DNA, 644 bp, Homo sapiens
tgtgtgatgatccccttctctttacctaaatgacattgtgctttagttaggtatttttccatttccattttttttttaactcaacggtatgtttttaagattcttccayaatgctctcagcaatccagttcattgcttctacaagctgcttgatatattaggatattgatttaatgccatttactcttgcctccatggtataatcaagctctggaaattgagttgtttttttttttacttcagtgaattcctggactgtcttataaacctaaataataattgaaaattgtattactcttaattctactaaaaaatattgaaatacaggcagtccctaacttatgatggttcggtttacaattcttttactttacaatggtgtgaaagctatatatattcagtagaaattggactttgaattttgaattttgattattgggctatgaatatgtggtatgatactgtctcttgatgttgggcagagacagtaagccgcagttcccagtcagccaggcaatcatgagggtaaatgccagtaccctatggtgtactgtgttgccagatgattttgcccatctgtgggctaatgtagtgttctaagcatagtaatgtaggctaagctaagctatgatgttcagtaggtt

SEQ ID NO: 845696 - DNA, 376 bp, Homo sapiens
ggtccaaagtagatgccaggtaagtaaatagaaaaatgaatgaatgaacgaacagcacacattttttcctgcaaggtattttaagattagaacactattacytaatccaagaatagaaacccattttgaaatgtttgggaagatgtgcaggatggcatttagttaaatctgttatgttgtgttttgctccctcttaccagcctcagaactcactgaaggaaggtccttcttccagttacttttgcatccttgcagtgtctaaggtctcaatgcatttttgtggcctgaacaaatgaaccaatgaatgtgtgaaagtcacttctccggttccttcctgtaaaagtttgatgttctaaggaccttcaaagtaaagtat

SEQ ID NO: 845697 - DNA, 624 bp, Homo sapiens
tgggtgaggaataaaattcactgtgctaagtcactgagatgggggctgttgttatggaactaaccgtatctaattgtgggataataggggctgttaaaaagcagctcctatcaggataaatagctaatgygtatagggtttaatacctaggtgatgggttgatgggtgtagcaaaccaccacggcacacatttacctatgtaacaaacctggatgtcttgcgcatatatcctggagcataaaataaaataaaataaaataaaataaaataaaataaaacaaaataaaataaaatttaaaaatagctcctaatccagctcggtgagactcaggagcaaacttcagaggagtattttattatggttggcaaggagcaggaatatgtcaaaggtgctggtgtaggagactgtccttcctctgacttgtgttaggccagacattctgaagtagacgtgaccattcctaggtttcttgaaaccttaagcaagggggtcctcatttatcccagtgcctggcccactgaatctcagtaaggaaatacgtactaaatgcaaggctggaactccagagcatttgcctaatgaacaaaagaaccgtactgagttctactgagggcatatgccag

SEQ ID NO: 845698 - DNA, 573 bp, Homo sapiens
tttaagcaagaatgtaacaagaccagtcttatgtttggacctaactctggtggcagagtggaggacgaaatgcaggagaggctggagcaagcaggcaggcatgtatccttaaatgagcaccattcacttttggactagaaaggaagtctgaatattaagaagtgtaagggccacagggtcctaggcaggcagaaaagcaaagggttccagctgcaggaggatacaggggggttccttctcagttcaggagtgtggtctcggactggcatcttcagcatcacctaggagttgttagaaatgcccattctcaagcatcatcttagaagcagtgagggaaccttggggatggggcacacaaatctagctttgaacaacttttccaggtgattctgatgcatgctaaagaaccactgctctagcccgccaaaaatcatgtctcaggtggtaaaggcttagaactgcacaacttactgtcttttttaaaaagaacgagggtaatgagaaatgggttyctatgttgagtggggcagaacaaaagccacatacaacctagattttacgtagtgccggaaa

SEQ ID NO: 845699 - DNA, 570 bp, Homo sapiens
agggtgattgttatagcaacattacctttgagaccctcattcayctgggcacttcatatgagctcattctaagccactcagtgacccggcttggggattatcatgacccatatagatcaagaagaaaaaagtagctgttggttagttggctgaactcacaggtatgagcttaacacgaaggattcaagctctggctcttctcttcgccaagtatatgatcttgggcatgttactaaactgtctaagcccccatttcctcatctggcaaatggggctcagatatgttcctacatcatagctttgtcgtgaggattaaataagatgtctgtgaattagcaagacacctagcccatccgtagtaggggatccttaagtgatggcaggaatggagaggtaggaacagatccaccaagtaaagggtaaagccaagatcaaacacaaatccagccaggtgtggctccttctgccttttcactgccactaagagaggggtagcattcaatgagcagatggcagtggctcagagtgcagatcagtgcaaaggtctttctcgtcttctctgcaaagaag

SEQ ID NO: 845700 - DNA, 570 bp, Homo sapiens
agggtgattgttatagcaacattacctttgagaccctcattcacctgggcacttcatatgagctcattctaagccactcagtgacccggcttggggattatcatgacccatayagatcaagaagaaaaaagtagctgttggttagttggctgaactcacaggtatgagcttaacacgaaggattcaagctctggctcttctcttcgccaagtatatgatcttgggcatgttactaaactgtctaagcccccatttcctcatctggcaaatggggctcagatatgttcctacatcatagctttgtcgtgaggattaaataagatgtctgtgaattagcaagacacctagcccatccgtagtaggggatccttaagtgatggcaggaatggagaggtaggaacagatccaccaagtaaagggtaaagccaagatcaaacacaaatccagccaggtgtggctccttctgccttttcactgccactaagagaggggtagcattcaatgagcagatggcagtggctcagagtgcagatcagtgcaaaggtctttctcgtcttctctgcaaagaag

SEQ ID NO: 845701 - DNA, 557 bp, Homo sapiens
agctgccagtaactttgtgtgcagctgttatgggagaagtcagtagaaagacagaagcagagtaaagagggggatacttatccctgagcccttgttacaactctgtcctttccttggttatgttagccaataaattacccttatttgctagatgtagttcaacgtacatgtatgtaactggcagcaaaagtaatcttgatcgtataatggttcattgatttttagtttgtaaagttggtcagttacattgtcactaataaattaattgtatcaataaaataagtctattttatcattaatttggtatagtatctgtaagagatgataaatctattttagaagattaaatgtcattatcttttaaaatgtcatttacattatttatattggtaataatagtaattaatggcttaatagagtatggggaattaggaaaaaagagatgtttaaacaaaaatcctcaaacaactttgatggaaaagaggagaaaatataatatttwaatctaaaaattggtttttaagctaagcataggagtgacataatttttaacataa

SEQ ID NO: 845702 - DNA, 557 bp, Homo sapiens
agctgccagtaactttgtgtgcagctgttatgggagaagtcagtagaaagacagaagcagagtaaagagggggatacttatccctgagcccttgttacaactctgtcctttccttggttatgttagccaataaattacccttatttgctagatgtagttcaacgtacatgtatgtaactggcagcaaaagtaatcttgatcgtataatggttcattgatttttagtttgtaaagttggtcagttacattgtcactaataaattaattgtatcaataaaataagtctattttatcattaatttggtatagtatctgtaagagatgataaatctattttagaagattaaatgtcattatcttttaaaatgtcatttacattatttatattggtaataatagtaattaatggcttaatagagtatggggaattaggaaaaaagagatgtttaaacaaaaatcctcaaacaactttgatggaaaagaggagaaaatataatatttaaatytaaaaattggtttttaagctaagcataggagtgacataatttttaacataa

SEQ ID NO: 845703 - DNA, 577 bp, Homo sapiens
agcaagttcttagagacctacaaagagacctagactcccacacaataatagtgggaggatttaacaccccactctcaatattagacagatcaatgagacagaaaattatcaaggatatccaggacttgaactcagctctggaccaagcagacttaatagacatctacggaactctccaccccaaatcaacagaatatacattcttctccgcaccacatagcactttttctaaaattgaccacataattggaagtaaaacactccagcaaatgtaaaagaaaagaaatcacagcaaactgtcactcagagcacagtgcaatcaaattagaactcaaaattaagaaacacactcaaaaccactcaactacatggaaactgaacaacctgctcctgaatggctactgggtatataacgaaattaaggcagaaataaagatgttctttgaaaccaatgasaacaaagacacaacgtaccagaatctctgggacacatttaaagcagtgtgtagaggcaaactgatagcactaaatgcccacaagagaaagcaggaaagatctaaaatcaacaccctaatgt

SEQ ID NO: 845704 - DNA, 574 bp, Homo sapiens; identical to SEQ ID NO: 841468

SEQ ID NO: 845705 - DNA, 617 bp, Homo sapiens
agtattattatgtgtttttgaaccccacaaattattattgttttttcatacagtcaatgtttatttttgtgtaactgcatgttagtcgaggtctttgctccttattctttctttttgtcttcagttttcctaaaccttccgttagagagtttcctttttttctttcttttttttcaaaccacattctttagaattcccttcagtgaaggttttttggtagtaaacatagcttttgtcaacttaaatatgtttttatgtcatcctattctttaaattaagcttcactgagtatacaggtctagagtttacttattttctcttagcattatttcagtttcttctggtttctattgttgctgtttagaagttatctgcatatctaattgttggtgttttagacatttttttttctctttgaatgtctttaagatcatctttgtctctggaatatgacatctttactatgatgtgtttgtttttatgatgcctgaaatttgttttactttctgcatctgtrtattaatgtcattaattcttggaaattcaattctatctccaacctttgcatatttctcattttctctattatcttcttttgaaattctgtaaagacttag

SEQ ID NO: 845706 - DNA, 612 bp, Homo sapiens
attatagccataggtaaaaatccatagttaaattgcacactgaccttaaatctctctgtgtatgcccttgtatcttgcatgttaaaagttggattattgggcatgtgtggcagcctgccctgctacatgctagacaagtgtgctttagtacatagccacaagttcttcattctttaaaatgttttgacagatcatctcataataaaaataattcaggaaaactatggggaaatagttacatttcacaaaagatattttaaactctttgtaaaacttagataatagagcctagcagttactttgtatctaattgatacattttatgttaatttaccaccatacattttattaatcaaaattgtatagcatgtgactcttttggctttcagagttctcaaaaatattattttgttgcatgtactgtatgtttagaggcaaccaattatatactcaatatggttttactgtgccttacacaaagagaaactctatacagaatgtatrtcatggggtggggtaacagagtctttactgcactgttaggtgatggcacacagagcatgtcccagaacatttctgtgcttaattacccaaccaaagagatctgaagta

SEQ ID NO: 845707 - DNA, 644 bp, Homo sapiens
gttttactttgcccatgccacctctctcccagcccaagtttcacagcacagagggagatccttctgcrtgagagaagagtgtatgagcacccaactttactgaaaaccccagcaccaagctcactccagtgaaccccagtgccaggctggtccctgcaaacctaggttcctggcccaccccatactctgaccagcttgtgcagcttctggtttgagaaccaaccttgcagatccaggctctaagtctgtcccagcactcacaaccccaggttcaaggcaggtcaggcctgcttcggcatgtccattatcaaaaagacaaaaaataataaatattggcaagcatgcagagaaaaaggaatttgtatacactgttgatggcaatgttacttggtacagtgattataaaaaacagtatggaggttccttaaaaagttacaagtagaactaccatataaactaacaaacccacttctgggtatatgtccaaaagaaacaaaatcagtatgtcaaagaggtatctgttctttgcagcattattcatgttcattgcagcattattcacaatagtcaagatatggaatcaacctagatgtccattaacagatgaacaaataaagaaaatatgatacatacacacacacaat

SEQ ID NO: 845708 - DNA, 631 bp, Homo sapiens
aagatacctgagactgggtaatttataaaggaaatagttttaattgactcgcagttccacatggctggggaggcctcacaatcatggcggaaggcraatgagtagcaaagtcatgtcctacatggtggcaggcaagagaacatgtgcaggggaactcccctttataaaaccatcagctctcatgagacttattcactgttatgagaacaacatggaaaagacctgcccccatgattcagttacttcccacctggtccctcccataacgtgggaattatggaagctacaattcaagatgagatttgggtggggacagagccaaaccatatcagctatacatacatttaagattaataaaaacaagtagggtcatgatatccttagtgactccagttcagggctgcagtggccacagcctctcctggcagctcagggctcaaggtaggaactgaccctggacaggatgccatcccatctcagggcacacacacctgcactcacccagactgagaccatgtagacacgcccattcacctaatgtgtgcatctttgggaggtaggagtaaactggagcacctggagacaatccccacaggcagtggccccagccaaggaatcaatttttttctta

SEQ ID NO: 845709 - DNA, 693 bp, Homo sapiens
gtgtaagcattcctcttttgattactaaagcttctaaaccagcagtcatgagaatggaaagcaaaatttttacaagtgatcaaccactttgattctagaccaatactgtccaacagaaatttctgtaatactatccaatatggtaaccattagccacatgtggctactgagcacttaaaagtgtagctaatgtgaggagctgtatttttaacttttagttttcaaataggtacatgtggctagtggctaccatattggacagcacagttctagaccctcatatccttctttggaaaaaagagcactatattcagtcactggttcagaacacaaatagaatcctgcaagatagcatcctatattcttaaggtacttctgatgcaggccaggtaagccgtaaaattgggtcttcacccaagaaataattcaagggtgagctggtgttagatagcaatgcagtgtacagcagcagaggcactgctccttatgaagcagggctaccccatagacagtgtgcccagagtagcagttcaaaggcagttctatttatacccacttttaattatatgcaaattaaggggcagattatgcataaatttctagaaaargtgtggtaacttctgggtcatcaggttgttgccatgaaacagggcagtaatgtcgatgttgccatggcaatggtaactgatatga

SEQ ID NO: 845710 - DNA, 580 bp, Homo sapiens
ttattaaggctggagtgcaatgtcgtgattactgcaaactccacctcctgggctcaagcaattctcctgcctcagtctcctgagtagctgggattacaggcctctgcyaccacgcctggctaatttttgtatttttagtagagacagcgtttcaccatgttggccaggctggtctggaactcctgacctcaagtgatctgccccctctcaggctcccaaagtgctgggattacaggtgtgagccaccacacccaactacattaaggagtatttggaagttcatacaagaatgccacataaggccacaatgaatagtaggtgtagttgactgttctgtctctcacatagacatacaagctcacaaattgacactcgtgcttaagtcaatgaactctattataaactcatgtgcactcattttacaaacatggatttttgcattctcttttaagccatctgttgcctatgtaggatcctggtttttaaaaatctctcatatcatttttacagtgtacagttatggttgtgtttacacttactcaagatgatttagggtagtaagcatatggatgaactttaa

SEQ ID NO: 845711 - DNA, 494 bp, Homo sapiens
gatggatgtaaagttacacaagcttgtctggatttcccatcatarggcctttgtattcacttatttaataatagttcagaagaagctatctcagctgtacaagaagtaattcagtttcagaacatttctcactccaacaaggtgcattttcccctctggcgctcagttgtataaatctgacctctttccctctcactcagagatctcttttatgtatttcccaggttggctggcatagtcaccttagaatagcccccaaatgtggaaattctgttgtcaggagtcatcatttccagtaagaaactcactgagtgacagaaaatgaagactaaagatcaaagattactaaattaatttgcctaaaaccaattcacctaaaaccaattagtctaaaataaatatttatcaaatctgcagcatttcaaaaggatttagcagattcacccttttagttattactgttgtctgtataacttttcattgtaagtcaactg

SEQ ID NO: 845712 - DNA, 510 bp, Homo sapiens
ccatcaactcttccctaaatttgagtgtagctgctgggactgtctgggatactatcacatagttagaagccaagagagcagtagcagcatcatggtgcagaccacacacwgtacaagaaggtcaccaaatccctgcctgccctcctgtagtcacacagccaatggatccatgtgcatgttgcagctataaaatttgaacaattaaaaaaaatagctactatcggcacatgtcagttgtagactctatgggatacatacaaaacatcaatcaatatcttttcattaaaaaaacagcagtttagttataactgcaagaaacagaaagccttaatgttgcctcttagaaaatcagggtgctttttttaatagaataataaaatcaggcaaaaccagggctgctactgattgaatgactcgacactattgtggctaacatttctatgattattttcctcaggtttgctgtctccttgtttcctgaaagctgcttcagtcaggtatcaggttgac

SEQ ID NO: 845713 - DNA, 579 bp, Homo sapiens
gcataaggaggagttgactaatcattgctgttattaaagctgaaagaatatcataaaccttgaaatataggttgcctcttaaagcttggaatgaccccaaccagtagccagtaaccaaagggcactgtagtcctacagccacaatggtactgaatcatgcaaacagctctaatgagtctggaagtagattcatgcccagatcttccagaaagaaacacaggctgctggcaccttgagtttggccttgtgacaaacaaagtaccaactgagcaatgatgtccctggacttttgatgtaccagactgtgggataataaatgggtgttgtaaactgctaagtttgtggtagtttgttgtggcagcaacagaaaactaatgctccatcctatttgcctagtgattattgtcaagcttttcattgataagtactggaatgtgtgcatatatatatatatatatatatatatatatatatayacacacacacacacacacacacatatatacacacacactcgcatacagatatacacacacatacacttaagtcctcaatgtcatcgataggttcttggaaact

SEQ ID NO: 845714 - DNA, 589 bp, Homo sapiens
ctagtagaaaatatataacaaatctgtgtccagattatataagaaatatatgcaaatcaataataaattttaaagttctgtaaaatataggcaaaagatttgaagaaacatttcacacrcacacaaaaaaaacgatgtacaaagggcattcgaaaagatgctcaaggccgggtgcagtggctcatgcctgtaatcccaacactttgggaagccaaggagggcggatcacgaggtcaggagatcgagaacatcctggctaacacggtgaaaacccgtctcaacttaaaatacaaaaaaatttagctgggcatggtggcatgtgactgtagtcccagctactcaggaggctgaggcaggagtatcgcttgaacctgggaggtggaggttgcagtgagctgaaatcgtgccactgcactccagcctgagtgacagagtgagactccatctccaaaaaaaaaaaaaaaaaaaaaaaaaaaaaagaaaagatgctcaaaatcattaatctttgagaaagacaaattacaaaacaatttcttttcacacctactaaaatagctgaaattaaatagcctgacaatatataatatgg

SEQ ID NO: 845715 - DNA, 472 bp, Homo sapiens
gagatgggtatcatgcattttattactaatgtgttacaaattccacaattgtttttattgttttcattgttttattgttttattgtttttattattgctttaaaartcaattgtattttaaagagattcaaagagtaagacaaaatgtctttattgttaccctatgttatcatttcttatacttaataccgttttcttactctttgagagcacaaagtttattctccaaattccactgctattgtttgcctttgtctccataacaaatataacatcttcaatattgcatatttcccttgaacttgctcaggtttcagatactttttattgttctctgatcatagatatatattttccttaagttttctagctccaataatacctttgaagcaatgcggattttttaaaattgttgtatgtttgtgggttgttctattgcagtggaatggaatatttgtatcttgttttcatc

SEQ ID NO: 845716 - DNA, 611 bp, Homo sapiens
tcaattatttcttttttattataaatatctgtcatatacatttttgtacttaaaaatccttgtgtgcatttaaaactatttctttagtgtatagtcttaaaaatggcgttctggatgaaatacgaatttttgaaaaggctattggtaaatatggtcaaattatctaaactgctttctggaaattttctactaattaatcttccactaaaatgggtttattttaaagtttttattgcaattaaaagaggtaaaccctttgcaaatagatagtcatgggctgcaaagtcaagctggctattcaaactcaatgacaagtttttttttttccctctcaacccactttctgctgctctcccatttcacatacacaatgtgagatgaaggtcaggtgagataagggtattaggcatgacttacaaaagctataggcacaggatagctagctgacttctggtatggtaataacaatattggtgttactatttctattcctacttgcttttggcacaaatkacagccagttctgcaaatgctaaagctgttttccactgccaacatgttctactaatgatcactgcaaaaatgccagctgcagctatggagggaagtat

SEQ ID NO: 845717 - DNA, 594 bp, Homo sapiens
gagggaagtatttttctgattttcctgactttaggaatagaaagaagaaacagtaccaaatgaacgtgaattggaacccagttagrtagaagtctttccttctctggttccataccttctacccaaagatgtcacacgacactgctagggataaaattccccatttgccctctacctaggtttttcttcttagactgaggattgcatcctcattacattcagaaattggtgggtctgatcattatattcctatgaaaataggagaaaagtgccaactctcctcctacactaccctgctcactaacatcttttgaaatttctgaaaggtttggaaggggaattgatgcttcagacagtcttcatttagtttcctctgatctctggaagtggtactgatcaggaccacactgaggaagcacaaatgctgcttggaattaatagccagaaccaaactcaacgagtgacaaggaaattacctctctgagaagagttctgggaatgggagtgggcaggttaattgcactccacaatccccaaggccacctggccatagcattcatatttatttcagccatggccctgtcatgttgatta

SEQ ID NO: 845718 - DNA, 590 bp, Homo sapiens
tttcccctgctttgataagagcaccttttcaggtgagcacagatttgttagggaacctgctgtaagcaaataactaagctgctggcaggactctcaccttccaackttgtttacctactcaagtacctggcttttatgggtggcccccttttcctgggatttcccatcagaaagactgtctgagggctggattggggaactgctcacagatgagaggcagtagaaggaggaagaggatttgcaaaggagtgtcaaggaaagaagggttggaggctaaatgagaagaaagttaccacatgacatggaagaaaactaggggagctggaagggatctttgactacagaatgcttgagaaaacaagaaatttttaaaagaaaattttacagtaaggaaaaacacaaaagataataagacacacattctcaccactcaagattattatctatgaacataggatctcatttgtttgcacctatcactgcattcaagaacacagttgaatctattgagttaactgataaacatttcacctctattcctctgatactacctattctaaagtgtattaaaaaagaattaaagaatcata

SEQ ID NO: 845719 - DNA, 461 bp, Homo sapiens
tggcaggtagtgaagaaaaatactaatcgaggagatggytagaagtaaatattttactcttcatttctgcatggaggtgcgttttccatgctctccagctgaggaattgaataggaagaatacatttctagacactagttttcaaaaaacattttactctagctttctgtggacagaagttatttcttggcatggtttcacttaaccaatattaatcgaagatctgtgtacaaaccactgaactactcactataatttcatttattatgggcttaaagttaatggtccatagtaattgagaatttagctgagctataaaagaaagtactgatttagagttcagtatgaatcattttgaagtctgtactattaaaaacatctcttaaagtttcaatttgagacttgtctcacctgatttatgtggtatataaattaactgagcactttttgtttttgttgtt

SEQ ID NO: 845720 - DNA, 575 bp, Homo sapiens
ttcccgaagacccagaaaacagagtcgaccacacccttttctgtgtcatgccctattaaagtcttccttaccccagattgtaaatgcatgtttggattaacgtctccccaacttgtctttgagccttttgagagtagttactgagtttgtttggtttttctggtgttctcatgttagcaccccaacacaaggtctggtacagagtaggtgctgagaagatgcttgtattttgttttgtggggtttttcggtgggcgggggttgcctactacaactgctagcagcagatgcgtgttgaatgaataaatggatggatggatgggtggatgggtggatggatggatggatgaatgatggatgatgaatgaatgaatgattaaataaataaataaatcccaactaactaagaggattttaatgaacctgggtagaaaggacactccgttaccaatcaagcgagctggatgtcagccaaagtgacttcctggaggaggagcaaatggcccctgaatgatrgatgcgtttttgccaagtggagacacagtgcagaggaaatgttgggaacattctctagcc

SEQ ID NO: 845721 - DNA, 575 bp, Homo sapiens
catagggccactgcaggagcattgattgtttagtgggctcctaggtaatagaccatgagatggaatttacatcctggaggtttgttgacgagatctctgatatggtttgcctgtgtccccacccaaatctcatcttgaattgttagctctcgtaattcccacgtgttgtgggagggatctgctggaagataattttatcacaggggtgttttcccccatactgtcctcatgatagtgaataagtcaaacaagatctgatggttttataaggggaaacccctttcacttgtttttcattctttcttgtctcccatcatgtaagatgtgcctttgaccttctgccatgattgtgaggcctccccagccacatgaaactgtgagtccgttaaacctctttttctttataaattacccagtcttgagtatgtctttatcagcagcatgaaaacggactaacacaagctctcaagaaccacgcctgtgatggagcaaggggaggacrgggcagagggagaaactggactgggatccagttgcaataaaggcctcagccaaccccatggggaactctcaat

SEQ ID NO: 845722 - DNA, 433 bp, Homo sapiens
aacattattgcattaaaggagaggggctgtatctcattgaaaacacataagcacataatttcatagacatatatctgcagccagatatatatctatgaacaatgaaattgccccaaaattaaaagccttctggctatatatttgtaaacacaatcagatcacaatccaatgaaggggcccttttgaattaatgcgcatcacgtgatcttcctatcattacatttataactttccttttgaacagctcactgccttctctttatctccataaaaatacgggcatttatgtgtggattttcttgttttcttcggttaatggtatgtatatatataccattcttgtttttaaagaaaggggattagatcagaattgtgaaaaaatacmcaaagaaagaaagtcactcttttacacctgcagatagcgagagtcccc

SEQ ID NO: 845723 - DNA, 505 bp, Homo sapiens
gaagggttaatgggcaaaagaaagatyaatgtttctccctgaaatttcaacagtcatagattttaatgcaatgaagctgtggagtgtaagctgggaatctctgatgaaaacgaatacagcaagaccaatgccttccacatcgactgcacctacctggagtgccggccctcttgcagaaggctccagtacccacttactcacagaaagaatgggagggctgagtgttgggccccctccagttcttttactttaactaacttttttttttatttaggaaaaaaaatctactaaaataaagcaaaataagaagctacaggtattaaacctgatgtgtttaaaccccaatgaataacagacttccaagtcaagaatagtgctaagagcatatggttatgacataaccctctccctgcaccccacctttgcttgtaggtggccatgtgcaaactgtgtctgcacacacacacacacacacacagcattagttctttcattcagctggact

SEQ ID NO: 845724 - DNA, 612 bp, Homo sapiens
acagttttcaagagagcagtggttttcccagcacagagtttgagatctgagaatggatagactacctcctcaagtgggtcactgacccctgagtagcctaactgggagacatctcccagtaggggccaaatgacacctcatacagccaggtgcccctctgagacaaagcttccagaggaaggatcaggcagcaacatttgctgttctggaacatttgctgttctgcagcctccgctggtgatacccaggcaaacagggtctggagtggacctccagcaaactccaacagacctgcagctgagggtcctgactgttagaaggaaaactaacaaacagaaaggaatagcatcgacaccaacaaaaaggacatccacacaaaaccccatctgtaggtcacaatcatcaaagatcaaaggtagataaaaccacaaagatggggagaaaccagagcagaaaagctgaaaattctaaaaatcagagtgcctcttctcctccaaagaaatgtagctcctcgccagcaatggaacaaagctggacagagaatgactttgacgagctgacaaaagtaggcttcagaagatcrgtcataacaaacttcactgagctaaagga

SEQ ID NO: 845725 - DNA, 603 bp, Homo sapiens
cttaaggtggctccaaatgagcactgaaggctagagtcaaggaaaccagagttactctctctctgtcacacaatatggtccccagagtggtcaggatctcagcaggaaacacggtactcgcaaaagtgatgactgaaggaaatttaaagaatggctcttttatggggatttgagtggggttatggaaaacctgtaagagactggtgcagttcttgagggctaggtatcagcaggaagctgttaccaccagtaggcctgaaagggaaaaggcagaagtggttactgccaccaaccgctgggcaagagctggagccataggccacaagacagaagctatgggcctgggtaaagatcacagccaccagcaggctgccacccagcagggagggagccaccttcctgtggcttgcgaatgcccagcactggacaaacccaaccagaagccaaatggcaaggctgtggaaggctaagccatcccttgaggtcaacctcctgaacacagtgcaggayagagaagagtgaagggtacacagagaatattcagcgcactctatctcttaacacctacaggctggggaggcttaaggaaactaagttatacta

SEQ ID NO: 845726 - DNA, 641 bp, Homo sapiens
tatgtcatttgtgtgcacacatgcatgcccgcaaatgtgtgatcatcccttgagggatatgcaaggaactggcagcaatggccgcctatggagagaactaggtgatcagaggacagggatgagaaactcacacttcacgtaggccttttataccaggaacgctagttaactatttctaaaataaaaatttaaaatcacttcattacagttagcacaaagaggtcagcacagaatgaggcttaagttgtagaggccccaagaatcagtccccctgcagaaggtggaggaaggggttcgtcaggaccagagacggacggggacgcatgactgggcccggggcaggccgagctgaagggaaggtgcctggccgcacccctgaagtcaggttagggcagaatgaagggctgtgcattttctgggagacagatgcaatgctttccgctttccacaggagaggtccctgattaggtggggggtgggagagaaaaggcaagaggaatggtggggattaggggcaggttagttaggaggccrcggcaccccctcgggtgggaagaaggacttgtgctgtccctggcagtagtgatcgatcaaagtgcttctaacttggcgaccagatacacagcagtgtcacacaccac

SEQ ID NO: 845727 - DNA, 430 bp, Homo sapiens
ttgtgtttttggaactaatgtaaatctcttgtatatactgggatcctgtaatttttacccattatgccaatctctgtcctttggaaagtttaacccatttatatttaaagtaatcactgataaggagggacttctgtcatttggctatttgttttgtacattccttaaagttttttatgtccttcatttcctgaattactgtttttttaggttttttttttttttttttttttttttttgagacagggtttcactctccttgcccaggctggaggagcaatgtcatgatcttggctcactgcaaccttytcccttccaggctcaatcaattctcctgcctcagcctcctgagcagctgggactacaggtgcgtgccaccatgcgcagctagttttttttttgtagagacagggttttgccatgttgccca

SEQ ID NO: 845728 - DNA, 513 bp, Homo sapiens
aaaataggcctccctgtaaccttcatcttacagttttgtttctggtttttagagcaagagagtcaatctcataatctgcagcatgagwattctttttactcaccagtgaagcattcataacctctgtcaggcacctgcttggaattacaggtttacacagttaatcggaataaatcctgtcttccaaagcttacattctaatcatatataattcagtaaaaagtgatgtcaggacacagattaaaaacaaaatcatgggaccaggcacagtggctcacgcctgtaatcccagcactttgggaggccaaggtgggcggatcacttgaggtcaggagtttgagaccagcctggccaacatggtgaaaccccgtctctactaaaaatgcaaaaatcacccaggcctggtagcgtgcgcctgtgatcccagctactcaagaggctgaggcaggagaatcgcttgaacccaggaggcggaggtttgaactgagtgccactgcactccagctgggcaac

SEQ ID NO: 845729 - DNA, 499 bp, Homo sapiens
gtatttctcagcagaaagagagggcataaaaaacagcagttattttattttgcctttgcrtgcttgaaagttttaatttctttaattcagagcatatatccataattcagaaatagagcttttcttttccctgattctttatccaatggaacacccacttggatttcttaatggccaaacattagataaagataatacttgcaaatgaatgagaatagtgcagatcgtcagtgaacagaaaggaggcttaggtgcacctgtgggaggcgtggcctgtgggctcactgccctcactgccaccagggaggcccagaggcgattatgttttgttgagtccagcaagtgacaatctatatagtctctttatctaactgtgcttcctttatttcaggtatgtaattttccataatcatctctgatataactagagttaacctcagtgctcaagcagttctttgccccattttccaaagcattcagatgccaccttttgagtacc

SEQ ID NO: 845730 - DNA, 622 bp, Homo sapiens
aaaagcgctttacagtgttattttgcaagacttgagccctgagtggatactgagtgtggagcagcctggttttgtacatttttgccacatgttgagatgccatgggagctggtgactcacgcgccacygacgttcacaaaagctcccggctcggagcagagcattgaagggaagggtctggctgcttggcgtatgttaaccaggctgggtactgagcgtcttaaaagccaagccacgtttgcctttcaactttactttgtggtgacgaaagaggaggtctctttcttcaggggcttactcagcgctgctggatctgaagatgcccgggaggagggtgaggggtgaaaagggcatcctaaggcaggatgggacacagcggcctctccagcttaactcagtattctctgaggcacagaatactggagatctgagacccctgaggtgcaagccctcccctcaaggatctaagcaggtggtgggctgccgctggcttctccccacagctggtggggggcagaagccctgttccacaggcgacaagtgtgggtcccagccatcatgtttagccaatggtcttgtccgtgttttctccccaaaaacgctttgagttagtgatgacgtc

SEQ ID NO: 845731 - DNA, 595 bp, Homo sapiens
caaggtcagggcatggaagtgccagacccagcagggtcctggtagctgcgagagcatcgttctaccccgactctgctsctgctcagcagcaaagttgcagagagagagagcttccagaagtggaaagatttttaaataagtcttttaactttttgcctgtggatacagctgcgttgacacaaagccacatttgaggcatgatgtctcggaagcctggcaccacggactgtttttctactgggacccataattgctgccttttaagaggtgtcctgtgttcagttttatcaatgtggtgcttgaaccggactttcagctgactcccaaaaggaaatagttttaaaaggaagaattttaagtctgccaagagccagataatggcatagcacagagaaaagccagggttttgtggtttgtatattaaaatacaagtctcttaatgcctcaaaacagcagcctccagaaaatgggaagtttaatagatgaggctagagaaagcagttttaaagatcgaaattttccctctttgttccttgtgatttacccgaaaggaacaagttcctttctcctgaacctcctcctatgtctatttttg

SEQ ID NO: 845732 - DNA, 629 bp, Homo sapiens
ctgttactggctttgaatggcatttgtatgtgacattttttacaaaatgaatctctttgttatcagaataggtgaatcgygtgggtgagcccagcgtacagatgtgcagccagccatggctatgggtccacaagacaggggctgtctgtggttttgatggaaggatctacagggctcccttttagttcaggttttacttcctggccctgtggactcctgtggcctcttctacccatttcagagtagccatttgatgtgttttcataattgaattaagctaaacatgaaaagcagattctaaaactcagccttaactccaggactcctcaagtacacgtcaactggacccagacaagtttctcatctgagtcaaaatgctgtgacccagaacagggaaagggctttcacatagacacatttcatatgagcattgcttaaagacacaaaggaaggaagcctggggttcaactgtgctctcaccaccccagaacctgatttggtctcctgctgcaggtccatgctttttaccaggccagacccctctccaggggcatctcagccagttcacctggctccaggaggcctgttcccatcaggaaaagcccctgcatccattgctgggatggtca

SEQ ID NO: 845733 - DNA, 621 bp, Homo sapiens
tgaataaatgagggcacacctggtttttaggacttccctggatggctccatgcttcctcctggaccaagtgtgttcagatgagaatggcccttccttgctgtgggcaccctctttgctagggtgccaaggtcggagctgatattggttatctcatcgggccttgcagcagcgccgcagatattctgcctcccattttgcccgcggggacgccgaggcccggcgccgcatcctgccgcccgttttgcccgcggggaagccgaggcccgatgccgtaccctgccgcccgttttgcccgcggggaagccgaggcccggcgccgcatcctgccgcccgttttgcccgcggggaagccgaggcccggcgccgtatcctgccgcccgttttacccgcgaggaagccgaggcccggcgccgtatcgtgccgcccgttttgcccgcggggaagccgaggcccggcgccgtatcctgtggccgttttacccgcgggaaagtcgaggcccggcgccgtatcctgccgcccgttttacccgcgrggaagccgaggcccggcgccgtatcctgccgcccgttttacccgcggagacgccgaggcccgatgccgtatcctgccgcccgttttac

SEQ ID NO: 845734 - DNA, 621 bp, Homo sapiens
tgaataaatgagggcacacctggtttttaggacttccctggatggctccatgcttcctcctggaccaagtgtgttcagatgagaatggcccttccttgctgtgggcaccctctttgctagggtgccaaggtcggagctgatattggttatctcatcgggccttgcagcagcgccgcagatattctgcctcccattttgcccgcggggacgccgaggcccggcgccgcatcctgccgcccgttttgcccgcggggaagccgaggcccgatgccgtaccctgccgcccgttttgcccgcggggaagccgaggcccggcgccgcatcctgccgcccgttttgcccgcggggaagccgaggcccggcgccgtatcctgccgcccgttttacccgcgaggaagccgaggcccggcgccgtatcgtgccgcccgttttgcccgcggggaagccgaggcccggcgccgtatcctgtggccgttttacccgcgggaaagtcgaggcccggcgccgtatcctgccgcccgttttacccgcgaggaagycgaggcccggcgccgtatcctgccgcccgttttacccgcggagacgccgaggcccgatgccgtatcctgccgcccgttttac

SEQ ID NO: 845735 - DNA, 621 bp, Homo sapiens
tgaataaatgagggcacacctggtttttaggacttccctggatggctccatgcttcctcctggaccaagtgtgttcagatgagaatggcccttccttgctgtgggcaccctctttgctagggtgccaaggtcggagctgatattggttatctcatcgggccttgcagcagcgccgcagatattctgcctcccattttgcccgcggggacgccgaggcccggcgccgcatcctgccgcccgttttgcccgcggggaagccgaggcccgatgccgtaccctgccgcccgttttgcccgcggggaagccgaggcccggcgccgcatcctgccgcccgttttgcccgcggggaagccgaggcccggcgccgtatcctgccgcccgttttacccgcgaggaagccgaggcccggcgccgtatcgtgccgcccgttttgcccgcggggaagccgaggcccggcgccgtatcctgtggccgttttacccgcgggaaagtcgaggcccggcgccgtatcctgccgcccgttttacccgcgaggaagccgaggcccggcgccgtatcctgccgcccgttttacccgcggagacgccgaggcccgaygccgtatcctgccgcccgttttac

SEQ ID NO: 845736 - DNA, 608 bp, Homo sapiens
cacattcaaatatctattgagtataaacaagtctattgagtataaataagtctgagttactgggtctctaaaggctaacatgttactctttctagggatcttttgtaggaagtgatttgtttttcaacaaaaaagcaagggaaggaaatgaagagctttcccagtaaaaaaattacatgggatcaaacacatcctacattgtttttgtttttggttatgtcaagaggctccaaccacttgcctatcatcgagcactgagtctgggccacgcactggtgagctgttcacattcctcagctcagctaacccatgaggtcgtgctgctaccatcattggacacatgaggaggccgggctcagagtggtcaagctggcccagctcccacgattagtagcggcggaactcagagtcgctggagctctccccttggcatgttcatttattgaccaaatattgattgagctgatactgtgtgataagttcagggactmtaggatcaactgagtatgaacaccttcaccctcttccaggtgggcgtttgtgttctgggtgttgtccacgctggacgtgccagcatctcccactgagccagatgttccagggctaag

SEQ ID NO: 845737 - DNA, 608 bp, Homo sapiens
cacattcaaatatctattgagtataaacaagtctattgagtataaataagtctgagttactgggtctctaaaggctaacatgttactctttctagggatcttttgtaggaagtgatttgtttttcaacaaaaaagcaagggaaggaaatgaagagctttcccagtaaaaaaattacatgggatcaaacacatcctacattgtttttgtttttggttatgtcaagaggctccaaccacttgcctatcatcgagcactgagtctgggccacgcactggtgagctgttcacattcctcagctcagctaacccatgaggtcgtgctgctaccatcattggacacatgaggaggccgggctcagagtggtcaagctggcccagctcccacgattagtagcggcggaactcagagtcgctggagctctccccttggcatgttcatttattgaccaaatattgattgagctgatactgtgtgataagttcagggactataggatcaactgagtatgaacaccttcaccctctyccaggtgggcgtttgtgttctgggtgttgtccacgctggacgtgccagcatctcccactgagccagatgttccagggctaag

SEQ ID NO: 845738 - DNA, 622 bp, Homo sapiens
catataatagaaaagaagaaatatctatagtcaataatctaagcttctaccttagtaaactacagaaagagcagtttaagcctacagcaaacagaagaaaaaaataaaaatgagagcaaacatcactgaaattgaaaacaaaaaatcaagagagaaaacaaaaccaaaagttagttctttaaaaagatcaatacgattgataaactctaaccaggcttatcaagaaaaaaagacagaaacacaaattactaatatgtggtacataagaggagttattattactgactccatggacttcgaaggatgataaaggagtattatgaaccgtttgccccaatatttgcctagcactttgggaggctaaggcgggaggattgcttcagctcaggagttcaagaccagcctgagcaacatagcgagagctcgcctctactaaaaataaaaaaaaaaaataagccaagggtggtggtgcacacctctggtctcagctactcagaaggatgaggtgagaagatcacttgagcttgggagaatgaggckgcagtgagctatgacagcaccactgcactccagcctgggtgacagagcaagataaaaaaaaaaaaaaaaaaagacatcatta

SEQ ID NO: 845739 - DNA, 532 bp, Homo sapiens
acagaattacctttacttaaggtgctctttgtttttcatgtggagtcaaattactgtctgaagtcacctgctttcaacctgaagaacttcctttggtatttctcataagtcggtatgctgcttaatttccagatgtttgtctgttactaatgagttctttcagtttttcttttctaagaatgtttttatttcaacttcatctttgaaacatagttttgtaaaatacaagattcttggttgactgttttctttcagcattctgaatatgtcaccctactgccttctgccttccattattcctgatgagcagtcagccactaatcttattggaatatccttgggcatgatgagccatttttctcttactactttcaagattttcttatctttcaggattttttttttttctttttggaggcagggtctcgctctgtcacccaggctgtgattgcagctcactacagcctcrtcctcctgggttgaggtgattgtcccatctcagtctcctgagtagctgggattacaggtgtgc

SEQ ID NO: 845740 - DNA, 578 bp, Homo sapiens
agacgaagacgaagaagacaaagacgaagaagacgaagaagaagaaaaaacagaacatctgaacagccctataacaagtagagactgacttagtgatttaaaaaaaaacaaacaaaaacaacaataacaaaaaactacccataaagaaaaaccttggacatgatggctccattggtgaacaatacaagacatttaaagaatgatcaattcttcacaaactcttccaaaaaacagaagagaaggaaacatttcccaactcattctttgaggcgagtattaccctgataccaaaaccaaacaaagacatcacaagaaaactacagatgagtatctcatgcatatatacacaaaaatcctgaaaaccctagcaaacaaaatccagacacatacaaaaaggattatactccacgcatgatggcttatgcctgtaatcccagcactttgagacgtcaaggcaggaggactacttaagcccaagagtatgcaaccagcctgggcaacatagtgagaccctgtctctacaaaaattaaaacmaaaaattagccaagcatggtagcatgctcctgtagtcccagct

SEQ ID NO: 845741 - DNA, 626 bp, Homo sapiens
aattttaaaaactatgcagagaatttataaagaactcttacaacacaatattcaaaagagatatatctcaactaagaaattgaaaaaggagagacagacatttctccaaggaagatatacaaatgacaaactcaagaataagatggtcatcattggcaatcagagaaattcaaatcaagaccacaatgagatgtctcttcacactcactagaatggctgtaatcattacagggctggagcgggggctcatgcttgtaatcccagcactttgggaggccaaggctgggggactgtttgagtccgggagtttgagaccagtctgggcaacaaagcaaaacgccatctcagtactttttttttaaattttaaaacactttcaaaatgacagataacaagtgttggcaaggatacagaaaaactgaaacccttatacactgctggtggcaatgtaaaatggcagggcctcttggaaaacattctggcagttcctcaaacaattaaacatagagttaccccatatgacccagcaactstattcctaggtatgtatatgcctgagagaaatgaaaacatgtccacaaagaacctgtgcaagaatgtttatagcactgttattcataatagca

SEQ ID NO: 845742 - DNA, 495 bp, Homo sapiens
gagccactgtgcctggccatcttattcttttttattttgtttggctgcatagtactccattgtgtataagtaccatatttactttatccatttatctgctgatgaactsttaggttgcttccaaatcttggttgttgtgagcagttctggaacaaacatgagcgtgcaaatatttcttcagtatactgatttcctttcttttgggtatataaccagcagtgggattgctgggtcatatgagagctctatttttagttttttgaggaacctcaaaactgttctccgtagtggttgtactaatttatgttcccaccaacagtgtatgatggttccctttttctccacaccctcgccagcatttattattgcctgtcttttggataaaagacaggcaataacaaatggggtgagttgatattttaactggggtgagatgatatctctttgtagttttgctttgcatttccctgatgattagtggtgtcaatcactttt

SEQ ID NO: 845743 - DNA, 573 bp, Homo sapiens
cacataggccctgagcacggtacccaacagttagtttttcaacccttgttyccctctctcccttccttctctagtagttcccagtttctgtgtattcccaggtattttattttgttcatggctattggctttatgcctatgagtatccagtgtttagctcccacttctaggtgagaacatgcagtatttggttttctgttcctgcattaattcacttaggataatgacctctggctgcatctgtgttgctgcaaagatatgatttcattctttcttatggctgtgtaatattccatggtgtatatgtaccacattctctttatccaatccactagtgatgggcacctaggttgattccatgtctttctattgtgaacagtgttgcagaatagaaactggtagaatgatttgttttcttatagatatatacccagcaatgggattgcagggtagttctaagttctttgagaaacctccaaactgctttccacagtggctcaactaatttacattcccaacagtgcatatacaggtcattaacaaaattaacataaaagataccacttgtaacct

SEQ ID NO: 845744 - DNA, 514 bp, Homo sapiens
gtggcacctgagaactcctccaaaggtttgaaatcaggcccactcaacctgccactacccctgtagctggcacccacccacatgcaccacctataggttagagaaatggcccacccaacacattgcagccaatgccaacatcagcatgggttgcttgggtccctgagggttgtcccactactgttactgtcattgcccatgccatgcttgttgcccaggggcttgagaaaccattcacctatttgacccaccatatccaattttcatatcaaaaaaagccagctggaggcttaagaattgacctgtctatacctgccaatgcaaattccagcatacactgccctgggtcccatgaaaaggcactctcagtccacagctgccattcctggggcctgaagactggcccactgagcatcccagtccccaggaaaaattygtcacagcctccactaacaattataccctaagccaccaggaaatcacagacaccactgacactgtttacagctaaaga

SEQ ID NO: 845745 - DNA, 718 bp, Homo sapiens
acccagagaggagttctcgcatctgcttggcmtgatcggcagacctattagatttccgacgcttaataaacttctttttgagggtggcaagaccagaggttctcttttttttgtcttgtggtttctcatggccatggtcaaggctatacaactttgattcgcaaccatagccttgctgagaataggatgaggtccctaagaaaaaaattaaacaaatgaaaatttattttttcttaacattcattttcaacgtttaacatttttcatgttgaaaaattctgtaagcagacattaccgaaccactcaaaattgcatttgttttttataaaggaagacaaaaagttcaattaactcattttagttttcaattcaatttaatttttagagatggagtctcactgtgttgctcaagctggagtgcagtgggaagatcatagctcactgcagcctcaaactcctgggctcaagggattctccccaacctcagcttcccaagtagctgggagtataggcatgtgccaccatgcctggctaattaaaaaaatttttttttctttttttggtagagatagggtctcactaatgttgctcaggctggtcttgaactcctgtcctggcctcatgcaatcttcctgccttggcctcctaaagtgctgggattacaggtgtgagccattgtgactggcctacattttttatattaaataagaaataggga

SEQ ID NO: 845746 - DNA, 657 bp, Homo sapiens
tggagtggactgtctgtttaaagtactatgtaagatcaatggagtggatccataagacatgrcagagagatttgggggccttggtccaggactatggtattggggctggggctgtactttagctgtctgtagactcagggtcgtatggaaacctggtatgatggtagatgcattcccctcttttgaggagaatttattggagcagaaaccttgataacatcattgggtcacacatggggttaggaatactcttcacatgcagtctggtatggtaaagtggcaagaaccctaactgggaataataagacctaggttcaagtcccagttctcttacctagagctggatcgtaatctataagctgattgagtacctcctatgtgcaaagagggtataagaattggacttacaaaacttctttcctgatcccaagagcccatgatgaagtttcaaggcaaagcttaaagggattaaaaaggaggaaaaattaagtgattcagtaactactattaaaacaacttaattgcaggaattgggatactcataattacatctctctcttttcttaaaaaataggtactctatagctccttacttggagctagatacttagcaaagcccttgataaatattaattgattgactaaggtctgacaatg

SEQ ID NO: 845747 - DNA, 598 bp, Homo sapiens
tcaatagaacaaattctaggagacgaattccttagtcaaaaattatgaatatgtttacatatagccactctttgaaagcaytaatttacaatcattgtggctttttttcctgctgttgcttttcattgttagcatattgcttattcttacaccgcttcagtttccttaagttgatggcaccagaatatgaggtccttggggttgagaactgtaatattttcatctttgtgtcccctagggctacactactgagtgtggtagtcactagccaaacatggctgttgggtacttgaaatgtgtctagtgcaactgagacactgaatttttcatttagttaaaatttaaaatgaagggagatcaatttattttcaacaaagattccaaaacaattctttgaggaaatggtgctggatacacacatgcaaaaagatacatttagaccacaccccacactatacacaaaaataacttaaaacagttcagagacttacatgtaagatctaaaacttacaatttttggaagaaaacgtaggaaaagtctttggttaggaaacaagttcttacatacaataccaaaagcataatccacaaaagacaa

SEQ ID NO: 845748 - DNA, 582 bp, Homo sapiens
ttcatcagtgcacagttgtgattacaggaaaccaaactcctctgaattatgggacttttttgcccaattattctttctgtgaattcaagtgtttcctaaatctgttttgtttgccttaaaaatatcactgtatatctatacacattacatagtgcctctatagttttccaagcattttacagctactcttcaattttattgtcactgcattatttgatttatttttcccatagcagagtcagaaaatttagccttgaaaaggttgttggtgagattgcagagcaaataaaactcacgcactgctagggaaagcaagatggtatagctgctttggaaaacaacttggcaatttcttatccagttaaacatgaacttatcacatgacccagcatgcaatcccatgcctacagatttacccaagagaaatgaacactcatgttcacacaaaatatgtaacatattcctagtaaatttgatcttaatcacaagaaaactagaaacaacctaaatgttcttcaactgstgaatgaataaacaaagtatggtacctccatacaatggaatacccctcaacaataaaaa

SEQ ID NO: 845749 - DNA, 596 bp, Homo sapiens
cccttcacaccttcccggatccaggatatacmgcggctcgctagcccaagtcttcaggtgcaatcccagtcagggagaagaaacttcaccctgccctcctcagggagacccctcctgcctccccagtgtaggtatgtgagaccctcattaggaccccaagatcatgtgcaggaacatcaagcatcttattcttgtatttacaacctggtgtgactttattatctacttttcttctgtttcttcatccttccccattttccatttctttattccaatgccgatgttttctttgctttcttgtccaactccagtcatggctgcaatcctactttataggcaattcggtattgtttatcctaatgtcagtactaaaaggaaaagtagagaaagtggataggctaagtaataaagaatgaaagccagtaaggtccatatgggagaccagttggggagtaagaagaccagagaagagccaaggtcagcctatcaaaggactagggagaaaaacgatagaagcaaagagaagccgcagcctggagaaaatcaattaatgtcagtagatggggaggagggagtacagccgggacccaaggcat

SEQ ID NO: 845750 - DNA, 395 bp, Homo sapiens
agacacagagtgctgattggtgtgtttacaaaccttgtgctagatacagagtgccgattggtgtatttacaatccctgagctagacataaargttctccacgtctccaccagactcaggagcccagctggcttcacccggtggatcccgcacgggggctgcaggtggagctgcctgccagtcccgcgccgtacgcccgcactcctcagcccttgggtggttgatgggattgggcgccctggagcagggggcggcgctcgtcggggaggttcgggccgcacaggagcccacggagtgggggaggctcaggcatggcgggctgtaggtcccgagccctgccccgcggggaggcagctaaggcctggcgagagaaatcgagcgcagcgccggtgggcc

SEQ ID NO: 845751 - DNA, 538 bp, Homo sapiens
tccacacataagtcatccatggttgcccaatctcagacttttttcacaatctggactgattctttcttcgcacctcccgctctcgcatctgwcaggagggcgaggtgggtggggccacgccaagacccgctgcagtcatgtggttaagacacctgatacgagtcttattgaacatgcacctagactctccactgaacccaaagcagaggatgaacatgagaaaaatggatccttccattcaagaggtgcccaatcaagttagactcagccctgctaagtcaggaccaacattactagtatcactatactgaggatttccaatttttagacaaacaccagatacacctaatgaacaaagatcatcagtaaaacatgtcacaactgagaaaagcaagaaatgggagaagggatcatgaagcttttctcaagggctgagattctgaaaggtgtggctgaaaactgtcctgtccccatagcactagagcagcgctgcccagggaatgacttgccactcctgcactcatactccatctcaccc

SEQ ID NO: 845752 - DNA, 561 bp, Homo sapiens
accctgcctctaaaaaaataaataaaagagggatggggcagtggaggagcttgcagcaagagtgcaataaaggtcataaagttcacattgcaattggagggatctgaaagagttttacgttttcccatttttatttgataaaggaatcctttaggaattaatttttcttttcttttcttttttttttttttttgagacggagtctccctctgtcacccaggctggagtgcggtggcgcgatctcggctcactgcaagctctgcctcccaggttcacgccattctcctgcctcagcctccggagtagctgggactacaggcgcccgccaccacgcccagctaattttttgtatttttagtagagacggggtttcaccgtgttagccaggatggtctcgatctcctgacctcgtgacccgccccacctcggcctcccaaagtgctgggattacaggcgtgagccaccgcgcccgkccccgaagtggtctttgagggaagggcaccattcgggaaggggagcactgaggtcacagcgggagcacgcccacccgggagcagaaac

SEQ ID NO: 845753 - DNA, 561 bp, Homo sapiens
accctgcctctaaaaaaataaataaaagagggatggggcagtggaggagcttgcagcaagagtgcaataaaggtcataaagttcacattgcaattggagggatctgaaagagttttacgttttcccatttttatttgataaaggaatcctttaggaattaatttttcttttcttttcttttttttttttttttgagacggagtctccctctgtcacccaggctggagtgcggtggcgcgatctcggctcactgcaagctctgcctcccaggttcacgccattctcctgcctcagcctccggagtagctgggactacaggcgcccgccaccacgcccagctaattttttgtatttttagtagagacggggtttcaccgtgttagccaggatggtctcgatctcctgacctcgtgacccgccccacctcggcctcccaaagtgctgggattacaggcgtgagccaccgcgcccgtccccgaagtggtctttgagggaagggcaccattcgggaaggggagcactgaggtcacagcgggagcacgyccacccgggagcagaaac

SEQ ID NO: 845754 - DNA, 553 bp, Homo sapiens
cttccttcatttatttaggggtctggtatcttagggatatcattctgaaaattaaacttttctacataggaccatagatacagggtgactagatgactgggctggatgtgttccacagtgtatcagtcagggttctccagagaaacagaaccaagagggtatatagacacatacatgcacacacaccaggagagccagtgatgtaagccctgagactcaagacccaggaagagctgatgtttcagccagagtctgaaggctggaaaagaccaatcttccagctcaaacaggcaggagttccccttactcagcatttttgttctgctttggttttcagttgattggatgagacccactcagcagtagggagggccctcgcctcactcagtacaattcagatgttagtcttatgtagaaacatcctcacagacacacctggaatcatgagggactaactgtccaggtgccccatggcccagtcaagttgacacataaggttaaccttatgcatggyatctgctacaacttgtgtttctgaatgaaattctacaac

SEQ ID NO: 845755 - DNA, 626 bp, Homo sapiens
ctggtgagactttgttgcctgtccttaacgagactccctgctgtatccctacagcaaacttgcctttatttcagctagcttctgagggtttccttttctgtaactcagcaatatgtaatagataggcctgatcctcagcctttatggacaagaccgctgaagacggcgaagccacactgttggctagttctagaacccaatttgccttgttcttagttttgttctattacccagtctatgttgtttttttttttaaatttgagacggagtctcactctgtcatccaggctggagagcggtgacacaatctcagctcagtgcaacctccacctaccgggttcaagcgattttcctgcctcagcctcccaagtagctgggtctacagaagcgtaccacctcaccccactaattattgtatttttagtagaggcggggtttcactatattggccaggctggtgttgaactcctgacctcaagtaatctgcccacctcgcastctatgtattattgagcactgaaaaagttagatctcaaaatagtaagcaatattccagcattggttttgcttatcatgaaaactgtaagttaaaccaagtttgttcccacataaaaacacacctgata

SEQ ID NO: 845756 - DNA, 515 bp, Homo sapiens
tggcttcccatgccacgcagtgtgaaagccagagtccttatgatggccttcaaaaccgcatgatctggctgttyccctcatcctcaatcatagggtttggtgctttcctccttcctttcattctgctccagccctagcctccttgctttttcttgccaagtgtgccctacccctgggcctttgtatttgctgttccctctggcgagatacttatattgcctacttcctctctatctccatcaacagatgatctcaggagatgtcagatgcagcaccctgcatctggaagtgtgctggaagctggaaatagaaatggtttagttctaggacagagccatgacataataggtcctcagaaaatgattgctgacttaataagagaaaataaaaaaggagctttcagttgattgtagtttacaatacaatataaataagcagtacgttactatttctattatcaatttagggaacaaaaatatctacagttacacaaaaatggccacacatggtggcac

SEQ ID NO: 845757 - DNA, 403 bp, Homo sapiens
aaaaataccacattgtcttgattcctgtagattcgtaagagtcttaaaatcagatcgtgtttggcctccaattttttgttatttttcaaaaatgttctggctcatctagtcccttgggttttcatatgaatgttaaaatcagcttgtcactttaaaaagttgggattgtgattggttacatttcgtctatagatccatgtaagaataatttacatgttaacaatatttagtaatgacccttaaagtaagcctcttcatttatttaggtgttatttcactcagcaaatgttttgatcttttgtcaggtctagtcttatatagtccattttcacagtgstaataaagacatacctgggactgagtaatttataaaggaaagacgtttaattgacttacagttcag

SEQ ID NO: 845758 - DNA, 585 bp, Homo sapiens
cctcaccaaaaacttgagaactaaagcccagttgagtgacactgccctggcttatatagcccataggtgtcagagccaggacttaaaccacagccagctcaccccagaactcatgctccttaatcacttarcaccgacaatgggaaatgttaattaaataccagcacatgctataaggatcctgccacctcactattaataactcagcagccaatttgcaaaaaacattcaagtggattctgttaattgcaaacttatgctccttcctctatacaactaagggaacacctgaccatagaacacagtgcagggtcactgagtaggtggcacagggagtatggcacaatccaacatgaccactgtggccagagaatgctccatgttggaccaccatttctcctttacagaccaaatgtccacgcatggttagtcccctcccaagtaccagtcaagggggtgagaaaatcaaagcacaagcctctcctacacaagagtgaataaaaatgctgggagagcagggctcagctgtacaaagggcatacagggcccacacatacagctattactgtgaaaagaataataatc

SEQ ID NO: 845759 - DNA, 573 bp, Homo sapiens
tcctcgccccaaatatggggtaggatccttttgcaatgaggttcctgtggccaccttgaggggaaggtaggtcagaggtctctaggttttatggctggctttgcgggagagkagttctagtttttatgacacaccttggggaggagaaattctagtttctatgacctgcttcggggagaaatgggaaaagaagaaatgagggcaggagaaggtcagagagagactttgcttctgaggccttctaatctcctttagttcaaagtactcagcctgcccaaggtccagacttcagggtattgttttctgagccccgacactatcaatgtttaccacattagaaatgaaaattaagaaaaagttaaagtagtatttattagtttaaaataatgaatgtatatattgttatatttataataaaaattttttaaattatatcttccaaaacaaaaaagtgagaaaatcagtattatttttaaaataatttttaatttttgtgggtacatagttcatgtatatatttatgaggaacatgagatgttttgtttggtaagacgtgcaatgcataataatcat

SEQ ID NO: 845760 - DNA, 623 bp, Homo sapiens
catccagctacaagggatccttaatgagattatcagcaaatttctcatcagaaattttggagaccagaggcagtgggccaacatatttaaaatgttaaaasaaaaaaaaaaatcaaacaagaatcctgtatctggaaaaactgtccttcaaaagtgatggagaaaatgacattcccaaataaacaaaagctgagggaattcattaccactagacttgtcctataagaaatgccccaagggtgtcctgcaaagtaaaataaagaacagtagatagtaacttgaaaccatatgaagaaatgaggatctcaataaaggcaattataagagctagtattattgaaacaacagtttgtaagtttactttgtgacataatttaagagactactttaaaaaacaatgattagtctaaaagcttaaattattataactttggattgtaatgccacatttgttttctacagaatttaaaagactaacacacttaaaataattattagtttatatttttgggcacaaaatgtataaagacataattatgtgacatcaataatcaaaagggatgcagatgcagctgtaaaggagcagaatttttgtatgtttttgaagttaagctgttataaat

SEQ ID NO: 845761 - DNA, 652 bp, Homo sapiens
acagagtagtttcactgccttaaaaatcctcctattcattcctccttcctcctgcccaaacctctrgcaacctgatctttttttttttttttttttttttttgagacagagtcttgctctgtcacccgggctggagtgtagtgaggggatctcggctcactgcaacttctgcctcctgggtttaagctattctcttgtctcagcctcccaagtagctgggattacaggtgcccgccacttatgcctggctaattttttgtatttttagtagagatggggtttggccatgttggccaggctggtctcaaactcctgacttcaggtgatccacccgcctcggcctcccaagcaacctgatcttttcactctctctatagttttgccctttccagaatgtcatatagttggaatcatacaataggcagcctgctcaggttggcttctttcacttagcaatatgcacttaagtctccttcatgttgtttcgtggcttgataggtacatttctgatatggtttggctgtgtctctgcacagttctcaccctgaattgtaataatccccacctgtcaagggcagggccaggtggagataattgaatcgtggggctgggtttttcccatgctgttctcggggtagtgagtaagtctcac

SEQ ID NO: 845762 - DNA, 652 bp, Homo sapiens
acagagtagtttcactgccttaaaaatcctcctattcattcctccttcctcctgcccaaacctctagcaacctgatctttttttttttttttttttttttttgagacagagtcttgctcygtcacccgggctggagtgtagtgaggggatctcggctcactgcaacttctgcctcctgggtttaagctattctcttgtctcagcctcccaagtagctgggattacaggtgcccgccacttatgcctggctaattttttgtatttttagtagagatggggtttggccatgttggccaggctggtctcaaactcctgacttcaggtgatccacccgcctcggcctcccaagcaacctgatcttttcactctctctatagttttgccctttccagaatgtcatatagttggaatcatacaataggcagcctgctcaggttggcttctttcacttagcaatatgcacttaagtctccttcatgttgtttcgtggcttgataggtacatttctgatatggtttggctgtgtctctgcacagttctcaccctgaattgtaataatccccacctgtcaagggcagggccaggtggagataattgaatcgtggggctgggtttttcccatgctgttctcggggtagtgagtaagtctcac

SEQ ID NO: 845763 - DNA, 548 bp, Homo sapiens
tacagtatcatacagagtagtttcactgycttaaaaatcctcctattcattcctccttcctcctgcccaaacctctggcaacctgatcttttttttttttttttttttttgagacagagtcttgctccgtcacccgggctggagtgtagtgaggggatctcggctcactgcaacttctgcctcctgggtttaagctattctcttgtctcagcctcccaagtagctgggattacaggtgcccgccacttatgcctggctaattttttgtatttttagtagtgatggggtttggccatgttggccaggctggtctcaaactcctgacttcaggtgatccacccgcctcggcctcccaagcaacctgatcttttcactctctctatagctttgccctttccagaatgtcatatagttggaatcatacaataggcagcctgctcaggttggcttctttcacttagcaatatgcacttaagtctccttcatgttgtttcgtggcttgataggtacatttctgatatggtttggctgtgtctccgcacagttct

SEQ ID NO: 845764 - DNA, 458 bp, Homo sapiens
atcatacagagtagtttcactgtcttaaaaatcctcctattcattcctccttcctcctgcccaaacctctrgcaacctgatcttttttttttttttttttttttgagacagagtcttgctccgtcacccgggctggagtgtagtgaggggatctcggctcactgcaacttctgcctcctgggtttaagctattctcttgtctcagcctcccaagtagctgggattacaggtgcccgccacttatgcctggctaattttttgtatttttagtagtgatggggtttggccatgttggccaggctggtctcaaactcctgacttcaggtgatccacccgcctcggcctcccaagcaacctgatcttttcactctctctatagctttgccctttccagaatgtcatatagttggaatcatacaataggcagcctgctcaggttggcttctttcacttagcaa

SEQ ID NO: 845765 - DNA, 458 bp, Homo sapiens
atcatacagagtagtttcactgtcttaaaaatcctcctattcattcctccttcctcctgcccaaacctctggcaacctgatcttttttttttttttttttttttgagacagagtcttgctcygtcacccgggctggagtgtagtgaggggatctcggctcactgcaacttctgcctcctgggtttaagctattctcttgtctcagcctcccaagtagctgggattacaggtgcccgccacttatgcctggctaattttttgtatttttagtagtgatggggtttggccatgttggccaggctggtctcaaactcctgacttcaggtgatccacccgcctcggcctcccaagcaacctgatcttttcactctctctatagctttgccctttccagaatgtcatatagttggaatcatacaataggcagcctgctcaggttggcttctttcacttagcaa

SEQ ID NO: 845766 - DNA, 640 bp, Homo sapiens
ctggttaccaaattacgtctattttatctcccaatrtttatataatttgttcactcctttccatctccactgcctttgcttaggtctaactgttataatttgtctgagttattgaaaagacctctactgtcattcctctatcaaaacaaggaaagatctctctaaatacaaatctcgctcaaacttttggtactgtgcttaaaatccaaaagtggctctctataacccatagaatgaaattacatatgttatgtggctgtcctccctgtggcagatactgaaggcaggcaatgtgtgatgtgggatactcagaaacttctgtccttgttcagggactacccctttccagcatatgactggagcacatgacaacctctctggaccttgatttcctcctttacaagaagaggaaattgaaccagaatatttccaactccagtgactttgtgattctgaatcattgccttaaaatatattgtttgcttttaaaaattaatcttatgtttataccaacatccatattaggttgtacaaattttatgtagaataatctcagacatcaactatgtaatttttatgtagcaacaattgattttatctgcagtgattcatgactcaagtgggaaactaaatcccgatt

SEQ ID NO: 845767 - DNA, 620 bp, Homo sapiens
taccaacatccatattaggttgtacaaattttatgtagaataatctcagacatcaactatgtaatttttatgtagcaacaattgattttatctgcagtgattcatgactcaagtgggaaactaaatcccgatttaactaaatcattttaattgacgttctccaccattaaaaggcctgtagaagtccctcaagattaagatacatgcaacctgtgatcctagaaatcccttcctctgtactagcctgaagtgtgagggttatcttattatccagttacatctcttgactctctgctcattcccacccttgcaaactaagctcttctctgttattctcagccccctcaacaaaaatacctcatactatccttctacatctcatgtgatgccccttcctccttgcatgctttctcccattgcccatgtctggctctctcttacttggcctttagaactcagctttgcctcacctcctctaattgccttctctctctttttctgggttaggtgtccctcctctttttcctgttctcttgacacactctgtagatatcactgtgcttctcaaactacattgtaatatatatatatatatakagagagagagagagagagagaga

SEQ ID NO: 845768 - DNA, 632 bp, Homo sapiens
tgctcagtgctggcatggaggaactcacatcgtaaggaggcactatgcgttttccttccactgtttatttttttgctaatttcttttcttttctgcaaaacagtcatattagccagtcrgtggagtactttattagaggtagcatgctttagtagctatgtgtcacattgtaaaggagaactaagtttcataattatgaaaaatgcttagagtattcttgtatttatagttttctctatgaagggaatgagtattctttataggattctgggcagttagtttactttcactgggacttcctggggaatgatgcactatgtgactggatactgcagtcggaatctgaaattgctccgtaaaacagctgtccaagtcacttgcatgcctctcttgaattctatgctccctaacaatccacatctctaacaaaactgtcatagttctatgtttattagtgatgggtctaagctctctgtgggtttttaaagataggtgtataacttcagtgtttcccgtcagctaaagtaaactacaccccatgttgtggggtgttgaggaagcactgcacacagattgtaagctttacatgtgagctttctattgtaaccaagcaactgacacattagacaccc

SEQ ID NO: 845769 - DNA, 632 bp, Homo sapiens
tgctcagtgctggcatggaggaactcacatcgtaaggaggcactatgcgttttccttccactgtttatttttttgctaatttcttttcttttctgcaaaacagtcatattagccagtcagtggagtactttattagaggtagcatgctttagtagctatgtgtcacattgtaaaggagaactaagtttcataattatgaaaaatgcttagagtattcttgtatttatagttttctctatgaagggaatgagtattctttataggattctgggcagttagtttactttcactgggacttcctggggaatgatgcactatgtgactggatactgcagtcggaatctgaaattgctccgtaaaacagctgtccaagtcacttgcatgcctctcttgaattctatgctccctaacaatccacatctctaacaaaactgtcatagttctatgtttattagtgatgggtctaagctctctgtgggtttttaaagataggtgtataacttcagtgtttcccgtcagctaaagtaaactacaccccatgttgtggggtgttgaggaagcactgcacacagattgtaagytttacatgtgagctttctattgtaaccaagcaactgacacattagacaccc

SEQ ID NO: 845770 - DNA, 602 bp, Homo sapiens
agaatctaagctaggtatctgtagtctaagagggagaactgattgaagtaaataaatatttaacatgttgaaagcttttatataattttctttcaaaaaacttaytcattaaaggtaagcgtaggatttgaaggcaaagtgtttgctaataaaacaaccttttcagaaaataattcaggattataatttcataggtaaccaattaaaaaattctaagatatcaaatgaatgtaatgtagaatttctttttgttaacactgacttattctgttagaatggaaaaaagtatctagaattgtgaaaattagtactaaatcttgataattgtttttgggtacatatgtatgctttcttgttaagtgaatatggatgttaagtgtctgaagtaaagattatatcttattttattcataacctggggcaatgaggtaccttctgagagcattttctttttaataaactataaatgttggatgctaaaatcagaatacagtctcaaaagttaaacctatacaattatcaaaataatatattgttagtgattaggagaatattagggataaattgtaaaattccttaccccatttccttgaaatgtttaa

SEQ ID NO: 845771 - DNA, 496 bp, Homo sapiens
aggtaatctagccactgaatttgggtgcagggtatcgctggactttgagcatttgtgtagtttaaatagcaaatcattatacctgartattaatagctaactactacacaaacaactcaaaaccagtaatgtcatgtcattaccatggcttcttttatgtaacattatctgctacattttaccactcaaaatatatttaaaatatgtattttaaaatatattagagcatatggctcaagcaatcctcccacctcagcctcccaagtagctgggaccacaggcaagcaccaccatgcttggctaacttttaaaaattttttgtagagaccgcatctcactatgttgcccaggctggtcttgaactcctggacttgagcaatctgttcacctcagcctcctaaaatgctgaaattacaggcatgagccaccgggcctggccacaactcatatatttaactgtgaatgacacaagtgttggtcttagaaaaatacagga

SEQ ID NO: 845772 - DNA, 622 bp, Homo sapiens
atccctgggccccgtcctggcctgctgagtcagctccygcagggtggggtctgcaatctacgggtaatcctggcagggccaggtggggctgtctgggtgatcctgaatggtgaggctagcctggcatggattggaaggagccctcgcttctcatttaatggcagagctgccaagaataagtcccaggtccccggctctgcccttcccaggcatgtccagccctgaagcaggagaaggtgggtgtgtggccagcaggaggcacagacattctgaagtcagaattttccttccaagttaggggctgggacacgaagaaccagtatccctttctcatcataacagcaagaacgacgcttttgaccttggtctcttggaaacttggaggcaaatagctgcatgacgccttcgagctgtaaacatgcactctctacacactgagtccacacagcctcctggctgccacattctgttctgattccttgaccgtgcctttgtagtcagtcctgcagtcaggtagggtaagtcctctacttttgttctcttttttataattgctttgatcagcattctgttttgatttatatctctcctgattgtttaggtgtgcctttttaatttcaat

SEQ ID NO: 845773 - DNA, 609 bp, Homo sapiens
aaggaaagaagactgactgtcttggtgttttatggtggttagtgggtggggctggggtgagaattcccaagcacagtttgagaggcactgggctatcccatcagtgggcccagatgtggggtagaaaggggagagggaggaaccaagcctaaaagctgtcagcagccaagcatcaagaaacggagtcagactgcattccaaggacctgctgccaagtccttcatagccacacagcagtttagagaacctgctcctccctttaccctacaatccacaacagctccaaagcactgagacctaggagaccctgagctgagggctagagaaggacagggcagaaggtcaggtgtttgctctgaacctggacttcggtcagcactgcacagagacggcagcgtaggcaggaagcctggggtgggaagggcggcaaggctgggctggagccatggtgggcagagggacagggtttggaggatgaagcaggmcctcgaagaacagaaatccccatcccctccctctctcctcagttcagaaatatcttcaccttctgaaatcatcagctcagcatcagttagaaaatcctcatggctatggtgatacccgctctgc

SEQ ID NO: 845774 - DNA, 652 bp, Homo sapiens
ttggggttcctcatagtttctggaaaaaactagttgtgaacagcaagtgtcattagtcacttcttcacacctactatctcctttgtgctactgtaggacatcttcttgcctactctgcaggaggctggagccatgtctgagcaggtatgttccttcctgggaaggatgcctggcttctccactgtggcctttataatggagagcctgagggaagagcattgtgtataaaacaaaccttgcttcaggcagcgttgcgggagcccttcataactggccattggtccttgttctaagccagcacaggaaggccctgtggcttaggttagttgtttttactctttgagtgtcagctcttctgtttttgttttttgtttgtttgtttgtttttgttgttttgagacagggccttgctctgttgcccaagctggagtgcagtggcagcttgttctgtttgtgaaataaagtgggagcgtgagggccagggggttaggttcccctgggacttctgccagctctccagcataactcctttctgttttgtttctttccttataaaatagcatgagaaagcctacatgaggyccctggcacatccgaggtgtgtggggcaccggggcccccagaagaggagcctttggatctgatgggagca

SEQ ID NO: 845775 - DNA, 460 bp, Homo sapiens
ggaaaagtgcccaatgtatgggctcagtagacacttggtgkgctgccctgagatggagaagcattaacaccagcctcagaactggggtggtggctgggcgcggtgctcacgcctgtaatcctagcactttcgaggcaggtggatcacctgagatcaggagttccagaccagcctggccaacgtggcaaaaccccatctctactaaaaatgcaaaagttagccaggcttggtggcgggcacctctagtcccagctactccggaggctgagacaggagaatcacttgaacccgggaggcggaagttgcagtgagtcgagatcaggccattgcactccagcctgggcaacaagagtgaaactctttctcaaaaaaaaaaaaaaaaaaaaagcaacaacaacaaaaaaccagggaggtgaaatgaaggaggcctcctggaatataagactgaaaccctgagttt

SEQ ID NO: 845776 - DNA, 460 bp, Homo sapiens
ggaaaagtgcccaatgtatgggctcagtagacacttggtgggctgccctgagatggagaagcattaacaccagcctcagaactggggtggtggctgggcgcggtgctcacgcctgtaatcctagcactttcgaggcaggtggatcacctgagatcaggagttccagaccagcctggccaacgtggcaaaaccccatctctactaaaaatgcaaaagttagccaggcttggtggcgggcacctctagtcccagctactccggaggctgagacaggagaatcacttgaacccgggaggcggaagttgcagtgagtcgagatcaggccattgcactccagcctgggcaacaagagtgaaactctktctcaaaaaaaaaaaaaaaaaaaaagcaacaacaacaaaaaaccagggaggtgaaatgaaggaggcctcctggaatataagactgaaaccctgagttt

SEQ ID NO: 845777 - DNA, 524 bp, Homo sapiens
ttacataaatattttatttctattattcgctctcatgtttttgcttctttccaccccatctcacccacacacctacttaggacaatttcttccaaacgctttcctgctaaagggcactgcttgctacttascaggcatttaataaatattctttcagtgaatgattttttttttttgagacagggccttgctctgttgcccagggtggagtgcagtggcacaatcattgctcactgcagcctcaaaatccttggtccaagcaatcctcccacctcagcctcccaaatagctaagactagaggcgcacaccaccatgcctacctaatttttgttttattctttttgtagagacagggtcttgctatgttgcccagactagtctcaaactcctgagatcaagcaatcctcccactttggcctcccaaagtgctgagattgcaggtgtgagccactgtacccagccgtgtgaatgattttaagagaatcccctagactctataattccttctaaaaaattcccaaaa

SEQ ID NO: 845778 - DNA, 524 bp, Homo sapiens
ttacataaatattttatttctattattcgctctcatgtttttgcttctttccaccccatctcacccacacacctacttaggacaatttcttccaaacgctttcctgctaaagggcactgcttgctacttagcaggcatttaataaatattctttcagtgaatgattttttttttttgagacagggccttgctctgttgcccagggtggagtgcagtggcacaatcattgctcactgcagcctcaaaatccttggtccaagcaatcctcccacctcagcctcccaaatagctaagactagaggcgcacaccaccatgcctacctaatttttgttttattctttttgtagagacagggtcttgctatgttgcccagactagtctcaaactcctgagatcaagcaatcctcccacttyggcctcccaaagtgctgagattgcaggtgtgagccactgtacccagccgtgtgaatgattttaagagaatcccctagactctataattccttctaaaaaattcccaaaa

SEQ ID NO: 845779 - DNA, 472 bp, Homo sapiens
tcctcctaatgacccaaacataagacagggagggacaggagaacatgcgtaaaaagtgagaagggaaaaagaaaggagatattgcatcagaagccttwgctggccttcctatgtaatgcagaaaatactgagctacataatatactgctctgaaagaggaaagaagaaaggctttggggtatccacataatctgaatgtgtttattcatccagtaaataattattaagtgcctattacgtgtacacactgttctaggcactaggaaaacagtagtgaacaaagcagataaaaacccatgccctcatggaacttactatattctagttaaagccacaattatccccatttcctagctatggaaactgagctcagatgggtaagctacgggaaggagattcaattttattttagtgcaatgagaggccattagtggatcttaaaacagagaagtggcatgatctgatttttgct

SEQ ID NO: 845780 - DNA, 610 bp, Homo sapiens
tagtagtttatctgctttcaacaatactgaaggaggatctaaccaattgtcatcaaaaataatttttggtggtagattgatttttgacacataactcagaaacagttcaagggactgagtgatgctgcaataacagaacacttcccattcctatctcttatttatataattaggatttgtcagtgctctatcacaataaaaaagaaaagtatgaaatagaattggccgggtgtggtggctcacacctgtaatcccaacactttgggaggccgaggcgggtgaatcacctgaggtcaggagttcgagaccagctggccaacatgctgaaactccgtctctacttaaaatttaaaaattagctgggcgtggtagcgtgcacctgtaatcccagctactagggagggtgaggcaggggaattgcttgaatccagggggcggaggttgcagtgagccgagatcgcaccactgcactccagcctgggcgatagagcaagactccatctcaaamaaaaaaaaaaaaaaaaaaaattgatgctaaatccccattctggcaataatcaatattcacccatgtatgaagagctcatttatttaatttaaaaaaagccac

SEQ ID NO: 845781 - DNA, 635 bp, Homo sapiens
gtgtgatgcttccaactgtttctttatcaagataactgacttttgtgcctctacaatatagataatctaacttaactctaacttgctataaatgtaccaatcagccaatcttcaaggtcttgatcaataatgtggtttaaattattgcacctcactttctacaaaaacataaatatgacattacattgatgacattcttctccaaggaggttcacttgccacactcattcaggacatacaaaatactcaaaatggatctaacaaaaaagacattaaccgttgtcccattatcagtaaatacctctttaccctcttaacaccacttaacattgtgaatgctaacaaggtcaacaggtatttcttgacgacaggacaattgttgatcttttttttctcaattgattttgtgcttctacaacagaagttatatcaattaactcctaacaagtgctaagatgtaccaattggcaaacattcagtggatactgagattcaaattaccagagccaataaatatttatatactctcttggtgcatgtgtgacatcatcagccttgacttgtgaattaattttgagtagcaggaattgatcctgcctcatgartatagccacaaggtacattgtgaagtgtct

SEQ ID NO: 845782 - DNA, 621 bp, Homo sapiens
atttttatgtgtaagcaatcattatatatgaaagttagtccctagcaataaaattgtactcatgtaaaattttttccttggtttaaatatagtctttcctttccatttgagatattcagaggctrtacttcataaacatcaatatctttccaaagtgattggtcattttcttctctaggctcagcagaaaattaggaaatacgtaactcattcaataactaaggataaaaacttccatgcattttagacttatttcttggctattatgtctgcatctcttatctaatggatggatatcccagaaatgagttgcctccactctggcttggtcaattatacttagatggagaagagttgaagggaagggtgggaaccctagctctgttctgttttcccctctgaactacaaaggatcctattaatatctatagctattgagctaacatgtaaagtcttgcctactatttctttttcagggcatggtagatactactgagataaaaataattttctaagaaaccaggattttaataaaaatgtaaattattttaacattagtactgaagttcaggttaataagtatggcagtgattgataaaaatcttatgtactggcaaaaac

SEQ ID NO: 845783 - DNA, 631 bp, Homo sapiens
gtctatgggtccctcagctgtggataccagcatctgttccagtggaggtggcagggcatgaaatggattctgtgagtgttcttagctttggtggtttaatgctctatttttgtgctggttggcctcctgccgggagttggtgctttccagtagcatcagctgtggtagtatggagaggaaccagtagtgagcacggccctagaactcccaagaatatatgccctttgtcttcagctaccagggtgggtagggaaggccaatgagatgggggcagggctaggcatgtctgagctcagactctccttcagcaggtctggctgtggctgctgtgggggatggggtgaggttcccaggttactggagttgtatacctaggagtattatggctgcctctgctgagtcatgcaggttatcagggaagtaggggaaagccggcagtcacaggcctcacctagctcccatgtgatccaaaaggctggtcttattcccaccatgtcyccctaacagtgccaagtctgtttgcaggcagtgggcaagcagggctgagaatttgccccaggatacctgcctaccagcctcaaaagaaaagggctttcgttcttcctctgcctgtggagtctgtacgcaggat

SEQ ID NO: 845784 - DNA, 470 bp, Homo sapiens
cttctcccggtggcattttccctgcacctctggcsgccctcctgaaggatccctgtggtttcaggcaggaatggcctgcttggggacccagcaagttcccagggcctttcctgccactttctgtacccctgtatttcactcagctctctaaatggactcagctccaggtaaggttggaatcttctcccgtgaactagaccttcagtttccccggttggggtgtgtgttcagcggcagagtatctcccgttcccacttccacagtttgggcactcacagtatttggagtgtctcccgggtcccgcaggatcagtccgcttccttcaggagtctgtgggtcctctcaggattcctgatttattcctgtagtcattctggagataaaattcacaatgcgaggctccacacgttgctctgtccacctgagttggagctggaatctggtcctgcctcctgtccaccatgatcatt

SEQ ID NO: 845785 - DNA, 588 bp, Homo sapiens
ttctcacttcatttcatgcatttgatcttcaatcaccgatacccttttttccagttgatcaaatcrgctactgaagcttgtgctgtgtcacgtagttctcgtgccatgtttttcagctgtatcaggtcctttaaggacttctctgcattggttattctagttagccattcgtctaatcttttttcaaggtttttagcttctttgcgatgggtttgaacttcctcctttagctcagagaagtttgattgtctgaagccttcttctctcaactcgtcaaagtcattctccattcagctttgttccattgctggcgaggagctgcgtagctttggagggggaggggcgctctgatttttagaattttcagcttttctgctttgtttttttccccatctttgtggttttatctacctttggtctttgatgatggtgacgtacagatggagttttggtgtggatgtcctttctgtttgttagttttccttctaacagacaggaccctcagctgtaggtctgttggagtttgctggaagtccactccagaccctgtttgcctgggtatcagccgcagaggctgcagaacagcga

SEQ ID NO: 845786 - DNA, 556 bp, Homo sapiens
gtatgggagtatgtaaatcaatgctccccacaatgtgatttgtatccaaaggccaagataaccctttggaaggaaagatgggattttaatggaagtgacatttgaaatggtccttgattgataaataggagccttcagtgactgggccctgcctatccttctgctggatcaatctaaatgttaaattctgtgttaaaaaaataaacggctgatttttgttttcaggtcacactacactgttgccagtttccattcctttgcttgtttggtctgcctcttctgaagtgggtcccttcccaactcaccttaggtagcaccctctaccagaaagttttctctggaagctcccaccctcccaagaaaaagggtcaggtgttcacctcctgtgagtgcccacaaaactctgcacacagctgagtgtcttggacctccacacaatgccatatctttctgtgccactctgtagatgtgagttcagttgaagcaaartcttcttttccctctttgtaatccgatttagagccaaatttagttcctggattatgagtggtagata

SEQ ID NO: 845787 - DNA, 610 bp, Homo sapiens
caagactcatactgctgtatatggtgttgtatacattaggggtagttgggtagcagtaactgatatagaaaattttaaatgtaaaaaacactggggagtgaacctttccattatatatatatatatatatatatatatatatatatatatatatatatatatatataaattcacatcaggatgagtttctgtttaggcaatgttggaaaacgctatttccattttttttttttaacaaatatttaacaaacatttataaggcacttaaatccatgctggctcttacaaatgttgactcatttctcataaccaccttggggtagaaacggagaggctaaacaatctgcaggcgatgcttcactactaaatgcaggtggcagccttgcctgtgttctctgcttggctaggaacacaggtcttacctattgagctgggctgtgtagaactctgttgtggagacatctgcccctggggcaraagcctctgctttttccccctcctcccatcttactccatgtctcagagagctctgaatcccacttggagaatcacacttaaaccctctaaaaacctaatgatgaataaaaataagttctctagaacttctgga

SEQ ID NO: 845788 - DNA, 489 bp, Homo sapiens
aacggattctagggactcaggggaaaagggtgggagggggataacataaaagaatacacactgggtacagggcacactgcttaggtgatggatgcaccaaaatctcagaaatcatcactaaggaaatttatctgtataaccaaacaccacctgttcccccaaatcctactgaaatagaaaaataataataataaaaattaaagaattactgtgcctttatgtgcattagtatctgtgttgctaatccttctcttgtagctcttcaatttcaaagattttacggctcttcccagatgtttgttttgtcatgtaaaccttagaatcaacttgcctaattccaaagaaaatgaacctattggtatttcattggaattctctatttgtggattaatttagaaaaaaatgrtatctttataaatattgtctacttaagaatcaaatacatcttttgcttaattcaaggatgtgtatgtgtacctgtgtgtggac

SEQ ID NO: 845789 - DNA, 512 bp, Homo sapiens
ggggctcttattataaaaaggtaacttatattgactacattttaaagtaaggcattttttttggtaacaaaaggtcaaggataaactttgaaatgraacaaattttgttatcttggccctagaatttgggacagtgaacactaaagcaagtagaaggccaagtagaatggtaaagcaatgaaaaaaattagaccttatatggaaaagccaagaaacttaaattgcttagcgtaatgaacagatgcactgatagatactagaaaagatgacgacctggaatacttttcttgaaatgtgctgcaaggtgatatggtcttgacctcaaccaagtggacagcagcactgaaaggaggcaagtcacattcatggcttgtacctgcatggtctcacactggctctgaatttgttaattatgtaagctctcattatagttttaagttcctgatacccaaactatgactttatccacagaaaaatgttagattttgattagcaaaccaaatgaaaagaga

SEQ ID NO: 845790 - DNA, 641 bp, Homo sapiens
actttccattttgctcatgacaacaaaaagaaaatatcaattatcctatgatggagaatggagcaagcacacaataatggctgaccccaactggcagtcaacacaaaaacatccatgtaaagcttgtagataaactataattgaaattttttttttttttgagacggagtctcgctttgtcacccagactggagtgcagtggtgctgatcttggctcactgcaagctccgcctcctgtgttcacaccattctcctgcctcagcctcctgagcagctgggactacaggcgcccgccaccacacctggctacatttttgtatgtttttagtagagacagggtttcaccatattagccaggatggtctcgatctcctgaccttgtgatctgcccgccttggcctccctaagtgatgggattacaggcatgagccattgtgcccggccgaaaatatctttaggctaaaagtaattttcattttctttgaaataaaccttcaggctaataaagcagcaaatgcaagtagacagtaacatgggagtttaatatggytaatagcactaaatcagacactgttgtaagaattacgtaagtcaatataagtaaactgctaaaagagtttggcacatagtaggtagtcagt

SEQ ID NO: 845791 - DNA, 601 bp, Homo sapiens
tcaaaattaaagagagttttttttgtctgttacttttttttgtctattcaagtgaattaaaataagaactcattattggaataaatttcataactttttcttagcttaacttcttcaattgcttagaaaaattgttaacaatcccttctcaggtttatgactttaagtaatacttgtgtcttgatttctcaagaatgatagtgttggaaggaatcaatacagataatctggtctatagcctgtcttctaaagtgaaatctctcagacagtaagcatttattgtgtggatttcaaatttgaaagtacctcagatccatttgagagcccctaaaaatagagattctggcccctttctccttaaccctgagtcagaatcctggattaaggcagtaatctgcatttatcacaaccaccccagttgatgctaatgcatatggtgaaccacaatctattaaactcattcattgagtcttcaggttgcctagcaaggtgttcmatgatgtaattaaaaacctaaagagatgattttgtttagtcaagaattctgaaaagatattctgcttaatttggacagaacagacttaggtcagattaaagtaca

SEQ ID NO: 845792 - DNA, 535 bp, Homo sapiens
agcctcagcaatggtggatgcccctccctgcaccaagctcaggcatcccaggttgacctcagactgcygtgctagcagctagaatctcatgccagtggatcttagcttgctgggctccgtgggggtgggacccactgagccagaccacttggctccctggcttcagccccctttccaggggagtgaatggttctgtcttgctggcataccaggtatgaaaaaaagaaaaaaaaatcctgcagctagctcgatgactgccaaaacggccatgcagttttgtgtttgaaacccagggccctggtggcataggcactggagggaatctcctgttctgccagttgcaaagactgtgtggaaagctcagtatctgggctggagtgcactgttcctcctagtacaatctctcacggcttcccttggctgggggagggagatccactgaccccttatgtttctcgagtgagtccatgccccaccctgctttggctttcactccatgggctgcacccactgtccaaccagtcccaatgagatg

SEQ ID NO: 845793 - DNA, 484 bp, Homo sapiens
gaaaaaagaagtggaacttccacttccagcaacatggcagatcaaataaytttaaatgtctttatttcatttaccaaaaatactggataaaatataaaaacacccaacgtttctggtaaactagttttcagttggctacactcatacaaacattttgaattgttaaaaagtaaaagattataatttgctttactgaagaagaaaagggtgtcatttaaatgcaaaaatagataaaacctacaaaactgaccaaatattaacgatcgttagattaatccattagaccaaaaaatacccatcacagaatcttagaaaaataaataaaagaacagttaacaatctaattgtatttagtttttctaaaatgaaggaaaacatgtgtgtgagtttttttttaaccagacaaaattggacataaaaacataacaattttttttcaatttctattttaagtacagggtgtacatatacaagtttgttctgt

SEQ ID NO: 845794 - DNA, 655 bp, Homo sapiens
tacaagtcattcatttattcattcattcattcaatatgtttttaggctctgatatgtacaagatcctgtgcttgacattagatatatatcatgctgaacaaattatrtacaaactctgccctcaaagtggctctaatccagtgaaaaaacacaattgcatgttttcaaattgtttatttagttatccataaagatatttctattgtcttttaggaggctttctgccatagtctcattgacggaaccatctgcactcacttgttcggtgtttcctgtcacatcatggccagagctcagatttttccttgttgagccttattagcctatgtaggagttaaaagcaagtctaactaaaaattttcacaaaaatgccttaattttgcttcctgaattcattaaaggttcagagttcctgtggcttcctgaatccaataaaagttcagaaatttctgtacttcaggatatttcagcagtgtctgcttagtcctttctgcaaatctagtttgttttttcccaattctctggcatatcagaacacagtatttcacacaaattgcctagaaatatatttgcaatttaaaattccagacaggcaggctttgtttactttaaccattgttaggaaattgttttaaaatatagacttttcttcctc

SEQ ID NO: 845795 - DNA, 638 bp, Homo sapiens
acatacaaatcaaaagatagagaaagcaagctatagacttgaaggaaatatttgcaaagagcacatctgataaagggcagctgaamaaaaaattcaaaaaactcaccaataataagatatgccacccaattttaaaacaggcaaaaacttgagtagaaaccacaccaaagaaggtatacatatagcaagtaagcatataaaaagatgttcaacaccatatgtcactaggaaattacaaattacaatgaaaatgagataccattacatgcctattggaatggcaagaatccaaaactgaaaaccttaaatgccgaagtaaatgtggagcaacaggaactttcattcattgctggtgaaaatgcaaaacagtacagtcactttggaagacagtttgaaaattcttttacaaaactgagcagactcttactctatgatccagcacttgatatttatttatctaaactccttggtgtttatctaaaggcgttgaaaacttatattcacacaaaaacctgcacacacatatttagagcttgattcaaaattgccaaaacttataagcaaccaagatttccttcagtaggtgagtgtttaaataagctgtggtccattagacaacgggatattactcagcacta

SEQ ID NO: 845796 - DNA, 644 bp, Homo sapiens
aggcgttgaaaacttatattcacacaaaaacctgcacacacatatttagagcttgattcaaaattgccaaaacttataagcaaccaagatttccttcagtaggtgagtgtttaaataagctgtggtccattagacaacgggatattactcagcactataaagataatgagctttcaagacttgagaaaatatggaggagacttaaatacatactgctaagtgaaaagaagccaatctaaaaagcctacatattgtataattccaactatatgacatctgaaaaagacaaaactgtggagacaaaagaaagaccagtggttgcatgagtttaacagggagtgggggacgaatatacagagcacagcggatttttaggtcagtaaatatactatgtatgatgatataatggcagatatatgtcattatacactaatcaaaactcatagaatgtacaccaagagtaaactctactataaactatggattttggaggataataatgtgtcaatgtaggttcattaattgttataaatgtaccactatagcrtaggatgttaacagtgggaaggttatgggtggaggggattgaagaatatgattaatttttttgtgaacctaaaatttctccagaaaataaggttttt

SEQ ID NO: 845797 - DNA, 583 bp, Homo sapiens
aaatacttctgaatgatagttaatggctttgatatttttccatatgacacgtccattgaacagagaatttcctcactataagttactaacrgtgccctgagacaccatggcttcccaatatggtggatatttaggagcagggggctttgctgggtgactggatctccaaattaaaataatcttagccacaaagatatcatgcccttccatgttccaacgcaggctcatggaggctttgtttcaggagaagagggaatcccagctatgactgacatttatttacgctcacaagatggcttgtctgctgacgaggaactagagtgtaggagtgaaagtcaatgacacagagaaacacaaatagacagggaaggtaaaattatctctcgttttggcattttctgctctgccaggagcacagttaaattcataccatcttaagatgccagagatgaggtttgccttggaagggcattcattctgtcaccatctagaaagcattatatgctagatgctgggcctgagggtggcaatgcaatggtgccccagtgcagcccatctcctgccctgggtcatggagaaggga

SEQ ID NO: 845798 - DNA, 605 bp, Homo sapiens
agagcaggacactggatcaagactgccagtgcacacctggccccaccacctaccgggcaggtratgtgcagggctgcatcattaccctggttcctcactcatctctgcttacccttaacatgccagtttgcagtaccctcccctgtgggcagggcttgctgcctgcccctgtgtttggccacttgctttgctttaaccagtggaattaggggggaaatgacaggataccagctctgaatctactgctcactctcttgtacttctgccatccctataaaaaggacatgcctggactggcctgatgttttcagaagaggaggagaggcatgtggagcagagtcaagcccctacgggccacaggcacatggatgagaacaggagaaccgcctaactgagcccagcctggatcagagctgatacccagccaacaacttgtgagaaccaatacatggttattttaaggcactaacttttggggctggtttattatgtggctatagctaactgatacaggtgaccttgggcaagttaatccatctatgcccccattttcttttttgtaaagtaggggaatgaatagtatctgcctcgtgtgatttttataa

SEQ ID NO: 845799 - DNA, 549 bp, Homo sapiens
agcccaaactgggcaggtttgtcctctccctcctggatgtggcacatccatggatgctaataagaaccacttcactttggggtcaccacagtatgccatgacttaygatgctacaaaatcacattgctccctgtttgtggaaggtgagcatttttaacccaagaataggacttagtatttacattacagtccagggggctgacctctgcccactgtgccaatctgttgagtttgccttggcttctagatgattgtcttcctacacagtcactctcctcccagcttcagatcatccacacactggatgtgcaccctctccatacagttactcaccttccagtttttgactaggtttccagcttaataccaactagttcattagcactcttccaaggctgtcaattggttactgtttgccttctcctctggcccatatttatccaaggttgctataaagtccacctaggggctgggcacggtggctcacgccagtaatcccagcactttgggaggccaaggcgggcagatcacaaggtcaagtgatcgaga

SEQ ID NO: 845800 - DNA, 613 bp, Homo sapiens
gctcccataatccccatgtgtcgtgggcgggagctggtgggaggtaattaagtcatgggggcatccccttcatatgtacatctatcccattagttctgtccctctagagaaccctaatacatgtatcccgtaggagaaaaagtaagggaggagttatatgttaatttgcccagataatacatcctgttggttcttctatttaaccaaaacatattcttcacatgtatcaagtaattttgaagaaggggagtaacaaatgttggtaagcaaaaaggcacataattgacttaaaaaacggtaaaatgtcttctagttcgccaacatataaatggatctggctattagaagtatgcttatgtcagataggatgttgccaatctttactcattacaaactaatttcaacattattatagcaaaaaaggcccaataatcacaataaaataaataatttaatttactaaaatggaagaaaattgggaacagaaaaaattgaccaagtagaagtccagaagcaaatgcaaaataaaatacaataaaattatattaaattagtatagtcttataggatataaatataaaaagtatccrtaaaagtagctgaaatttcttaa

SEQ ID NO: 845801 - DNA, 668 bp, Homo sapiens
atgaagctgagagggaaaggtgcatccaattagaatgcacattttataggaacaaaatgaagagtttattaaggtcaataccratatgatagaacacagtgcagagattgaaaacataaggcaactgagcacaaggggaaggggcaaaggttcccgggacatgctagtaaatgctttacacaggttcccatccatcctcatgactctgtgaagattacattatcacctccatttcgaggaaactaaggctcaccaagctggtaagtggtggaacaacagaaaattgcaccggtgaccacctggctccaagacctcaccaacatgctccacaattatggaagtcactgtgaggaaggagcacaactttcaagagtgacaggaaaaactgtggcttaatcatctgggcaaggctggtgacacccagaattcctaagctttctttcccattagctatcctttaggagatgaatcttgattcatttttctcactgacacataagtttaacataacattcagagaaagcagtgttttattgtgaaaagagtactgtctggaatcaaaagacctggattgcaggtatgacaccagctggttgggtaatcttgatcaagtcacttcacactgggcttcaagtgccctcaggtgtaactcacttcgttgactgaag

SEQ ID NO: 845802 - DNA, 575 bp, Homo sapiens
tccagcactgtgagacaataaatttttgttgttctaagccaagcagtttgtggtactttgttacagcagccctgggaaactaatacgaggttgatttgtttcgcaaacgtgccttcctggaactcctctcatgtcctgggccccatgtaccgagacgagtaggacacatgtctctttgtgttcaagtgtccccttgagagaaaaactcatcacaaagtgttatgagcaaattgtgtcccccctagattcatatgttgaagtcctaaccctcagactgtgacggtcgatttggagataggccttaagttaaaatgagtcattggggtgggtcccaatccaataggactggtgtccttatgggaaggggagattaggacatggatacacacaggaggaagacgatgtgaagacacagcaagatgtcaaccatctggccgggcrcagtggctcatgcctgtaatcccagcactttgggaggccaaggcaggtggatcacaaggtcagaagatcgagaccagcctggctaacacggtgaaacctcgtctctactaaaaatacaaaaaattagccaggcg

SEQ ID NO: 845803 - DNA, 614 bp, Homo sapiens
caggcctcttatgattctgcaattccacatgaactccgctgcacagggaggggtctcatctccctgactctacccctatcasgatccatactggggcctggtacatagcagattctctgaaattgttcattgaacagaagtgagagaagagctggacttcagcccagcctattcctggggtcccagttgccgcagtggccttgaagtgtttgcacagcttctgcagacaactgggacacctgctccttcacatgggggcatggacctactcatcaagtcagcccatctgtgaccaacgcaatgggtcatgaagcaggaagttacaccgtgcaagatggcagtacacgggtcatctcacccaagctgagccaatcagccccttctctgaggattctgaattgaagggatggggaaaaaagatggtgaaagagagacagacacaaagagagcctgggacaaagtgacacacacacataacacacacacacacacaatccacacagcctttgtccctggttcgagtcccttcctcccttccagaggctgacaaagcttacctagcagtgatgggagttgaagattcctattatccctgcctccaaccccattggttc

SEQ ID NO: 845804 - DNA, 516 bp, Homo sapiens
ccttgcttactgctagtgcagcagtccgagatcgaactgsaaggtggcagcctgggctgggagaggggcatccaccattgctgaggcttgagtaggtaaacaaagcagctgggaagcctgaactgtgtggagctccctgcagctcaacgaggcctggcagcctctgtagactccacctctgggggcagggtatagctgaataaaaggcagcagaaacttctgcagacttaaacatccctgtctgacagctctgaagagagcagtggttctccagcatgaagtttgaactctgagaatggacagagctgccagtagggatttactgacacctcatacagccaagtgtccctctgagatgaagcttccagaagaaggatcaggcagcaatatttgctgttctgcagcctccactggtgacactcaggcaaacagggtctggagtggaaccccagcaaactccaacagacctgcagctgagggtcctgattgttagaaggaaaactagcaaacagaaag

SEQ ID NO: 845805 - DNA, 632 bp, Homo sapiens
aagcacttgagctttttttccaatttttggctattatgcacaatgctgctgtgaacatttgtgtacaaattttagtgtggatgtatattttcatttcccttggttgtatcactaaggaatacactatctgggtcatatgataattgtttaaaactacaggcacgtgccaccacacctggcaaatatttaaaattttttttgtagataaagggtctcactatgttgcccaggctgaccttgaactcctggcctcaaaagatcctctcacctcagcctcccagaaagtgttgggattacagttgtgagtcactgcacctataaaagaggctcatacctctttttacgtattttttttttttgagacagtgtttcactctgttgcccaggctggagtgcagtggtgggatcacaactcaatgcagcctggacctcactccatatgattctagttgtgggtgtctttcctgtagtttttattatgttgtggtatgtttcttctgtayctgtttctttaaggattaatagcatgaagggatgttgaattttatcaaatactttttcagtttcagttgacatgatcatactgtttttgtcatttatttggttgatatgatgtatcacattgtatgtta

SEQ ID NO: 845806 - DNA, 632 bp, Homo sapiens
aagcacttgagctttttttccaatttttggctattatgcacaatgctgctgtgaacatttgtgtacaaattttagtgtggatgtatattttcatttcccttggttgtatcactaaggaatacactatctgggtcatatgataattgtttaaaactacaggcacgtgccaccacacctggcaaatatttaaaattttttttgtagataaagggtctcactatgttgcccaggctgaccttgaactcctggcctcaaaagatcctctcacctcagcctcccagaaagtgttgggattacagttgtgagtcactgcacctataaaagaggctcatacctctttttacgtattttttttttttgagacagtgtttcactctgttgcccaggctggagtgcagtggtgggatcacaactcaatgcagcctggacctcactccatatgattctagttgtgggtgtctttcctgtagtttttattatgttgtggtatgtttcttctgtacctgtttctttraggattaatagcatgaagggatgttgaattttatcaaatactttttcagtttcagttgacatgatcatactgtttttgtcatttatttggttgatatgatgtatcacattgtatgtta

SEQ ID NO: 845807 - DNA, 628 bp, Homo sapiens
gtggtgtctgctgcgggtcttggggagagatggaggagagagagtgggttgcctgtgggggaaagagtgagtttgggaaaggagtgggcctgacccccaagcccctccgtgggggaaagtcaccagaagacatggtccaacgtgccctccatcgagcctcacgccaatgctcttaggattcctgtgacggtggcagggcagaacctgcaacaacattgcacagaaatactggctgagcccaaataggactaggggaggggatcatgctggtccctgtgggaagagcacgaaggcaagagaagggatgtctaagctgccacacagggtgctgctggcccttctagggagaggaggccacttgtgcaggggccttgggggaactgggagcacagtgcagggtgttcctgctgcatgcaggggaagggagggcaagggaatggagggctgtggccggcgggccttggaggccacactacagagacaggacttagcccagagrccactgaggagctttcagtaacagggaagcagtgtcgagtactgcaggccacgtggctgcatttgagggtggctggtgggaatagggtgcggcagcccatctggcctcggaggcatgagaactgagaac

SEQ ID NO: 845808 - DNA, 562 bp, Homo sapiens
actacatggaaactgccaaggcttggggattgaactctgaagcaataacctgagctgtayattggctccttttagccatggctgggacacagggcaccaagtcccaagactgcacagagcagcaaagttctgggcctggcccacaaaaccattttttccctcctaggcctccaaccctgtcacgggaggggctgttgtgaacaactctgacatgccctggagacaatttccccattatcttgtcaattatcatttggctccttgttacttctgcaaatttctgcagtcagcttgaatttctccccagaaaatgggttttcttttctatcacatcatcaggctgcaaatcttccaaactttcatgctctgctcccttttaaacataagttctaattccaaaccatatttttgtgaatgcataaaactgaacacttttaagagcactcaggtcataaattgaacactttgctgcttacaaatttcttctaccagatgtcttggatgggttccaagatagccaaataggaacagttccggtctgcagctcccagcatgattgaca

SEQ ID NO: 845809 - DNA, 624 bp, Homo sapiens
agatagacacaaacacatgtatgaatttaatactcagtaaaagtggtatttcaaggctgggtgcagtgactcacgcctgtaatcccagcactttgggaggccaaggtgggcggatcacttgaggtcaggagtttgagatcagcccggccaacatggtgagatcccatcgttactaaaaatagaaaaattagctgggcatggtggcaggcgcctgtaatcccagctactggggaggctgaggcacgagaatcgcttgaacccaggaagtggaggttgcagtgagccgagatcacaccactgcactgcagcctggccaacagagcaagactctgtctctaaagaaaaaaaaaaggccgggccggtagctcacacctgtaatccgagttctttgggaggccaatgccaggggatcacaaggtcaagagatagagaccatcctggcaaacatggtgaaaccccatctctactaaaaatacaaaaagtagctgggcgtgatggtgcccacctgtagtcccagctactcaggaggttgaggcaggakaatcgcttgaacgcgggaggcggaggttgcactgagccaatatcataccactgcaactccagcctgggcctggcaacagcgca

SEQ ID NO: 845810 - DNA, 665 bp, Homo sapiens
gggtgggggagcactggagcttgtttacttcatattgtaaattaagagaataatgaaggcattacttctaaatacattaaatttcttcacgagacaaaaataaggacagttgtgttcattttcatggccatcctttaaaagctgaaaatgtttttaatgagtcaaagtacttaaaaataaccagtggcaacaaagaacagaaatgacaggtctctcaggaaatagccaaccaatgcagaaaccagcaaaccaactaattagaagttctattataaagaaacagttactttaattttttttaagtatcaaaatgatttttaaagctggtcctcaagaaagagatgaatgaccagagcaattaagctacttgaggagtcctaacacattctctcttactgagagcaaaaaggactgcaaaactcaaaagaaactcaagcgaaatgtgactctggatagcagaggcataagtattaccttattcaacaaaattccccaagagtgcagttgttcctttttactttcagaatcagaacaaaataacagaggcgttccattgaagatctacataatggtcttagaagacaagtcgccagtgtcaagaaacaagtccagaaccattcagaagtcagctatgaccttawttcattgggttttttttccgtcag

SEQ ID NO: 845811 - DNA, 605 bp, Homo sapiens
ggtctttgcagatgtaactagttagtatagggtcatactggatcgagtaagtgctaaatccagtgactggtgtccttaaaagaaaggacacagacacacagagggaagaaggccacgtgacacaggacacagaggttggaaggatatgtccaaaagccaaggaacaccaaggatgaccagcagccactggaagctggaagcggccagaaagcgtcctcctctagagcctgtggaagagcctggcctgcgggcaccttgatttggggcttctagcctccaaaaatgcgagagaacaagtttctgttgttttaaaccacaaccgcaatttgttacggcagccctgggaaactaatgtaagttaccctatccgtgcctcagtttcttcatctgtgaaacaggtataagggcaccaacccaaggtgatccggatgatgaaatgacagtttccagcattttcctcctgtgtgccgggcactgtgccaagtgccataaatatgttaacttatgtaaaacgctgtgtaattctgctttaaaatcttattatrctcagattacatgttttttaaaaaaagtgttggctacaaacagtatgtataattctgttt

SEQ ID NO: 845812 - DNA, 619 bp, Homo sapiens
tgaagaaatctgttaatggaaactttgataaatacaatgaacagatttggttcttcctcatccacataggttggaagcaacaagtattttgattgttgactcatacttctccagtgaagtgacaatgtgttgatggattaaacacagttatttttaagctgctttgacattctctaggcaaagtattatcaggaacagagccctgagatttgagagttgcagatgctttcatgattcttcactgtctgtctctccttacataagtgtttccagaaagctaataaaattattcctgaaggttaaaaacaaggaagttatgaaccggatttgaggttgaaattaggtagggggaacatgaattattttctgtaacgtacaagtggaaacaatttaatcaatcctttttatttttattgaatgtagacagaaaattcagtgcaggtggctgcattgcatttcatttacaataattaaaaaatgtttgagtaaaacagctctgttttggtggacagagatccaggacacccactttcacttacaggtgatccgctstttcactgatcccagcatctgctgcttctgtgtcacaccgctgggggaatgggggatccagagctga

SEQ ID NO: 845813 - DNA, 668 bp, Homo sapiens
aagataataagagtagatttagatttaaatttgaaaatgaaatttgcaaacaatatgattaatgccaacacaytgtggactggtgaaaggtctgtgacattattacacaggaaatgatacaaccagcatgttccccaagctgtgtttcatgggccactatttccgcctgataaatagaccatgagaacaggatggacaagtgaatttagaaataggatattatattgccctcttggagagatcagtgcctgttagccttttaaagactcttaagaggtagaagtttggtttgtttcccaaatgtatttgattagagaacaattttagaaaatgaaacacttctgccttgtttccaccagtaagggacgggaaattactcccttcttgtattttccttttagataggaatgcgtgtagtactgcgtgacatcatttaaatgaaagttgccctgtagtcttgtcatttttttgtgcatttctttcacacctaaaattaatgctctcaaggtttaaatttttatttgtaaaactggcatctttgtccaaggtaactcttttttacatccaagaaaagcaatttgtcaaaattaaagcgtactgcttttatcattatcctccataagagaactgatcatattctttttgcttatctctaagatatgcttttc

SEQ ID NO: 845814 - DNA, 587 bp, Homo sapiens
ccagtgtggtttatgggtcatggctatagaactaggaagakgttgattattttaaagatatcattaataacataagcctaatttttcagtagttttccatctagttatattttgcctacttaaatgtcaatcgaattttttttttatatttattctggccctctctgtgactgtagcccagtttcgaatcatttctagtcctaagatcatattaagatgattccagacttatgccttcgatgtctgaaagaatcaaccagaaatcctgaaaatcatattacaagaaaggaaaatgataggccaattactcttaggaacttagttgcaaaaatcctaagcaaaatattagtaaatctaatccatcaatacataaaatgtaaatatacaatacaaccaagttgtagttttcccaggaatgcaatgttattcagatatttgaaaatcactcaaccacacaataaaggagaaaaaagtttgactatatcaatagatgcagcgaaaatatttgatgaaattccaccatgttaataataaactcttagcaaactagtagtagatagaaatttcttaaatagaataaaagctac

SEQ ID NO: 845815 - DNA, 632 bp, Homo sapiens
aatatgtatttcgtctccctgtttcctcacagaaaaaaaacctctaaaacccatgggatcatcagggtggtaactgtcttttctctgctacgagatgaccagtggctggggactcctatagcttcaggttggggactgttcaccagaaagaccaatgtatgcttagagggttgggactttcagctccagcctccttagaggggaaagggggtgaaggttaagtggatcaccaaaggccggtgatttaatcagtcatgcctatgtaatgaagcctccataaaaacccaacatcacagggtttgggaggattttcagacagctgaacatgtggtggttcctgaaagaggatgtgcctggagagggtatggaagctccaggctgcttctcccatacctcgacctatgtgtctcttccatctggctgttcatctgtatccttttaatacctttctaataaatggctaaacataagtaagtgtttccctgagttccgtgtgctgctctggcaaattagttgaatcacaggagggagttgtgggaaccctgatttatagctgrtaggttagaagcacaggactgtgcttgtgactggcatctgaagccagttgtgggaccgagccctcaacctgtggg

SEQ ID NO: 845816 - DNA, 582 bp, Homo sapiens
gggtagctgggattacaggcatgcgccaccacgcccagctaatttttgtatttttagtacagatggggtttcaccaygtttgccaggctggtttcaaactcctgatctcaggtgatctgcccacctcggcctcccaaagtgctggtattacaggccaccacgcccagctctctaaaattaatctttaagtgcccaagaaatgcggtcttcagataagttccccaggaccttttaatgctaacctgttgtgcatacctctgtaggggttgagagaggggaatcggggcaaggtgagagggagccactcaggcaacaaaacaccctaaattctgcatgcttgctctttaagaccatggtccatgcctggcttttggccagtggagaccaaaggcttgggattctgcagaaacagtcacttggccaccaacaaactagaagaagaggagaaattccactaccttgttgaagtgagaaccctctgaacatcattgcttccccacaggacatggccagggacagacaggtatggggagaactgcaagatcagcctcacagcacctttaatccatttaattcccaaag

SEQ ID NO: 845817 - DNA, 711 bp, Homo sapiens
acttggtagacggtaacagggagaccggatctagtytgaaggtcagggtaaaacgcttggacaaaattacatatgagctaagatttcaaggagtaggagttaaacagatgaaggggcagagagtgaggaatagaagcacattccaggcaaaggaaacagtatattaagaagaatctaggctgggcacggtggctcacaactattatcccagtgctctggaggccaaggcaggaggacagcttgaggccaggaattagagaccagcctgggcaacatggcgagagcttgtctctaaaaaaataagaaagaaaaaaattagccgagtgtggcggcacatgtccacagtcctagctacttggaaggctaaggcaggaggatagcttaagcccaaggagtttgaggttaccggtgggctatgactgcagcactgcactccagcctggaagacaaagcaagaccctgtgtcaaataaataaataaataagaagaagaatctatgtcaaaaaaggttaaggtttgtgagaggaattaaaaggaagccagcaagtcagaaagatataatgaagggaagagtgactgataaggtaggcaaggggtagtttcatgcagggcttgtacgctgtgttaggaatttagtctttcatgctaaaagcaacaggaaccactgaaagattttcaagcctgggagtgacaatccgattcacattttta

SEQ ID NO: 845818 - DNA, 577 bp, Homo sapiens
aattcattaactatacacatttaacaccttctcaagaaatgaaatgttttagcttgggattgaaaggagctackgacaaaattggcttttgaaggctaagaaataaaattttaccaatagaaattgctttttccatgctgcagtgagcatctcacttaatttcaactcatctggcttggtgtttagaataggagaaaaaagaaacagaatctttttgttctaaattattctctaaggatatatatcctaaattatccttaaagtattcctttagatgtgaaattttttaaagaaaacttattttcaaatgaatgcctttgtactgtaactagatttttagaacaagaagtaaaataatctgatcttgaattcactgtctgacacaaaataacgtcatccatatttgtatctaatatcatctagagcatacagtagaagtgaaaacagggttccaatacagggatcccagtgattcccacacatcctagtatctgcacctcacattgcaccagcattgatctttgtaaccaatagaatatgacagaagtgatgaatgttacttccaagattatataat

SEQ ID NO: 845819 - DNA, 577 bp, Homo sapiens
aattcattaactatacacatttaacaccttctcaagaaatgaaatgttttagcttgggattgaaaggagctactgacaaaattggctyttgaaggctaagaaataaaattttaccaatagaaattgctttttccatgctgcagtgagcatctcacttaatttcaactcatctggcttggtgtttagaataggagaaaaaagaaacagaatctttttgttctaaattattctctaaggatatatatcctaaattatccttaaagtattcctttagatgtgaaattttttaaagaaaacttattttcaaatgaatgcctttgtactgtaactagatttttagaacaagaagtaaaataatctgatcttgaattcactgtctgacacaaaataacgtcatccatatttgtatctaatatcatctagagcatacagtagaagtgaaaacagggttccaatacagggatcccagtgattcccacacatcctagtatctgcacctcacattgcaccagcattgatctttgtaaccaatagaatatgacagaagtgatgaatgttacttccaagattatataat

SEQ ID NO: 845820 - DNA, 577 bp, Homo sapiens
aattcattaactatacacatttaacaccttctcaagaaatgaaatgttttagcttgggattgaaaggagctactgacaaaattggcttttgaaggctaagaaataaaattttaccaatagaaattgctttttccatgctgcagtgagcatctcacttaatttcaactcatctggcttggtgtttagaataggagaaaaaagaaacagaatctttttgttctaaattattctctaaggatatatatcctaaattatccttaaagtattcctttagatgtgaaattttttaaagaaaacttattttcaaatgaatgcctttgtactgtaactagatttttagaacaagaagtaaaataatctgatcttgaattcactgtctgacacaaaataacgtcatccatatttgtatctaatatcatctagagcatacagtagaagtgaaaacagggttccaatacagggatcccagtgattcccacacatcctagtatctgcacctcacattgcaccagcattgatctttgtraccaatagaatatgacagaagtgatgaatgttacttccaagattatataat

SEQ ID NO: 845821 - DNA, 280 bp, Homo sapiens
aatatctgtgtgtctggtgtaatagtcacttcttgcaatttttttaatttgccttcatgggaggactttctcctggagatgtattaatgktgttggttttataggaccctttagctttgattctgggtgcatatggcaatgtagcctctatatggtttctttggctgtaaacagtatgagtaacatctgtggtttcctaggtggtttaggctctaattattagtggaggctatggtgaagtttttctgggggcagggatggcaggtgggtccatatctgg

SEQ ID NO: 845822 - DNA, 594 bp, Homo sapiens
ttgaaataaaataaaacaatataaaataagacaagtgaccactttcagagggctcatagtctaggaggggagatacatacgaaaaaattgcatttatacaaaatcatgctcatttgcaagaacacatataaaacaaaggatctcttgtgatcttgctccattatcttgctccaggagctcccaggttaatgcagaagacagacagaaaaatccttactccagtatcatcagggctgtgcatacatatgaggcactctgggaccacagaggaaggaacaatttattctgtctaggggaaccccagaaagctgcccctgaaaacaatgatatgtaatttgagtcctcaatgctgtctacgaagagttcatggcataatatgatctccctaccagagaacaggcaacacttaatccaagggaatgaaattgaaatagtgggttttagttgccatgggagaagatgtagttggccaggggtcctttcaggctggggacactycttgccttatcagcttctggtgtctgggccccctgcaactcaagctgggattgaataggcaggctgtgtccccatcccgagaggcctagcgtggtt

SEQ ID NO: 845823 - DNA, 573 bp, Homo sapiens
ggagcgcaatgaagtagtatcagaaactgggctgttcaaccacagggccactggggagctgtccatggtttggggtaggctcctcaccagctctggctgtctctctcactctctgccagggcccagttgatttgataggctgtggagtcagattgcctagatttgaatccaacttcctctcccaggggaaagggactaaattttgtgtttcagtttatctgtctgtacaatgtggatggggatctcaaggactgttgtaaggacaaaatgagttaatcacacttcttggcatatactaaatggccagtaaaactatcatcaccctcatccccaccccaatcctcacccccagcaactggcccaggggacaaagtctatggccaggtattctccaatctttcttgatacccctggagcacatgggaataaataatggcgagaatctataccctctgcatttgcagatgggaggagcattcccctccctgcttgctgaggatttgaatatccttaaccaattgactttgttttagtgaaccaagtactcmtccaacccttgatgccccaaatacc

SEQ ID NO: 845824 - DNA, 603 bp, Homo sapiens
gcatttgaccgtgaccccagccaggctgggctttggggaggagggaaacagccagcatgggccccctccccgcagggctggtcccacacacagccccagrccaggctgctgcttcctgagccgatgaattattaccgggagatttccttccctgtctgcgcctcctcacaggggctcccagctcacttcactttcgctttctcccccttctccccctcctctctgcttctgaccctcaggcagcttgaaattcctctgtccagccccctcccaattccacctccaactggagatgccaaccaaggcgtgaactgggcccggaaggcgaagaggggcttgccttgtaggctcattcatttatttgctccttaggcatattttgacacttgggaccctgggagtagaagaaaaccatgaatgagactgagacaggccttctgcagccgagaggggaaggcgagctgtaaacaaaggatttcaagacaatgtggtaggagcaagccagggtctggtatcagagagacccagttccggttccaaggttagctgcttcccagagtctcagttgcctgctctgaaaatgagataataatagtacccatt

SEQ ID NO: 845825 - DNA, 620 bp, Homo sapiens
ttctttgcctgcctaacaggcatgctccttatttagggattagccacagtgrgacttccatggaaagttgaatgtggccctaatcgggggcagggttgggtttgcccactgtccctgtcggtgcattagatcaggttaatcagaccaaatcacgtacaggattaggcaggccacagcttgaagcttcatggcagaaagggctggatcggtgttgacttccatttttcagtggggtgtgtgtgatgggcttgctgaggttttctgtggctcatcaatggtctgcccatgtgccagctcccacagcctggctgcctcccagggacctttgctctcaactgcttggggagatttgcttatcctgggcgtcagggcactcatcagcacagacctccagccagggtggccatagggaaagagcaggtggtgtgcagagatgtcaaacaacagcaaagggttctgggtggggagccacgcaggccagcagagtccttgggccgggcctgcttcacgggcacatagagctgggcagccacacaggaccctgcactaaaaaaggccctgtgcttggtttgatgctctgtggtttatgtcttgaaattcttaataagtttggagcattt

SEQ ID NO: 845826 - DNA, 592 bp, Homo sapiens
aaacgcaaaccgacagttatttaaacaattctmtattgttggatatttaggctggctccaactttttgctcttgtaaataactgtacaatggatatcctggtatataagtctttgcacacatctctgattatttccttagggtaaattcctagaagtaaaattactggtgaaatgattcacacatattaagacttttgataaatgccatcatatttgcctagaaagtttatgacaaataacatttccaacaagaatgtgagtctgtctccccagcccctcctcatcttctccagtcctgggatacattaacgaaaatgcagaggaaaaaaacataaataattctacctccaaagtaaaccactgttaacaatttggtgaatatttcctccagattttttactgtgtacttgtactcatgtatgtgtgtgtgtttcagaaatggaatgatgtatacatattgatttgtgacctgatttttattttattttattttacttttttttagatggagtcttgctctcttgcccaggtgggagtgcagtggtgcaatcctgacttactgcaacctccacctcccgggttcaagtgatt

SEQ ID NO: 845827 - DNA, 592 bp, Homo sapiens
aaacgcaaaccgacagttatttaaacaattctctattgttggatatttaggctggctccaactttttgctcttgtaaataactgtacaatggatatcctggtatataagtctttgcacacatctctgattatttccttagggtaaattcctagaagtaaaattactggtgaaatgattcacacatattaagacttttgataaatgccatcatatttgcctagaaagtttatgacaaataacatttccaacaagaatgtgagtctgtctccccagcccctcctcatcttctccagtcctgggatacattaacgaaaatgcagaggaaaaaaacataaataattctacctccaaagtaaaccactgttaacaatttggtgaatatttcctccagattttttactgtgtacttgtactcatgtatgtgtgtgtgtttcagaaatggaatgatgtatacatattgatttgtgacctgatttttattttattttattttayttttttttagatggagtcttgctctcttgcccaggtgggagtgcagtggtgcaatcctgacttactgcaacctccacctcccgggttcaagtgatt

SEQ ID NO: 845828 - DNA, 527 bp, Homo sapiens
atggcaactatattataccatgttgcctttgtcagtcattagaaaataaacaaaatggccaggcgtggtgactcacgcctgtaatcccaacactttgggaggcctgtaaccccagaactttgggatcacaagatcaggatttcgagaccagcttggccaacttagtgaaaccccgtctctactaaaaatacaaaaaattagccagacatgctggcgggcacctgtaatcctggctactcgggaggctgaggcaggagaatcacttgaacccaggaggcagaggttgcagtgagccaagattgtgccactgcactccagcctgggtgacacagtgagactccatctcaaaaaaataaataaataaaataaaataaagaaaataagattaaggacagagtcctaaggwatacctttatggaaactgcccaacgacactgatgtactaattatctctaggtattgtttttcactcactcacctaatatcactaacacttagctaatcagccaccatcttaacccaaagct

SEQ ID NO: 845829 - DNA, 559 bp, Homo sapiens
atgaggagcaaaatcacatcttacatggtggcaggcaagaggcctcgtgcaggagaactcccatttataaaatcatcagatctcgtgagacttactgaatctcaagagaacagtatgggggaaacggcctccatgattccattatctccacctggccccgcccttgacatgtggggattattacaattcaaggtgagatttatgtggggactcagagccaaaccatgtcaatgccattgtgtgattagaccacagttgatttatctatcacattggatggacatttgtgttgtttccagtttcagtcgattttgaatagtgctgctaggaaccttcttgtacatcttttggtgaatgtgtgaaatctattttgtttcgtacaaactgtttatctcccctctttttaacaagcctccctccccttatccaagtcaggcagggtaatccaagagtgggtgattggaagggaaaasaattccagctgcccaacttctggctcctatcttccttcctccccaagcaacttcctccaccctcctccctcaggacctgggattca

SEQ ID NO: 845830 - DNA, 640 bp, Homo sapiens
ccctttccaccatatgaggacacagagaaaagatgtttatctgtaaaggaagtggggattcagttagacactacatctgtagacaccttgatcttgaatttccaagactccagaactatgaaaaataaatatttgtagtttataagctacacaatctatggtatttgttagagcagacctagtggactaagacagaatagcaacggcttttttgtcagcagcacaaacatcataaacaaatgaaagacataatcaataagctagacttcattaaaattaaaaacttctgctctaaaagggtactgtcaagagaatgagaaaataagttatagattggaataaaatatttacaaaagacatacccaataaaggactattacgcaaagtataaaagaattcttaaaatttaacataaagaaaacaaacaactcaattttataaagaaaaaatttgaacaaacacctcaccaaagaagatataaacatggcaaagaagcttatgagaagatgctccaaatcatgtgttgttagaaaaatcaaartaaaacaatgagattaccactacaagcctattagaatggccaagtccagaacactgtcgatatcaaatgttactgcggaggtgaaacaacaggaactct

SEQ ID NO: 845831 - DNA, 635 bp, Homo sapiens
agcaggcctatctcttctactagattttaagttctytggatttttttttcttttctttcttaacaacattcattagtttgagatacgtaacagcttagaggcaggatgataaaccacaagtaaaatggggctgaggttgggcaatgaggcaaatagcaactctggaaaaaacaaacagcagagagggaggtcgggccatttgttcctcccctccctctcttcctggcttgggcacagtccttacggtgactgcgtcccaccacagcttcggctcctgccaggtggctcctctcccaagacatagctctcacctgggttctacgagcaccactccctctccctgcccctctggcctcaggatggtgatggcttcctgctgctgtgggtccccgggggcctcagcaccccttgttgcttcccttattgcactcataccttcattaataggccctttaccttgatgctttccattgaggtccctgactaataacccctctgtatctgcaccactcctagactctggttaatacagaattctggtcaagaaaatcctgagtgtcaccttgcactgggggtcagcaaaccacttatttttataaataggttttactggaacacagccatacctattcttt

SEQ ID NO: 845832 - DNA, 630 bp, Homo sapiens
ccagtccatagaattggaggcgtgtcaactgtgaagcctcatttccctgaccatccaatgggcagctaggctaaacttaaatttaggctctccttctcctgggaatttgagtcttgagtagatattctccaggagtgaaggcagagttatcccacagcagccccctatagagacattccgtgggttcctgagatgttcagattcaccctggtcctatccttcagttccaggagacaccagaattccaacaaggcagagatgccagtacctagtctccctttttccttagagaaacaagatggagtttactgtgtgtgtaaatgtacccccagctttaaaggcactaactcctctgggagatgcactttgtctattctctttcctttttttacctggaataccgatgtgacggttggatctacagtgattgtattgcagctgtaaagtgaacttgaggatggaaaccagccctgaagatggtggagagaaaggtagatggagcctggttcctaaggagtttatgaaactgccataccagccctgcaccrcctgccttctggctttaggagagagggaaaaaaaagtcttccatcctacataggctaatatgattacgggtctcagtcatta

SEQ ID NO: 845833 - DNA, 595 bp, Homo sapiens
tgtgtaaattaatcaagcctgactatagatccatctgctggcccccttatsccaaaacactgacagccctgtcttgccaccaggtaggctttttgttgttggtgttgttgttgttttgtggggtttttttgacatggagtctcgctctgtcacccaggctggagtgcagtgtgcagtcttggctcactgcaacctccgactcccaggttcaagtgagtctcctgcctcagccaactgagtagccgggattacaggcatgcgccaccatcccagctaatttttgtatttttagtagagatgggattttcaccatgttggccaggctggtcttgaactcctgacttcaggtgatccacctgcttcagcctcccagagtgctggaattacaggcatgagccaccgtgcctgaccaaggtaggtgtatttctgaataagctcctgcataaatctacctgggtaaaactcttgcattttatatttacactttgtacttttcaatgccattccatatgtatgtgtgtcattttataaatgatacatgatagatcatttttcacattttatacatgttacatcactaaccatgtggtgaaat

SEQ ID NO: 845834 - DNA, 607 bp, Homo sapiens
atgtgataaatgacaatgcaactgtagcaaaagcactcagtcttctctctatatagcaccccccgccccrggtaggactgtttagcctgaatttcccacacatattttatacatatctaatctacgatttcccatcttcccactgacaccatcaactggcagcctggtggctttgagcattttgcaggccatagtccaagctattggtacaggccattggcacaaccggctggcatgccaactgcccatgaggtcagcagcatcacgtcagatactttctcctcccaccaggcacgcctggcagcagttagatttaccgagtcactcatgtcatttgggaacgccctgtgtgctgtccttacaagagaggtgttggttatgttgtgcaacaaagagagatgttgctaggaagcttctgaatttaaccacagagcaaagggttcacatgtggtccacacaactagatgaggccatggtgtggagctagaagtatcaagtggtctaccaaacctatccagtctgcttgaatgcaactattattataatacacctggcttggaagtaaaatggtgaaccggatggaactacaagatgacacgcctaagcg

SEQ ID NO: 845835 - DNA, 650 bp, Homo sapiens
atacaattaaaatgtgtgttaactgatgaagataaaccaagagttttatggaaatacatagaagggacacctggacattggaaaaagtaaatcagcraagtctttccaagaggtaacccccaggaaattggagttttatacagaagcatagacatgaaataataggataccagattatagggtataaaataaagactggtaagataaagggctggaagcaggcctttatcccatgttaagaagtttggtttttatcctgaaaattatgggattcctttatgtgatttttaaggaagaaagtaacataatcattttgatacttttttaaagccttactgtggtgaatgagaaaagtgatttcagcagagaagaggttctacctagatggaaggagaccaggttgcaggaatgtaggcacaaaatgattagaacctgaactcaagcagtgacaatgaggctagagaagaaaacaagatttgaaaaatattatttcagaaagtaaaatcagcaatacttgataacttattggatgtttaggggaaattggaaagattgactcagatttctggcttgggaaattgagtagatggtgttgctgttaacttaaaaaggatgttttggagacagaatattattaataggaaagagga

SEQ ID NO: 845836 - DNA, 695 bp, Homo sapiens
catttttcttattatgagaaataatggacaccttctctggacacatctgggcacatctgctcaagtttaccttcaggacaggtttccagaagtagaattttggttctaggtcctgaaatattttccccttcagatgtatttcatatcacatgcatccttgccttaggaataataatgcaagtaacagtagcaattactgtgtgttgagtgctttttgtgtgtcaagcattgtacctacattatcttattcatcctgacaataaccctatgacacatttattattatcctctttttatggatgcaacactgagatttagagtattgaagtcacttgcataagatcatatgcttacataagaggcaggggggccaggattcaacccaccctctaactccaaattctgtgttcttagctatgttgctgggttgggaagataaaccacattttagactttttggccctgtgttgtatggatgtggtttggcatgttctggccactgggtgtggtgggttctgggaggtgacagactcagttataattacaggaagaagtctggtctggcaggcagcatgtggaatcaatccatrgtgcattgggagtctggtgaaatagcaccatgcagatggtccatcttggcgtaatgggatcccaacaggtggactgaacatccaggagttagaacatcagtgata

SEQ ID NO: 845837 - DNA, 537 bp, Homo sapiens
tttctgagctaatgtgcaaggtaatgccatcttccaaatgaaaaaaaagttgcatttacccattcctctaacgagaayatatttctcctcactttaaaaataactccattaccaaatgcaaatatgcataatgagatggaattatttccaaatttatacactatatagtttttctagtgtaagtaaactgttgctatgaaaccaaaaactaagaactttactgccccttttgtagtctaattacttaaaaatgaacaaagaatggttttattctgtgctttttttaaagcaagaaaatatatatcagtatataacaatagtgatcttgaataaaggaaatgtgtttttaagatatagatggggcaaatttttcttatcagactaatggcactacagatgacaattacaaactctgaacaaaatataaagtgaactatttgaaggcatttgagagcaataaaaagcagactgaaattggagggaagttaactaaagaaagaagggacccccaaacatctatatataaactcttcccaa

SEQ ID NO: 845838 - DNA, 665 bp, Homo sapiens
gaaaggctgttttaggttaatgtagaattccaatagtagaaagaaaattctatcccatatacaaatgtgacttgcctctcaagagcttctttgaaggttattttggagcgtgtgggggatgaatttggtgcataggataataataattgacatctgtctggtgctactctgaaccaggaactgtccctaagtgctttgcatgtattaattaatctacatataagcgctctttgtattatttccatttacagatagaaaaattgagatgtaaaaagataatagaaacaaggccacacagctagtcagtgttgagctggggcttggttttgactgtctggcttcagtggactctggctttagccactatatgacactcgctaatcaaagtaagttatgttttcttagtcttttttttccctttatttgaaaccaagtttcagatgttgatttgcaagttggcagtcatttctgttttataaagcttattttttattgccccagttttcaaaaaagcttttcttgtttaacatttttgcctgatgaaaataaaagtcaacttttcaaacagattatacatgttgataatagtgctagtcatatgaaccaytaatagtatgttaagaataagtttcaaagtaaaaataatgtaagttccaacatagtac

SEQ ID NO: 845839 - DNA, 665 bp, Homo sapiens
gaaaggctgttttaggttaatgtagaattccaatagtagaaagaaaattctatcccatatacaaatgtgacttgcctctcaagagcttctttgaaggttattttggagcgtgtgggggatgaatttggtgcataggataataataattgacatctgtctggtgctactctgaaccaggaactgtccctaagtgctttgcatgtattaattaatctacatataagcgctctttgtattatttccatttacagatagaaaaattgagatgtaaaaagataatagaaacaaggccacacagctagtcagtgttgagctggggcttggttttgactgtctggcttcagtggactctggctttagccactatatgacactcgctaatcaaagtaagttatgttttcttagtcttttttttccctttatttgaaaccaagtttcagatgttgatttgcaagttggcagtcatttctgttttataaagcttattttttattgccccagttttcaaaaaagcttttcttgtttaacatttttgcctgatgaaaataaaagtcaacttttcaaacagattatacatgttgataatagtgctagtcatatgaaccactmatagtatgttaagaataagtttcaaagtaaaaataatgtaagttccaacatagtac

SEQ ID NO: 845840 - DNA, 613 bp, Homo sapiens
gattactgtgaattgcaattagttttttctagcattatgacttacataaactgtaaagtaatttacargcaacattattcatcttcaatatcaccatccactgttagaatttgaccctctatgatgtatatatatggattgttagtaagaaccgtatgtcggatgtcagataaaggaacagtctattttttttccttccttttggtagccgcggtgtactttagacaagaatgttgtgagtcaaagaggaggctaaggtttcagctctgactcagctttggtaaaataaagtcattaggcagtttgctttggagacttcatctgctgaatgaagatgcttttttatggtagcattgttataggcatgtatatatgggtgtgcctactggtgcacttttaagtaaagagaagagatgagaagagatggccttgggtgccatcaatcctgatattaataaactatatagtttgccccattatctagtccctgcagagaagattaagatgtacaagatccagtcctgctcttaaggagattttgaaatgacaaatgagctatacaaaggaaactatacaaagctatagaattagccctttgattaatttaggttat

SEQ ID NO: 845841 - DNA, 604 bp, Homo sapiens
tgcagtatattaagcttgtccaacccaccttactttgttgttgttgttgttgttgtgttttgttgttttaggcttttagcagcctgaaaccatgkttttttagtttctgtctctaatgataagtggaaaagggggatgaggaaggggctttctcctggcttaaccagaaatagaaactaagaacccatgactctatctgctcccttggatacccctgttgggtatataatacatataacatacaaaatatgtgttaattggctatttatgttatcagtaatgcttccagtcaagagtagactattagttaagtttttagggagtcaaaagtcatatgctgatttgtgactgcataggggggttggcatcccaaaccccacattgttcaagagtcaactgtatttgattgtaactcaaagtataagataaatatacatgagtccatattgttataaatgaatgataaacattgatgaatgataaattttggataaatggaggagaggggacaaatcttccttacagtagaattctaaataatttatgtaaatatatgcccctccaagaggtagagattaataccccttaactgtgagctggactt

SEQ ID NO: 845842 - DNA, 624 bp, Homo sapiens
agtgttctgtatcttatacagtttaaagtgaaaagcagaatgattatatgggtacttgatgtacagtttctaccaaatgtgtattgctatkgtaccattgtaaatttaaaaaattgtatgtcagaccatcgttaagttgggaactgtttatatttattttgtcttctttgcaatggttgcagaatactaggtattaaactctggtaaatcatcacaatctatactatagtatagtttgaagtagaataaatatttgtagaatggtgtttttaaccaagcagattctttgagaatatgatttgatgtctgagccttggatcctgttttcagcgtaggatacctggggagtatagtatttccctgtaatcctttttatttctgtaagattggtagtaatgtctccttttctttctaattttagtaatttgattttaaagatttaacttttggttttttgattttctctattattttttgatcctctgttttttaaatttataccctaatttttatttcctttcttctccttgctttgggtatagtttgctgttctttttctagttacttttggtggaaggttagattattgatttgagaacttttttttcaatataggcatttata

SEQ ID NO: 845843 - DNA, 583 bp, Homo sapiens
caactaagaattttttatgttgctgttctaggctaatcaacggcacttttcagtttatctagtcataaaatggtccattttggctaggtctaaatagattcgtagatagtgctgaattataacttttcatgcatgatttcatttttaaaatgttttgttctgggatttgatccaaatgtaataactgaaatacgattcagcgtccagagaagggtattatatttgaaatgttgcccttgaaggatcatcagaaagttggcaggattttttttttcgttctatgaaacataggcaaaggattttatgaacaactatgatatttaggtttttgtccaggcgtgttacaccagtataatacagtggaatggagtctatcaaaatgtcaacataactttgctgggctgattacatctataataggagtaggtcagaatctattcctcagtacaatctaaagcattcttttggatgtcacactaaatgaaagcatgmttctctaaagactattcagggcatacaacaattgatcatggcatccagtgctgaaaacatgttatgtatagtgcatgagatgtaatattgc

SEQ ID NO: 845844 - DNA, 544 bp, Homo sapiens
gcaacctccgcctcctgggttcaagcgattctcctgcctcaacctccagagtagctgagattacaggtgcccrccaccatgcccagctaatttttgtatttttagtagaaacgggtttcaccatgttctccaggctagtctcaaactcctgacctcaggtgatctgcccgcctcggcctcccagagtgctgggattacaggcgtgacccactgcacccagcctacatttttaacacaactaggagacagataacattttcaatctccagaatatgtataggggttgccaaaagtagctgaaatcaggtataaactagtgtgagaaagaaagagaagtaaagaaagttaaaaaaaaaaaaagcccagcaacagcatagttcataatgtgccagcaaaaacatacagttccagagatatgggactcatcagaaatggaaaagttatacctgctgtttgcaaaaatggggtcagaaattaggatgaacaggactgagattgggctgaaaccacataagcaaagtagcaagagcccagcagttgcata

SEQ ID NO: 845845 - DNA, 558 bp, Homo sapiens
cattagctgggcagagggtggatatttcaccataaattcattaatgtggaccttgaagaccttccatctttatgcaaatgttccttcagtgaaatgcaaatatcccctggatacaatcagaccttgtgctgtcaacaactaacatagtttggatattctttaacaggtaacctctttcttctggcatcataccagaaagtatgatgccagaagaaagaggataatcatttgctcacattagatttcacccacttcacagttttccagatgaggactaactgtctgctttctctttatgcatttgcttaagaaatcttctgtctcaatttatctctctctctctctcccctcccccttctgccccaccccacccttatgggactctaattacacatatttttttctctctttgattcagtttggataaatctattgatctgtcttcaagtttactgattttttactgtatccaggctgccmagcccattaattctttatctcttgatgttgtggggagatttgtcagcatttcccttggaatttgtttagtttttgtct

SEQ ID NO: 845846 - DNA, 391 bp, Homo sapiens
ttacttcatattaaagaaatgctttacaaaagaaaataaaggagcttattttatagccccatttccacaaataatagcaaaggtacatacacayatctaatgttttacacactcattattgtttctcttaaaatttgttgcttatactattttaaaaagcaagcctatagattgttgtgtgtatatacatctacacacaacatatatatatgtgtgtgtgtatatatatatatatatatatatatatatatatatatatggcagcaagcaagagaatgggcctcttcctactgaggtttaacatttgcatgtatatgtatattttgattcacatagacttattgttctttaattacatgaacagtgattcctggttacattattggaaaat

SEQ ID NO: 845847 - DNA, 604 bp, Homo sapiens
agtccttttaaaattttccttcttgagcaccacctcaagtgcagtttgtgaaatctgggttttagaagtattttttttatcttgctatcattttcactaagttaagttcaagaacttcggatatgtattccacagttttttttccgaaaagagatttgttgtcactattgttaatttctacctaaagccatttaaacatcttaattaaattattttgctccgatgttccttatcagcttttgaattttttgaaaatatggggctaaatttatcactgttatctaaaaaataactaaaaaactaattttgtttggttaccacctgttagtatgtgctcttgaatgcatttgattttctttcctgattagtcatagaatttcatgttatttatctcatttttgtaaagagaaggatagtattattttatgactaaagaaaccagaagagtaagactttattaactaaagtatttaattttgctggcagwgttatttctttctccaatacttaaaaattatcttataaactgcacttatactacaagcatcctgtgtacatagctgtttgaagggttcaaatattatttttctaatttaaggaattc

SEQ ID NO: 845848 - DNA, 554 bp, Homo sapiens
ggactcaggctgcgtgaccactggcacaggatccaggctcgtcccttgtcyactacagaccccagatggcctgaatcagatgctcttggcagggaagagcgtgagcaaaatggcaaccaggcctgagagggtcccccagacacagccctgagttctgtctctctggaaaggccgatttgtgcagcaagctcttgggaggtagataacccagtctgacaagcgaccttgaaagaattacagcaataatattttcagttggttgggccaatcttggccaatttctccagagcgttaggtgcgaacgtcagtctgggactccacattgctcatgcatgtgtttgccgtgtcccctttgctgttttaagtgtttatcctgtggcttgtacaagcgacatcgctctcttccctggtgagagccagtctccaggcctccctcccccacactctgctagaagtgcagcgaagcaatgagaacaaggatcttgttccaagcccactgagcaagtgctagcatttagtgaccttctgcaccagtaattcggtccttcggggat

SEQ ID NO: 845849 - DNA, 598 bp, Homo sapiens
ttcaaatgcaataaaatatcacaaggcaaatgggggcagagcaagatcacaaggccagggtgaaattagaattactaatgakgttccatgtcccactgtgcacacattgtcattgataaacatcttaacaggaaacaaggttcaagggcagagaactggtctgactagaatttgccggtctggaatttcctaatcctagcaagcctgggggtgctgcaggagaccagggcatattttatcccttatcttcaagtgcataagagagacactcccagagagaccattttagaggcctgtccctgggagtgcattcttttcccacggctgttccttactgcgaaaaagaattcaggtatatttctcttattcgtttttgcgagaagagaaatatggactctgttctgcccggtcctgcaggcagtcagactttatggttatctcacttgttccctgaaaattgctgttatcctgttccttttctacatgcccagatttcatattgttcaaacacacatgctctacaattaatttgtgcagataatgcaatcatcacaggatcctgaggctacatacatcctcagattatgaagatgatggg

SEQ ID NO: 845850 - DNA, 621 bp, Homo sapiens
taatctagcctccagtattayggttttgtttttgttttttgataacttttatttatttttttcttttaagacacagtttcactctgccgcccaggctagagtatagtggcacgatcttggctcactgcaacctctacctcccaagttcaagcaattctcatgcctcagcttcccgagtagctaggattacagatgcgtgccaccagcccaaggaaaaaaccatcccccttgctggcttttaagaaataagctaatttttgtactattaatagagatggggtttcatcaggttgaccaggctggtcttgaattcctgacctcaggtgattcacctgccttggcctcccaaagtgctgggattacaggcgtgagccactgcacccagcccagtattaccgttgaaaagtctgatgccattcgggttccagattatttgcatgttttgttttttccccctctgaaagcttttagtatcctctttttgactctactgttctttttactattatgatgaagtgtgttggtgtgagtctatacatttattttgctgacccttttgatttgggagtccttcagttctaggagagaaaattttgggtggaaggctgaggattatttctc

SEQ ID NO: 845851 - DNA, 627 bp, Homo sapiens
tatgatcgccaaaattaaaaatacaattgatagcctgaaaaaaagttaagtcaaaaaaaaaaagaaaaaawgttaagtcaaggaaatctcaaagaaagaaaatcagaagttgaaaacatgagagaaaagataggtaatacagagaaacaatatgaaaggaccagcatctgattaatgggaattccagggagggtgaaacagaggaggaaatgatcaaaacaaagcaaaacagcttcccagaaataaagggcacaaacattcatattagaaaatcctggccggacacggtggctcacgccggtaatcccagcactttgggaggccgaggtgggcggatcacgaggtcaggagatcaagaccatcctggctaacatggtgaaaccccatctctactaaagatacaaaaattagctgggtgtggtggtggacgcctgtagtcccagctactcgggaggctgaggcaggagaatggcgtgaacccaggaggcggagcttgcagtgagcagagatgtctccactgcactccagcctaggtgacagagcgagactccatctcaaaaaaaataagaaagaaagaaactcctaccaagttctcaggacagcaaatggcgaaataaaaacttcacc

SEQ ID NO: 845852 - DNA, 470 bp, Homo sapiens
cgatttagttaaacatctttctaggctgccgcatccttatcacctattacaccrgcctgcatccttatctcccattagtctttcttctctctctctcgcttttttttttttttttttttttttttttttttgagacgaagttttgctcttgttgcccaggctggagtgccatggccccatctcggctcaccacaacctctgccttctgggttcaagcaattatcctgcctcagcctcctgagtagctgggatcacaggcatgcgccaccacgcctggctaattttgtatttttagtagaaacagggtttcaccatgtcggccaggctggtctcaaactcctgacctcaggtgatccgcctgcctcagcctcccaaagtgttgggattacaggcgtgagccacagcacctggcctcttctcttttcaagagccacattccatcaggggaagtgtgtaaattggtacactga

SEQ ID NO: 845853 - DNA, 595 bp, Homo sapiens
ctcgggaggctgagatgggaggatcccttgagttctggaagccaaggctgcagtgagtggagatcacgccactgccctccagcctgagtgacagagsgagactgtctcaaaaataaaaagtaaaaataattccacaccaccaagacaaaatcaagttgtttgcttgaccttccaagaaatcaggaaatccaaatccccagataggccagttttagctggcatgacaaggaagtcccctctgctttaacctttacaaggaaagtaactgtgaaacaaccagtctctgttctttgtttctgctatctttggctatttatttatttatttatttatttatttatttatttgacagtctcactctgttgcccaggctggagtgcagtggcacaatctcggctcactgcaacctcggcttcccgggttcaaggattctcccacctcagcctcccgagtagtagctaggattgtaggtgtgcaccaccacgtctggctaatttttgtatttttagtacagatggggtttcaccatgttggccaggctggtctccatctcctgacctaaagtgatctgcccacctcagcctcccagattgct

SEQ ID NO: 845854 - DNA, 499 bp, Homo sapiens
ttttggtgtctgttcttttgctgtcatatcaacaaacaaacaaacaaacaaaaacattacccacaacaatgtcaagcagaagctttttttcttgtttgcttctagtagttatacagttttgaatcttatgtttatgtgtttaatccattttgagttgatttttgtatattgtgtgaaataaggatccagtttcattcttctgcatgaggacatacagttttcaccacaccatttattgaggagactatcctttcaccttgtcaaagattagttgtccaaccataatgggtagatttatttttgttccactggctatagtctgcttttatgacagtgccatactgttttgattactatggctttgtaatacactttgaaatcacaaaatgtgataccttcaaaaaagrgtgtttgaaaaatttctttggattcactgagagtatttttaatattgtctttttggcttgcatacgacttctgatctttctataataagctt

SEQ ID NO: 845855 - DNA, 630 bp, Homo sapiens
gtaagttaaggatgctaggtaaaggtggtgaaaagagctaatattgtactgttagcttaaaagcgaataccaartgattgccctttttgtgattattcttctgaagatatgtatgtggacaggaatttatgtctgatcttgttattctccaacagtaactcaggaagatgaataagtctttagttttattagatttcctgtttctgtgttttctggaatcacatcatgtattggttcaactaaaataaaaaaaaaattgtttccttacactggtgaggaaattttatgtaggatatggatgtttctttaggaaaatataacaataaattagaaagaaataggttttcttcttttcagttgcctttattgtcaggatgtggttatgtttagaaattttttaggcagtaccgttgtaaaagcataccttattcattgaagcatcagttttcattcatactttgtttctactttattcactgaaagttatagctgtcaacttttaaaaagttcatagcatgtgacataccagttgtggagctgtatttgtatcttagatacttaagtagcattgaattatacaaattgtgcaaggtgtttgaagaaataaattttcatcattatatatgcttt

SEQ ID NO: 845856 - DNA, 623 bp, Homo sapiens
aaacatattttttaactcattaaaattttgatttcaatttctaagtgattataagttccagtggactaaatgcattctagttgatcttgttttgtgatcactctactgctgattagaatctctactagaaattttgtattttcaagaggaggaacaaagagcagaaatgggataagtaaaattttaactatcttcttgggttcaattgtattgctctggtgagagaactcagcagcaggcagaagaggacaaaggcatgatgcatattcaatgagtaatgcacttataagtaagtttctttaaatataaaacatattgaagataataatactctattcctagctaaggttatagtcttgtcttctcatgagagtaaatatccttgaggacaggtaccacctctgttcaaaattgatccttcccaacccctacttccacactaccccatacatttgtaggcaggcactagattgagctcaataaatgttttgaggartaactaacagagttatcatcacaacagcttcagttaaacttagagctatttctacttgtctgatgagtgtcattttttgttctgtagtctctccctaatgaatccttctttttagtaattcttaaaa

SEQ ID NO: 845857 - DNA, 572 bp, Homo sapiens
actggataaaatttctatctggttaagatttcatcacttcaagctaaagcggaaggaggtttttatattgatattggaaaagtccttgrttgtattggatgccattattcttatctctaaacatgaactgatgtcaccatttctttatatcagtctcagttttgataacaaattgactctcttaaacttcttaagcagattgataattcatgcacttccttgtatccagtgactctaatcttaaacaaatggaacataaaatactgaaccaattagcaaaatgaactgtttcttaaacgtttataacaatctatggatcttattgtgcctaaatagattaatcattttaatttttttaaaaatttaaaatttctctaaagttttcttttgctttctagatacacaaattacacacacacacacacacacacacacaaacacacacacagtggcaattaaatattcgtgccttgaaaagtgagaaaggatacagatgtccttctgcctagtagacctgtttatgagaggtcctgtagactccctgtactcacttgactcccaaattcattacc

SEQ ID NO: 845858 - DNA, 635 bp, Homo sapiens
tgaggatgcatttctccccaccctgatatgaatgtaaatatacttcttacttgttaaatatgcctctccacttttctagggaactaatagccctcttacttgcctgcccatcgtctgccggttcctctgcctgggtattttgaaagaacagcagttgctcatatcgtttctgttgctcatttgctcccctaaggcattagtcagcctgaaaacaggacgtttaaggtattttcctttaacagttactgatttcctttgacagttttctccctctaccacagctcttttagaagtctaacaccatattcaattctgagaagccactgtgctgtccctcccatctctgctcttgcgcatctggacttcctctgcctggaacgcagttcctctccttcaccacgcagcatcagtcttgggtcaaatagaaacgaatcgtccccttcctggttaagtcttccaagacacaccagaggtccaggctggcattcttggtgtacatccctcttctgtagaacattataacaytgtaattggcacactgccctgttgacttacatttaggcacttttgaaagcactctgtatcttccttctccccctaccacttagcccactgcctttcacaggatatgtctt

SEQ ID NO: 845859 - DNA, 600 bp, Homo sapiens
ggggttccttaaagaatttgttttatcatatgactttttaccatatgtcctaaatacccatctcaaacagtattcaaggtaatataggatgtttacagatatagatgttaaatggacatcttggtcacgtttttgtttttaataatattatccttttaatatttccttacctgtacttctccaaaagccaactcttcaggagatctgggctgtaagtcccaagggttaggaggattcagttctaaaagcaaaagtccgttgttttcatccatttcaacaactagaatcaaatgagaacaaatctggattaatgacaaaaatggctttttaaaagcatcactgaaataggaatgcatggtcttccaaagatcaaaggaaaatcaaaacaaagggtgccactcccttagatcaagcaatatctgcagagactatgacttaagatgaacaccaattcatttctttattcatatggcacttakagaacttatgaggtctcagtcatgtcagggatacacatatacaaacaagacttccttacgactaaatgaatgattgatagagatgacttcgaggcgctatgggaatgcacagggaggggca

SEQ ID NO: 845860 - DNA, 627 bp, Homo sapiens
ttcaacatttgaaaatcattcaatgtaacacactgcattaacagaacaaagaaggaaaccacatcatcatctcaattgacacagaaagggcattygaaaaaaatccaacatcctgttgtcataaaacacactcagaaaactaataggccaggcgtagtggctcatgcctgtaatcccagcactttgggaggccaaggtgggtagatcacttgaggtcaggagtttgaaaccagcctggccaatatggtgaaaccccgtctctactaaaaatacaaaaatcagctgggtgtggtggcacgtgcctgtaatcccagctacttgggaggctgaggcaggagaatctcttgaacctgggaggcggaggttgcagtgagcagatattgcgccactgcacttctgcctgggcaacagagccagactccgtcaaaaaaaaaaaaaaaaaggcatctaagaaaacctgacagctgttttccccctaaaagcaggaaccagacaagcagtttccttggctaaaacctccatttctacatggaggcaactgaacgggaaaatgacataaaaggtatccagtttgtaaaggaaaaagataactgtctctattcacagatgacacaatcttgtatatag

SEQ ID NO: 845861 - DNA, 586 bp, Homo sapiens
gcaagtatctgtatgtgttcattgtgcatatctagaattawatatttttaaatttcattaaactgaattatgcaatgttctaatgtctgtgtgtgtgtgtgtgtgtgtgtgtgtgtgtgtacacagagagaaagcgagtgccttaaggctagcgaacatagctaaaaaaattgctgagaatcagaaggattattcaacacaaaattttaaatgtatggggaaagaaaggatttaataagaatcaccaaaagaaaaaacttttggtaaatagattccaggctaaatttgtttttgctaatatgcagataaaataactagtgggcctcttcttaatttatagatgtgtgaaaattaacctaaagaaaaagtaagagagaaaattgatttaaggtataataagtggcttggagtcaagcaaaattgataagataaaccagatctcttttaagcttgcttctgcaggcaaaataagctttaattcaaaacctcattgaatctgtattagtgagtatgtagagtatatagcaactagatcataggaaaggtcagtctcactatcccctgaggcagagttggttgttcttac

SEQ ID NO: 845862 - DNA, 595 bp, Homo sapiens
tccaatgactcaattctttcttttttttttcttttttttttaattacattttaagttttagggtacgtgtgcacaacgtgcaggtttgttacatatgtatacatgtgccatgttggtgtgctgcacccattaactcgtcatttaacattaggtatatctcctaatgctatccctcccccctccccctactccacaacaggccccggtgtgtgatgttccccttcctgtgtccatgtgttctcattgttcagttcccacctatgagtgagaacatgcggtgttcggttttttgtccttgcaatagtttgctgagaataatggtttctagctccatccatgtccctacaaaggacatgaactaatcattttttatggctgcatagtattccatggtgtatatgtgccacattttcttaatccaatctatcgttgttggacatttggcttggttccaagtctttgctattgtgaatagtgccacaataaacatatgtgtgcatgtgtctttatagcagcataattcataatcctttgggtatrtactcagtaatgtgattactgggtcaaatggtatttctagttctagatccctgag

SEQ ID NO: 845863 - DNA, 634 bp, Homo sapiens
aaaactctggggatcccagtcttaagaggaccctcattgtatcataagatttaaaaacatataatggcttctaacacaataaaaatcrtgaatttaaaataaagaaaagagatctaatatgtctgcccaccttctagcattatgcctttcaataggaatcaagttacaatagatttatagtttttagagcagtcaggtgttctgtagataataaattctaagtatgtaaatggattttccaaaataagctttacagggaaagcatagttctattattttttatggaaatgccaactaccatagaagcaacaattcgagaattattttaaaagccgttcaaaagcaataaatgtttagaatttcagaataagagacttctaactcagactaagaactcaagagctaataactgaaaattaaaaattcagacagtggaatacctcctcttctaaccacaacgtagtaataaaggttagatttatcctttaacattaaacacaaggaatgctggacaaagtatatagtacaactgttttcaaacattaatcaacaggcaacacaggacttggatccctgagatatgagatgcaatggaggttgtcttctgaccacacagaatttttgcttaaaggca

SEQ ID NO: 845864 - DNA, 595 bp, Homo sapiens
tctttgctaaagttctttaaaactaagttagtatctcatcattgagtttctttaaattattgtctagaggaatggattctgacctcatragatcctttcctattcaaacattttatttcttattgaaaaaaaatacacagcttgcttttgaataatgctttaactttttgaaaaggcttaacattcatgttctgatttgattattacaactctattcagtaggtctagaagatttttctcttaaataaggaaacatacacaaagagatgacacagcctgttaagtggcacacatgcgaccagaacttgttctctttgaacacttcaatcctgacttgattctttaccatagtgtctttagtttgatgttaaatcttggtaacaaacaggaatgattttaatatctagatgaagaattctagatattagaatgataaatatttgagatcattaagcccaattagaatattccacatacaacataaaattataattatgtgtgtgtacatcaatagatatattctactatgacagtcatgtgttacttgaagaaagaaatgtgttctgagcaatgtgtccttagtgatttcattatt

SEQ ID NO: 845865 - DNA, 595 bp, Homo sapiens
tctttgctaaagttctttaaaactaagttagtatctcatcattgagtttctttaaattattgtctagaggaatggattctgacctcatgagatcctttcctattcaaacattttatttcttattgaaaaaaaatacacagcttgcttttgaataatgctttaactttttgaaaaggcttaacattcatgttctgatttgattattacaactctattcagtaggtctagaagatttttctcttaaataaggaaacatacacaaagagatgacacagcctgttaagtggcacacatgcgaccagaacttgttctctttgaacacttcaatcctgacttgattctttaccatagtgtctttagtttgatgttaaatcttggtaacaaacaggaatgattttaatatctagatgaagaattctagatattagaatgataaatatttgagatcattaagcccaattagaatattccacatacaacataaaattataattatgtgtgtgtacatcaatagatatattctactatgacagtcatgtgttacttgaagaaagaaatgtgttctgascaatgtgtccttagtgatttcattatt

SEQ ID NO: 845866 - DNA, 566 bp, Homo sapiens
aaaagatcctgattcagcagttcagagctatggctgtgagatctacacttgtgtaaagctcatcagaatattttaatgctgctgtcagggttggaaatcactacaggtttagaattcacttctgaaggtgagtgagaataggaaataggataaaaaagagaatttagagtccctaaaagaaaaacttctattctagcccatgtgttgcgaagtgatactcactgtcatttgaatttgccagaaggcagttattctgcatttgagttttgctcaaactcaaaactgttgtctttcatgtagggcccatagctggttccatagtctaacttaggtagagccatatctggtatcagcagacccaaactatcaaggcaatacagttacgtgaaagttgctaagaaaacaccgtttcccctagtctacacattttacagacattttgggacayagacactgtaatttctttcttaatccatgaataattatgtcttttaaacaagctgttcctaagagttctataataaaatctgtaactgctagccctaaaacatttgctcatagctgat

SEQ ID NO: 845867 - DNA, 573 bp, Homo sapiens
caaagtgctgggattacagacgtgagccaccgcgcctggcctaaactcccgtttttaagccatcagttcttgtgagatccattcactatcaggagaacagcatgagaaaggccagtccccatgattcagtcatttcccaccgggtccctcccacaacacgtgggaattatgggagctacaagattagctttgggtggagacacagagccaaaccatatcaatcctgccttcgcttttagcgactacttcttgtatctgccgttgatgtctcccacattttctcttccaatgttgcttcttcctcaatttgtctccttagccttctagaaatctaacagttacagatctctttgaaattacattgtatcctgtcttttctgcattttctctgttattgcatctacacagacattttattatttcttctttcactgtctctaatgtcaatagaktcttgattttagcaattggggtgggagttgcccctttgatatgataaaatttctttgctgttctttcagaaaagttttctcagtgaatacaaatttggatccatatgaaatatctctgcaa

SEQ ID NO: 845868 - DNA, 538 bp, Homo sapiens
ttttgaagaagttgattccagccctcatgaatgactttgaagagttcaagatttcagggtaggaagtaactgcagatgtggtggaaaacaaaaacaaaaactagaattagaagtagagtctgaagatgtgactgaattgctacaataaaactttgatggatgaagagttgctttttgtggaagagcaaagaaagtggtttctttagatgaaatgatgaaatctacttttggtgaaggttaaacattgttgaaatgaccatcgaggacttagaatatttcataaacttaatcgataaagcagtgacaaggtttgagatttttgactccaaatttgaaagtagttcaacagtgggtaacacgctatcaatcagcatcacatgctaaatgaaaatctttagtgaaaggaagagtcaatcgatgaagcaaacttcattgctgtcttgttttaagaaaytgccacatccgttccaaccttcagcaactatcactcttacagtagccatccacatcaaggcaagatcctttaccaggaaaaaat

SEQ ID NO: 845869 - DNA, 544 bp, Homo sapiens
aacctcccggccttccaagaaggtttgtgtctatttcctataactttatctttataatttttcccaccaaaagrtccgaacccctacaggactgtttctttctaaggcttcttccaactctgaaatactctgcttttatggctccttgcttggattccacccttccagactagatttcctttaacagtgtaaatgttctgtttctccctatggcaggggcatcttccatgttctgggcctaatgaaaatggacatggtgaactataccattcagagctttcaaccctacctgcaggagcattccatccagtatgaacaagataaattccaggaactccgtgataaacagcccagtatgtttaaaattcaaggacaggagaggggagatttgacctccggttttatagcaatagagctattttctatattctgaatagaaagtttcttccttgggcaagggttagggagaaggagtgtttctctaagacagaaagatctacaaaatcacttatttatagatgaaaactatgtctcaaagacttcg

SEQ ID NO: 845870 - DNA, 512 bp, Homo sapiens
gcactctgcacttgaacagtagaaataaaatttttctatgagaaaatccagagtttgaagcccaagagtcatttcagacaccttcttctcttttccctcascagaactccacgatgcgcatcagttaggagttttctggtttctttttttcttccttccctaacaaataagcagcagcaataacaagagctcaaagttactgagcttcttttgtttaatcctcagaccaccatagtgtctaacaggtagacaccgtgatcgcaatctccatttcacagaagagcagtgaggccggggcaacatgatatttgcccaattcactcagctcattaagtggtataggatttaacgtggggagattaacccccgagtcctgggggctacaggccatgcagggatatgcagcacatagcagaaatctttgctgagtcaggtttgagtaattttcaagttttctctgtcaactttcttaaatatagccttttctctatctctcagcatccctcacctgt

SEQ ID NO: 845871 - DNA, 561 bp, Homo sapiens
tctcccaacatattttccatttgtctggactgctatcctttgtcctggactcctgtcacacactgcatcctcctgacttcscctctagctcaccccaaatttgggctcccttctgctccgactctctgcagagcccctttgctcaacaccacagttttggatttgctctgtattcaatgactatcttccaagttcctgccacgtctattcactgtgccaagcccatgaaattaatgagagaaagagagctccctctaggaactctcgatgtggggaagatgacaaatgtcaaaaaccgggggactgttcttaccaggggatcattggaaggccatctaatccagtcatggagttgctgaaaggcttctagaaagctggtgctcttgtggaatgatggccaagaaatagcatatgtgagacctctctagggactctcggaactaattggggagagactgtagggactggaggcccacagagaagctagggcagggccagataaatattgttttatggtcattgttatgatccactcctatgaggataagcaagaagcccttt

SEQ ID NO: 845872 - DNA, 611 bp, Homo sapiens
aattttctaaaatgagattgatttactatggaatttaactcctgccaatactggttgttatggtctcagggccttagagtagaaagcaaagctacattcactattggtgttttgggcttaagtgctgccatctgggaggtcaaagagaagtagccacataggttactgcaactgcatatctaaaggcaggttcaacaacagcacttaaactggcattcagggagttaactagtctggggcaagcactggctaaagttcccccagagtcttgtctacagtgggggcctgtaaaggagaacattcccaatggggttaccactcatatgtcagcttgcaatggaaatatgtttcgtaaatgaatatatgagaacacacacacacacgcacacacacacactaaacaagtctgatatagacctgtaaactatataagcaacaatgctgattgactctttacaaatgtgtatgtgcacgtgtgtataacatagcctcctttgagcccggggacaacctgtgaaggaccgtttgttgtgggtgrgagaattcttttcaatggctgaagtaaagaggcaagatttggtggatctgataatgtgaggtcaggagagaaa

SEQ ID NO: 845873 - DNA, 604 bp, Homo sapiens
ctccttccccaaggcatgaagagcgtaggacttggagcatgacaatctcatgacagcctggccagccctatttctcactgtgtgaacttaagcacttcaactgaacctttgagccttgaattcttcaatgacagsgggactggtgcccagtgtctattccactttccttctagcatgccttcctgatctgcagaggcttggaaatctgacagtacagatgcccttgcagctgggtgcagggtttatttaggttcagccaatcagacactctcaagctggatttagaaggtgaaagtcaggttagaggctgtgtttctgctctttctcctggaaatcatgggaggattttttttttttttttaataacctgtggtgttttgtaactaggatcctaagcactgaatggcagggccctggtggtggtatgtgccaaaatgcaactccaagcttcttttagagaaccaaaactgtgccaaaatgcacagttccagtggcagcatcccgattcctctcctgctcgacaggcagaagcagctctcttcaggcagaccagttttacagtgaggtccgagacatagcacactgagacctagcctgctccaca

SEQ ID NO: 845874 - DNA, 583 bp, Homo sapiens
ctgccctggccttattctgaggctttgcctagactactgcaatggtcttatttgcactcttcttcccttatctttcttaccacctgtctacccccagcacctttcacctatctttctcatcattatcaaggtaatcatttctaaacacaaagtgaaactataacacctctcaatcctgcacatactgtgattttgcgttggaattttactacgtctcctaatttactgaatctttcagaaccccgttgaggttccctcctccatgcagcattcctgaatgcccccatccctaacgttaagtcactttcctcctgtgtgtctgttccaactatacacttttgttgttgtgctcatcttatcaaatgtaccttaacctacttgttttctgccctttaaggcaaagagtcattgtacgcattttgttaatttcagcacccagcagagtaaaggggcactcygtatgcgttcaacaaatgctgctaagttgaattaaatatctatttaaagtgctctgttaatcttcctcacctttattacctttggtactgacacctatgattcttcccattttagtgttctaatt

SEQ ID NO: 845875 - DNA, 614 bp, Homo sapiens
tataaaatagggataaaacacaccttccttagaggttgttggaggcctgaatgagatatttgccatgtgtcttacacagtactggggaggctggacaatcataataaatcatgatggttaagtttctgtgtcaacttgattgggctaagggatgcccagatagctggtaaaacatttctgggtgtgtctgtgaaggggtttttggaagggattagcatttgactcagtagactgagtaaagatcacccccaccaatgtcggggggcattgtgcaatctattgagggcccaaatggaataaaaaggtagaggaagcacaaatttgctctttctgcttaaactgagacatttgtcttctcctgccattggtcattgatgctcctggttcttgggccttcagatctggaatgaatcacaccactggctttcttcgttctccatcttgcagatggcaaaactgggatctctcagcttccacaatcacaatagctaattcccacaacaaatctcctcacatatactgtgtgtgtgtgtgtgtgtgtgtgtgtgtgtgtgtgtgtstgtgtctgtgtctatgtgtgtatgtattctattggttctgtttctctggagaac

SEQ ID NO: 845876 - DNA, 610 bp, Homo sapiens
actatggaatttaactcctgccaatactggttgttatggtctcagggccttagagtaraaagcaaagctacattcactattggtgttttgggcttaagtgctgccatctgggaggtcaaagagaagtagccacataggttactgcaactgcatatctaaaggcaggttcaacaacagcacttaaactggcattcagggagttaactagtctggggcaagcactggctaaagttcccccagagtcttgtctacagtgggggcctgtaaaggagaacattcccaatggggttaccactcatatgtcagcttgcaatggaaatatgtttcgtaaatgaatatatgagaacacacacacacacgcacacacacacactaaacaagtctgatatagacctgtaaactatataagcaacaatgctgattgactctttacaaatgtgtatgtgcacgtgtgtataacatagcctcctttgagcccggggacaacctgtgaaggaccgtttgttgtgggtgggagaattcttttcaatggctgaagtaaagaggcaagatttggtggatctgataatgtgaggtcaggagagaaatggatcctgacagccagttgagg

SEQ ID NO: 845877 - DNA, 512 bp, Homo sapiens; identical to SEQ ID NO: 835422

SEQ ID NO: 845878 - DNA, 474 bp, Homo sapiens
gaggcatgtttctaaatggcctgaaagccccctctttctgcctctcggaaaccagccaccatgctgtgggaagctcaagtcatgtgcagaggccatgtgttggtgttcttattgacagcckcagcgtagctcctagctgatagccagcatcacctggcagcacgggagtgtgccacttagatgtccatccagcccacccttcagatgactgctgtcctaggtgacatgtgactgcagtgcatgagagaccccaaatgagaagcatcctgatgggcccagtcaacccctagaaccacaagagataataataaattgttgttttaaggatgctaagttgttgagtggtttgctatgtagcagtagataatcagaacatgtatacaagtcatgtgaataagcatttaactttgatttttctttccaaactataataaactgttgacccactaccatttattgatctcttttcatcca

SEQ ID NO: 845879 - DNA, 474 bp, Homo sapiens
gaggcatgtttctaaatggcctgaaagccccctctttctgcctctcggaaaccagccaccatgctgtgggaagctcaagtcatgtgcagaggccatgtgttggtgttcttattgacagcctcagygtagctcctagctgatagccagcatcacctggcagcacgggagtgtgccacttagatgtccatccagcccacccttcagatgactgctgtcctaggtgacatgtgactgcagtgcatgagagaccccaaatgagaagcatcctgatgggcccagtcaacccctagaaccacaagagataataataaattgttgttttaaggatgctaagttgttgagtggtttgctatgtagcagtagataatcagaacatgtatacaagtcatgtgaataagcatttaactttgatttttctttccaaactataataaactgttgacccactaccatttattgatctcttttcatcca

SEQ ID NO: 845880 - DNA, 581 bp, Homo sapiens
cttagactccagacctatggctttatcttgtcaatatcattaatattcacgggacccaagctaaggctgaagttagtgagccagctctgggtctggcaatgtactctagtgagaagatcaccggccttgaagtcaggcttgtgtctgaatcacagctctgcattttaactagctgtgtgacctcaggtgatcaccatacctctgagcctcaatttccctatctgttaatttaaataagggtgttggtatgtcaccaaaatcccttctagctctaagattttaattaatttgttaaccaatggaattgttgagttccccccaatgtttttgcataatctttgttataactgtgttttgtttacattagaatagtagaacaacaacatcaacaaaaaacccaaatcatccccaacttgatataattgcttctctaccccagctgttgtgactttgtgtcacttagctgttgtcaccctgctgagctagagttttccttggtaaaagaaaatgaatgacagttwatgttttaaagggctgttgtgagaattaaaatatataaatgggatagtatatgtaaaagt

SEQ ID NO: 845881 - DNA, 628 bp, Homo sapiens
ggcgtgctgtagactagtgagtgtcaagctcatatttaacctcctccagtctctctgccttctgcaagaaaaygcttccctagagctagattgatcctacaaataactgcacagaagctaaggcacaaagggagaggaaagggatagttagccaactctcaccaccatgctgggaccctaccatagacaaatgcagccaggctgggatttttcacctaggataaaattaaggagtttagattcagaggtgactgccctggggtcaagcagctaggaatcagaaaagccaggtttatctgagttcaaagtcagtgctttcaaattttcaacaaattgcttttaatacatcagtagtcttcatcctttctggagtcagagaaccctttgagactgcaagaaagctatggagactttcatcccaaataaaacacaaatgcagatgaacaacactttgcctataccactaaggcatttatgaccctcccaggctcactcaatctcactcactcatttatttcaataaacattattgaatgctatcaatatgccaggcactggctaggtattagccaagcaggcatggtccctgccctcacagagcttatagtgcagcaagagagaaagatgt

SEQ ID NO: 845882 - DNA, 640 bp, Homo sapiens
tgggggttcacagtcttgctttcacatttctaactatttttaacaaaatgttaaaaatactcatgttaaaagacaacctttaaacatgttaccaggcaktacttttggaaaacatgttcaagattgagttacttctccgttagctcccctctgcggtgtaactctgctgctaggggcagggagaaggatcaatgagcccactcaacaaaatataaaagggctgaaactcatagagatttcctgtcttatattgaggcaatcagtaaaattaatattaactgtagctgcagttttacaggcacatattccaggacagatgttctgctacttgatttgcatacattatgccctttggtctctataaatcctaacaatgagaggtaggtttcactattgctttttaaagatgagtaaatggaagctcatggagggaaaatcagggatccaagaacatctggattgccattgtgaccttccttatttctaagcactcttccacaatattaggctgcctcccactctgctacattgctagagattcaagttcaggcagttataaattctggaaattgaatattcaatttctgttgcttctgcccattacatcacagtaatcagcaataaatctcttaccatagca

SEQ ID NO: 845883 - DNA, 646 bp, Homo sapiens
aggtggatattttggcttggggaacttatccatgggaaaaaaaaatggggaggagaacttgcaattaggcaattttaagtcccccttgattttaccagatgtcaaagaagcacaaaatatggatttttaattttaggtcttacctataaaaccagtgcaaaaaaaaccccacaagtaaataaatgcatatataaataataaataatataaaaatagtaaaaaaaatgcattatttatacatgaaatgttacctacacaaatattttaagcatgatttacaatagaaccagtaagttctcccgttttcagatattaaatagttataaaatagataacaaattatagtaaactagaaaatgttatttttattttgttcaattttagaataggaacaaaaacagtaaaaatatcagaaggaaatctaacaaaagataacacatttatggagataattacaaaagtctttgatagagtgtagcagaaagataaattaggtcaaccaccactttttaaattttctggtaaatgtgcattattatattgcattaattaaaaaaaactgaaaaccacatttctcacattccyttgcagtttagattccagaagatatttaagctctatcaatccaacttggatttgagcattg

SEQ ID NO: 845884 - DNA, 618 bp, Homo sapiens
caatagaggaatataaggaaggttttcttctccagtttttcccctttagccttcctatcctcttattccctacctaactctaccacccccaacccctccgagggagactgcaacccagcttagtgaggtatgagcctgggagaagatcagaaagtatcaagtccttgaagatgtggtatccagagatgtttggagctctggaataatatgtgaatgagcttcacatctccttagccttctaaagtctaagaaatagctagaaggatacattgagtctaccctgctactgaagtttgaaaaatacaaaacaattttggaacacagatgcttgtttcaagggccaggcactatgtcccagtctatgacagcagatattgctttgtttttcatcatttaataacaaatcttgacccaaaaagcagaaagctctgcaatcatagaggagagcaaagaggaaatagagagacagagagagagagagagagattggaaattgtgaaataaagctgcagagrgatagaaatgacattgtgaacaaacaataataatatgtgcattttctggtattcaggagaaaaattcacaaaaataattatggaggaattaaaggaagaaaac

SEQ ID NO: 845885 - DNA, 461 bp, Homo sapiens
aattttacaaaatatttgaacagcactgctcaaacctatcaaggttataaaaagcaaaaaatgtctgtgaaactgccgcagccaagaagaccctaaggagccataactaaatgtaattttacrttatgaaaaggaacttaaaaataactacataaaaaaactaagaaaatctgaataaagtatggacatgaaataatcataacacactaatattagttcattaatggtgacaaatattctagcataatatgtcagtagtaggagaaactgggcatgatatatgtggaaactccgtggaatctttgtgacataaccgggtatcccagcctcaaaatacatttaaattgttttttcctctctggctctcagccttgaaacatactttgaaactctttgtttttcccttttcctccagccacctctgtgaataatgctcacttatctaattatgtactttctta

SEQ ID NO: 845886 - DNA, 566 bp, Homo sapiens
acagcttgatgaatttttacccagacatgccrctatgtaacttacccaggtcaagatcaagatttaaaacactcctgcctaggagacaccctcatggccattccttgttagtgtctaccccacataactattattctgactcctgccaccttcaattacttttacctgttcttgaacttctgggggtaggtaaattattaaacctttctgagcctcagtttattttttaaagtgatagtacttgtgctatagggttggattaggagaatcaactgagacaacacatgtaaaatcattcgagaaatatttgtaaaacccttgatgcttaataagttaaagctgtttgtttatgaatggccattgttgacctcaaagtctttgcctgtttctcacccagacgaagcaggcatttccccagtgctcaccataattcatgttcctgtgccctccatttccttccatgtcctgtgactccctgaacgcacttcagagactgttccatcagtggctttcaggatttttttttttttttaactgaaaccagttcttcttgcttaataaggcag

SEQ ID NO: 845887 - DNA, 578 bp, Homo sapiens
agccagcctaacaagctaaatggtagggttttgtaattgaattctaaaatgtgaaacgcctgatgcaagaacatttcattctgatcatggctttggaaattgaaaggccttcagtacgtctcccactacccaacgctgaatgcagtctgatttgggtttccacaacttgtgaagcaagggtgtgacaagattcttaatggagggtattcatgctgagctagcatggcagttagattcagcgggctgtaaaatagctcctctaaagaaaacaatatattcttaagagccataaaagagaacccttcctcaccttgaaggtattcccacccctcatcttccccccaccaagcgtaggaggcagagagctctgactctgtgccaggcactgtgctaactactttattcttgactcattcagtcctctgtgtgcctttatgaaggaggcagcagtgttattcccattttayggagatgaaactggagcacaaagaggtgaagtagctgacccattctgagagctgctaagtggtggagcaaggctgccagcccaggcaacactctgctcctttccggctcac

SEQ ID NO: 845888 - DNA, 440 bp, Homo sapiens
ctgagtaaagatctgataattaaagttaattcttttttattatgaataatatacacaaagtctggacatgctctaaatatattyacaatttaaaaggaatgtatttgccatttcaaacaaaaaaagaatatcatcacaaaatacattttcggtattactagactagtgttcttttaaatatctgaattaggccgggcacagtggctcaggcctgtaatcttagcactttgggaggctgaagtgggcggatcacttgaggtcaggagttcaaaaccagcctggacaacatggtgaaaccctgtctgtactaaaaatacaaaaaaaataatctgcatgtggtggtgcatgcctataatcccagctactcaggaggctgagaaacgggaatttttttttttttttttttttgagacagagtctcactctgtcacccaggctag

SEQ ID NO: 845889 - DNA, 607 bp, Homo sapiens
caagctctcctgggatgatgatcaccatcaagcacatcagccatagcttctggctttattttgtaactttctagcttatgttaattgaaaagttttgtgttatttcttttcgcctctcttggttctcaggcacatgctatgaaattgattggctcatggcaccctatcatcatcagtttattgttttattttattttatttcatttattttattgagacagagtctcactctgttgcccaggctagagtgcagtggcgcgatcttggctcgctgcaacctctgcctcctgggttcaagcaattctcctgccttagcctcccgcgtagctggaattacaggcacgtgccaccacatccaactaatttttgcatttttagtagagacgaggtttcgccatgttggccaggctggtctcgaacccctgacctcaggtgatccacccgcctcggcctcccaaagtgctgggatcacaggcaggagccaccgcrcctgggcctattttatttttactttttgttgttgttgttgttcccccttataccacattcccaatattgtttcttccccttacgttttctcccaccatattggaactacattaaaaaa

SEQ ID NO: 845890 - DNA, 603 bp, Homo sapiens
atttaattaataatttggagcattaaataatttttccacgaaaattaacaatgtgaccgtaaggataaaaataactcatgttaagaagaaaagagaacaacagacatacagtgtaacagcagaaacatttactaatcactcttcttcggccttttctagagcaacaaatctaaacagtgctatgctttatgttgctttcttgcactttacagatgccgaaaactttcaagtttctatctcctagaagtggggtgggggaaaagctggttattattcctaaacccattgaaattgcatttgtggcatcaaaatggatttttttaaagcaggatgttggattgacagtaaagcagctgctctgcaacaaacgaaagcaaaaattaataagagaccttagcgaaagaaagactattggttttgcacacccagagcaaattggctggatttagaagagcacactttgatcttttccagactaattactgctctgtggtttgactgttttgtgcattagttgcccttcatacaaaamcgaaactgctatggtacacagctgtaatacaaatgaaaatttgacattcagtaaacaaagcatggcaaggg

SEQ ID NO: 845891 - DNA, 627 bp, Homo sapiens
gtcattcaggaggaggacactgctgtgctgcccggtcccgccggaccattccagttcaaagagtacctgctgcagttggtggaagtgcaaagcctttyctgtttgataagaaactggccaagatacccggcttatggggagcactggatgaccacagccacctgtggacttggcaatccactggttcctgcacccgggtaagtttccgggcagagctgcatttattgacggctatgaagaccggtcagtgaaagtgaaactgcatcttggcatcttggcattggccactgagctctccacttatgcactgtgtatgtctctcccatgcctaaggacattctgggggtggatgttttgcacggcttggcagctgtgccgtcacagacttcatggacccctggacaatggaaccgggacagtccactgagagccagaaagagtttgccttcgtgggaagatgacaacgggctttctcagtgttgctgcagggcttgcatagccccatcatatatcatggttttgttgatgatattatattaacctctgatttgcttgcaggtttagaagaggcagcacccctcttgcctgggattgggataatgcagctgagacggccttcctggtagc

SEQ ID NO: 845892 - DNA, 501 bp, Homo sapiens
tttttcctgagcagaatctaggttaagaagctttgcaggctagtctgtatagactgatattaacttttccattaagtagggcagactgaattactgtttcagaatttgatgatggatgaagaagcaatgcaaaagtgacaccatcctatatttgtagtggtgacattatcaatccatttcctttgtgttgttaaagtaatgggcatcctaaagagacaagaaatattttttttcttttatgtatgtatgtatgttttttttcttaagcatgttggctgtgaagagaatccgaaggaagctgtcatcaaaactgagttctaagctcagaaaagtgaccaccgtgaacatccccagaaaagtggtctagtacagaaaacaaagaccatgtcaactctatgaagtttcagcttctgaacaacagacagaaaggcaccgtttcactkgggaataaaatatgattccattgtcttaggaattaccaagcggcagcatgttctatta

SEQ ID NO: 845893 - DNA, 552 bp, Homo sapiens
aatactctctttggccatagaacagagtraaaccgctggagagaggcctctggctcctgactttggcctcgtatgcaagttctctaaacagctgagctaacccctactagtgctaataagagtttgtaattagacctgaggtgaacagaactaagcgttcacctccagctccctaccgttccacagcaataatcaaacctgaagacatagagagagctgtttgattcataaatatgtaaagtggatagaatgatacatctctgttgaggttatgatatgaaattcttatttgtaattttttaaatcttcaatgatagatacaacaaaactacaattattatttgttaaaaaccatagtttaaaatgttattttaaaagatttttattttctatatggaatagggtaataatcataaacagtagaagaatagagtcataatttatgactgtgcagagtgctagattgtattttttcccaatgaaatgcagagatagaaaaatattatcatgatttgtgttataacactggagtcagaactaatacgaagaagt

SEQ ID NO: 845894 - DNA, 646 bp, Homo sapiens
gcaggccagtgctttgtgcttggagggcacagttgctaagggaacgcatgctgatgaaaagagaaccttgccaagtgttcatttcctccttccctcatctctttctgtgttctcatgacccagctctcatctgaaacacaaactgagtttgaggaagcttaggaacagtctcccctctagcccacacccattttcatctgcttccagttatatatgaagaggggacagtggaaataatccagaatcagtataaacccattatactgctagtatgtttaagtagaaacttagcaatagaagtatgttgctattgctatctttactgttttagtacctagaaccttcccattctttcttcacattctttatagattttatatcagtccattacactttggcctgaaggagtgttcaaatacaactgatttttctgggactactagatgtctgtttccagtatttggggggcatagaagaattccttgagggaaagagtggcccaggagtcaccctttgtaaaacactgcacccacagaatgggatctacccagtggattatgatccaccaaggtttggcttaaaccacayttagctgactgtcaagtccagccacctcctctaggttggcttcatctcaatcagagag

SEQ ID NO: 845895 - DNA, 599 bp, Homo sapiens
ttttttcccttctacttcatttatttttggttgttttaatacagtttccaattacagaaacaggatttctggggagaaaaaaacaattttaactgctcataagatgagattctgtggctttgctctttgcttttttgaatagctttagcttttatatttatatgattcttattagggaaacggtgctaaaagttggtacttgatactttcaggaaagtatatgcaagatgatataattaagaattctttgcagcctaattgatagatatgtattttatttaaaaaattagaatatgaatcttttatctcatctgcaactatggaacattgcctctgatagctagaaatattaaatgcaaattcctggaaaatcctcaaaaatcacttatttatgaaatagtagttttgaatcaatagccattaaaaactcttttgtaacaagaattgtcaccttattcataaaaatgtagtgtgggctaaatcatgtcctctaaaatataactgcaatgttrtaacagcctgatccgacatggacccttatctgttccctcagaatttgatgttggtattgcatgacacagggtgtcgttattgtgaat

SEQ ID NO: 845896 - DNA, 488 bp, Homo sapiens
cttctcatggggacccaacctcaagagcaagcaggactgtgtttcccagggctgggggaatgtccagctcccttgcaagtgggcttcttccctgcagagcagctcgtctggttgcttgaagtgttactgacacatcactatccaaggaccctggggcatcaaggtgtgaactcccagcccaggctgcctcaggcagggattcccgcagtgctgggcacctgagtggtacccacggagactgaggctggggtagcctgtttccagtgctgactgctgcttgctccctggcatgtggctcctagaagcagcagctctacaatgggggctggggcctcagtggctgcatctagctgctcaggtggccttgacccctgcctgagtgtgtgtggggcrgtaacaaagtgggggaagaagctgtgctcacatattttcttgacagcagcaaacatcaaaaggggtctcaatccttaaataatgataacaacccg

SEQ ID NO: 845897 - DNA, 488 bp, Homo sapiens
cttctcatggggacccaacctcaagagcaagcaggactgtgtttcccagggctgggggaatgtccagctcccttgcaagtgggcttcttccctgcagagcagctcgtctggttgcttgaagtgttactgacacatcactatccaaggaccctggggcatcaaggtgtgaactcccagcccaggctgcctcaggcagggattcccgcagtgctgggcacctgagtggtacccacggagactgaggctggggtagcctgtttccagtgctgactgctgcttgctccctggcatgtggctcctagaagcagcagctctacaatgggggctggggcctcagtggctgcatctagctgctcaggtggccttgacccctgcctgagtgtgtgtggggcggtaacaaagtggrggaagaagctgtgctcacatattttcttgacagcagcaaacatcaaaaggggtctcaatccttaaataatgataacaacccg

SEQ ID NO: 845898 - DNA, 605 bp, Homo sapiens
catccagctacaagggatccttaatgagattatcagcaaatttctcatcagaaattttggagaccagaggcagtgggccaacatatttaaaatgttaaaasaaaaaaaaaaatcaaacaagaatcctgtatctggaaaaactgtccttcaaaagtgatggagaaaatgacattcccaaataaacaaaagctgagggaattcattaccactagacttgtcctataagaaatgccccaagggtgtcctgcaaagtaaaataaagaacagtagatagtaacttgaaaccatatgaagaaatgaggatctcaataaaggcaattataagagctagtattattgaaacaacagtttgtaagtttactttgtgacataatttaagagactactttaaaaaacaatgattagtctaaaagcttaaattattataactttggattgtaatgccacatttgttttctacagaatttaaaagactaacacacttaaaataattattagtttatatttttgggcacaaaatgtataaagacataattatgtgacatcaataatcaaaagggatgcagatgcagctgtaaaggagcagaatttttgtatgtttttga

SEQ ID NO: 845899 - DNA, 547 bp, Homo sapiens
atacctggcacgtagtagccactcaataaataattgtgcaataaattccagaaatgtgccaaaattattttttaattgttctrcttttggaggattcatttattctgcagcctaattttggacaattgttccatttccttttgttacactgcttttaaaaaataagacaaagtgtatatggtaagagaaaaaagctcatctgaaatgcaatctctattcctccctttctgttttacctgaatataattatatacttttacattatttaacccaaactacatatatatatgtgtgtgtgtgtgtgtatatatttgtgtgtgtgtgtatatatatacattcaactttgcattgctattttctacatcattttataatttcatatagtgtagtgcctgcatactgtcctttgtatatgacatttagtgttttgacttataaacacttaccttaaaacactaatacattatgcagtgtactagtgttcattgtacagtgtactaatacattgtacaatgtcctctgttttggaaatttccccagaagaatt

SEQ ID NO: 845900 - DNA, 547 bp, Homo sapiens
atacctggcacgtagtagccactcaataaataattgtgcaataaattccagaaatgtgccaaaattattttttaattgttctgcttttggaggattcatttattctgcagcctaattktggacaattgttccatttccttttgttacactgcttttaaaaaataagacaaagtgtatatggtaagagaaaaaagctcatctgaaatgcaatctctattcctccctttctgttttacctgaatataattatatacttttacattatttaacccaaactacatatatatatgtgtgtgtgtgtgtgtatatatttgtgtgtgtgtgtatatatatacattcaactttgcattgctattttctacatcattttataatttcatatagtgtagtgcctgcatactgtcctttgtatatgacatttagtgttttgacttataaacacttaccttaaaacactaatacattatgcagtgtactagtgttcattgtacagtgtactaatacattgtacaatgtcctctgttttggaaatttccccagaagaatt

SEQ ID NO: 845901 - DNA, 547 bp, Homo sapiens
cttttcgacttgtttactttggaaagattttcttaaataatctgtttattgaattgttaaaccaacagtaaccagtctggtttgtccatttatcattatccaccaatgagaaatattatttgaatattatgttawttttaaaaatgtaattttatctaaatttttaccatcttattaatgaaaatataaaatagatttataataactctgacaggtagtctttaattttatgtttgagtgaagaggagaaaccaaaaagtttttgtgatgaactacagtgtttaaagccttttgtccacatgcccattttgcctttagtttgttgttaatgttgttcagataaagcagtgaaacactttctctaccatgactcttcgtttagattttttcaccttctccataatctttatttgtcttttaatgccatccaccatccccaaccctcagtacttctcattttctctctacaaagtatgtgggagccttttaaaagagagtatgtatccttgacctttgcaacttttaagtttcctttatcaagaatttc

SEQ ID NO: 845902 - DNA, 619 bp, Homo sapiens
aatatggtatgtaacatgcaatggaatattgttacgctgtaataagggaatgaatttttgagatatgctacatcagtgcatcttgaaaatattatcctaagtaaaataagccagacaccagrcagatattgtgtgattccatttatacgaaatatctagaattttgacatagagacaaaaagtagattagaggtaactgggggatataggaaggaagggatggaaatttatttcttaatggttagagttacagtttgtgataatgaaaaacttttggaaagagatagtgagagtatatgtacaacatttgaatttaattaataccactgaattgtacacctaaagatgggtaaaaggaccagttttgtatgtagcacaatttttattttttatttatttattgagacagagtatcactctgttgcccaggctggagtgcagtggcatgatctctggtcactgtaacctgtgcctcgcaaattcaagtgattctccaccctcagcctcccaagtagctgggactacaggcgtgcaccactaaaaaataacaaaatttttttagtagagatggagttctcactgtgtagaccaggctggtctcaaactcctgacttcaggt

SEQ ID NO: 845903 - DNA, 558 bp, Homo sapiens
ctttcattcatacaattcatagcagtctccccaacactcagatccagcagkggggaacatggctgagttttgagccaactctttaagcaaggaaaggtaactcaaatgctggaagtattacatgatagaatgcccaggcctggaaacattctgaagtctttttttagttattcagaaatgacaaaggaaattatttactccagaaaggtttgcagattggtgtggctgagggatccaagaaagcatttttcctatgtcttcctccctctccctactcctgccagtaaccaagtgacaacaatattgctagtcatctatttttttaatcatgtgattttcttacaaaagacaaggacaattgctcagattgttgtttccaaaaaaaaggcacatgatggttagatgagattccatacagctgttaaatgcttccagccagtcctatccaggattttgaaaattatagccatgtttttaatggaataacaattattgaagacagaaaaatggagtcagaggggaactagaaacttacagataatattgatttaaaaaata

SEQ ID NO: 845904 - DNA, 495 bp, Homo sapiens
agacctatgtatgtcataaacattagtcttatttctttataaccacacactgcactgctctcacttaacatgaggctttttwatatgttaattactggaaagattgactggtttgggaaaaacagttcatttttctcttgacactagatattgcctcagaactgattcaaatactaaggtgaggctgtcagtgccctggtcagccaatgtcactagaatatttaagtcttctcaaggtgctgcagccaagccacatgtgcaggcatcacacattgctggggccaggggcctccgagctctggacacagccagcatgtgcagagcagcagcaggggttggcagagcagggacctcaacaggccagttgggaagctccatgaaggatggttctgatgttctgtctctgtggctggaagaagtgaggtgctgaggctggtccccagagacccctgaggacacatgccctccccaggatgctcccagacccactgtcta

SEQ ID NO: 845905 - DNA, 397 bp, Homo sapiens
tagttgctatttaataatgctaaaactaatcaataaaaagaaaggggaaactgtaatgttgctgtctccaccattatttaaatataaaagaactgtctttcaatgaagttcataggattagtttccaattsttatttttcttgaaaatccattttttggtggaataatgttgttatgtagtttgctaaatacttgcttttttattaaatttaggaatggttcttaaatgttttatattgaaatacttatcatttttttcctatgcccttgaggtgatgtgttatataaattgatttattaatatttaattatctgtacattcacaaataaggcatatttggtcatttattattttgctgcattgttacactagagttattatttagcatagattttt

SEQ ID NO: 845906 - DNA, 486 bp, Homo sapiens
cgccttggatgaaaggagagttggtcacaagaccatatttagctcacaaaaaattcactccaactcagaactcagcagcaccaacaacccaaagccaagatgtagctgccccgaagagaaaacttcccctttactaaaatcatacttggaagtctgtgtgatacaccaactctcccaactcaattccgatcaagtcaaaattcttggtcttagaattggggggcaaatgaaacgtgaggattaggaccaagccacacgtgcctaagcattccctccaatttctctcacaggccctaaagtggtgggagaagagagggagggccaggtggcctgaagccattccaaacggctcaggggggtcagtgtgatcttactccattactccatctctctgctgcaaaaccagatggagctggtcacgacaggatstggagacaagatattccaaatggaggaaaccaaaagagtgaacaccctgagccagga

SEQ ID NO: 845907 - DNA, 638 bp, Homo sapiens
aggagctcacagatccgaccactcctgycctgtcctccctggctcttccactgagactgccacccaggactcccttggattccagccagctggatgcctgacctgggcgccaattcttctgccctggttttggccctcatcttctgcctaaccacttgactcatgaacttgctgcttatttgaaattagttctgttctctgggctctgacatcagccccagaccagctgcagaagggtgagagacgcctagctcttgttcccactaggaagaaagcaggatcaggcactggcgcttgttctttactgcacacgctcgcataatactagccattctctgagactccaatcaacccaaaataaagccttttccaatttaaccttcccaaccagattcttccttttcctcatctgcacctcacggcacttaagagcaatcaaattattaaagtctacttgtcaagcattttacatacatttcctgtttttgcaatattcctgcaaggtacaatatccctccaaggtgtccattttatagatgaggaaagtcccagagtcataagataaattgctcagggtcacaaagcatcctactgatgggccagaatacaacctaggtcagtctttctccactccaact

SEQ ID NO: 845908 - DNA, 327 bp, Homo sapiens
caaagtataaggaatgttttagaaatatcattacattttagaacattctctagagacttgaatagtataggtttgtatcattataactgaatgcagatttccagtagaccttccacactgatctcagatatctaaaaggagagggatttgtgccatttaggcaaaaggggattaaagaagtgacagtaggaaaaactgaaaataaagaaatactccagcctgggtgacagagtaagaycctgtctcaatcaatcaatcaatcaaggattgtggtagtgctataaaccacatttgtataattgcatgggcaaacagttatgcttttgg

SEQ ID NO: 845909 - DNA, 643 bp, Homo sapiens
atctaaaatataagcacataatagagaactgggtaaacctgggtaatacatctacattttccaggagtaagcatatgcctttacgcgaataaacgaaagccaaataaatttgtataaaaattagctctgcactttgctcactataactgtttttgcatatacccagatactattcaaacatatacaagtcaggggcctcttataaagtctatcatcatgaacacttaggacactacttgaactacaaagtataaggaatgttttagaaatatcattacattttagaacattctctagagacttgaatagtataggtttgtatcattataactgaatgcagatttccagtagaccttccacactgatctcagatatctaaaaggagagggatttgtgccatttaggcaaaaggggattaaagaagtgacagtaggaaaaactgaaaataaagaaatactccagcctgggtgacagagtaagaccctgtctcaatcaatcaatcaatcaaggattgtggtagtgctataaaccacatttgtataattgcatgggcaaacagttatgcttttggtgtctgttcctcatttacgatwctgataaataatggtatgtccatctaaggttattatgagatttaaatgag

SEQ ID NO: 845910 - DNA, 634 bp, Homo sapiens
caagttcttcccacattaaaaaaaattatcttaccatataaaacctttggagcttgatttttcccccttactaaagtatctatgacacatcttcttatgctaataaaagatacatcttcgcyagtcacggtagctcaaccctgtaatcccagcactttgggaggctgaggtggggagattacttgagccaaggagttcaagaccagtctgggcaaaatggtgaaaccccatctctactaaaaatacaaaacattagtcgggcgtggtggcacatgcctgtagtcccagctacttgggaggctgaggtggaaggatcacctgaacccaggaggtcgaggcttcagtgagtcaagaatgcaccattgcactctagcatgggcaacacagtgagactctgtctcaaataaataaataaacaagtaaacaaatgaatatatgcatctttgtcacagctcttaatggctctgtatatctacatccattatgtagatatacctttgtcttaaaaccattttcttattggtatgtattttggttatttaaatcttttgttattataattaaactgtaataaacatccttgaccaatcttgtgcccttgtttaatcatttcctttggataaattaagcagaa

SEQ ID NO: 845911 - DNA, 591 bp, Homo sapiens
tatgggcaatggtgagccatgaagagtttagggtttccagcagcattattttgattatgacactgagcaaacttttgcacagctatcagagttggttaagacaggtatrgtattttttgttttttgtttttgagatggagtctcactctgtcacccaggctggagtgcagtggcatgatcttggttcatacaacctccacctcctgggttcaagcgattctcctgcctcagcctctcgagtaactgggattacaggcgtgtaccatcttgcccagctaatttttgtatttttagtacagacggtttccccatgttggccaggctggtctcaaactcccaacctcaggtgatccacctgcctcagcctcccaaagtgctgggattacaggtgtgagccactgtgcctggccaggtatggtattttcatttcacagatgatggaactgagaccagaaactgtctaagcaatatatatattacagagtaaataattttagctacaaaatcagtgggttggactagaaactctttcatttcccctttgtatcagttaggtttttattccacaatgctgcataacaaaaggctcct

SEQ ID NO: 845912 - DNA, 565 bp, Homo sapiens
acactgcatttaaattgtttatttaactcagaaaggacacatagttttaatgcttattaagagtttcattgtgtacaaaatggtatagcatattgtgtcamttttatgaagaggcaatggcccataatacgttttagacacagactttattgaaattttcagcagaaagctctaaaatgtcgatattaaatgtaaaagtatgtttttagtacatgccacaaccatgaacagcttcattctattactaaacggtcattaaaatattcatccaaattctatttgaataactttcatgtcttgtaaaatctgaagaacattttaaattgatggggtattagaatgttgaaagaaatacatttgcttttaagaccagccttatcagaattcgtgaaggctatattgtggcataaatgtatatattataaatgttggggaaacaaaaagaaaaaatcatataagagtggataacttcctgttgaatataatattaccagtttttttttttggggatttttattaaagcattcagtattgtcttctcgtacttttcagccacatagttgaa

SEQ ID NO: 845913 - DNA, 565 bp, Homo sapiens
acactgcatttaaattgtttatttaactcagaaaggacacatagttttaatgcttattaagagtttcattgtgtacaaaatggtatagcatattgtgtcaattttatgaagaggcaatggcccataatacgttttagacacagactttattgaaattttcagcagaaagctctaaaatgtcgatattaaatgtaaaagtatgtttttagtacatgccacaaccatgaacagcttcattctattactaaacggtcattaaaatattcatccaaattctatttgaataactttcatgtcttgtaaaatctgaagaacattttaaattgatggggtattagaatgttgaaagaaatacatttgcttttaagaccagccttatcagaattcgtgaaggctatattgtggcataaatgtatatattataaatgttggggaaacaaaaagaaaaaatcatataagagtggataacttcctgttgaatataatattaccagttttttttttkggggatttttattaaagcattcagtattgtcttctcgtacttttcagccacatagttgaa

SEQ ID NO: 845914 - DNA, 566 bp, Homo sapiens
ttaatgtcttactagcagcattttgttcagatgtcagatttatgggggctacaggtcgtacatattcctcataggaacaagtattccctggagtgctttcctgaccttgctgggrtatgataagttgcacattcccagtcaatgaacacttattggtcacgtgctgtgggtcagacttgatcacagacactgctcactagatgctcacgacaatctgtgaagtaggcattgcttccattttgctgatggagaaactgaggcttgggcaccaatatgactttcccagagtgagcaagaagtggcagatgtggaacaggaagccaggtcttctgcctctgctctctgcttccctgcttccctgcactgcctttgtagaggttcccgtttttcccaatcctggcaagggtggctgtgtcctgactcctcgtggcaaggacggttgtgtcattactcctcctgttcttactgcccacttcttccagtgcctacaccccctttccgggggcccagagtcttttgggccacaggggaattttgctagaagatggaatacacaaaggcaacct

SEQ ID NO: 845915 - DNA, 628 bp, Homo sapiens
caaggcctgtgctcaggccaaargacaggattcagttcttatttacctgaccttttggaagcattgaactctgtctttgaaggtatttttcctaggcctccttgacattgaacactctgtggtttcctccagtgcagcgcaatattccttgattgtctgaggaactcccatagttttcaaattccatctatatcctgacacctcccaaatctgggtctttagccaagatcttttccagaattgcagattcccgtatctaagtgcctactggctatcctcatttgtcacatcccagtgacaacacacgctcatcatgtctaacatgagatgtatcactttcctggaaaacctggtgcatctcaggagttccctacctcaatgaataccatcactttgcacgcaggtggtacaccagacacatgggcatcattcttgaggcttccttgtttctctccctcaatcatcaaatccgatccttgagcaaatattttctatcctacctcttaaacagcccttgaatctacccgtgtatgtacccctttccagtccattctctacagtgcagtcagaatgagcatttcagggctaaaatccgaaatcaaattatttgcacaaagcccttatatgg

SEQ ID NO: 845916 - DNA, 628 bp, Homo sapiens
caaggcctgtgctcaggccaaaagacaggattcagttcttatttacctgaccttttggaagcattgaactctgtctttgaaggtatttttcctaggcctccttgacattgaacactctgtggtttcctccagtgcagcgcaatattccttgattgtctgaggaactcccatagttttcaaattccatctatatcctgacacctcccaaatctgggtctttagccaagatcttttccagaattgcagattcccgtatctaagtgcctactggctatcctcatttgtcacatcccagtgacaacacacgctcatcatgtctaacatgagatgtatcactttcctggaaaacctggtgcatctcaggagttccctacctcaatgaataccatcactttgcacgcaggtggtacaccagacacatgggcatcattcttgaggcttccttgtttctctccctcaatcatcaaatccgatccttgagcaaatattttctatcctacctcttaaacagcccttgaatctacccgtgtatgtacccctttccagtccattctctacagtgcagtcagaatgagcatttcagggctaaaatcygaaatcaaattatttgcacaaagcccttatatgg

SEQ ID NO: 845917 - DNA, 486 bp, Homo sapiens
tacaatgcactgcgctgggctctgccttaattctcatgggcccctccatcctgccccgaccccgggcagcaagtcctactatcttccagttttacaaacgagcaattgaggctttcagactttgccaagattatattccaaatgaggggattcaaacccaggctgtcagcctccgcagtgcaggctttcttcaccagcatcatcacacatggtgataactcccaaggttcacagcttgtctgttcactatgcatcgtgctgaggggcttccatgcacttcctccattcccgctcacaacagtatctcaggttacaggtatgggcctgtggaggcacggcccctcctcacaacgacaagcaagtggcaatggccaatggaagcccagcaacttgtttcagtccacccccaaagtagcacttctkttccactggaatgggccccgaggaggaggaaaaggaggcacaagatgagcaggcttaggccta

SEQ ID NO: 845918 - DNA, 486 bp, Homo sapiens
tacaatgcactgcgctgggctctgccttaattctcatgggcccctccatcctgccccgaccccgggcagcaagtcctactatcttccagttttacaaacgagcaattgaggctttcagactttgccaagattatattccaaatgaggggattcaaacccaggctgtcagcctccgcagtgcaggctttcttcaccagcatcatcacacatggtgataactcccaaggttcacagcttgtctgttcactatgcatcgtgctgaggggcttccatgcacttcctccattcccgctcacaacagtatctcaggttacaggtatgggcctgtggaggcacggcccctcctcacaacgacaagcaagtggcaatggccaatggaagcccagcaacttgtttcagtccacccccaaagtagcacttcttttccactggaatgggcccygaggaggaggaaaaggaggcacaagatgagcaggcttaggccta

SEQ ID NO: 845919 - DNA, 595 bp, Homo sapiens
cccctaaacaaaaataagtgmagcattctactgggtgaagagcacttagtgaaaatctttgaggatctgaacacttttctcaggcacaggtactacttagatgagcaagatgtggtccctgtcttcaagaaactcacaatctattgaaagagaaagatacccgactcccttcctgccgcccactggttccccatcacttcaatacataattggttgaacaggtaaagatgatacgtgcatgccttagacattttattttgacttaacacatacacgtcactaatcttttgatatggggccaaaggcttctaattgtgacatgagtctactgataggaacttcataaactactttcattaggcatcttcaacaatttccaggttggaattttataaagtgaagttagaaattaagggcacttaaaaaaatctgaaaggagattctttcaagattactacatacccctcccctatcctgtctgtagtttttcctatggctcattcaaaagtacgatttctagcatcttatctttccaaagcatccatctgttttcatagaaaacacaactctttcactcatgtgctattcactcaag

SEQ ID NO: 845920 - DNA, 595 bp, Homo sapiens
cccctaaacaaaaataagtgaagcattctactgggtgaagagcacttagtgaaaatctttgaggatctgaacacttttctcaggcacaggtactacttagatgagcaagatgtggtccctgtcttcaagaaactcacaatctattgaaagagaaagatacccgactcccttcctgccgcccactggttccccatcacttcaatacataattggttgaacaggtaaagatgatacgtgcatgccttagacattttattttgacttaacacatacacgtcactaatcttttgatatggggccaaaggcttctaattgtgacatgagtctactgataggaacttcataaactactttcattaggcatcttcaacaatttccaggttggaattttataaagtgaagttagaaattaagggcacttaaaaaaatctgaaaggagattctttcaagattactacatacccctcccctatcctgtctgtagttttkcctatggctcattcaaaagtacgatttctagcatcttatctttccaaagcatccatctgttttcatagaaaacacaactctttcactcatgtgctattcactcaag

SEQ ID NO: 845921 - DNA, 598 bp, Homo sapiens
tctgaaaggaatcttttttttttagcagtaggtacaaacagtgggcttaaattattcaagaaaccatgctgtacacagttsggttgtcatctggaccttgttgtcccatttacagagcacaggcagagtcaatttagcataattcttaagggcgctaggattttcataacagctaattgtattgctgcatattgctaatattcaatttacgctcattaagctcaccttaacctcagtgaggtttcaacagaaagtcatcagctgcatcagtccttaataggagagatagcctgtcctttgaagttttgaagccagtcattcacttctcctctctagctatgaaagacctagaggatatcttattcgaatagacagtgttttgtgtctgttgaaaaatctggctttgttttgttagggccttatctgtatctttcttcatatcagcaaaaaagctgtttcccttttctatcatttatgtgttcactagaatagcacttttaattttcttcaatggcttttcttttgcattcgcaacttggctgtttggtaaaagaggcctagatttcagcctgtcttggctttggacatgccttcctca

SEQ ID NO: 845922 - DNA, 509 bp, Homo sapiens
aatgtcttgggggtaaggaccatgttttattcatctctatatcattccatattcatccagctaatttaacaaagattcattgagtgtcagagactgcattcaaaattggagctccaaagataaatgagacatgacccttgctctcaagggagctcacaggccaggcataagggagtgactagtgtaaataagtgtgtgtatccatctcggtgcctcaaatattagagaatgggcaaagatcatgagcgcagagaatgaatgaaggtacagggagaacgtttattctcatcttatttcctgcaaatgctcagaaattagtttgggaagatagtttttaggggagaaaatgaacatacagtagtcttcccttatttttcagaatatgttctaagacccccagtggatgtttgaacccgggggtagtactgaaccctatatacactaggttttttcctatayctacatacctatgataaagtttaatttataaactagacgcagcaagagat

SEQ ID NO: 845923 - DNA, 600 bp, Homo sapiens
gtttttattcattttactaagtactcaccttgtccttagtcaagatattcatgttttaaagttctgggaagttttcttgatttttttcttggatgakttcttcctatttgttttctcttcctgtgactttgattacagcatttgcatgttaaatttcctggactgggtgccagtcttcccaatgtattcccccctgtttccatttatttgcttttgctgtatttctgagggtatttctttaactttatcttgcaaaccttctgtgaggtttatttttaaatttgtgctctcaagtttacatttttaaagcttcttttttaggtgttctctatatgttcctttttatcctggcattgtgtttttgttttatagatataccatctcctcttatcttactgagagtattggtgacctttattagaaaaagtttccttctctaagcagtttcttttctgtcaaggtactttttcctgttttttgtagtccctgactttaatattagatgctttctccaaatgtctggtgctccttggtaacagctcatgtgtgagagtaagctacagaaagctgactgagctttctgggtgcctggtggggctt

SEQ ID NO: 845924 - DNA, 646 bp, Homo sapiens
tgagttttgcaatacttaataccagttatgggtgaaatgatagatttctttggcacagtttttctaaataatacttcttggtgaacctacccaccaactcacccccatcacatcatgtcatcaagtatggataacaccaacattctagaatctattgcattctctttgtaagctattactgagtttttgccacctcatgttgcctaccggttttatgggtcatgctaactgtaaattggggatattaaagtttatatgtgtgtatgtggcatgagtaagttactgttcacaaggaggaaagaatattcagcaaatccaggaagcatactttcctccccttttaagcccctgaggaggacttggtcattaaaatcctgtcctgggctgaggctaagcagaaccagaatcctaactcctccataggcaggctgtgtgtgcaaattcgctaagcctcggctgcttcatccataaaatgaggtgataatattgaccaatactgcagtttgaggattaagtgaggggtttggccaggtgggcagyagggctcccagcatctaagtgcttgatgattggccagtggcagttgtaagaactcccctggtcctcagcacatggcagcatatctatattttgcaagtatgccttg

SEQ ID NO: 845925 - DNA, 546 bp, Homo sapiens
ttgagctcagaattttgagtctgcagtgacctgttttgccacagcactccaggtttggtgacagaacaagaccctgtctctyaaaaaaaaaaaaaggggcttggaaacagtttttgtctcagacatgtaggcatgaactgcctctactttggggcttcccagccctagtttgtttggatataacaaaagtgatttcatcctgctatctgcaactttcacagtagtcattggtgaccatgataggacctattttcgtgcaatggtagaggcaaaagcctgactggagtgaatccaggagaaaacaggaggagagagtagagtccaaggaacagacaaatctttgaaaggattttgttgtacaggaaaagagaaaaatggaaggttagttgtaaggaagagtgttttttgttggtttgtaaagtgggataaataacagcatgtttgcatgctgatatggtttggctgtgtccccacccaaatctcaacttgaattgtatctcccagaattcccatgtcttgtgggagggacccaggtgggggtaattg

SEQ ID NO: 845926 - DNA, 654 bp, Homo sapiens
ttgagctcagaattttgagtctgcagtgacctgttttgccacagcactccaggtttggtgacagaacaagaccctgtctctcaaaaaaaaaaaaaggggcttggaaacagtttttgtctcagacatgtaggcatgaactgcctctactttggggcttcccagccctagtttgtttggatataacaaaagtgatttcatcctgctatctgcaactttcacagtagtcattggtgaccatgataggacctattttcgtgcaatggtagaggcaaaagcctgactggagtgaatccaggagaaaacaggaggagagagtagagtccaaggaacagacaaatctttgaaaggattttgttgtacaggaaaagagaaaaatggaaggttagttgtaaggaagagtgttttttgttggtttgtaaagtgggataaataacagcatgtttgcatgctgatatggtttggctgtgtccccacccaaatctcaacttgaattgtatctcccagaattcccatgtcttgtgggagggacccaggtrggggtaattgaatcatgagttctggtctttcccatgctattcttgtgacagttaataagtctcatgagatcttatgggcttatcaggggtttccacttttgcttttttctcattttct

SEQ ID NO: 845927 - DNA, 613 bp, Homo sapiens
ggaatgctcaaagataaataaaataagataaaacttctgctttttgaaagacacttttaagagaatggtaagctgccagctgggggaagaatttgaaagtcatgtgcttgatacaagacttttaccccaaacatataaagaactctccaaacatagtaataagaaagcaaataatcaaatttttttttaaaaatcaaagaatatatacagatgacaaataaacacataaaaagatgctcaaaaccaacagagaaatgcaaattaaaaccagagatactaatacctaataaaatggcttaaactaaaaagactgatcataccaagtgttgacaaggatgtagaagaactggtaatttcatacactgctggcgggatatcaaaaatacaggccctttgaaaaacagtttggcagttaaacatatacctaccatatgatccagtcattccattccaagagaaatgaaagcatatatccatgcaaaggcttaaacacaaatgtttatggcatttaatagcaacaggtgagtgaataaactgtgmtatttccacatgatggaatactataaaaaggaatcaactatcaatatgtgctataacatgactttcaaaatta

SEQ ID NO: 845928 - DNA, 618 bp, Homo sapiens; identical to SEQ ID NO: 810476

SEQ ID NO: 845929 - DNA, 620 bp, Homo sapiens
gtattcaagtgcatatgttccaaagtgctgttctgttgatataataggaaaaaaaaccctattatcacaaaggaattgggctgtgtgtacagttaactcmaaatcattattttaccctatatagcattatttttgagatttgacacaattttccagaggaaaaattttaaatgcaagaattagatcttaccctttaggacaacctgcttgctgtctcccagacagtgtatcttatttcacatgtgccctgtatattatggaattgcctcccttggaaaaacaaccagaaagccccagaagcacgtggtagaggtagtcaggttcatctccaagtaacaaaggaagctgaaacctgggttaataaaacaagcccaatttagtctgctcttgtttggaaatttcaccttcaaaggtgttttctggcttgagttagatttaagtttctgggtataagtagtggaagttgtttagatatccagcatttagtagactcctttgtgtatttgaggaattccctaattaggtctttgtattagtctattttcatgaagctgataaagacaatttacaaaagaaagagaggtttaatcaacttacagttccacgtggctgaggtagcc

SEQ ID NO: 845930 - DNA, 620 bp, Homo sapiens
gtattcaagtgcatatgttccaaagtgctgttctgttgatataataggaaaaaaaaccctattatcacaaaggaattgggctgtgtgtacagttaactccaaatcattatttyaccctatatagcattatttttgagatttgacacaattttccagaggaaaaattttaaatgcaagaattagatcttaccctttaggacaacctgcttgctgtctcccagacagtgtatcttatttcacatgtgccctgtatattatggaattgcctcccttggaaaaacaaccagaaagccccagaagcacgtggtagaggtagtcaggttcatctccaagtaacaaaggaagctgaaacctgggttaataaaacaagcccaatttagtctgctcttgtttggaaatttcaccttcaaaggtgttttctggcttgagttagatttaagtttctgggtataagtagtggaagttgtttagatatccagcatttagtagactcctttgtgtatttgaggaattccctaattaggtctttgtattagtctattttcatgaagctgataaagacaatttacaaaagaaagagaggtttaatcaacttacagttccacgtggctgaggtagcc

SEQ ID NO: 845931 - DNA, 643 bp, Homo sapiens
taacatgttatgttcatttcagagttgaaaaataagccacctaaaagccaactcaaataaaaagaatacacaaaagatttcacaaaatctcaaatcttttcaccttaatagtagaaaagattctgatrcctatagaggtatatcataaatgtctcctaaaaattataataaacttggattcatcccaagtctgttctaccatcattattttctgtatctgcttttaaaaggggaagaaataggccaataacagattttagtatttaaaaatcaatatattccagaagaagaacacagagccaaattgaaagacatgaggttcctcccacttatcccacatagagagtaataaaaacgagaaaaacatgaatggaagaaactgagaaatctttctgaattctgtaccatctgagagggtgacatgtggagatgagttcctcccatggaaagggaacctttccccttacaggaagaacaattaaaactcaacactttttttccttccatctggcaggaagaggtgtgttggtcactacagaggtgtttatggcccaaatattaataagctagcattaatgattaacaaaacttcgcagaaagaatagagaagaaaaaaaaggagacatgaaagagaagaggctaa

SEQ ID NO: 845932 - DNA, 609 bp, Homo sapiens
aatgagccaatattgatacattattattattaaagtccatagttgactttaggattcamtccttgtgttatgcattctgtaagtttcgccaaatgcataattatatatatccatcattacagtgtcctacagaatagttttagaactatatattttaatcaagaaggtttttgttttgttttgttttgtttttctaagatgaagtctcactctgttgcccagactggagtgcagtggtagaatctcagctcactgcaacctccgcctcaagcaattcttctatctcagcctccccagtagctgagactacaggtgcacgccagcatgctcagctaatttttgtatttttagtagagacagggttttatcatgttggccaagctggtctggaactcctggcctcaagcaatctgcccgcctcagcctcccaatgtactgggattagaagcataagctactgtgcctggccccaagaagtttttttagtctgatgtttttcctgtcatgggtcatctgtgtgaccctttcaggcaaatgtgggcgtctagacagcatgtcatcagatttgggtataacagagccttctgtgactaagtagagttgacctga

SEQ ID NO: 845933 - DNA, 609 bp, Homo sapiens
aatgagccaatattgatacattattattattaaagtccatagttgactttaggattcaatccttgtgttatgcattctgtaagtttcgccaaatgcataattatatatatccatcattacagtgtcctacagaatagttttagaactatatattttaatcaagaaggtttttgttttgttttgttttgtttttctaagatgaagtctcactctgttgcccagactggagtgcagtggtagaatctcagctcactgcaacctccgcctcaagcaattcttctatctcagcctccccagtagctgagactacaggtgcacgccagcatgctcagctaatttttgtatttttagtagagacagggttttatcatgttggccaagctggtctggaactcctggcctcaagcaatctgcccgcctcagcctcccaatgtactgggattagaagcataagctactgtgcctggccccaagaagtttttttagtctgatgtttttcctgtcatgggtcatctgtgtgaccctttcaggcaaatgtgggygtctagacagcatgtcatcagatttgggtataacagagccttctgtgactaagtagagttgacctga

SEQ ID NO: 845934 - DNA, 632 bp, Homo sapiens
ggagaaagaataggcagcacatagaaagattctgggagcagtaaactattctgtataccactagatgggaactcyctactttctgcttgattttgctatgaacttaaaactgctctaaaaaataaagtctatttcaaaaattatcttgaggaaatgggtgtccaaactggtaaccaagactaaagcccagtccccagaatttgtggaagagagctggtttggactagcacaaaactgatgctattataaaagttcctccaaatgcagctattctgatgggtatagtgtctatgtcctgggagcaattgctgagcatggttgtattcactgaagagagaacttgagctgggagcacacacagctgagcttgttccctataggaggattatgagggcaccaggatggagcagaattgctgtgaagtagaccagcaccatctgttgccagaggatgacaaatatgcagcaaaactccatttgtcagtgagaaacaatagcaaggttaaattgttctgatatgagtactgttctctctcaggtgtggtagtcaggcagatggcactttgaggacatgggaacccaagggtgtgcttaggtgtcagggagggcagtggaagggagcacttaaggaat

SEQ ID NO: 845935 - DNA, 572 bp, Homo sapiens
gcagcagcggatctgacaaatccgcccggtgcacagagcacgtgactcattgtgatgtgtcagtgagtcggcggctggacgcggttccgcacagagctcctagccctatccctccccgaaggcgatgacagaggtgtaggctcctagaagctgccaggccttgcagcaacgctgcacgcaggagacgcacctagggcagaagctcagccagtagcttcgggctggcttttctgcttcatgcaggtgaatacagaatgcctttgtttccttccctcggtcccacctccagtgtagaaaagctgatttttcttagcagagaaagagcaaacgttaattttctaaaaaagatacatttttaaaaaggcaaacttaaatccaattcaaagaagaatgcattgctgtgactgagttatccaataagatgcatttattcaacagatacattgactacctactaagcactaracaccgttttaggcattgtggaacaaaacaagcaaatattcttgctttctgaaacttatattcttttttaattttttttttttttgagacggagtcttgctgtgtca

SEQ ID NO: 845936 - DNA, 606 bp, Homo sapiens
ggcaaggaacaattggctattgaactctccacataaagawagacaagcatgagcatgtcagccccagactcaaggaaaggccataaatgactgtctcctgtgagaggccatcttgggaacaatgaggaacttgtcctggtctggactagctaagtgccttccagtagtagtgactgccaggatgggctgtaggagcaacaaagagggagtcaatcttctcagttattctgttggaatttccttatgctgagaaaatgagctgggaatctatcctgaggaggcaactttgctgcagtcagaattaaatattcagaaaagcagagagggaaggactagtctatgacatgaattctaagaaattcctgaaaatggggaaggagtgggcctaagtgctaactgattttgcaattgcacttacccggaaccagatatattctaaccatttgagatttcagagtctgaaaacttgacacaaaataatcattgggtatttatgtatgtatgtatgtatgtatttatattcatttagagatagagtctggctctgtggcccaggctagagtgcagtggcatattcctagctcactgcagcctcaaacttctgag

SEQ ID NO: 845937 - DNA, 606 bp, Homo sapiens
ggcaaggaacaattggctattgaactctccacataaagatagacaagcatragcatgtcagccccagactcaaggaaaggccataaatgactgtctcctgtgagaggccatcttgggaacaatgaggaacttgtcctggtctggactagctaagtgccttccagtagtagtgactgccaggatgggctgtaggagcaacaaagagggagtcaatcttctcagttattctgttggaatttccttatgctgagaaaatgagctgggaatctatcctgaggaggcaactttgctgcagtcagaattaaatattcagaaaagcagagagggaaggactagtctatgacatgaattctaagaaattcctgaaaatggggaaggagtgggcctaagtgctaactgattttgcaattgcacttacccggaaccagatatattctaaccatttgagatttcagagtctgaaaacttgacacaaaataatcattgggtatttatgtatgtatgtatgtatgtatttatattcatttagagatagagtctggctctgtggcccaggctagagtgcagtggcatattcctagctcactgcagcctcaaacttctgag

SEQ ID NO: 845938 - DNA, 631 bp, Homo sapiens
aattcgctgtataaatgtgagaaaatcttaaaattagtattaatcataacttttaaaaaaagcaaaaccatcatctcttaaggcctatcttaatgctggtttcaaatttacaggcctygaaatgcaggaggttcataaaagcattttgctcacgctgagacttccattgtttgtcgagggaacatttcaaattttaaaagcacccgcccttctaaggagccatcttcatttttgaagagccccaagtaaaccctgcatgatttttatcatccatgtttatcactgtttctgcctcataattacagctttaaaataagctctccattatttgtagaaaccttttaatgtccaaaaatagcttatcttagaattcaccaacagcatcccagagccagcctgagggaaagctctaaaaacctaagataaactgctgtgttcttgctctgaggtggggttctcaaagtgtctttgattagaatctaaatctgattcaatttcactgactatctactaccaaaaagaaaccccactggtgaagagtttcttacagtcccagcactctctcatatgagaaaactttttggaagagcgagaaattttgtgcaaaaatataaactggttgtttttaagc

SEQ ID NO: 845939 - DNA, 559 bp, Homo sapiens
aaatagtgcatccatcacctcaggcatttatcctttgtgttacaaacaactcgsttacactcttttagttattttaaaatgtacaataaattattgttgactgtagtcaccctgttgtgctatcaaatattagatctcattcattctagatgactaatttttatacccattaaccattcccacttccccgtcccctagtacccttttcagcctctggtaaccatcctactctccatttccatgggttcagttgttttaaggcttttagctcccacaaatcagtgagaacacgcaacatctgtctttttgtgcctagcttatttcacctaacataatgtcttccagttttatccatgttatagcaaatgacaggctctcattctttcttttttttatggctgaatagtactccgttgtgtataggtgccacattttcttttgtattttcattttactttaagttctgggatacatgtgcagaacgtgcaggtttgttacataggtatatgtgccatggtggtttgctgcacccatcaaccttcatctaggttttaagccc

SEQ ID NO: 845940 - DNA, 559 bp, Homo sapiens
aaatagtgcatccatcacctcaggcatttatcctttgtgttacaaacaactcggttacactcttttagttattttaaaatgtacaataaattattgttgactgtagtcaccctgttgtgctatcaaataytagatctcattcattctagatgactaatttttatacccattaaccattcccacttccccgtcccctagtacccttttcagcctctggtaaccatcctactctccatttccatgggttcagttgttttaaggcttttagctcccacaaatcagtgagaacacgcaacatctgtctttttgtgcctagcttatttcacctaacataatgtcttccagttttatccatgttatagcaaatgacaggctctcattctttcttttttttatggctgaatagtactccgttgtgtataggtgccacattttcttttgtattttcattttactttaagttctgggatacatgtgcagaacgtgcaggtttgttacataggtatatgtgccatggtggtttgctgcacccatcaaccttcatctaggttttaagccc

SEQ ID NO: 845941 - DNA, 642 bp, Homo sapiens
tctgttcagattttctggttcttcatgattcaattttggtagggtttacgtgtttaggaaggctaatatccagaataataaggaaattaaacaactcrattgcaaaataatctgacaaataatccatcaaaaatgagcaaaaaatctgaatagacatttctgaaaacatacaaaaggccaacaggtataggaaaaaaatgctcaatatcactaatcatcagggaaatgcaaatcaaaatgacaatgaggtaccatttcactccaattagaattgctgttaccaaaaagacaaaaaacaaacgaacaaaaaacaactgttggtgcagatgtgaagaaaagggacctcttatacactgtcagtagaaatgtaaattagtacaaccattatgaaaaacagtatgaaggtttctcaaaaaattaaaaatacaactatcatatgatccagcaatcccactactgggtatatatccacaggaaaacaaatcagtatgatgaagagatacctgcactcccatatttactgcagtactattcacaacagccaagatatgaatcaacctaagcatccatcaacagatgaatagataaatatatagtatatacacaatggaatactattcagctgtaaaaaggaatggaatc

SEQ ID NO: 845942 - DNA, 533 bp, Homo sapiens
gaaaacagctgactgacacagaggggaggctacagaggttctgcctgggggtttcctgyaatgtaatggtcccggggcgcaggtggaccaatttgcagcctcatcagctctccctagagctttgcgctcaccctgccctattgacggcaaacaccgaaaggatgggaggagagaagagacgtatgttttatatggatgtgcatattgcagtaacttaaaatgaacaaaaatctggaacaaccattctgtgtttatagttttttgacacctttaaacttgtttttcttcattttatacagaactctgtgtattccctgacagatttgtggtttgtgtcagtcagcttgcattcagtcgtgatcttttagcaagtcagaatgaagatttggtgagtatgaaaaaattctataaacaaataagtctgcttaaatgctgagttactgtaaaaaatagaaaacaagaattgtctgctgttgtcattcagctgatgagcacccaacgcatgttttaagggaacaagaagccctacctgt

SEQ ID NO: 845943 - DNA, 626 bp, Homo sapiens
aagaatcagcttcccgaggtcacagagctggtcacagagcttggctctgggacaagcatgagcacatctcagtggagactctctactgaggacaatcaaaatcaccagagctggactgccaaatacaatgcgtgatccaggactagatcctggactgggggtggggatgggcgaggagatgggtatagggaacacttggggagaaatagtgaaatctgaatatagactgtgcattgtatcatttagtataaatgttgacttgcctgattttgttgttgaaggcactgtggttacacaagagaacgtctgtcttcctaagtgatgcatgccaaggtttgcaggggcatcctgtctgcaattactctcaaatagatcaaaataataataacgtgtgtgtgcatgatggagacagggaagaagaaaggaaagggagagggggagcgatcaaataaaaagttaccaaaaagttaactctgaaaagaacatattaaattgcccagaaatacaacatgtttggttttgtgcctagactgccatatgygtgtagaaatgaataatatatgcagccaggtatacacacaaaatatcattttaccatactgggttccataagagcgcctgtagct

SEQ ID NO: 845944 - DNA, 530 bp, Homo sapiens
ccacctcccgggttcaagcgattctcctgcctcagcctcctgggtacctgggattacaggcacccrccaccatgctcgaccagaaaatgtggtcttttacatatcaaggaaatagtaactggctggaaagcaggaaagagcatcaactccctattagactcatcggagccgaactccctgttagacttatcggacccgaactctgatcttgatctgcacttcaaccagtggcctcagcccactcccctggtcttgcatttgtctcactgtctcccctaaagacatcccttcctccccttcaccaagcatgtcccccttggggtcagccctcgcctggactattgcagtagcctccaggctagtctcagctaccctgtacaccctccaaataggccacagagtctttgtctcaaacacaggccagacctcctgcccttactcaaaaccctaccatgggcctctggtggccccaggattaggtcttgacaccctagtctggccttcaggatccttcctgttccagcttggcc

SEQ ID NO: 845945 - DNA, 636 bp, Homo sapiens
aaaactaaattaaaacaaaatgccgccatcaccagtgctaacaaaaaatccttcaagattgaaaatttgaacctgctgaacaaattcggaagctgctttttgtaaaatcaaakttcttttttagtaaaataaattatagcttattttcacgtcagcattatttgagcttagagaaattgtggccaaagtttaaccaagcagggtagcttgacatgggatatatatacctgaaaaaacaggataaatataaatattctaaatttgccaggtatagtggctcatgcctgtaatcccagcactttgggaggctgaggcgggtggatcacctgaggtcaggagttcgagaacagcctggccaatatggtgaaaccccacctctactgaaaatacaaaaattagccaagggtggtggtgcgtgcctgtaatcccagctactcgagaggctgagacaggataatcgcttgaacccgggaggtagaggttgcagtgagccgaggttgcgccattgcacttcagccagagcttgctgttagaaggcccttttctaaaatctactaatttcatattataatttgaattttcacttaaattagtgtgtgccagtggatctgtcctcccttgctgtcattgtatctc

SEQ ID NO: 845946 - DNA, 636 bp, Homo sapiens
aaaactaaattaaaacaaaatgccgccatcaccagtgctaacaaaaaatccttcaagattgaaaatttgaacctgctgaacaaattcggaagctgctttttgtaaaatcaaatttctkttttagtaaaataaattatagcttattttcacgtcagcattatttgagcttagagaaattgtggccaaagtttaaccaagcagggtagcttgacatgggatatatatacctgaaaaaacaggataaatataaatattctaaatttgccaggtatagtggctcatgcctgtaatcccagcactttgggaggctgaggcgggtggatcacctgaggtcaggagttcgagaacagcctggccaatatggtgaaaccccacctctactgaaaatacaaaaattagccaagggtggtggtgcgtgcctgtaatcccagctactcgagaggctgagacaggataatcgcttgaacccgggaggtagaggttgcagtgagccgaggttgcgccattgcacttcagccagagcttgctgttagaaggcccttttctaaaatctactaatttcatattataatttgaattttcacttaaattagtgtgtgccagtggatctgtcctcccttgctgtcattgtatctc

SEQ ID NO: 845947 - DNA, 677 bp, Homo sapiens
agtgtttagtaagtgctcacatcgcttttataaggtggtcacattgctttttatcagtaatacgtgttccattttgaaaaataagaaattatgggtaagcaagaataaactccctcttaattctaccacagagataaacactatttactatatatatgtgtgtgtgtgtatatatatatatatatatatatatatatatatatatatatatgactgtttaggtgcatgtttaagatttaaagtaaaaaagaatgcagagaatgctttttaaaactgttttattaacttcacaatatataatgagcatctttccatgcaataggtaaaactctcctgctgacagaaacttacaaactgggtcaaaaacaacattcatttagaagctggtaataggagacccacaagaaataggtaacatcaaaacgtttacgacaaaggtacaccacaaatgtgtaagtttaggaagcaggggtctccctattaacttcagggaaaccatcaggattcagggcataaggcaaaactcatcgtgatggtcatggtgagggggatcagtgctgactgcccgcaractatgactcaactgcttttccctcagcttttccatcagctgtctcacctcctccccaatcctttccatattctcctctctcatccttgcctgtggctctccaagc

SEQ ID NO: 845948 - DNA, 616 bp, Homo sapiens
tttggtagaacttgacaatacacttctttgagcctgtacttttctgttctggaaaaattttgactacaaatgtaacgtcttgaatacacctattaaaactacatatttcttcttggaaagagatttgtagttcttgtctttcaaatagttgttatattttaatttgtcatatatatgggcatagagttgttggtagtattcacttattatactttcactgtgtatgcgattgatctagtgatgtcttgtttttcatttctgatatcagttattattgtcttgtttttctctatgtcagtctagctagaggtttatcaattttagaaatagtttttcattcattgattttctctgttgttcattggttttcaatttcattgacctatgctctaacctttattatttctttctttttgcttgcttgatgcttaatttgcttctctttctctagtttcttaaggcagaagcttagattacagattttacatctttattctttagtaatataaaatttaatgctgttaatttccttcaaagtagtgctataacaygggcaatctctgaattttgatgttgtattttcactttcatttagttagcttataaaaagctacat

SEQ ID NO: 845949 - DNA, 601 bp, Homo sapiens
acagaatatttgtgatgaagctgytgatgaatacaaatatgatatgatattgatgatgtattgatggcagtgcctgcttttcatctttgctgcccatgagcaattgaaatgtagttgtgtgtgctcttttggagaacgattttaaatcagccgaaatgctctgtaatgttactaaccttctttgaactgagtcctctaaatttcaggtgcattttgttcaaaatcagttagaaatagtcaaaatattcagagtgaagcacccaaaaatgtaattttggaggcttttagctacttgaaatcatagaaaacaaagtttgcaaacaggaagatattcaaagttctacaaaaccaaaggagaaactaattaaacagcatcagcttaatagtgaataggacttaactttctcaaattctgtaattgaattttggcgtatcttgacttggaggaagaaactttagatggacttcctatttttaattggataaatttacaggctatattagaatgcagtgaaactgggatgtccaaaaagtttgctgcacaaaaatttggtgaaaacttcaaaaggattatttaagtcagtcatttgataagctttgt

SEQ ID NO: 845950 - DNA, 594 bp, Homo sapiens
tatagaaaagaacctacgtgaaatattgggggtgaatttcgcccaatatctggctgaatttcccccgatagatgtgtgccactacgcccagctaattttttgtatttttagtacagatgggattttgccatgttggccaggctggtcttgaactcctggcctcaagtgatccacccgccttggcctcccaaagtgctgggattacaggcatgagccaccgcacttggccagaaacaccaaactttcttttctttccttttttctttttctttttttttttttttgaaacagagtttcgctcttgttgcccaggctggagcaacgatcccagctcactgcaacctctgcctcccgggttcaagcaattctcctacctcagcctcctgagtagctgggattacaggcatgcgccaccacgcccggataattttttgtatttttagttaagaccgggtttctccatgttggtcaagctggtctcgaactcccgacctcaggtgatctgcccaccttggcctcccagagtgctgggattrctggtatgagccacagcacctggccccagaaataccaaactttctaataggtggcagt

SEQ ID NO: 845951 - DNA, 504 bp, Homo sapiens
aaaaaactgaaacccaaatgaagcctggagttaatagtaatgtacaacgttgggaccttagtttccacaaatgtatctgttttactttaagatcttcaagatgyggagcacccctacaacgattaggagagacacaggctagaaatagtttattacttacagatcctggggcacatggcatacttggaggccaccttcatggaaatcagggagtgcaggcagagagaccaagacagcaacccatgggccaacacctttattgggtccagggtgttatccaaacaggtttcccatggggagttttattcggtgggtttacagcaagcaggcatgagttccaggaggtggcacagtgactgagtggtgggccctgtggcgcatctgcacattctaggtggggtgtgagggtcagtgtggccaataggttctagctgtgccatagagaagtggtcaacaggagatagttgtatgaggcagatatctggatccaccacataacagaac

SEQ ID NO: 845952 - DNA, 602 bp, Homo sapiens
ccttggtgatgagtgagttctcactctrttatctagttgaaacagcttatctattatccagttcacatgacagctgattgtttaaaagagcctgacacctcctcccttctatctatctctctccctctctcaccatgtgataagctggctcgtcttgccttatgccatgattagaagctttctgaggcctccccagaagccaagcagatgctggtgttgtgcctgtacagcctgcagaaccatgagccacataaacatcttttctttataaattacccagcctcaggtattcctttataacaatgcaaaacaggctaacacaatcattaatcaactagatccaatgaacatgtatattacgctccatccaacaatgacagaaaacacattcttttcaagcacacctggaacattcaccaagatagatcataccctgcagcttaacaaatttggaaaaattggaatcatacaaaatatgttattaccataatagaattaaactataaatcaataaaaggaagacaatagaaaaaacaccaaacacttggaaattaaacatacttataagtgacccatgggtcaaagaagtcttcagagagatt

SEQ ID NO: 845953 - DNA, 602 bp, Homo sapiens
ccttggtgatgagtgagttctcactctattatctagttgaaacagcttatctattatccagttcacatgacagctgattgtttaaaagagcctgacacctcctcccttctatctatctctctccctctctcaccatgtgataagctggctcgtcttgccttatgccatgattagaagctttctgaggcctccccagaagccaagcagatgctggtgttgtgcctgtacagcctgcagaaccatgagccacataaacatcttttctttataaattacccagcctcaggtattcctttataacaatgcaaaacaggctaacacaatcattaatcaactagatccaatgaacatgtatattacgctccatccaacaatgacagaaaacacattcttttcaagcacacctggaacattcaccaagatagatcataccctgcagcttaacaaatttggaaaaattggaatcatacaaaatatgttattaccataatagarttaaactataaatcaataaaaggaagacaatagaaaaaacaccaaacacttggaaattaaacatacttataagtgacccatgggtcaaagaagtcttcagagagatt

SEQ ID NO: 845954 - DNA, 489 bp, Homo sapiens
ttgagtgaactgctattttttaggtcarttagaattaaataatttatttcaccttatttcttctccagtgctcttcctttctttatgtaaatccaaatttctgacctatatcattttccttctctcttaagcaggggtccccagcacctgggccacaaactggtgctggtccaaggcctgttagggctgcacagcaggtggtgagcagcaggcttcttagctccacctcctgtcagatcagcagaggcatgtgattctcataggagtgtgagccctattgtgaagtgtgcatgtgagggatctaggttgcacacccttatgagatctaatgcctgatgatctgaggtggaacagtttcatcctgaaaccattccccacaaaattggtctctggtgccaaaaaggttggggaccactcctctataggaattcttttaacatttcttgcaaggcaggtctactggcaacaaattccctcagtctttgtttg

SEQ ID NO: 845955 - DNA, 489 bp, Homo sapiens
ttgagtgaactgctattttttaggtcagttagaattaaataatttatttcaccttatttcttctccagtgctcttcctttctttakgtaaatccaaatttctgacctatatcattttccttctctcttaagcaggggtccccagcacctgggccacaaactggtgctggtccaaggcctgttagggctgcacagcaggtggtgagcagcaggcttcttagctccacctcctgtcagatcagcagaggcatgtgattctcataggagtgtgagccctattgtgaagtgtgcatgtgagggatctaggttgcacacccttatgagatctaatgcctgatgatctgaggtggaacagtttcatcctgaaaccattccccacaaaattggtctctggtgccaaaaaggttggggaccactcctctataggaattcttttaacatttcttgcaaggcaggtctactggcaacaaattccctcagtctttgtttg

SEQ ID NO: 845956 - DNA, 630 bp, Homo sapiens
ggagctgcatgcaggactaccaagattcctccccacagttatgaaaccgatttttccgggactggttgttctagtcttctgggtgccaagtctgacttttctgggaatggttgatccacactggaaggtttccagatgtgttccccaggcattcctggtggtaggaagagtagaggcctgggtattctgtagatgctgagccctgagtcatattgttgcttattctttggtcagttggctttctaccacctcttagctttcattctctgtaactagcttgtatgctgtttgtagctaagattcagggtattggaaagttcttgcagctgctggaggctgcggtgtttctgtctctgaaatccatcattaattacacacagctgggccggagagaacatgattctggtcttctgtttcttctcctggatcttatcttcattcttcactgtgctcttctctgcagaaatgtgtagttttactctgggactagtggaagaattagasctttcctgaataaatagatccacggaggaaggaagatgagagagcctctgagtgggacacctcctcatatgtcatttgcaaggatggataactttcatcagggccacgagtcacaggcattggtga

SEQ ID NO: 845957 - DNA, 623 bp, Homo sapiens
catgatgggaaacaaactacatcttgcagcwcatgaaaatatactactgagtgctttactgattccaggcactaagctaagtactttaaatatggattatctcatttaatatttacacgactgtacatggtggcactgttattatccccatttacaggtaaagaaatcatagctttcagaggttaggtaatttaccctaagtgtcagagctggggcttgaagctaggcctgtgacactaaaatgcatgctcttacctattctattaaagtgcctcagagattatttccttaaaaagaatgccaactaggggccgggcgcagtggctcacacctgtaatcccagcactttgggaggccaaggcaggcagatcacgaggtcaggagatcgagaccatcctggctaacatggtgaaaccccgtctctactaaaaatacaaaaaattagccaggcatagtggcaggtgcctgcagtcccagctaccgagaggctgaggcaggagaatggtatgaacctgggaggcggagcttgcagtgagccgagatcacgcgccactgcactccagcctgggcgacacagcgagactccgtctcaaaaaaaaaaaaaaaaaaacaatgccaactag

SEQ ID NO: 845958 - DNA, 512 bp, Homo sapiens
aattcatgtggtagagaaaagctcgtttatctaaaacaaacaagaaattrtatctatttggatttgggaggtattgcactttcacagttgttttatttcctgattgtttatttcagacaaataccaatcatgaatgttctgatcctctgcaggactctttggggaatgcaaataatagccagtttagcagttaccatcgatggtgaaacatacttaacactcgtgttttcgtgtgattcctgcaggtcattgaatgtaccctaatgtggggtaggtttttggattctgttttacagatgaattaactgcaacttggagcaattcaccaacttgcttagggtctcgcagctggcacagggcagagctagggcaatgcaggtcaggttagctccaaaggaggatgtggatataaggtggggcccttctcttcaattagaatccgggcaggaaggccaggctcagccctgttccatggtgacagagcagtacagggttgtctttaggactgcctc

SEQ ID NO: 845959 - DNA, 622 bp, Homo sapiens
cagcatcagtccccccgggggatttccggcactggggagtctcagggcctgtaggggtttcaggcaggccttctccctcataccctcttctccgtctgcagattgaaactctcttcaagtctaaggactatgagttcatgtggaaccctcacctgggctacatcctcacctgcccatccaacctgggcaccgggctgcgggcaggtgtgcatatcaagctgcccaacctgggcaagcatgagaagttctcggaggtgcttaagcggctgcgacttcagaagcgaggcacaggtgagcagggcaggtgctgcggcttcccgtggcctttgggcagccctgtttcctccgccctgacttgctgtctccccaggcggtgtggacacggctgcggtgggcggggtcttcgacgtctccaacgctgaccgcctgggcttctcagaggtggagctggtgcagatggtggtggacggagtgaagctgctcatcgagatggarcagcggctggagcagggccaggccatcgacgacctcatgcctgcccagaaatgaagcccggcccacacccgacaccagccctgctgcttcctaacttattgcctgggcagtgcccaccatgcacccc

SEQ ID NO: 845960 - DNA, 650 bp, Homo sapiens
gaccagcctgaccaacatggagaaaccctgtctctactaaaaatacaaaaaaattagctgggcgtggtggcgggtgcctgtaatcccagctactcgggaggctgagggaggggaatcacttgaaccagggaggtggaggttgcggttagccgagatcacgccattgcactccagcctgggcaacaagagcaaaactctgtctcaaagaaaaaaaaagaaaacaactgcttcacaggactgttgtgaaaagtacatgcaatgctataagataaagtgtgtgtagaatttgattccaggagctatactacctaatcccaacccagctgtaccactcactaagtctaggtaacttgacctccctgaccctgtcacctctacaatgaaaggatggcttgacatacagagtgcatggaacagcacctggcacacaataaactcctgacatgtgtttgtgattctggctgatgttactgttataattctctcacaaaggcctaatttgcacccaagtttatattttctgcaaatgggtccaggctatgctctaagtttaacccacttaaaatacttggttccttggtgacttttctaaaatagcataatragtccttggtacaatgaaaaatatactttagctgggtatggtggtg

SEQ ID NO: 845961 - DNA, 463 bp, Homo sapiens
ctcccttagcaaactgtttgctcacagacagcaggggatttgggtctgactcagttgtatgttcacagtgtctagcacataattagctttcaataaatgtctgccacatgctagataaatcaggatagtaacttaaatattttacagacctataagtagtcattaatttcatcataatctgtcaggggatttcctaataaagctatttaattccatcataatagcttgggcttaaagagcctttcagaatgctgtaaggtcagtaactcttactattctccgcttttcctctgttctagttttgtggtttcaagttacacatgcacacatgtatgtgtgtgtctctgtaacttgaaatttcatcctactsctgtacgttgtattaatagacaattcttaaagcactcatgtttgatctcttacaacattaccaaaaaccattggttttgggaacaatcactta

SEQ ID NO: 845962 - DNA, 502 bp, Homo sapiens
caggctgcggcatatctgacaagaacaccagccattccttttcatcttctgtggctcttcttctccttctcatcaccgtmactcacctcccaccatcacttgtatgtaataacagaaatatttatgattgcatcctgcgtgtctgaaaggagggtgtgtatgtggaaggtgtgcttgtcactcccagccctgaggcctgaaacatactgcatgaattttacttttagtttcccattggccttgaggaaacccttctaaataacatatgctatgctgttattcctctgttcacccctccccagtatcttcctgggctcccattgcctccagaataaaatcccagctattcaggtctccaccttctggttcctgccaatctctccactcttgcttctggccgttttcattacacatttacttgagtcctaatgaagtgcctggttcttgaatgcacttggctgtttcattcctctgagcacactctttcctctgacggagatgc

SEQ ID NO: 845963 - DNA, 635 bp, Homo sapiens
aggtaaccctcgcttctactattttagagacaccgtagactttcacctgtgctcaggatgcagggtgtcccaccaccagacttactaggtttgtgtatttgtgatataagaaacaaagaatgttarcatttccctggtagaaaagagaagataagtgccttgtttgaggtcccgtgttggtgaatagcagagtttgtgaagtgaaactctaatctttttttaagtccattactttagatggacaaccaagcttgttcctcttaagggaaggatgtgagccaaataggagattcaaagagatggagtaagggatgatgctccatgaaggaaaatatccgggtttcaaaggaagagcatgtcttgacagggtaagagaccaagaatccctttgaagaaaaggtaccatttactaaaaaatatcagtcatagtgactataggtgagaaataaatgaacgctcacaaattgagaaatgtaggcaagtaggctattgacttcggcaagcccgactctctatctcagggtttcccagacatcaggcatccctggaccatgcccccattccatttgtactattgactaatattatctgttttattcactcttgcatttatacaacatggtcctaagcaataa

SEQ ID NO: 845964 - DNA, 636 bp, Homo sapiens
cttacagatgtctctattagacttaattccttaagaatgtttctaagaaggtcaatgcacgttaaacaggccaaggcattacatttcctaaggatgacacgtcaagtagaagacattagcacaaatgattttatctgataataaacatgtttgcttcacagaaacatagggctctggccttgaaacaatcagggaaaagaccaaagtatcaacattattcatgaggtgactgcacactttcctagaactctggcctcaatgagtagtcagtgtatctagattggtcatcatataccaaaggcagttcctcaactttgcaatttttgagtgcacctggggaggagcagacacctggggatgacaatctccaccaaccaaactcagaagagactagtattaaaccagtagctcttcatcaatgatcaatttacatatggggaaaaaatactgtttttctcatttgataaatgctcttcaaaatatagtgtaggagaggaaaaaaaatttttycttctacccttttaggatcttagctggggccccataagaaaagccagattaagaagagaaaaacaaacagaaatgtggtaacatgtgtatctcatgtatacatgagagaaagagagtaactcaaag

SEQ ID NO: 845965 - DNA, 555 bp, Homo sapiens
acaaggacagcttaaagcttaaaagcaagatagagttagttaggttagatctgtttcactgtctcggtcataattttgcaaaggtggtttcagaaaggtgtcatgatgtgtacaatatcatctgaaaaagaataaatgagaagcctagctctccaataaaaaggcaacaattaatgactgctactgtagaaaggtgaattttcaaaaacagagaagtggtgtaataaatatagctcaggtaatataaaaggtcagggaaaaaaagtgtgttttttccccagctctgctacttataacttgatgagacttttcgataaatctttttggaagctcttaaaaactaccaatgccagccaggtacagtggcttacgtgtgtaatcccggcactttgggaggccaaggcgggcagaacacttgaggtcaggagtttgagaccagcctggccaacatggtgaaacccctagttataaataaagttttggtgccacaaaagaaatagcactcraatataaaatgttctttttaattctcagcaaggcaatgtacttctatag

SEQ ID NO: 845966 - DNA, 627 bp, Homo sapiens
gggaaactcaccagtaggcgagatcagtgaccggtgtgcacgcacagagagctgactggaggctgaggagcttcctttgtcyggctgctgtggcctgctctccggggtggaggggtaggtccacgggggatgcagacctgagcctctcccgggttttggcaccaaaatgtaaggttcttgtatccgtttgaaccccgagagggagccaacagacaacacgacgcggtgtggagcaacatgctgttttaatgagcgcctgggtgcaggcaggctgaggcctaaaatggcgtcagcaccaaaatgagaacagagcaggggttttatggtctcctgtaaacaggaagtgtcccagtttgacgtgactgctatgtactacatactacagtacccagacggcctctttttcaatcttcaggggtacgtgtcttcccaccagggtaggggtcttccagctggctgtcttcctgcttcggctaccttgctggtgcacgctgctgacacaaatagccttgtgccttgggactgggcctgagaagggaggagttactcatcccttcaagctttcaggcctcagggagaatcttacagtttttatcatggacaggtggaaatctagatgtttctaat

SEQ ID NO: 845967 - DNA, 600 bp, Homo sapiens
gccagataaggaaaacacacacacacacatacacacacatacacgttgaacctgacaggattccagatgagttttaatattttagaatatccaacctgtacctacatcattccagttcctmacagagatgaggctgtgttggtgttagcctctcatgacccatgagaaacaccaccagccagaaatagaactgagaaggggctggaaatgcataggttgaggttctggaaccaaaatggtgtattagaactcatgagaaacttttgtaggatttttaagacgtgtaaggtaaagattttagaaaagttcccactgagaaatagagggcacctaacaaaggtttattagtattggccaccaatatattcttctattgcagcccttaggcagttgtttaaaatgaagggggaaataaactgaggagaagaaaaggagcaaatcctttggaaagcacaaaagtctccaaacagttccaatcttagagtgttaagatgttaaaaaatgagacacattatcaggagatgaaagttcaaagaggactcagctttgtgttggataaacaggaacatatgcccagcctcagaaatatttcaaatgtgt

SEQ ID NO: 845968 - DNA, 631 bp, Homo sapiens
tgatgaaactgcttcaaataatgtgcaaaacaaccrctagcatcacaatgacaggatcaaattcacctacaacaatgttaaccttaaatgtaaatgggctaaatgccccaattaaaagatacagactggcaaattagataaagagtcaagacccatccgtatgctgtattcaggggacccatctcacctgcaaagacacacatagactcaaaataatgggatggaagaatatttaccaagcaaatggaaattaaaaaaaggcaggggttgcaatcctagtctctagtaaaacagacttgaaaccaacaaggatcaaaacagacaaagaagggcatgacataatggtaaagggatcaatgcaacaagaagagctaactgtcctaagtatatatgcacccaatacaggagcacccagattcataaagcaggtttgtagagacctacaaagagtcttaaactcccacacaatagtagtggaagactttaacaccccactgtcaatattagatcaacgagacagaaaattaacaaggatattcaggacttgaactcagctctggatgaagcggacctaatagccatctacagaactctccaccccaaatcaacagaatatgcattcttctcagca

SEQ ID NO: 845969 - DNA, 593 bp, Homo sapiens
aatctgccattgttattattatcttgtaaatgtgaatatttgcatatcctatgtcccaccaatttcrcttttcagcaagggaaacacatatatccggagacattttaaaatgtttgtcatgggtactgctagtaataacatcaaattactaaaagtaatccagatgtctatgaataggaaaatgaataagtaaattacatcttattcacctaatgaactattatatggaaatgaaaaagcaaatgaactgagctgtatgcaacatgtatgaatttaagtaaataatgttgagggaaagtaagttatagaagacaatatatggtatggatagccctttttacaaggagcaaaaataagtaaaattaagcattatgttatttaaacatatgtgcttaaattattttaaataccaagggaatgaaaaaacacaaaattcaggatattggatatgtaacaggaaaggcagagggataggaatggggagaaacaggaagatgtaaattactagcaatatgccgattcataggttttcagttcacacagttcattatattattaaataatataaggaaaaatacaaatgagccatgtat

SEQ ID NO: 845970 - DNA, 510 bp, Homo sapiens
taaaaacttattttcactacccagcatgaaccttattatatacccctctgttatcagtatatattcttctaggtctttttgtctgtatgtctatctgtgtgttttatcaaaatgagtttgtcccgtatatgatttgtaagcagatctttccgttaatgatatctacctttcccagctaataaattttcatttaaaacccagttgtacaagttatttattgctgtataacaaaccacctaaaatttcatagcttaaacaatgatttattttctcatgatcccatgggttggctgagcagttctctaatggttagcctgggctcactcacctggtgttcagatggagagttggctgggctgtgaggtccaagatggtttcattctcatgtctggtaattggtgctagctgttagctgrgccacctcttttctcctccatatggcctctcatcctccagtacagtagatcagctttttcatagcatggtagtatcagggcagctagcaactac

SEQ ID NO: 845971 - DNA, 309 bp, Homo sapiens
cttatggaggaaggggcccatgaaagtcacaatgtggccctgcccatagtccagtaataggaatattctctcagtctcccttttctccactcctgctaaattttacatgatctcagcccctgctgaaggacctccctaaactagaggagaaatatgacacaataggatcggcactggtccttgggaggaaggagacctggtttcttggccagctctgggtgacctggggtgagtttcttaaactctctgagcctccactcttcctcctctgtgaaatgaatagagtkggactagaattggtcacaaagg

SEQ ID NO: 845972 - DNA, 639 bp, Homo sapiens
tttcattatattgatgtcagtaaatagacaataatagagatggaaaatattttcaacttaatctcatcaattamaaaataaatggctttttcagaaatgtctctcattctcttaaaaattaatatatgacccctagtgtctatgcttatattaaaataatcttagaattcttagactaaatctgataattatttttttcaaaatatattaagaaagaaaaaatctggttgatagatattagaaggtatcatcttggatctgaagtttagattatagggaaatatataatttttaaaattataattaagcataatacagattgataattaaattgtgtataggcatatctaagctattttatacctgtaacataatggaaatctgtcactctgaccatcagttttttcattcaatcacttgttttctcttctatcaatttccctttcttaatgtattatataaagtaaaatatgccaaatgaatttctcacagaagaataactcctttgagagatcatgagtctttcaaccatatctatctagaatgattattagatcagttgaaatgtctataagcttaccttgatgagctacaatttgtcagtactatacacatgaaacttgtttgaatgaaagaaaa

SEQ ID NO: 845973 - DNA, 671 bp, Homo sapiens
ttagctcttaaaataagacttacacatatggtacttatataatgaagataaaatccgtgcagtggggctggaaatgttcacatttggtttcttgataacgcttgatgagagatactgcctgggttatataacaattcaattcctagttgttttttttgttgttgttgtttgtttgtttcctggaaggtgaaacagtttgacatatatctgaataccaatctttgtccctttttgctaataaataagattgtgtgttttgaaaatcctgatttcagtgataaaacttatattccatattttcatattctatatcaccttgttcaattcatcatggataacatcattactgagaaaaatcaggaatctatttggtgacgttctgtcatttctgtttctgtgcctttgcttataactctctctcactgcagcaagcctgctctgactgacctggtagacactgccaacatttggcaacagagggaaagggaaggtaatcaactttactgcctgatgttactaaaaaccacagccaagtttcaattatccgtgtcagtagattyggtgatctttgaatccatatctaatatataaataacgaggtaacaagagaaacaaacaatggagcttcatttgatcaaaagttgctgtattttttagtcatgatttctaaa

SEQ ID NO: 845974 - DNA, 578 bp, Homo sapiens
aagagaaatgaaaaatatgttgatgcctaccatttaggacttaattgtctcagtggccgaacaggtacagatagacaaaaacaacacaatgcacttacagcatgccaaatctcatttcagtcaatagytaatatcccagtcttgaccacatcctgcgtccatggggaaaaaaggatcaattttattgtccttaatgctaatactgaaagaactaaaaactgctaaaaagacaaaaattaattggaagttggaagaaaggaaaacaggaaaatgacccagagattctatgaagtaagttacaaggctatagtacaaagctaaaagatggctctaactgtagttcaataataggaaagggagtcttgaaaatggctcataaaaaaaggtatccctgcggctaaacgtccctgctacagcgtttttttctttctttctttttgcagtagtgagggagctaagactaaagatgcttttctgattttctttctagagcactccacaccctgtccctcaattcctttatttttcacattgaaaccatatgataaccctacttcagatggatttatgtactagac

SEQ ID NO: 845975 - DNA, 627 bp, Homo sapiens
tttaatttttggatttaaattaattgagtattttgctttttttttttgcagatactaaatatgattgttcataaagcaactggaaaacaatacaaggtagtgtttattcaggagctaagtggtgtggtatcarttaagtacaatgagaatgaaggggaagacgaaatacagcatatgtctatgtcctaatattggttgtcatgatattaacagggctttgcatgtactgcttctgtgcagggctcttgtttggtcagtagaattctctaattattttaaagatttctgtttcaaattagaaattaaaaagtcaattttgtatatttacatataaattattttgaaaaaaaaaacactgaaatattggatgtgaacaaaaacttagaagctaattttccagattatttctaatagccaaaaagagataacacctgaattcaataattaagggttgttaaatcagtggttctcaatatttagcaatgtgtggagaaatttttgattctcactactgggtggatgccattggcatctggtagatcaaggccagggataaagcaaaggacaggcccccaaaacaaacaattgtcttgtctaaaatatcaacatcgccatggttaaggaagc

SEQ ID NO: 845976 - DNA, 604 bp, Homo sapiens
tccactccttgtctgttacttgttaacttgtgtatctcatttccccgcagccaactgttctcttacaaatcatggttgaagggcagggactgtggctcactcagctgtatattctgtgtggtctccagcatgaatcctgcagcattatacattctcaataaaaggctacatgaattgagctgactgaacaagtcttaatacatcctatggtaaatgttttcagtgagaacagctttcaatttattggtagagttgggtctgatcacatctctatcacttactacctgtgtaatactgggaaaactacagagtcttcctgaacttcagtttccttatattaaaattaggttactgtgagaataaaataaaatatgacatgtaaaatgcttagcattgtatctgacacttagtaagtgttcactaaatggtagtttaaaaaagtgaataaattatttcctgaagcacctgtctctttgggttgggcatttctcattttggattgctccttgattccaatcaacctastcataattgctttgcaaaaactggctttccttatccgatttttgtttaagtactagaaacatcatgtttggagacatgt

SEQ ID NO: 845977 - DNA, 582 bp, Homo sapiens
gaaccagaatcactgggtatataattaccttaaattgttttcattaatcttagatgtatgtatagataacatttatttcaatgtttagtgttagaagtgtttggggtctttatttagcgatttagtggtgttttcgtgaccagaaatatgccctaggaacttaactgctgtttttattaattcacctgtagtgaaattggttttgtgttaccttgttttgcttaaagtcacagtttccaaatacctatagacaatgttaagtgaggacttcctgtaagtagtttagattgaggagcttccacacactgacaaactcgtttagtggctactgtgttaggcaccacgaaagagacaccagatgtagcggagagcaaggaagatgaggcttgtcccctgcctggatggttttaatgagaaactgtgctcagggcaactgcatggacatcatgtgacttgtgcagtcacacagagcctcacactcagatggtccctgagcctgaytttcatgctctgtgaacatcatcttgaaattcttaataatttttaaagagggagccctcatttttatctttcacagggcct

SEQ ID NO: 845978 - DNA, 564 bp, Homo sapiens
tgcagagttgctagcttgtgaaaagtcctaagtcatttttcttgtgctgcattccatattttctctttgtttttggctcttagcatttttgccatgacacatctagttatggatctctttgcatatatacttcttggagtttgttgaatttcttgaatgtgtagatccatgttttcagcacatttgagaagttttcagccattatatcttcaaatatttttttcttcttcttttcctctcttcttctgctactcccattacacatgctggtgtacctagtgaatccagcatttgtctgtggctctgcttattttcattcattcttttttttccagattatatgatctgtattgatctgtcttcaaactctgattcttgagttcaaatttagtgtcaaaacattagtaaatttttcatttgggctattacattttcacctccatgatttccatatggttctttttttatctctgtrttggtatttctctatttgatgagacattgtcaccagaccttcctgtacttctttaaacatgttttcctctagtaaattgaacaattgat

SEQ ID NO: 845979 - DNA, 655 bp, Homo sapiens
tggtgtgtccggagtttgttccttcagatgttcagatgtgcccgsagtttcctccttctggtgggttcatggtctcgctcacttcaggaatgaagccgcagaccttcgcagtgagtgttgcagctcttaaaggtgccgcctctggagttgtttcttcctcccagagggttcgtgatctcgctgacttgagaagtgaagctgtagaccttcacagtgagtgttacagctcataaaggtagtgcggacccaaacagtgagcagcagcgagatttactatgaagagtgaaagaacgaagcttccacagcatggaagagaacccgagcgggttgccggtgctggctctagtggccagcttttattcccttatttggccccgcccacgtcctgctgattggtccgtttttacagcgtgctgacaggtgtgtttacaaatctttagctagacacagagtgctgattggtgcgtttttacagagtgctgattggtgcatttacaaacctttagtgagacacagagcactgattggtgtgtttatagtcctttagctagacagaaaagttctccaagtccccacccgacccagaagcccagccggcttcacctcccagcaagagatacccctacttcacatctataggcacagccaaaaactg

SEQ ID NO: 845980 - DNA, 645 bp, Homo sapiens
gatttagcctgtgggctctagtttgccaattcctcatatatgtcaaagaatttagtaaactgtaagacaaaatttaaatgcaagctgttgactatattcattttaatattttacttagaaacacttcwaagtgttttacatttaaaatatttgtgctttaaatatttcctaatgttgtgtgtgtgtgaactcattgatacctaaacattttctacaactctttacagcctaataacgttactatttttattctttctgcaaaatcaggtgtcacttaatcaggtatttgttcatcttggttggaggtgagggtctttttaatttggctaacttgggtgattccaggcagcctgcagtatgaggaaacagttctgagccttgttccctgcaggtgtgctgagatctgtacactttggcaggcctgctggtgacttgggttgataagttgggtcaaggtggaggcataaagtattaaattgctcttgtaactgtttcactaccacggttcattactagtttgtgcattttttaagctattggaaaaagagcaaatcacattccatttcgggaagtatcttgatggcatataggatgtttgaattgttacttctgaagatttggcttcacgtgattttaagtggttta

SEQ ID NO: 845981 - DNA, 634 bp, Homo sapiens
acatgaaagaaaaaggatggaaactatgtcctcagttttacttctaccaaaacatccctgtatgtgtgtgcatgtatgttggcgtgtgtgtgtgtgcatgcatattagtaaatgtgtgtttgcatgtgtgtgttggggagtgtatgtgatctgggtgtttgtttatctctgttattattcccctttagctttattttagtcaactctacattatgatgaatttcaaaatgaagctgtattaaaataattgtaatataacaattcaatctcacatgttactgcagatagttaacttttgctgcaatctattgtacatttgcaattttctgtgttagtaaacttagcagaatctggttatttatttttgtgtaggcttaatgttcactgaaagataagtcaattactgttagtaaaaaattaaggtactctcactgcagagatttaaggcctgggcctaatgtgctgtattatgaagccttgtgactgaaaaatatgtttacataygttgtctatttttttaataaacttttatagctggtctatttgctcagtagctttgatcctctcttgattattgtgactatagtttgcaatggtttattttgtattcaataagaaaaattgtgttaataaa

SEQ ID NO: 845982 - DNA, 634 bp, Homo sapiens
acatgaaagaaaaaggatggaaactatgtcctcagttttacttctaccaaaacatccctgtatgtgtgtgcatgtatgttggcgtgtgtgtgtgtgcatgcatattagtaaatgtgtgtttgcatgtgtgtgttggggagtgtatgtgatctgggtgtttgtttatctctgttattattcccctttagctttattttagtcaactctacattatgatgaatttcaaaatgaagctgtattaaaataattgtaatataacaattcaatctcacatgttactgcagatagttaacttttgctgcaatctattgtacatttgcaattttctgtgttagtaaacttagcagaatctggttatttatttttgtgtaggcttaatgttcactgaaagataagtcaattactgttagtaaaaaattaaggtactctcactgcagagatttaaggcctgggcctaatgtgctgtattatgaagccttgtgactgaaaaatatgtttacatatgttgtctatttttttaataaacttttatagctggtctatttgctcagtagctttgatcctctcytgattattgtgactatagtttgcaatggtttattttgtattcaataagaaaaattgtgttaataaa

SEQ ID NO: 845983 - DNA, 567 bp, Homo sapiens
taaaccgtttccttatatgtaagcttcagcrgaaaacttttcctaccaactgagtgaagacctgatctcaagttctactgtatacttgttaaaaatagcagttgattcaaaacttcctgaggcagggatcatccttccttgagctttgtctgtgtggccttgattaacaggcaggaaaatatcttagcccagctctgtcagtatagctgaccaaaactgttatatacagaaagcacacaaaagtgttattcttggcagagcaactgctaactaagaattccatcaacttttatttaaaccattcctacatacaaatttctgggaaaaccagctttgccagcaaataaactttggtgatagtctgacgcaaaaaaaaaaaaaaaaaaaatccaaaaaactttaagaaattaagctcatgtggatgaaaaaaaataactatacccaaagcccaaagcaccaaaactgttgcacagaactcttgataaaaaactaatgcatacaatttaaagatctaatctgctactgttgattattaaaactgaaaattcttttcttgcttctggtatt

SEQ ID NO: 845984 - DNA, 624 bp, Homo sapiens
tttagtaaagtgtagtcttcatagctcagagttggcagtttcatttcatactcctgttagattagagttccagtttgtttcacaaactgttgggctcactctgtgtcctcaccttcctgtttgatctctcgaggtcagacttactatagtttactattagaaacgtctaggggcaaaatagagcgtatctcagagagcaagggagctgtcccttcctccttcttcactaggcagtgccgagttttaaaaagcccatcactcattcctcctttgtcttaaccctggagtgccctgccatcctgcttgaagagatttgccaaactcttcttaggacttaaaggcttataagatcttcattggagagccacaaacaggaggtggctttagtgaaggtaggaccccctaatctccaattgcaggactggagggagacttggaccccatttcttgttacctctcaactgatgccttcctcactctatcagttctctatagatgcataacaaacttaatggcttgaagcagcattttatgtgctcatgattgtgtgggtcaatgatyggagcagggctcagctggactgttcttccgttggccttgcctgggatcacttatgtgtcatct

SEQ ID NO: 845985 - DNA, 621 bp, Homo sapiens
aggaaatctgaggagagtgctggtttggaggcaaggtgataattgattttagatatatcaagatgttgcagcaaattggactcaaaatatccatcagtggaagtgaaggtctgggggctaagagcgaggtaatggtggagatggggaatcatctttgtgagccctggctagtgagaggagagagagggtgtgagaactctaaggtgaaacatggaccatgagctactggctccttccactggggcattttttagttcatctcccagagttaaaatgattccttggcagctgaagggagctgacagttattgacacagtgctcatcgcattcaggacttggtgctgaccgtgagcaggatgacctgtctcagtacccacctgtccccgctactgcttattgataggttaaaatatataagatatatacctataaatcacatgtgctttgtgatccagaccagggagtatttgagcataaaatgagggtaccattgataattatgccagggcaacgtgttaaccaggactgcccaggaacttgggyagttcatctgtagtaacaggagcatatgtcagtaagtagatataggggctgatgagaagagaagctggagtccccac

SEQ ID NO: 845986 - DNA, 621 bp, Homo sapiens
aggaaatctgaggagagtgctggtttggaggcaaggtgataattgattttagatatatcaagatgttgcagcaaattggactcaaaatatccatcagtggaagtgaaggtctgggggctaagagcgaggtaatggtggagatggggaatcatctttgtgagccctggctagtgagaggagagagagggtgtgagaactctaaggtgaaacatggaccatgagctactggctccttccactggggcattttttagttcatctcccagagttaaaatgattccttggcagctgaagggagctgacagttattgacacagtgctcatcgcattcaggacttggtgctgaccgtgagcaggatgacctgtctcagtacccacctgtccccgctactgcttattgataggttaaaatatataagatatatacctataaatcacatgtgctttgtgatccagaccagggagtatttgagcataaaatgagggtaccattgataattatgccagggcaacgtgttaaccaggactgcccaggaacttgggcagttcatctgtagtaacaggakcatatgtcagtaagtagatataggggctgatgagaagagaagctggagtccccac

SEQ ID NO: 845987 - DNA, 460 bp, Homo sapiens
gtatttaacctttggccttagtttctttagtactatgatcaaaactaatctccccaacttaaattttctgtgacrggtaaggaagccaggacaaaggacttaatgaaggttttgaagcaggaagtatagcagcaaaaggttttacagctatgtatgaaatggagttgaaaggaaagaactcaggatctcagaatccagtgggtatagccaaaaaggttgaagctcagaaatgactttcagagggattacatagaaaaatagataagatttggtcgtgcccttcatgtaagcaggctgtaattagattggctggtgtgagttagtgggaaggattagccatcacagagggacatttaatgggatggctgtctggttcccccatctcgctgtcccagcccacccttgggaactgatgtagctgccgtcaccatccaataactctacttccaatacttccaac

SEQ ID NO: 845988 - DNA, 595 bp, Homo sapiens
gatctctagagggatccccttgagtctttaagtaatgatcagtacacatgtgagaggcaaccatctagcgttaggaartaactgcaagaaggagaaggcaggacaatacgtgggtcacacagggttggggaatatccttgtttcttaggtctttcggtgagtactcctgtaggcgataggtatcctcacaacctgggtccatttggagagttatatacatttctccaaaccttatctccaatccttcaatctcattccttccaaatatctgaatatctgaccaaaccgttagcacattcctgtgaacctgtatagatttaacttcaagccattgataattacaggcaaattggacaaaagagctctcaagtttctactcacagggaggtttctctttttcatagtccctcagaagcatgcctaaatggctgctaaacatttcagcaaatctttcggatggtgccagaatatcacacagagccttctctagatgctgttcaaaacttttccattgtagtccatgactcatagaccactttcctgaagtcataagtgtgggctgaggaggggtggtattaggtcagaagcagacatg

SEQ ID NO: 845989 - DNA, 541 bp, Homo sapiens
ggggcttcctgcttagcacaagaggctttcactcccatactgccatgacctgcaccaggggtgagaatgtagccaagaaacgaggctgacactgacctgagcccacactctcgccctgattggtgagcccctgttctcacacagggaatgtgggctgctggtttgctcttacgctcaacaataaacatgctcgtggctccctgcatacctgagagcactcagtgatccacactcttacctccgggtcagaaaagcaaaaatccacatgctaagggcttcattcatgaagtagaatccccgaagcctctttcatcgtgagtagagacctggaggctggggacagggagggaagttgggggtggaatgggagagtgagtcaggctttgtaaggatctgatctcaaaagcaacagcctgaattctccctcygagaacaaaacagcctttccactctcaagggaaccagtgcgtggtgagttgggagcgacacctggatcccgtaactcttggagatttgctgccagccagagctgtttacaatt

SEQ ID NO: 845990 - DNA, 512 bp, Homo sapiens
atttctctctaggaaaaatccacaggaagaatatatctgggtataatttcttataaataatatttattcaatatcaaataaactcccattatatgccaggcacagcattatatgctatataactatatgcyatgcactatattaactatatggcccaaaatactacatgagggacttatctgagaataaatagacattttctagaattaacagacatggatgaaaccatttcaggttgtagaaatgaaatggctctacagttgtagagccatggaccattgtcaaatggctggggtatgcatgtatttttatgtgagaggaatgtggtatcagctaggaaattattaaggggccaaatcataaagagtagggtatgtgatgataaggagcagtgatgtcttcccataggcaattggaaaaagaagaatcataaccagatatgcattttaaaaagttaattttggccatggagtgcagaatggaatgccaagggtggagacagaaaactcaaa

SEQ ID NO: 845991 - DNA, 539 bp, Homo sapiens
gaaccattttctttagctctcctttataactgagtttgctgattgatgtgatgcaagggattttatttaraagtaaaagcactgaaactaaactggaggaaattaccaaaagtcccagaatggctttgacagaattgccatttctaaagaacagctgaaattcatttttcatatctttgagagtgagctcaatgaaaaccttattttgtaaaggcattttgtaaaccttcttccaagcacaaataattccaaacaggaaggttctgttgtgtgtgtgtgtgtgtgtgtgtctgtgtgtgcatgtgtgttcttccctctaaaattaatttattttctctatctattagaatgccctctaaggcctttctttaacacacactgactttttgaagaatgatctttagattgataacttgctatttatggtgactctgtggttaggcttatttaccgttaatctaaagtattcataaagcaccatttattaatcatccttttggatctttcaaaccaaacgtataccaaaaatgtcttcaaaa

SEQ ID NO: 845992 - DNA, 677 bp, Homo sapiens
tagttggagatgagaaaacaaaaaatgaactcttggattctgtacattaagagtctggggacatgaggcaaaactagcaaagaaaactgagaaggaaaagccagtaagttaggagataaagggagagattatgctatcctggaagccaagtgagaaagtgtatcaaggccaaagtgctgatggtctgtgaagatgaaatagaatggacaaccgaatttacctaggtggagatcattattgtccttaataggaaaatgagtcacagcaaatacaccattggagtgtgttaaaaagagaaagggtgggtgtgcatggtggtttgttcatacctgtaatctccgcactttgggaggacaaggcaggtggatcacttgaggccaagagttcaagaccagcctggccaatatggtgaaatcctgtctctattaaaatgatagatagacagatgatagatgatagacagatagatagatagatagatagatagatagatagatagagaaagggtagagagaaaagtgaaggcaacatctttttattgatcttgcttttgcctttgyctcctgaagacttcctggcgacagaagttctagcgatccaattaaaatgtaaatcaggtgttgttactgtctactataaactcttcagggctttcccatctttttcagggtataagc

SEQ ID NO: 845993 - DNA, 629 bp, Homo sapiens
tggaaaaccctgactaatacagtgtatgaggacctggggagaaatcgaggacctagatggaggtgaggtgcagtgaagagaagccaggaggacctgcagaggggctggcagcagagcagagctcaccgttatgccctctccagagggaggcagcagaggaccatgggaattgccccatccagcattagcagttcagttccccttgcttcactgtctaccatggagcccatatctagggactcaccttgtttgaatgtttttacacttttagtccctgccccaaggagagatgccttgggaaagtcagccctgatttagtccctcccaagctcctctcttcattcctatgtagaggcttctctcctttgtgtctagaacttagagaacatacttttgtccactccccacctccttacatttctcaacctccccagctccctacctcctacacgcccttggaggccatgatccagcccagattcactgccctggagaggcccgtmtctctgccctgtggccatgctgagccatgactgtgacaactagacattgttagcatctgacccccatcatccctagggagtttccagtgagggcccatactcctaatgtcttcttttccctacccc

SEQ ID NO: 845994 - DNA, 629 bp, Homo sapiens
tggaaaaccctgactaatacagtgtatgaggacctggggagaaatcgaggacctagatggaggtgaggtgcagtgaagagaagccaggaggacctgcagaggggctggcagcagagcagagctcaccgttatgccctctccagagggaggcagcagaggaccatgggaattgccccatccagcattagcagttcagttccccttgcttcactgtctaccatggagcccatatctagggactcaccttgtttgaatgtttttacacttttagtccctgccccaaggagagatgccttgggaaagtcagccctgatttagtccctcccaagctcctctcttcattcctatgtagaggcttctctcctttgtgtctagaacttagagaacatacttttgtccactccccacctccttacatttctcaacctccccagctccctacctcctacacgcccttggaggccatgatccagcccagattcactgccctggagaggcccgtatctctgccctgtgrccatgctgagccatgactgtgacaactagacattgttagcatctgacccccatcatccctagggagtttccagtgagggcccatactcctaatgtcttcttttccctacccc

SEQ ID NO: 845995 - DNA, 618 bp, Homo sapiens
tacaaatacagattttctaaagcgattggtctagaaaaagagagatcagggtatggaattaggaacaagcctgtccaaagttgattccagctgagggaaacattaaggctgtcttggtcagtggacgcaaaaagcactaactacccttttgagaaaattgtccagaaatgggaggaaagagagtaacttaagggaaatgtgtgctggggaactatatgctctttgtgtgttaagtttaaagaaggtagaataggtaggtagtcagagagagaaagagaagtgttaaagaaattggccaattttagctacattttacttaactttaccaaattggccaatttcacctgatagcaataggtaacattaataaggaaaatctcctaagaaggcagaaggcatgggaatcagaggatttatagaggaaacagccatgataagagatgagacagctcattaactacacccagatgtgcatgcacatgggttggtacattcattrgcaggaattagaagtggtgactgaagcctggcgcagtcgctcatgcctgcaatcccagctcttacggaggcagaggcaggaggatagcttgagcccaggagttcaagacctgcctgggc

SEQ ID NO: 845996 - DNA, 633 bp, Homo sapiens
agtactgtgtcttgcctaatgcccatggtgactactgcctggctaccactgatgtttattcaaggcccaagggctctttagttagcaggtggtgaaccctgccaggactcagtcattgccttcaaggcagaaaattcccttctgccccagggtgggtatagaaatgccatccaggagctaagacctggaatcaggggcttcaggaaactacttggtgctttattttattgtggcttagctggtacctaactaactagtaagacaaagacctctatactttttcttctcctttccccaagtgaagggagtttttccccaagctgcactgcctggagttgaagaagagggtctcaggtacttaaaatcatctatagattacttataatacatatacctaatacaatataaatgtcatgtatataattgttatactgtatttttatttgtattcttttttgttgcattatttttattgttttttaaaaaatacttccaatcaaaacttgactgagtccatatatccagaacttgggtatatgtggctgaccatatagtattctgttcagttagaaaaaatgtaccwatagctcaaaatttggaaacttggctatcagcaattcaagacttaatttt

SEQ ID NO: 845997 - DNA, 615 bp, Homo sapiens
aaaatccttttctacttctctaatcagactctgagaggtgacaaactcagattagtragcaacatcattttttgatacaggagttgaattttacccaggaatctcaactataagctcctaagagagaaactttttttattaaggatttttttaatgatccatgtcaaagtgcatgcctgtgtaatcataaaagcaaatttgctctagaatgctgcatgaagtaatggtgtcatctgaaatgctaatgaatctttgctgactccaccatggcccgatttgacaggaaggtgggagtcccagtgaatgagtcactgcaaatacagaagcacaaatggtaacagttatttattgttcatatgacttagcacattaaaaaattttgtaaatccttgttatatatatcacttgtaaattcatagactgagaagagaaaaagaaaattgtccacaagatgttagagctgggataatttttctgtttttcagtctttataatatgttagtctgtatgtccagtatgaccgtcctaaccatatgtagctaatgtccattttgtgttgctataaaggaatacctgaggctgggtaatatattttaaaaagaggcttatttggat

SEQ ID NO: 845998 - DNA, 567 bp, Homo sapiens
tttaatagactttactttttagaacagttttargttctcagcaaaattgagtgggcggttcagaatgcccatataatccctgccccacacatgcacagcctccccaacgatcaacagcccacactacaatcgtcttagcccactgggcagctataaccaaaacaacatagaccagtggcttataaacaaaagaatttatttctcacagttctggaggctgggaagttcaagatcaacatgctggcagatttggtgtctggttagggcctgcttcctcataggtgaggctttctcactgtaacctcatatggccgaaggggcgagggagtctctcaggtctcttttataaaagcactgatctcattcctaaggcctctgccctcatgaactaatcacctccaaaaggcccatctcctaatccatcaccttgtggggtaggatttcaacacagattattttgtaattcatagacgtgatgattgggtgttcctatgcatgtgtgagatgtgccaccttcaaaccttgttactgtaagagttaaagaaagaggaaagaagccagaaaagg

SEQ ID NO: 845999 - DNA, 567 bp, Homo sapiens
tttaatagactttactttttagaacagttttaagttctcagcaaaattgagtgggcggttcagaatgcccatataatccctgccccacacatgcacagcctccccaacgatcaacagcccrcactacaatcgtcttagcccactgggcagctataaccaaaacaacatagaccagtggcttataaacaaaagaatttatttctcacagttctggaggctgggaagttcaagatcaacatgctggcagatttggtgtctggttagggcctgcttcctcataggtgaggctttctcactgtaacctcatatggccgaaggggcgagggagtctctcaggtctcttttataaaagcactgatctcattcctaaggcctctgccctcatgaactaatcacctccaaaaggcccatctcctaatccatcaccttgtggggtaggatttcaacacagattattttgtaattcatagacgtgatgattgggtgttcctatgcatgtgtgagatgtgccaccttcaaaccttgttactgtaagagttaaagaaagaggaaagaagccagaaaagg

SEQ ID NO: 846000 - DNA, 441 bp, Homo sapiens
ttcaagatcaacatgctggcagatttggtgtctggttagggcctgcttcctcataggtgaggctttctcactgtaacctcatatggccgaaggggcgagggagtctctcagstctcttttataaaagcactgatctcattcctaaggcctctgccctcatgaactaatcacctccaaaaggcccatctcctaatccatcaccttgtggggtaggatttcaacacagattattttgtaattcatagacgtgatgattgggtgttcctatgcatgtgtgagatgtgccaccttcaaaccttgttactgtaagagttaaagaaagaggaaagaagccagaaaaggggctcaacagtcaaaaacaggtttattttggagaataaacctgaaaggggcttctggccaatttcagtcaggaggattctctattgcaactatcaacag

SEQ ID NO: 846001 - DNA, 554 bp, Homo sapiens
aataactaatatgatgtaaatgccatgtaaatagatgttatattgtattgctttaaaatgtgcattattttttgttgcttttccccccaatactcttgatccatggttgattgaatctgcagatgtggaacctacggacatggagggccaacttcacatataatgaaatattatttggccgtaaaaaggaaggaaatcctgccatttatgacaacatggatggacctggaggacattatgctaagtgaaataagctagacacaggaagccaaatactgcctcatctcacttctgtataaaacctaaactagttaaacacatagaagcagagaatagaatggtagttgccaggagctggagggaaggggaaatggggaagtattggccaaagagttcaatttgtgtaaagtttcagtgtgcaaaakaagtaaattctggaaacctcctgtgcgatatagggcatatgattaacaacactatattgtgttttaaaaaatttgctaagaaggtagattaagaaaaacaaagaaaaccaaaaaacccaaaggcagcag

SEQ ID NO: 846002 - DNA, 527 bp, Homo sapiens
tgttttaaaaaatttgctaagaaggtagattaagaaaaacaaagaaaaccaaaaaacccaaaggcagcagaaggacacttttggagatartggaaaagtttatggcattaatattggtagtgatgatggttacatgggtgtatgcttatctccaaacacatcgagttgtatacattaaatatctatagcttcttgtatgtcaattatatctcaataaagcggtttaaaaaattggataaaatattttggcaaacacaccaattctcaatagccccatgctgcccaacaccacagaagccaagcagacccagccacactctggatttggtctacaggttatgaggctgacctccaggataaactaagaactgaactgcaactggtgggcaagaaccaagggggagttcaagccctcagagacggtgccagccatgatatcgagatcttccctgcagcccagggccaaaattacaaaagcttccactgtgtgacttttattatgtgggtgagttacagaaaacagatgc

SEQ ID NO: 846003 - DNA, 529 bp, Homo sapiens
ccacccttaatggaaatgaaacaaatgtcttttccccttagttgagatcagactggactcttaagcagcagcctttcttatttaggaaacwggaaaatcaaagcaaacacagtagtccaaacatataaatggctgtgtttgcagaggccactttctggtcctaaccttctctgtcatagagcagatgcgaagaatccagtcttgaagctttcccatcctttcaacctctctggaccagatgagcaactgagatagacttgagtggtgctgcctgaggctggctgtgactttcacgtgctcccaacacctgctcccacctcctacagtacatttcactgcacgaccccaccctcggggacccactggcttccctctctgaccttgaggggcttgtctccctggtcactctcccctcctatgccttcttccccctcccaggagtccccacggctctacttccatttccctctgttcggctgtcccttcagtggagacctgagtcctccccagggggtccggggctgcctgc

SEQ ID NO: 846004 - DNA, 596 bp, Homo sapiens
tagtataaacataactattttgctagaatttatgtgtgtattttttcttggacccactgtatatttgtaaatagatacctaacttaaactttttaaaaatgtctttattgtataaatatccccattggaatctcttgaatccaggaggcagaggttgcagtgagctgagatcacgccactgcactccatcttgggcaatagagtgagactccgtctcaaaaaaaaaaaaaaaagtccccattgcatattgagaaactaaccctgaagagcagtaagaactgtctttgtaccttcttccatgaggaattaatggcccctataaagaaactctacagatagaaatttctaaacgtactttataaagcacctctagaaatatctccagcttaatagcaggaagaaatctttcccttgagaagattatcttggtttcttagaataaaccaacccactgcccactttattttatattwacagaatcttttaccactggcatgaaacaagtaacatgctagttaatttagcaacttaaattttgcagtatgctccccggttccaaaacagtataaacaagatttaaccatatataagtatca

SEQ ID NO: 846005 - DNA, 619 bp, Homo sapiens
ctagaaatgaggctacaatttagccatcaaactaaggcagctaggtttgcagaaccaaaaatgcaagttgtactattgcaactacagtagccagtgctttagaagtttgaacattagattaaaatcaacaccttgacttgaacttggaagctgaccaagagccagtgtaaattaaaaagctaatgtcctgagccggaagtcacccagctggcttcagaagaagctgcacattaaattcaggcaaaggaatgcttccgtgttatccacaaagtgagctgtaccttatgaggttaatattgctgtgacaagtctaaaagtcactaagtgtggccacagacacacacacacacacacacacacatacacacatacatacatggttctatagtcacatgagaggattctgcggtttctgcccatatggcatacatttctccctcatctcgtaagagcatctgatttttatgtgggggaatcacaagtcctagtcaaagtrgttgggatggtgctgacccaccctaagactgagctagacagacaacctaggtcttgtcagataatttcttcctgctggtcacagagatgggttagcaactgcacataatccaagccaggctta

SEQ ID NO: 846006 - DNA, 606 bp, Homo sapiens
atgatgtaaaagaagtgagggttgttagtgacatccaagaaccctgggagcatgtgtctgggattgctgcttgaactcaaaccatgggcctgaccagttaggatagcgtggcaggacaggccaacacgagggcccaggagccagctgggaaccccatctccctcctagggaggggaggccacaggggaaagagagtcacaggacggatctgctgggaccagccctgatgcacagatgctaatacacacagaaagagttgtttccagagttccagcaccacagctcctccctccaggaggagctcttttttgagaaagagtcttgttctgttgcccaggctggagtgcagtggcttcatcttggcttactgcaacctccacctcctaggttcaagtgattctcctgctgatacagaatggctgggttccagctaaaccctaccctcaagcctggaaccttggccctaagtgaaagcagctgaccctgcaggtctgggttcccagctaaactccaccctcaagcctggaacctcrgccctgcgtgaaaacagctgaccccatttttctgcccaaatgattgcctttttggcctgccacgcccctatgc

SEQ ID NO: 846007 - DNA, 602 bp, Homo sapiens
cctgcttggcatgacatgcctccctctctaggacctatgagtacaataatttcaagtgcctctcccctagagtttccctagccaggctggagtgatccttgaagaccccaccagaggcacttccccatttacaacacagacgtttgctaagatattggcctgtgatttcaaccactgtcacttctgattaccccctgcctttagcaaattagttgcaggagaaaacttctgccaaggataaccaagaacatcacagtgctggtgcgtcgaaacatgtagagaatgagttggaagattatgacaaatcaaagtcacctttcagatcaaaggtattgaatctgagaagagtgtgtcactaaggctcacaggacctgagactattttagagcctgatttggggtgcataaagcaggcacaggtgacccttgaacaccacgggttggaactgagtccacgagacacagattttcttctgcctctgccacccaggagacagcaagaccaacccctccccttcctcctcagccttcctcaatgtgaggawgatgagatgaagatctttatgatgatccacttccagtcagtgaatagtaaatatactt

SEQ ID NO: 846008 - DNA, 656 bp, Homo sapiens
atggataaaggaaatgcggaatatatacatgatggaatactattcagccttaaaaatggaaatcctgtcatttgtgatgacagggatgaaactggaggacattatatcaagtgaaataatccaggcaatgaaagacaaataccaaggatctcacttacatataaagtctaaaaaagtcgaactcatagaagcagagagtagaatggaggttaccaggggctggggttggggtgggaatggggagatgttagtcaaaggatataaaatttcagtcaagaagaatacattcagaagatctattgtaaaacatggtgattatagttaacaacaaagtattgtacacttgaaaattgctgagattttaaatgttctcaccaaaaaaaatgataaaaatgtgaggtaactgatatgttaattagctttatctagtcattccacaatgtatacataatcatcatattgtacaccataaatatataacaggtttttttaatctggaaatatctttaattgacctttgccaattaaaaaataaataatttaaaaaacaaatagatacttttgtcatgaaaatcacttattctttaaataaggtacacattgacaatgactttgactcattcactattaataaracatcttttggaatgtcaaaa

SEQ ID NO: 846009 - DNA, 484 bp, Homo sapiens
gcttttgaactaacccaatctgacaaagaaaaagaaaaaaaawttaatgaaaaaagcctctaagaaatttgggattatgttaaatgaacaaacatttaactggtgttcctgaggaagaagagaaatctaaaagtttggaaaacttacttgaggtaataatcaaggaaaatttccctggtcttgctagaattctggacgtacaaatacaagcagctcaaagaacacccaggaaattcatcgcaaaaagatcatcacctagacacatagtaatcaggttatctaaagtcaagacaaaggaaagaatattaagagctgtgaggcaaaagcatcaggtaaactataaaggaaaacctatcagattaacagcagatttctcagcagaaactgtgcaagccagaagggattgggatcctatctttagcttccttaaacaaaataattatcagccaagaattttgtatccagtaaaactaagcttcataaa

SEQ ID NO: 846010 - DNA, 484 bp, Homo sapiens
gcttttgaactaacccaatctgacaaagaaaaagaaaaaaaatttaatgaaaaaagcctctaagaaatttgggattatgttaaatgaacaaacatttaactggtgttcctgaggaagaagagaaatctaaaagtttggaaaacttacttgaggtaataatcaaggaaaatttccctggtcttgctagaattctggacgtacaaatacaagcagctcaaagaacacccaggaaattcatcgcaaaaagatcatcacctagacacatagtaatcaggttatctaaagtcaagacaaaggaaagaatattaagagctgtgaggcaaaagcatcaggtaaactataaaggaaaacctatcagattaacagcagatttctcagcagaaactgtgcaagccagaagggattgggatcctatctttagcttccttaaacaaaayaattatcagccaagaattttgtatccagtaaaactaagcttcataaa

SEQ ID NO: 846011 - DNA, 549 bp, Homo sapiens
gctttcagggaattttccaacacatgacttagtcactgatatgaaatcacatgtgagaagtgccccttagactccacggttggtgctcctggagcgttttgtmcctcagtcacattttccattgtttcagagcttcctatgtagttgctcctcccccctccctctccctcggtaactggacttttctggggtgcagggtccctgacttactcatctctacactgcctgcagcactgtgccctagaaggagtggagtaaatgtctgtataaggaatttcacaaaatattttatagaattgggattgagaatgagcagacctttaggggtggtgaagagccgttagggtagcaaaagagctatccataactgtgagaggtttgaaaatctgttctgaaattcctatcgcaagggatgcatgtcctttgaaatcttacttaaaggaaaggaggctgagtgtttgaatccagttgtcttaggacatacacgtgacctacaggcagtagctgatgaggcgagggaaaaggagctgcagtgacttgcttcatcct

SEQ ID NO: 846012 - DNA, 642 bp, Homo sapiens
aatggatccaagccaagaagaaatctgaattgtctgataaagaatttagaaggttgattattaagctactcaaggaggtaccagagaaaggtaaaaatcaacttaaagaaattttttaaaaatacaggatatggttgaaaaagtctccacagaaataggtaccacaaagaaaggacaattacaacttctggaagtaaaagacacacttagagaaatgcaaaatacactggaaagtttcaacaatagactagaacaagtagaagaaagaatttcagagcttgaagacaggcttttgaattaacccaatcagacaaagacaaagagaaaaagaattaaaaaaaaaaaatgaacaaagcctccaagaaatttgggattatgttaaaatgaccaaacataagaataactggtgttcctgaggaagaagagaaatctagaaatttagaaaacttatttgagggaatagtcaataaaaacttccctggtcttgctagagatctagacatccaaatacaggaygctcaaagaacacccgggaagttcatcacaaaaagatgattgcctaggcacatagtcatcaggttatctaaagtcaagataaaggaaataatcttaacagctatgagacaaaagcatcaggtaacc

SEQ ID NO: 846013 - DNA, 586 bp, Homo sapiens
gactggaacatagcccctttgtggccacggtggaaaggatgccagaccatcatcctgaccactcccaccaccatgaaggtagaaggaattccggcctggatccaccacagccacgtgaaacccacagcacytgagacctgggaggtgagaccaagcccggacaatccctacaaagtgactctgaaaaagacaacaagccctgctccagtcacacctggaagctgactggtctatgcacagccaaagcataaggaaactcatcgtgggactcatttttctcaaaatttggacttgttcaataagaacttcagctgattttccccacatggaggactgtacccagtgtattcatcaggttacagaggtagggcaacaagttaaaataacctttctgttttatagttattatgaatgtctaggaattttgaaagggatctgcttatataatgccactcagtataatgtgtgtagcccagggaatgaccaacctcatgtgtcttacaacctgtctgagcctcctatgaccacagtttttgaaataagattaagaactgaggactggtggggactcatgaaagatacaagt

SEQ ID NO: 846014 - DNA, 586 bp, Homo sapiens
gactggaacatagcccctttgtggccacggtggaaaggatgccagaccatcatcctgaccactcccaccaccatgaaggtagaaggaattccggcctggatccaccacagccacgtgaaacccacagcacctgagacctgggaggtgagaccaagcccggacaatccctacaaagtgactctgaaaaagacaacaagccctgctccagtcacacctggaagctgactggtctatgcacagccaaagcataaggaaactcatcgtgggactcatttttctcaaaatttggacttgttcaataagaacttcagctgattttccccacatggaggactgtacccagtgtattcatcaggttacagaggtagggcaacaagttaaaataacctttctgttttatagttattatgaatgtctaggaattttgaaagggatctgcttatataatgccactcagtataatgtgtgtagcccagggaatgaccaacytcatgtgtcttacaacctgtctgagcctcctatgaccacagtttttgaaataagattaagaactgaggactggtggggactcatgaaagatacaagt

SEQ ID NO: 846015 - DNA, 390 bp, Homo sapiens
aatttgtttagacaataataattaaggaccttttcttcttcagaatgataaaaaaattaatgatgtattgaagatactactaaagaaactttacttttggaktatggcctctgcattgaagatctgtaggattttttaaaattaattttcaagtctttccatgacctctctgttctaagaaatatcatctttgtaataatttgtgtgaatactttacaaatcaaaaattgattcacaatactgtactaccataatcactaattttaagtctcttaaacattttctatattacttttcttgattataaaatgtcaataatatgggcatgctcttaatataacagaatatttaattatattatttttcccatcaacccaccagtcatttatt

SEQ ID NO: 846016 - DNA, 521 bp, Homo sapiens
ttttttttttctttaagctctgaggaaatgttaagtgccttaaaatagctaaacagggtttattctatttggccccagagatactaggtaagtccaacggatagaaattataaggaggcagctgttggttcaggataaggaagtttttatttgcttgtttgaagacaggttcttgctttattgcccaggttggagaatagtggcgagatcatggctcactacagcttcaacctctcaggctcaagtgatcctccttcctcagtctcctgagtagcagggaccacaggcatgtgccaccacacccggctaattttttatttttagtagagacaaggtctcactatgttgctcaggctggtctcaaactcctgggctcaaccggtcctcctgtcttagctccccaaagtgttgggattacaggcatgagccacgtcgcctgaatactgcccgaccagktttttttttaatagtttaaaatggtctggcttgttagggttaacacctggtccgtggaggcattc

SEQ ID NO: 846017 - DNA, 472 bp, Homo sapiens
agctctgaaattcaggacacatacatttatagagtgtgaggctgtgcatacgtacattcatcccttaatgttctcaaggaggcccaggatccccaaaatattataagcattgcagtcagatgatatagcactagcaaagcattcatccctttccatataacaggagggaggggaagaaggaagtttccatgtgcaggcaatacgtgagagcatgggcaagtgaggatttgtatgctccctgtagccagaggtgaaatattcaacgcttttattttttctcccgtcttcaatgacctcccatttggacccatagtttatttatagagagcacacactccctaattgtcagatggtttttttgggaaaactcttagayagtacagtgagttgtgaccctccaaaggatcacaagtacataaacagatacaaagtatttatgtggtattaaaatttcatggtgatggtgcaaggg

SEQ ID NO: 846018 - DNA, 627 bp, Homo sapiens
gaaatttttgaaaacattatgkattttcagcctaatgaaagccccagggctgaaaactttggggaacaggaaagaaaacaatagtataaaaaaggattttaaacagtcacaatccagttcccttaaagttcccctccaaaattccctggtaatggattctgccaaatgacacaccacatcttggcagaagaatttcagaaaacgaacaaataaaaaacacaggttgttaaatcctccagctgtaatgtagtgtgtctctgttattacacattatttagaggcaaaccaggctaagagagcttaaggtacctcgctacgtattaggaaaattataaaatttgcatatatgaaattagatagaagaaaattatacaattttcataattatgaaaattgctagataaacatattgtcagtactaatttttctttaaatagatggactattcacagagagattaaaatgagggagattttaagaaggagttaaagaagagaggttgacagaccctacaaacatattgaaactgactttagagggaactccacaggaaagatatccaaagcgaagtcctccggacaaacctgtttttggctcaagtagtccatgccccgggccacgtcggca

SEQ ID NO: 846019 - DNA, 625 bp, Homo sapiens
aaacaccactgagaagtccagaagtaattttacacatgttatctagaacgtgtggacccaggaccagcagcatcacttgggaasctactagaaatgcaaattcttgaaccccggccccatcctcacctcaaaaccattgaatccgaaactctggggatgaggcccagaaacatcttttaacaaactctctgagtgattctgatggacacttaggtttgagaaccactgatttagaaaagggaggtaaatataagaaatagcttaaggagatgaaagtggctacctataggaagcaggactgggaggtggagggtggagcaggagaatgctgttctttagataaaagcttcttattctatttgatgtcatgactctgaccatgaattactttgaaaaattggaaattatttttgaaaataaataaactgggacttctaaaatatgcctgtggcaagagcctggtctgggcccttaagatggaaacaggaagccagtgataaaatgcaggagctgaagctcagcacagttgctgctgtgtaaatcccagctcctaggggaggccctgccttcctgaaggctcatctgcttccttctctgtccctacagagtgctgcagacctcctcc

SEQ ID NO: 846020 - DNA, 625 bp, Homo sapiens
aaacaccactgagaagtccagaagtaattttacacatgttatctagaacgtgtggacccaggaccagcagcatcacttgggaagctactagaaatgcaaattyttgaaccccggccccatcctcacctcaaaaccattgaatccgaaactctggggatgaggcccagaaacatcttttaacaaactctctgagtgattctgatggacacttaggtttgagaaccactgatttagaaaagggaggtaaatataagaaatagcttaaggagatgaaagtggctacctataggaagcaggactgggaggtggagggtggagcaggagaatgctgttctttagataaaagcttcttattctatttgatgtcatgactctgaccatgaattactttgaaaaattggaaattatttttgaaaataaataaactgggacttctaaaatatgcctgtggcaagagcctggtctgggcccttaagatggaaacaggaagccagtgataaaatgcaggagctgaagctcagcacagttgctgctgtgtaaatcccagctcctaggggaggccctgccttcctgaaggctcatctgcttccttctctgtccctacagagtgctgcagacctcctcc

SEQ ID NO: 846021 - DNA, 578 bp, Homo sapiens
ctctctcagcagttctagttggatcctttaactaaagaacttcttaaaggayacttcaatttcttttctttggccattgctataaaatgacatacccttggttcactccaaattagaattacagaaattgcagagcccctgcagaagaaaagatgtcctaaagtgttttcaagattattatacttaatagatgtagataagccattaaattatgagttttaagaattccactatctaaatcaaatatttgcaactccttcttttcacttttgtagagatatgagcttcaaagcttccatttaatttcaaagcttgatgacacttgagaaatagatatcaaagccttttaaagcctagttctttccagcaattgataagctatagagtacttggcctaagaaaactgaagaaaaaccagaataaattcagcaggattataataccacgaaaagtaggcactatgaagtaagaaacagaaatattctcactttggcaggtcatgtgggtgggtgcagctcttaaattacccattaacaacttcatcaaaaaattcatgagcaatatatgctattactaca

SEQ ID NO: 846022 - DNA, 352 bp, Homo sapiens
acacttccatgcagagaaaaaggaactcaattccctrttggtaggaatgtaaaccagtacagccaccatgaaaaatcatacgaagagtcctcataaagctgaaaatagaactaccatttgatccagcaatcccactactgggtctctacccagaggaaaacaatcagtatatcaaagagatacctgcactcatatgtttactgcagcactattcacaatagcaaagatgtggaatcaacttaagtgttcataaacagatgaatggatacagaaaatatggtatatatgcacaatgaaatactatttggccataacaaagactaaaatcatgtcatttgcaacaacatggatt

SEQ ID NO: 846023 - DNA, 514 bp, Homo sapiens
aagatataaaagtagagagtaaagtgaatgtattaagaaatcctgtctgataacagttttaatagttaagcataacatgtatatttatgagcttcctggtaaccagggaaaagaagcagatacattggattgcataactctctttggtcataaaaagcagatgagcttaaaaggagaaatggatatattgctggttatattagcgctttgagatatgcaacatattccaaaataccagatgaatgtaatctatgaatttaaagcatgccattgcaatgaattaggataatggcagattttaccaagtggaaatactgaaacttttttttaatgtagttttatgatttttagtgatgcaggactaatgataaactaatactagggaagtaggagattcaaggwaataaaaaataaaaaagaacatcacttttctggcttctgggggcttccagtatagctgaatggctagaaaactctattagttacatggtccttaataactccattgtcattc

SEQ ID NO: 846024 - DNA, 514 bp, Homo sapiens
aagatataaaagtagagagtaaagtgaatgtattaagaaatcctgtctgataacagttttaatagttaagcataacatgtatatttatgagcttcctggtaaccagggaaaagaagcagatacattggattgcataactctctttggtcataaaaagcagatgagcttaaaaggagaaatggatatattgctggttatattagcgctttgagatatgcaacatattccaaaataccagatgaatgtaatctatgaatttaaagcatgccattgcaatgaattaggataatggcagattttaccaagtggaaatactgaaacttttttttaatgtagttttatgatttttagtgatgcaggactaatgataaactaatactagggaagtaggagattcaaggaaataaaaamtaaaaaagaacatcacttttctggcttctgggggcttccagtatagctgaatggctagaaaactctattagttacatggtccttaataactccattgtcattc

SEQ ID NO: 846025 - DNA, 571 bp, Homo sapiens
agaaagaggtagctctcaccacttctgaaactttaatagcggtattaagagatacttttacctttattagtttcattatattcagtattttaaaataaaacaaattttaaataaactagtcacaaagaagytttaacatctgtcaaagaaatatatttttaaagtatgatcttcatgggccatttaagcctccttcctcttctgcttatccagctctctttccattaccctttccttctccatgttcttcctgctgtaccttagccaagcttcatccctgacagaaagctacacagtacccttccctctttgaagtcctagacttttttctcagcaccatcagatcggcacagctaatttctcctgtagatctttcttccctggctggccaagggtgaagccctccaaagccaaaccccacaggattgctccctggacttaccacaggagttctaccacttctacattcccataacattccttgaattaaattagtccctcaggtcctctttatcttatctttgcattgggaataatcataggatcaatctcatagaatacctgtgaatat

SEQ ID NO: 846026 - DNA, 557 bp, Homo sapiens
gaactggaggccattatcctaagcaaactaatgcaaaaacagaaaaccaaataccgcatgttctcacttataagtgggagttaaacaattgagtacacatggacacaaagaagggaacaatagacatcagggcctacttgacatccaaaaaaatatccattagtcactatgctcattacctgggtgacgaaataatctgtcactaaactcccatgacacacaagttacctatgtaacaaaccgcacatgtacccctgctaacctaaaataaaagttggaaacaaaagcagatagacaaacaaacaatgcccctcccaactcctttcaaaaccttttgctctttctgcagctcaaaaagtgagcacctattagaagtacctcttaacacttattaaatactgagctttctgcagataagcagtgacttaggaagtaatgaagccraagccagatctattttaatatttattctagcctgaaataaatgtttatgtccttgaaacagataagaatttggtgggataataattacaaccagcgtgatttaataaactgtt

SEQ ID NO: 846027 - DNA, 629 bp, Homo sapiens
actactttagaagtctggacacagaacaggaaacgagaaaatgatagacaatatataccacgctgcatgcccagtgataccagctctaccaagaagaacttaaagggaagggagtcttgaactggggttgaagttgtagttgttgttgtagaaagatccagagaagtgccatttttatttcaagactattattatacacagttttactcttttactctcaggctgatgtgggctgagaaataagaatcacactgtaagtttccttcggtggcattcaatcaggtttcagagatatggatttacctgctgtgtggtcccttaacccctcagcagttcactgtctccttgccttatgttgaactgattcccagaaaacaatatgaaaaatcagaggactaattaactttccagttccttctgcatgaaaaatatgtaagttccaaatataccatttgactgagacattagaaaccatagtgcactcaagggaggtgactctactctaaggtatttcacktctcttgatatcagaagacccaagttcctctttctgctatgttgtactctacccaacagaaaatagactgggaagcacctttgcgggcaatgaagaaaagacactgaagagg

SEQ ID NO: 846028 - DNA, 579 bp, Homo sapiens
aaaaatgttttcaaaagttcatgacccagaatcaaaatgctttgaaactgtagcttgaatgagcattccatattttccatctgtatcttcatttctttgtgctttttctatcaaccttaaggaaacaggggcatgatttaaagagagatgtaacaggacgcaaattgtctccaaacttagtctttagctatcaccttgattatgagctagaaacttggcatcctaaagactccattttccagcctaccttgcttctacatgtgacatatattgtgtgaggctcctgtgaagtcttcttaaaggaaacatcacatctctctcctctccattttcctctttcctgaaggctggaatatgacatgaggacttgagcttgagcagctattttggaccatgaaccgaatgtcatggatgaaataacatcaaaagaaaaaaattgagattgtataaactaatcaagccactatactagccccaaactgcctatctctagactgtcccacaaaaaaaaaaagtaaatgtctartttgtttacatatctgttacatgcagctgaacttcctttgaactgacagaggt

SEQ ID NO: 846029 - DNA, 593 bp, Homo sapiens
tttactgtactcattttttgtgatgatgtgagatgataaaacgactgtgtgatgctatgaagttaggtgaatgatgtaggcattgtgacayagtgttagactactactgaccctgtaatgatacatcagaaggaggagcatctgctttgggtgagtctggttgatggagccatgatagggtagatggttggatgtctggagcagacagtattgacaacaaatgagcaggtagcttatacagtgtggacatactggacaaagggatgattaacatcccgggcaggacagcccaggatggcacaagatttcatcacactaatcagaacagtgtgcaatttaaaacatatgaattgtttatttctggaattttccatttaatattttcagacacataagggaactacctattggagaagtcattggaacactgctatgtggctcacaatattaaatctggactcagacaggagaaacttagtgaaatgataaacaaaagattatattattgacttctaaataaatcaataactgatttgaaaattattaaattggatgaatgatttatataactaagtaagcaattgtataattat

SEQ ID NO: 846030 - DNA, 595 bp, Homo sapiens
ccattgggaagcatctgtgtatgaaatctatttgtttgtttcttcrtttgtttattgagacagagtctccctccgtcttccaggctacagtgcagtgtcaccatcttggctcactgcaacctgcaccttctggatccaagtgattctcctgcgtcagcctctcgagtagctgggattacaggcaactgccaccatgcccggctaattctttttgtatattttttgtagaggatgtttcaccatcttcgccaagcttctctgaaactcccaacctcaagtgatccgaccgtctcagcatcctaaagtactgggataactggcgtgagccactgtgcccagccagaatttaaaataaataatacataatgctgagtgtatgattttgggtgacagagaagatctcactaatcagatatttgtgacattaatgaaaaacacggattgaacccctgaaagattggcggaaggattttccacacacagctgtcagccgtgaaggcagaaagctgaaaacaatctgatgtggaaggaagaggctctgcctcaaatgctgggaatgagatggggagaatgacaagacgactgtggagagacg

SEQ ID NO: 846031 - DNA, 595 bp, Homo sapiens
ccattgggaagcatctgtgtatgaaatctatttgtttgtttcttcgtttgtttattgagacagagtctccctcygtcttccaggctacagtgcagtgtcaccatcttggctcactgcaacctgcaccttctggatccaagtgattctcctgcgtcagcctctcgagtagctgggattacaggcaactgccaccatgcccggctaattctttttgtatattttttgtagaggatgtttcaccatcttcgccaagcttctctgaaactcccaacctcaagtgatccgaccgtctcagcatcctaaagtactgggataactggcgtgagccactgtgcccagccagaatttaaaataaataatacataatgctgagtgtatgattttgggtgacagagaagatctcactaatcagatatttgtgacattaatgaaaaacacggattgaacccctgaaagattggcggaaggattttccacacacagctgtcagccgtgaaggcagaaagctgaaaacaatctgatgtggaaggaagaggctctgcctcaaatgctgggaatgagatggggagaatgacaagacgactgtggagagacg

SEQ ID NO: 846032 - DNA, 535 bp, Homo sapiens
agtggagatatgggcctaggaaggagatatgggcctgggtgtggagatatgggactggagaggtgatatgggcctggagtggagatatgggcttagggtggagwtctgggcctggggcggagatatgggactggattggagataggggcctagggtggagatctgagcctggattggcgatatgggcctagggtggaaatatcagcctggagtggagatatgggcttggggtggggatatgggcctggaaactgggtctctgcacagccgacagccctgttcttgggtgcaggtaggcactgagggtgagtttaacttcagcccaggaagggcctggctgccaagactcacagcccagtgggggcagcaagggagggctggttcgcctgcagatggatcgtccatcatgatctttctttccagggttcttcttgctgcagggggcctggccacatgagggtgagtccttctccaaaccttcgggtgtcatctccccacataagaggattttcctgaaacaggagggaagtcctgt

SEQ ID NO: 846033 - DNA, 605 bp, Homo sapiens
caaaagctggaaccataccccttgagaaccgaaacaagaccaagatgaccactcccgccattttaattcaacatggtactggaagtcctagccaaagcaatcaggcaagagaaggaaataaaaggcattaaaattggaaaagaagtagtgatactgtctctctttgctgatgaaataattttatacatagaaaaccctaaagactctgtcagaaggctcctgaaactgataaacaaattcaataaagtttcgggattaaaaaaatgtacacaaattagtaacatttctatgcaccactaacattctagctgagaactaaatcaagaacacaattccatttacactagccacaaagaaaataaaatacctaggaatccatctaaccaagaaggtgaaaattctctacaaggagaactacaaaacacttctgaaagaaataagaaatgatacaaacaaatggaagaatattccatgctcatgaattaggagaacaaatagttaaaatcgccatacttccaaaaacaaattgcagastcaatgctatccatttcaaaatgcaatgtcatttttcacgaaattataaaaatttattctaaaatgtattt

SEQ ID NO: 846034 - DNA, 392 bp, Homo sapiens; identical to SEQ ID NO: 838038

SEQ ID NO: 846035 - DNA, 665 bp, Homo sapiens; identical to SEQ ID NO: 838039

SEQ ID NO: 846036 - DNA, 600 bp, Homo sapiens
atctttgggagaaattatagcttgcttttactctgaaataaagatgtttccctttttgcatggtctggtctaaatgcttaatcatatgggaagaaaaagasaagccagtggattggccttatggaaatgaacgttagaggataaacagttaggggcttgatgaaatgttcaaaggcttttcttgctgattttcatgattgtctttattcacgctgttgtcatcctgccagcccaagtacagctgcgtctgtgatgctgggtggatgttttcacccaacagccctgcctgcacgctggacagagacgagtgcagcttccagcccgggccttgctccacacttgtgcagtgtttcaacactcaaggctctttctactgtggggcctgtccaacaggtacattctcagggccacaagccaggctctgcatgccaggttggcgaggtgccagaaccaattttctttcactattgatgagtaagaagacaattcttaggaggtgttcaaatccagttttgtgtcctggttctgctcgacgatctcactgctatcacaattccacgtcaaaagggggaggcttgtccaaaactgtgctagagtcag

SEQ ID NO: 846037 - DNA, 642 bp, Homo sapiens
acggaggaaactttatcattgtacagccagcacctagcatagtgcctgatacatacaagaaactgaaacttcctaagaaatcggccttctggtattgtggaatgagaaaaattttcactkgcgggtaccctacttattgactcttccaaggtctttgacggctgcctgctcacctcctacagtgccctaaaagaagtatttgcttgacatgaaagatctttgtagaaagactccatggaactgacctcaaactgccctgactctagacaagggaccaaaaaaaaaaaaaaaaaaaaatggagaagctgggcagtcacaaatgatcaacaaatctgtaagccatgcattccctatcaatgattttgcaaatttacagcttttgaaaatctgtatcacagacctattgtgagtacagacaaggagagtgtttcccaatgtttagtggtgatcctagtatgagctgaagtgtgtttccccaaaattcatatgttgaagccctaacctccagtacttcaaaatgtactggagggctgggcatggtggctcacacttgtaatcccagcactttgggaggcccaggtgggcagatcacttgaggtcaggagttcgagaccagcctggcaaacatagcaaaaccctgtc

SEQ ID NO: 846038 - DNA, 635 bp, Homo sapiens
cttttcagcaggatacctgctgagtgtcttgagcctagcagccatttagtatcaatccttggagacatttgtgcctttcttttcttcctggcctcatctcttctaggcctcagyggaaggttatgattgttttctgagcgtgtgtgagcctttctccttgccctgtctcctgtggtctgcttttatttccgggtgcctgctgcatgagtcctagttcctcacaccactctttttttttttttttccttttttgatatttggggtaagctaatcagctaactattaatcaactaatggtattaaagaatcggctacttggatctactatgtaatattgtattgctttctctgatgattttctgaagtctcaaatactttcatttttaaaacttcacactttctcctgacttgggtcagggcatgcacataattggttttatacatatttggggaaagagggtggtcattgtaaaatatagctacggctacaattgtggagttccaatttcggctaacattaaagaatatgctagaattctctggatctgaaaacattttgaaaatggttttcttcaccagcaagacagaagggcagtgaaggcattcctttataattatttcccttattcttctta

SEQ ID NO: 846039 - DNA, 569 bp, Homo sapiens
ccacctcactcctacaaaatatcctagctacgacttagggccataggttcatcacatcaattttgcatatgaatcaatgtcctatttacttttcctctatggtgtttaaatgayatctgattcctcactgtaaccttgagcttctagtacatgctacaggatagttctataactgaggaagctttttaagtgggaatgttagccacttgggcacttaatcatctttttatggattacaggatgcattttaggatattgtttatttatgagggagtccttataagctccctaagtacaaagacattctaactaaaaatatgagactttattcttaattctctcgtcctaattaaactgaatagtccgtcttcctaatgagactgaatagtccgcctcactgatttcaaatctaccatgtttgtgaatccaaacacaattccaaagggccaccttttgctctttctcagttgaaattacaccactctggctaggcgtggtggctcacgcctgtaatgtcagcactttgggaggccgaaacgggtggatcacctgaggttgggagtttgaga

SEQ ID NO: 846040 - DNA, 610 bp, Homo sapiens
aaccctgatcactgaaccctctacagctaatctcaccactgaacggccagctttgctctgcatacactgtgagatcccaggccccaccaggaacaagccatggaggaacagccaayctgctcatttcagtttgttgcctcagcctgcatctccacaggactcctggatgaaataggaactgcgaacacacttgagctgcagccgctgaatttggggcatctggaggaagcccatttcagggcaagacagcctcttgcattaggccaagagaccagagaaatcaggaacttgggaggcacggggacttagcattctaccccacccactgccttttatgcagactctgactcaattagaagcccagggaggtatagcaacaaaaatctgaggataggtagatgttaggaaagaaagaaaacctgtctctggtcctggctttcaaattcccatttggagtaaattttcagaatggaaattgattatttaacttcaatgaattttttaaaaaaagaatggactttttttggttctgtctcagtgattttaattaattttcagaggtctacagcaataactgttacctagaatgcttttatggataaaatgtgat

SEQ ID NO: 846041 - DNA, 585 bp, Homo sapiens
aagggtacacagtttcagatagacataaggaataggttttgagatctattgcacagcagggtgaccatggtcaaaataatgtattgtgaaaaattagccrggcgtggtggcgtgcacctgttatcccagctactcaggaggctgaggcaggagaattgcttgaacccgggaggcggaggttgcagtgagtcaagatcgcgccactgcactccagcctgggagacagagtgagactccatctcaataataataataatagtaataatctattgtgtattttgaagtaacaaagataatgcatttcaaatatctcaccataaaaaaatgatgggtaagagaggtgatagatatgttaattagcatgaattaatcattccacattgtttggctatattgaaacatcagattgtaccccataatgtgtacaatcataagttgtcaaccaaaaacaatattaataataaaaagtgtattgcggagcatacctagcatgcaggtcttggtttctaataccattctccaataaaaggaaccagggctcctttaagaaaaggctgattcttagactggggcaggaaatataca

SEQ ID NO: 846042 - DNA, 505 bp, Homo sapiens
gtggcattttagtggaggccccatctgaaagaatgaagtacctcccaatatccctctaatcctaccagagaggtgacctccagttccattccctgttggacaggctctgggggccaaagagagaaggtggatgcaaacatcttctgtatcaagtgtttctgacttcagttctggagatcaggacaaatggatttttgtctagaattgaccacgctcatctctcccatttcccatgccaagtcctgaaccaaggaactgagtggagaaatgacttcccaaactttacacactttcctccagcatttgaattcatggctacctgtgccctgatcctgcaagggccacgagcctctttcaagtgtctcattgctcctgggccagactcaggtcgtctgtccctcaccargtaactctgcccactccctgaggctcccgcctacctctcggaggcctgttccaagtattatggtgatgtcagtggcttctggctccctgcctgaagccc

SEQ ID NO: 846043 - DNA, 413 bp, Homo sapiens
atctcatttactttaactgctgtatagtactgcattacatgactaattcacaacttgtccatcttttcattgataggcatttaaatgatttccagtttttgcctttacaaacaatgatgcaatgaacatatgttcacctgtcactttgtatacatgtgcaagagacttttagcttacatacctagaagtagaatgactaaatcttaggatatatacatcttcaactttgacagatattgccaatgcactctccagcatagactcaccaacttacactcccaccagcaatgtataagaatatttgtttccctgcatccttgacaaacttggttttatcagatattatcatttttgccagcctcaggggtttgaaatcatatcacactatrgttttgatttggatttcacttgat

SEQ ID NO: 846044 - DNA, 640 bp, Homo sapiens
ctgtcattcatagcatccaacaagagaggatattgttactgattggcacagagagaaggaagctgaattaagaataatargaagtctgccaaggggcctgaaatctctattctgaaaattcgtgagaattggaagatctgggatttgatctgcaggctggaatgaaaagaagagggtgccctgcaatgtggcaggaagacccatctcaagccccaactgggtaaacgcaatcaataacatcctgtcaggaactttttgtggtctcatgtaaatttaggctacctgaataaaagataaaaactgtcatttcctctatcatcatgtagcgtgatgatttatctatgcctttgaaagaaccaaaccaaaccaactaatgcttaaacgttcctggttatatgtgtccattgtgaaatataagagaagaatagtgcaacatggtgagatattttaggacatttgcctagaggaacactagaagaaaatgaggactaattaactcaagacaatgggcaagtcattataattattcctaaggcaggctagagggaaaaagtgtcatgggttgtttaatcaaccctgaactgcgggggtgactagttataacttaggtgttttccaattagctaataccaaacattaa

SEQ ID NO: 846045 - DNA, 537 bp, Homo sapiens
tggaggaagcaggaggtggaagacgttcactctaagcatctggatccataactgggcactgaactttaaattccaagcaaggagaaaggaatggggtccatacaggttaaccctcaaagggcccatagcttcctctttgctgtcccatccccagatttggagcacgtgtgtaaattgagcctactgatataacaatcttgtctgtcagggacctctctggttcttcctatgttataccagcaagaagggatggagggttctttgaggatgatccactgagatgctaatccacaaaataataaccccaggagatgggttaacaaagaacagaaggtgtgaatcatcaataaaagtaaaaatttatatttagtatacattaagaagtataccccaaaactagttttttttaagctgccaagattattcctgcctgagaacatctgccaggaamgttctactcagatcttaccgtggccaactccttgttgcccttcaggttccactcaagtgctacaatcacagagaggatttctttgg

SEQ ID NO: 846046 - DNA, 634 bp, Homo sapiens
attgtttgcaaatattttctcccattttgtagtttgtctgtttattctgtggatagtttcttttgctgtgcagaaggtctttcgtttaatcaggtcccatttgtcacttttttttgtttgtttttgagamagtctcactctgtcgcccaggctggagtgtagtggcaggatctcggctcactgcaagctccgccttccgggttcacgccattctcctgcctcagcctcacgagtagctgggactacaggcgaccgccaccaggcggggctaattttttgtattttcttttagtagagatggggtttcaccgtgttagccatgatggtctcgatctcctgacctcgtgatctgcccgcctgggcctcccaaagtgctgggattacaggcgtgagccaccgcgcccggcccacttcttgtttttattgcaattgcttttggcatcttcatcatgaaatctttgccagttgctatgttcagaatggtatttttaagcttatcttctatggtttttatacttttaggttgcacatttatctaatcggtcgagtggattttagtatttggtgtaaggaaggggtcgagtttcaatcttttgcatatgcctaaccagttactttggcacaatttattgaa

SEQ ID NO: 846047 - DNA, 485 bp, Homo sapiens
aaagttccacttaaaggaaattatgaaggatggcccttcaggagggtttgggacagataaatctggggggaaaaggtgggtcgaagaactttgaaatcaaggtgtcttgggcctgggcatggtggctcacacctgtaatcccagcactctgggagaccggggtagatggatcatctgagcccaggagttcatgatcagcctgaccaacatagtgaaatcccatctctactaaaaatatacaaaaaattagtcgggcatagtggcacatgcctgtagtcctagctactcgggaggctgaggcaggagaattgcttgaaaccgggaggtggaggttgcagtgagccaagaccataccactgcactccagactgggygactgagtgagactctctcaaaaaatcaatcagtcaattaatctaacaatcaaggtgtgttgagaaaattttatgtgactgaggaccaagaaaggctggaggaagttagct

SEQ ID NO: 846048 - DNA, 643 bp, Homo sapiens
cacagggcggtttttctcctatatcagaattgaacaaatgtacaatcgggttttataacgagacattcagttcccaggggcaggcaggagacagtggccttcctctatctcaactgcaagaggctttcctcttttactaatgcacctcagcacagaccctttacgggtgttgggctgggggacggtcaggtctttctcatcccatgaggccatatttcagactatcacctgggaagaaaccttggacaataccccgctttcaaggacagaggtccctgcggctttccgcagtgcattgtgcccctggtttattgagactagagaatggcgatgacttttaccaagtatactgcttgtaaacattttgttaacaaggcacgtcctgcacagccctagatcccttaaaccttgatttcatacaacacatgtttttgtgagctccaggttgggtcaaagtggctggggaaaagtggctgcagcaaaactacaaattaacaacatctcagcaaagcaattgtttmaagtacaggtctttttcaaaatggagtctcttatgtctttcctttctacatagacacagtaacagtctgatctctctttcttttccctacacatatagactatataaagttatttttaatgc

SEQ ID NO: 846049 - DNA, 621 bp, Homo sapiens
ccagggtggggagagaggccaaaggggactatgctgggggcagttgccaccattcctcagaggtaacagcattgttcgcgttgttctctagcagacagagcaaccccatagctgtgtttaggatgcccagaggaccactttaaccttggggaccctgcacaagaggacctttagaaagaaatgcaagacctatttcttctttgccccatgcttgaccttctgccacccaaatctgggttccaggagagcctggcatttagagaagtttcttgccctttttatccatggcaaaaagctcctttgtctcagtcccagctctggtggagcatccacaggacaaagtctgagagagtgtgccagggggagagttaacacattctcagcctgcccagaggttcttgctgtgcagtttagagctgacttctctggcccgtcgctcatacccctctagccccaggccccacccctgcccagtgccttccgcctgtgtgcccagagcttctcgaagctctgtgggtagggattaggatcagagggacacaagtaggtctgagrttctggggtctcaggagaaactaagggatgacagatcagcttaaaaacaggaaaagggcttcaggc

SEQ ID NO: 846050 - DNA, 591 bp, Homo sapiens
gctttggtgagtgaaatggtcctaccagagctgttgttacttgggactgccaaaaagctccagttaaatcttcctgtgggaaccacagccaggcctgggtgtccctcggctttctccagtgttgggacatatttctggttgtccatgtcagaaaaaatttttgagagggtctctgtcacccaggctggagtgcagtggcacaatcacagctcacagtagcctcaatctccccaggctcaggtgatccttccgcctcaacctcctgagtagcttggactgcaagcaagcactattacacctgggtaaattttattttctgtagagacaaggttttgccatgttgcccaggttggtctccaactcttgagctcaagaaagccccccacctcagcttttcaaagtgctgggattacaggtataagtcaccacaccaagccccataaaacagcctcagttaagtgaggtcaggagaacctacaaacccaaatcaaatctgtccaaytggacctcagcaatttgctttgttatatttatcccagatctcttcactgagaagaggctaaacattgatttcctatgattgttactcat

SEQ ID NO: 846051 - DNA, 536 bp, Homo sapiens
acagcttggatcatcatgaagctctctgaacccttgacccacattttctcccttacatcctactcattagaggagacayagctaaggtactgttcagtggttcacatgccccagcctggagcccgttagagaaggggaagctgctgctgtcctccttggaggctctccctgagcacctgctttccacggaatgctcaggaaagaaaaaagtcacagggttgaaatgtgtaccgaatgtgtcaagtttggctgaaacaagctgataaagaatatttaaggagagctttatttttagaagcaacgcttctttcttttttttttttttttttttttagagagagacaggatcgcactctgttgcccaggctggctggagtgcagtggtgcgatcatcgctcactgcagccctgaactcctaggctcaagcagtcctcctgcctcagcctcccaagtagctaggaccacaggcgtgcaccactacgcccggctagcactcctttctttagtccactgttggtgttggtttttaactaggc

SEQ ID NO: 846052 - DNA, 591 bp, Homo sapiens
aattcccaagcccctctctgagggagtgtaaacctgagttagagatgagagaatcacrgagttggtctggggacatgctggttggacaaaaaggctttccagtggtttgggggagttttgcaccacatgtacaactaaggtggatcaactgacatcttggcagcccatcctttgttcacttaggccagggctttcatctgcagcatcactgatgttggatcaagtgattctttgttgtatggggttgtcctgtgtgttgtgggatgtttagttgacatgccttgctctatccattagataccagtagcaccttacccccaaggtgtgacaaccaaatatgcctctagacattgccaaatgggggaggtggcacaaaattggtcccagttagaaaaccactggttcaggcaactagtattttggggaagagagtccctctggggcacctacactgtttttttttttttttttttttttgcggggggaagtgtgcattagtctcagattataaaggtagcatgggtaccagccttcctgggagtttatttacagtttagtttatagtttagtgggggagggaggaaccacgaa

SEQ ID NO: 846053 - DNA, 563 bp, Homo sapiens
ataggatcctgatttttctcaagaaagcccctttccattctcagtctatgtagcccaggtggcactgacttcattctcaatgaatcagagcasgaccatggttattggcttagggatggcctcacaaccatctaatcaggccaatgagacgaaatgagtcaattcagagacacttatgagaactgatgggagagaggctctctctctctctgaacttgaaactgggagaatgtagacctgaaaaaagtaaaaaccactttccaaatcattttaagaggctaacaaaaccttgatatcaaaactgaaaaggacatgacagtaaagaaaaattacaaacgaatctttctcacaaacatagctacaaaaatcctaaatatcagcatactgaatgaaatgatacacaaaaaaaataatgcatcttgcaggcatggtggctcacgcctgtaatcccagcactatgggaggctgaggcaggtggatcatgaggtcaggagatcgagaccatcctggccaacatggtgaaaccctgtctctactacaaatacaaaaattagctgggcatg

SEQ ID NO: 846054 - DNA, 523 bp, Homo sapiens
tttgagtgataattgatgaaagttatatatacatatatatttaaggtatgcactatgatgatttgatatatgtatatattgtgaaagaatgagcactattgagctaattaacataattgtcatttcacatagttaccattttttatggtgacctcattgaagatgtattccattagcaaatttcaattatctaaaacattgttattaactatagacaccgtactgatcattatgtctccagaacttactcattgtataactgaaagtttgtacattttaaccgacatctctccattttccccatggcctaaccctagcaagcattcttctactttctgtttctgtgcatttgacttctgtagatttcatatataaacaagatcatacagtatttgtctctctgtgtctggcttattttacttagcataatgtcttccaggggcagacatgttgttgcaaatagcaggatttccttcttytgaaggctgaatagtatttcaatgtatgtgtgtgtgtgtatatc

SEQ ID NO: 846055 - DNA, 552 bp, Homo sapiens
atatatattgaagaatgttgttctatagttttcttttttgtaatgtctttttctgcctttggtttttagatgttggattcataaaattatttaggagtgttttcccctgctttttctcatggaattaggatagtatcctattattcttatttaaatgctgactaggatgcagcatgtaaaccaatagactgcagttgccttttgaggaaggctttaaagttcaaaataagttttcttagtacataagagctgttctaaatgagaaaataaataattttctcatttattagtttcggtaattccgatgttccatgaaattttcccatatcacttaggtttttgaatatatggccataggtttattcataaatttccgttattgttcttttaatattggcagcatcttttgtgatgtccattttatctaagttgttgaatttattggtacaaagttgttcataatatttctytatcatcttttgtctgtatgttctatagtgatgtgttaatttctttcattcttaacactcatactttgcaccttatttttta

SEQ ID NO: 846056 - DNA, 531 bp, Homo sapiens
gacagctcagtaaaggaaagacargaagattctcggaaatccatgccatctgacaactcagataagcctgccaacctgatccctgggagagagtctggcaaagatggtggcaggaccagttctagaaaccagagaacaaagcatgttactagaatagaatctcaggctcatgcctgtaatcagcactttgggaggccaaggttggtaggtctcttgagcctgggagtcccagatcagcctgagcaacatggtaaaaccctgtctcaactaaaactacaaaaaaaaattagccaggcatggtggcatacgcctgcagtccccgctgcttaggaggctgaggtgggaggatggcttgagcctgggaagtcgaagctgtggtgagctgagattgcaccactgcactccagcctgggcaatgggagtgagaccctgtctcaaaaaacaaaaaagaatagagcctcaggaaagggctaaggtaaaatacagttaatagacacagaacaggatccgggaaacaaagcaaaatcctat

SEQ ID NO: 846057 - DNA, 565 bp, Homo sapiens
aaaaaaaggtctagttcttcaaaacttcttttcttgaaatgtcaccatggtcttattagacaggaaaagcctctgtggcagtttatttcccaccctaggtaaccataatatagcccatatttcttttcataccattatctaaaaacaacaacaaaaaataataatggagataaacctaaatggataaactcctttttaaacactcatttactgttattattttgtgggagaggagtggggtcttgctctgttacccaggctggagtacagtggcgcgctctcatagctcactgtaacctcaaactcctgggctcaagctgtcttcccaccttagtctcccaagtagccaggactacgggcacacaccaccatgcctggcttaattctcaaagtttttgtagagatggagtctggctatgctggccacatttrcttaagtatatctttttattaaattcaaatacagtttaaataaaagggacaaatttagggcctttgtaattagtaaacggtttgtttttgtaaagtttttctactgtttttaaatgtgaggtaaggtcataat

SEQ ID NO: 846058 - DNA, 623 bp, Homo sapiens
attagttattaggaaaacaaaaattacactcacgttgaactaccactagacattgattagcaggactaaaatttaaaagactaaccayaccaactattggccaaaatgtggattaattggaactcctacactgatgataggaatgtgaagttttacaaccactttggaaaacagtttagcagttgttaaacataagcctgtcataaaatctagctgttacagaagccaggcgtggtggcacaggcctatggtcccagctactcaggaaactgaggcaggaggatcacttgagcccagcagctcaagaccagcctgggcagcatagcaagaccctgtctcaaaacaaaacttatggagaaaaatctagccattatagatatttacccaagagaaatgaaagcatatgttcctataaaaacttgaacatggatgtacataatagctttattcacaaaaactccactgaaattaacccagatgttcatcagaaatgaatgaatgaacaaaatataccaatacaaaggaataccactcagtagtaaaagcaaaggaacaaactactgacacaacaacgtggattaatctcaaaatcagtatgctgaatgaaggaagccagggaaaga

SEQ ID NO: 846059 - DNA, 436 bp, Homo sapiens
taacaaagacctgtctcaaaaaaaaaatcactgacctttaagcacaagtcttagtaacaataggcgatgctcacttcttttattattatyattattattattttttttttttttttttgagacagagtctggctctgtcgaccaggctggagtgcaatggcgcgatctcagctcactgcaagctccgcctcccaggttcacgccatcctcctgcctcagcctcctgagtacctgggactacaggcgccctccaccacgcccggctaattttttgtatttttagtagagacagggtttcaccgtgttagccaggatcgtctcgatctcctgacctcatgatcctcccacctcggcctcccaaagtgctgggattacaggcgtgagccactgtgcctggggatgctcttaaacccactgaagtctttgttcaagtgtc

SEQ ID NO: 846060 - DNA, 507 bp, Homo sapiens
tggagattaaagtcaagatggagttggttagatcagatctctttcactgttataattttctcactgttaaaatttacaaaggcagtttcaaaatctgaaacttttattgttaaattatgtatttattcctttagttctgtcatgttctgcttcttatattttggaactctgttgttaggtgcatacatatttataattgttatatcttcctgatggattggtattgtaatcactgtaaaatacactattatcattgtaaaatattcctttttatctctagtattttttgtctgtttgacttaaagtctattttgtttgatattagcatagctattcttgctcttactgtggcaatttgtatgatacctttttcttttagcctatttatatctttgaatcwaaagtttgtctcctgtagatagcatatagttggataatttttagttcttttgattggattgtttaattcattcatttttagtgttactattgatatggctggatttg

SEQ ID NO: 846061 - DNA, 576 bp, Homo sapiens
gctgtggtcatggttgccattagatgttcttttccactaaatctcagtggctaactgccaccagagactttactcctgacctctgcaccgtgatggccgccytgtcccctttgtgttctgtttttttcacttttgtggtgtttcactctgttgccaaaccttttagcttttttctctgactgctctattctcttaccaaagcgagggttttccctcctgtttctgagtggggagctgccgagaattgtcatcctcaggagggaatgtcgttgctggggctgcagagttgctgggtacaggcaggagggtggtgtgctccttcacttcactttgtcttgggacttaggcatatctcgggttggaattggggtagttatgcaggtgagaactaccagttcactagctggatgtttgtcatttagctaggcattaggattcagtagaaataaagttttatttcgttttgcaacaatgttgttttctgtttgggttgtttacattttaaatatacagtactctaggtattttgagtaatatgtagacagatgttagtggaccagcctaggagaataatga

SEQ ID NO: 846062 - DNA, 506 bp, Homo sapiens
gcatactatcatatcactgagccatatcaaaatgaagaacacgctaatgtttatattatacttatttcttgaatcctgggaatatttcttctatgtacaatttatctcaaaatattaatatayactattgtaataatacaataataaaaacatcttattgtctcttctaagaaatcaaagctccttaacttattttgccttcttcaacctatatatagtcttgaattcaggaatgatataaaagagacactagagctcagaaggaatctgtgatttatccaggcttcagtgaaggataataaatataaacatacctgaatccatctattttgacccagccccaataccaccacagcaagccaacttgctatcatccttcacatggactaaatacaatggattcctaaccggactgtatttctgtacttgcttaccttcaattcactttctatgccaaaattagggtgatcttctacaatccaaatgcattcatacattcgcttgtt

SEQ ID NO: 846063 - DNA, 567 bp, Homo sapiens
tttcccttaaagaagtcaaggtatgtttcctggtattctttggtactagttctgcttgctagagcaattcagaatcaggtgtatcccatcgcaagcatcatgtcaatatttgaagacagctgtaatgttytgaagagggaaaccttctctcctcccagttactcactgctagaaccttccaccaaagaacatgccttctgtacccttctccacgttgggcaacaatttttactttgttggtttgttttctaaatatagaaccattcccaggctgagtagaacattgaacccaacattatgttctactgaacattttaactgaacatgagactgacatatttttttctttcttttcttttttctttcttttttttttttttttttttttttgagtctcactctgtcacccaggctggattgcagtgatgtgatctcggctcactgcaacctccacctcttgggttcaagcaattctcctgcctcagcctcccatgtagctagctgtgattacatgtgtgctccaccatgcccggttaattttttctgtttttagtagagacggagttt

SEQ ID NO: 846064 - DNA, 628 bp, Homo sapiens
tgataaaagtgtttactgggtgctgagactgccctgtcactggacatgctattgagtgctttttctgtccctacattcttcagacactcttgaaataagaaagcctagtcttttaagtggsaaggatttcttcttattgagatccaagattatcacagatttacctatgagtgaaagcttgccataattgcaatatgaacaccgtcactaaaatgtaaactctggacatcagagaccatgtttgtttttctcaccactgtattcttagtgccctgaacagtgcccaactcatagcaagtactcagttgataattgtttactattgaacaactgaagatcaaatatccccataactgaataagtctagaagccatattcttttaaactcctccacaactgggatcagttaagttgcagccaatgtgagtttgattctcacatatgtttggtgctcatgaacaaatatctatgaaacacagaatggagtaccaaatgagaaacaacatacaataatttttgttttgtgtggctgaaattttagtatagaagacaaactatgaagataaaggtaaaaacaggcagatcaagaaaatgatgagtggtgttctatagagattgtttaggaaag

SEQ ID NO: 846065 - DNA, 614 bp, Homo sapiens
aaggtgtgacatttgctgctttgataaaatctccagatgatggtacttacacaggtgcaataargtccaagttgttaaccttatctcacttgcaaatctgcaatttcctttttcctcaccttctttttgagatgtgactaaagaagtgatggcaaggatgtgaaggattaggcaagagacatcctgggttgggagactgcattctatagtaaaaatcctttgtcctttatttcccaggttgaccatcagggtaatactactagctcattgctcagcttttcactttgctttgattggaagtcatcagtgacttagaaaaaaaagctttaaaaatgcaaaattattacttttcatcttagtaatagaagcagtagctttcttaatggtaatccactttttttccccctttggttttctttttagcaaagattggtcactgttgacttatctctcatttacttataataggtatcatgtatccccttgactcaccccaatttaagacactctctgataaaacctgtagtgctttgcaccttcaagttaattacccaagtatccctttctaccagatctcctaccctaagctcatcctatacagtatttctggaaca

SEQ ID NO: 846066 - DNA, 623 bp, Homo sapiens
gagatccccaagtttttgtttttgttttgtattgtattgttttttaaaaaggactaggagcagaaagaggagtggtaggagtggtaagtaagagctgaggctcaggatgacttgaaggcattgtgaarattaatagccataagagaaaatggaagactagaccttgaacctggacaaagatacgtttgaatctgagatgtttgcataaagttagacactaagaaggttatattcgtggtgaaagggtggtccaggaaaaaaatccacctgccagcaaagagagatgtcataaaacctggctatgtccatgactactacaaatggaaaatgaaagtagaactaaaactcagaattcttcttgaggatttgtaactatcgacattgcttctgtggctttgtggttcaaacccttagcacagaaataaaaatgatttcttttttggaactaccctctggcaactgacagaagcaacagtaaatgctgtgtggaggaaacatgcttagataaaataactctcaatacgtatttgtgtatgtagaaaagttatcttttaagagcaagaataaaatagcatgatttcagattaacaaaaactgggtaagtttataatcaacaagttctt

SEQ ID NO: 846067 - DNA, 587 bp, Homo sapiens
tttatcaaacatttctggtttcctgccatttagcccaaagataagattttaatttcctatcccctttagggttcagcatggtcatatggctggatttggccaatgacatgtgggtaacagtgatatatttcacttctgagtgaagggattgagagctaatccatgatttatcatgccacctttttcataaggtaataatgaaagcacctagccaacttggagcctccatcaggctgagtccctgcatgactaccatgaacagggcagaaaccaggacttattttttttttttttccatgaccaacatagtgcttggcatattattaaaattctagaaatacttataagtgtatgggggtatatatgtatgtgtgtaaatatatgtgtgtatgtgtatatgtatgtacacgcacatacacagagagagaaagagagaagctgaataatttttctgagaatcaaccggaattcgggcaatctagcatgaaaaatttcactygtagctgtgtttgtttcccttggtttcacttggttaactcagcatgttttataataacatcataactgctattattgactttattcta

SEQ ID NO: 846068 - DNA, 587 bp, Homo sapiens
tcatggatgacatgattttctatgtaaaaaatccaaaacaatcaacaaaaaatctggaattaataagcaattatagyggcattgcaggatacaaagttaatacacaaatgttcattgctgtataccaacaatgaacaagtggaatttgaaattcaaaacacaataccatttacattaacacctcaaaattgaaatccttaggtataaacctaataaaatacatacaagatctacaccaaaaaaacaaaacaaaacaaaaaagctacaaatctctgatgagagaaatcaaagaagtaaataaattgagagatactccatgttagggaggctcaattttgtcaagatgtcagttcttcccaacttgatctatagattcaaggcaatcttattcaaaatcccaacaagttatttcatagatatcaataaattggttctaaagtgtatagggagagataaaagacccagaatagccaacaaaatattgaaggagaagaacaaaggtaaacgactcatactacctgactctaagacataatataaagctacagtaatcaagacagtgtagtactgacaaaagaataggcaaa

SEQ ID NO: 846069 - DNA, 568 bp, Homo sapiens; identical to SEQ ID NO: 844484

SEQ ID NO: 846070 - DNA, 610 bp, Homo sapiens
atatgctagatatctgctaaaagtaccaagattcatgcacttagcctaaaatagaaaattctccatgatattttaagtgaataaagaaccatagagaaacatccccattttataaaataataatcacatagggctatccatggaaaacattctgaaagcaaattctccagtcagtcagttatggtcacctctggggttgggatcagggaaatatccactgtctatgctatactttattctgtaaatctttatttcttaatgaatatgtactgttaacagaaaaaaaaggaatgcaaaagttgttgcttagctcagaaaatacccagttgatcaccgctgtcatctagcaatcgtatttttaaaaaaccatgtgctgtgaggttatataagttaggttcttaatagaatttttcttattattcaagaggttaatcatacctgttaccatgtattctgacagctgtttctgagccctctttcccgctgctctaatgtctatattttagtaaagtctattttcaatatgagttccrtatttctgacctattctctaaaatttgtttggaacccccacatcttcattcatgcctttttgcacccattcacagac

SEQ ID NO: 846071 - DNA, 612 bp, Homo sapiens
tacgatattccaacttgctatttgagaaacaagaaaaaagaaatttgatttattgggtgtgaggtggaggatgggagagtgagtagggtaggccaattgctttattattttgttcacaaacagtgattatgaaaataagggcaaaattgtaaagaactgttgggggctgtaggatgatgagcatagggttaggtgagctgctgaattggaagatagaggagatccctttactgagagcccattctcaacactggcttgaagacacttaggtgagtttcagtcagattaagcccagtcatttgttaataaattaaaataccaacattacaaagaatatgtattggatatttgtgagtacacacaaatacaaccaatattaacaagttgaatacaaccttatatttatttccaggatctgtgtctaattttcagtattaatatattactaaaagaatattttaatagacagatctattttgttctctacaattcttatccaaaactttctgcttggggaastacctaatttccttttattctaataagtagatgaatgagacttcacttaactataatttccctctattagctgttcatgacacgttgcttggt

SEQ ID NO: 846072 - DNA, 619 bp, Homo sapiens
aggaatttcatcttcttgcccccaaacctaaaacccttacttgmatctgagccgattctccttgttcctttcagttacactggaagaagagcccctccttccttcaagccaagtcatccccttgggctctcaccacttcagtttataccttgcctgtagtccagtctctccagcatcaattccatcagcacaaagacataatttaattccttctaccttaaaaaaaaaaaaaaaaaaaaaacagctctccctctcttagggtgagatgaagtggttggcaacaggccaatgctactttcagaggcgtttgaatcagagtgactccattttgaataggggttgagtaaaataaggctgagacctactgggctgcattcccatgagcttaggcattctaagtcacaggatgagacaggaggtcagcacaagatacacgtcacaaagaccttgctgataaaacagattgtgataagaaaagccagtcaaaacccaccaaaaccaagatggcgacaaaagtgatctctggttgtcctcactgctgattattcactaattataaaattaacatgataaaagacactcccaccagcaccgtgacagtttacaaatgacatggaca

SEQ ID NO: 846073 - DNA, 622 bp, Homo sapiens
taaagtctctttcctccagtttcctttccagagaattttgttcacagtgctgagacaaagacctaccagactcttgattgagggtcatactctaagagcagggcaaactagaratagataggcaatttttttttttttaatatagggtctcactctgtcacccaggctggagtgcagtggctcaatcttgactcactgcagccttgacctcctgggttcaagtgatcctcccacctcagcctcagctggagctacaggcatgcaccactgtacccagctctttttatatttttttgtagagatgggggtctcactgtgttgcccaggctggtctcaaactcctgagctcaagcgatccacccaccttggcttcccaaagtgtggggattacaaagtgagccactgtgcctggctggatagactgattcttatccaaactgcatcttaaccttgactcagtttagtccctattgggattaaactgtttaatacttcactctatctgcctagcagagaatagggttaactctacttggggggaaaacgctagagtctttccagtgcttttatacaaaatatttggcattcctttaaatattactcaagagaaaagaccatttaa

SEQ ID NO: 846074 - DNA, 622 bp, Homo sapiens
taaagtctctttcctccagtttcctttccagagaattttgttcacagtgctgagacaaagacctaccagactcttgattgagggtcatactctaagagcagggcaaactagagrtagataggcaatttttttttttttaatatagggtctcactctgtcacccaggctggagtgcagtggctcaatcttgactcactgcagccttgacctcctgggttcaagtgatcctcccacctcagcctcagctggagctacaggcatgcaccactgtacccagctctttttatatttttttgtagagatgggggtctcactgtgttgcccaggctggtctcaaactcctgagctcaagcgatccacccaccttggcttcccaaagtgtggggattacaaagtgagccactgtgcctggctggatagactgattcttatccaaactgcatcttaaccttgactcagtttagtccctattgggattaaactgtttaatacttcactctatctgcctagcagagaatagggttaactctacttggggggaaaacgctagagtctttccagtgcttttatacaaaatatttggcattcctttaaatattactcaagagaaaagaccatttaa

SEQ ID NO: 846075 - DNA, 622 bp, Homo sapiens
taaagtctctttcctccagtttcctttccagagaattttgttcacagtgctgagacaaagacctaccagactcttgattgagggtcatactctaagagcagggcaaactagagatagataggcaatttttttttttttaatatagggtctcactctgtcacccaggctggagtgcagtggctcaatcttgactcactgcagccttgacctcctgggttcaagtgatcctcccacctcagcctcagctggagctacaggcatgcaccactgtacccagctctttttatatttttttgtagagatgggggtctcactgtgttgcccaggctggtctcaaactcctgagctcaagcgatccacccaccttggcttcccaaagtgtggggattacaaagtgagccactgtgcctggctggatagactgattcttatccaaactgcatcttaaccttgactcagtttagtccctattgggattaaactgtttaatacttcactctatctgcctagcagagaatagggttaactctacttggggggaaaacgctagagyctttccagtgcttttatacaaaatatttggcattcctttaaatattactcaagagaaaagaccatttaa

SEQ ID NO: 846076 - DNA, 508 bp, Homo sapiens
cttcagaccccaccaccatttctacagtagccactgtggatctccctactccaggttctgcctcttccatgtaatgagccaaacttggccaaggcagtcaacaagcagcatgcatgttagagccaggaacagctgggtccatatccttcctctgctacccacttcattcaggttgctaagccactcaagcctctgatacttcatctatgaaatgggggtgacggtctctagtttatggagttgttgggaggtgttagtgagataccctatgaaaaatgcctgacatggcataggggctccccacatattaggcaacctttacctccaaccccactgacagccacacacctgcccatcagggagtgaggttgagaatatcaaaatatatatttgcaacagaaaatgatagagataaatagcaattgcattggggttacaagggtaggaatgatggattctgcytgggagagggaactagtctgagaacataactattgaccagggtatt

SEQ ID NO: 846077 - DNA, 464 bp, Homo sapiens
gaaaccccatttgcctccttcttccaatccaaacaagtcctgttggtatctgcccccaaatatctcttgaattgcatttcttctctccacaccaaccccttaccataccccgtattkcctaactagccccacctgtccattacccgtgcttaagaaaccacacacctgtaactcatcctggattcaactatgcagtggttccctttgtgccagaaagctcaggacgaccccggcagtagctgctgaggccctgtggctctgggcccactctggtgatgtcttctttggctgtctgtgctccctcacattcagctgctttcattctcctgcaggctccaggctctctcatcccttgggtctaaaaaatgctgtcctctttgggagctcattccctctctttgaaccttctctcatccagataaaagtactcatcccatggggctcagctgaaaacacctgtctcc

SEQ ID NO: 846078 - DNA, 715 bp, Homo sapiens
catccacggctgtttgcagagtacaacttgcccctgctctccctatcaaaaaaggacgtcacaatgcacacgtatgagcttgacattagtataaaggaaacttygacatctatttttaaacagctgctaatgtatcaagagtgaatcatttgatgccatctatactttattattaagaaataactaggatgccaaagcagtcctatagagaaaggaaggcattttcaacaaatggtggtggagcaacgggttattcatataaggaaagaaagaaaaatctcgacaccctacttcacacaaaattaattcgagttggcacacagacctaaatacaaaagccaaaaacttactacctaatagcttaacgaaaaagacatatgggaccatctttttgaccttggataggcaaagatattttagaaaggacacagaaaacattagtaaagaaaaagatgatacactgaactttttcaatatttaaaacttctgctttttgaaatatgttattgagaaaatgaacagggaaaccacagattgggaaaaaatatttgtaacacatatatttgacttatatccggaatatacaaagaattcccacaacttgataataatgttttttaaaaccattttgaaaaaatgggcagacttgaaaaaatacttcacaaaaagattatagatgaccagtaagatgaaaagatactcaacattatttgtg

SEQ ID NO: 846079 - DNA, 648 bp, Homo sapiens
aggaaagaggcctgaagttctgctccagccaatgagcccattccttgactcagtgaatatgcaacactataattatcactcygagtcataacccactagcttccctactctacccttcagaggacaaaaaacacataaagatcctacaatcctcttagcattacataaccaaccaacaatagataaaaattcccagatctcttgttttgaggcccagtccttgtctgtaactcaagcatatctctctttttagctggaactctcaacagagacctgagttcactcaacatttgatctatttggcaactggtccacttaatagttaaatctactaggatttaccaaagggatgtgtcatcatttttaaatgtttagtctattccatagttgtgctacacaaaataactctcaaaaaatggttctattgattattttatgaagtatacttattccaaatggactctctgattgccaattctacattgtcttagtccattttggctgctataacaaaataccataaattaggtggcttataaataacagaaatttatttctcacagttctagagaactagaacttcaaggacaaagtagaatcagtatctggtgaggatcctctttctggcttacaaatggtgccttcttg

SEQ ID NO: 846080 - DNA, 553 bp, Homo sapiens
atgagggttcaggctctacctctgtgatctaattaccttctaaagtctccacctcctaataccatcactttgtggtgarttttaacatacaaatctgggggagacataaacattccaaacatagcattgcccaagtcaacaggtaacaacttgagccaatagtctttccagttctgaagtttatgtacttaaacagtatgagctacaacttgggatcacctgcctaaatttttggatgtatataatacatcctaaggaatagagagagagtctgtattgactaaaattagaagaaaggtttcatggaagagataatacttgaaatacaggtcttgaagcattgacacaatttacataatgtgaacagatggaagaaaacagtgataatttcaaggtggaggcagggaacagtaagtccctaaatgtcaatggaaacttatgtaaaatgatgagttctatctagaagcagataattgagtggggccaaagctttcagttgttaaacctaccaagatgaatggacgtgctcaggatggcaacctcgagctcctga

SEQ ID NO: 846081 - DNA, 628 bp, Homo sapiens
tatttatggtttatcatttaatgcccatgacaatgtacttttataatttctatatcagagttgagaaaacagacacatagcattaccagttagtaacacatcttcaagatatgttaaaggtaatattartttcatataactaattatttacttgaaatagctgaaatgattggaattgtgtaattggcttagatataactattctatttaaaagaattgctaactgaattagttttttactttgaagatgttttaaagcttgtaaatacttgaggattttggacacaagctccgcatagttctatagtatatgtgcttgggtttaaagttgtattgcttatttattatttccaatggtcttgtctgaagggttgcataatttaagcaacctttgaaactgtatacatactttgtacttatataaaaatttattataatccagtaattctggggaaaacaaacttaaaacttacattttttaattttatattttcacaagttgggaagaatttaatattttgtcttaattgcaatattttaattatgaggttatagaaagatttaaagtaaagctcatatcttctgatggaataaccaactgaaatgaaaactagaaaaagatgttttg

SEQ ID NO: 846082 - DNA, 621 bp, Homo sapiens
ggacacacatgttcattacagcactatttrcaatagcaaagacatggaatcaacctaaatgcccatcagtggtagaatgggtaaagaaaatgtggtacacatatgctatggaatactacacaaccatgaaaaataacaagatcatgttctttgcaggaacgtcgatggaactggaggccatcatccttaacaaactattacaggaacagaactgcatgttctcacttataagtgggagctaaatgatgagaaaacgtggacacaaagtggagaacaacacactgggttctacttgaagttgaaggtgggaggagggagaggaacagaaaaaagcaaccaatgggtacgaggcttagtatttgggttatgaaatggtctgtacagcaaatgatgtgagtttgcctatgtgacaggccttcacatgtacccctaaacctgtagtaaaagttaaaaataataaataaataatataaaaataagtaaataaaaataaaaattaaaaagagcaagaaagccttgctagattatatggatgtttcatttatatttctcttcccttattcatatggtcttcctatcagtggaaactatggagagtcatcccttcctgcagcatatgca

SEQ ID NO: 846083 - DNA, 645 bp, Homo sapiens
catttttgaggggatgatggatatgttcactatcttgattgtggttttagttttatggctgtatacatacgtcaaaacttatcaaattgttcaatttaaatatgtatagtttgctgtatacaatgcctgaataaaactatttttaaattgtgcataacttatatatttattttttcctccaaaaagatactattaaattgacatacattattaaggaacaaacatcatataacctaaaacatatggcttataacttcaaccacaataaccagcctagtcagtcctttacacactgcccttctgttctccttaccctaccacatgtgcacataatgcaaaattctgtacttctttgtttcaacccaacatgctagaaaaaagactataaaactctgagcgatggtttccattggtgactctcccccattgcatccccagctataggttttggtgtgtcagtcctgacagtctgaaggtgtttacaaaatatctttgtgatagtattcagtcmttcatacagttcatggcacaaggaactccagaaaagtagtgacttggccaagaactacagtgagaaactaagtatctgacctctaggccttggatctttttctaagatccagagtcaagtgtgcagagacagtg

SEQ ID NO: 846084 - DNA, 635 bp, Homo sapiens
cctttggatttccatataaacactagaatctatcttttggttaccacttttaaaacatgggattgtgattgatatttaactgaacctataaagaaatttgggagaaaytgacatctttacaattaagttttacagctcaataacctagcatatcttttcattcatttaaagtaatgagataattattttctgtgtagagacctagtgtatcttttgctaggtttattcttgaatatttttttaatgctgatcagatattcttgatattttttgatgctgtgatagtgaatggtatctttttaaaaaccttttctagcctgagcaacaaagggaaaccttgtctacagaaaagttagctgggtgtggtggtatgtacctgtggtcccagctatgcaggaggctgaggtgaaaggatcacttgagcccaggaggtcgagactgcaatgagccatgatcacatgatcatgccactgcactccagcctgggtgacagaagaagaccttgtctcaaaaaaaaaaaactttgttgttagtttataaaaaatataattgatttttacttatttatgcattgctaaatttactgagtaattctaatagttttccatgcattttttggatttttacaggtacac

SEQ ID NO: 846085 - DNA, 635 bp, Homo sapiens
cctttggatttccatataaacactagaatctatcttttggttaccacttttaaaacatgggattgtgattgatatttaactgaacctataaagaaatttgggagaaactgacatctttacaattaagttttacagctcaataacctagcatatcttttcattcatttaaagtaatgagataattattttctgtgtagagacctagtgtatcttttgctaggtttattcttgaatatttttttaatgctgatcagatattcttgatattttttgatgctgtgatagtgaatggtatctttttaaaaaccttttctagcctgagcaacaaagggaaaccttgtctacagaaaagttagctgggtgtggtggtatgtacctgtggtcccagctatgcaggaggctgaggtgaaaggatcacttgagcccaggaggtcgagactgcaatgagccatgatcacatgatcatgccactgcactccagcctgggtgacagaagaagaccttgtctcaaaaaaaaaaaactttgttgttagtttataaaaaatataattgatttttacttattyatgcattgctaaatttactgagtaattctaatagttttccatgcattttttggatttttacaggtacac

SEQ ID NO: 846086 - DNA, 509 bp, Homo sapiens
cacttgtcttgatgtagaaaaagtcactcccaggaaaggagcctgagatacgctctcagtaaatgttctctgtggtgtcatatgtacagtttactctcattttttttttttaagacagactctcgctttgtcgcccaggctggagtgcagtggcacgatctcggctcactgcaacctccgcctcctgggttcaagtaattctcctgcctcagcctcccaagtagctgggattacaggagcgtgccaccacacccagctaatttttgtattttcagtaaagacagggtttcaccatgttggccaggatgttctcaatctcttgacctcatgatccacctgcctcagcctcccaaagtgctgggattacaggtgtgagcccccatgctrggtctactctcattatattcttaactgaccaagaaaaaagatcaaaagttaggattcctgagtctcatcttaattctgttatttattcactgagtggtcttgggcaagtcatttcatttttc

SEQ ID NO: 846087 - DNA, 633 bp, Homo sapiens
cattgtattagcagaaatcagatcttaggaaatcggcccagttcccctgtgtgrtcccgtggaacagtgtctcagctggaactgtcgcggtagagcttggtcggagtgcaaaagggacagacgcatcaggggtccagctcaaggctcctgacagaggtatggctcagggagctgggggaggggcagggcagagatgctaggataccgatcagcacatttgggccctggcttctgagggttggctttgtctttccaaaagggagaggggggcggtgcggggggggataaaggggggaacatgcggaagcacaagcattagacaagctcattgcatacatttgggctatggtgcagagatggggaaaagccaaggcttgggctaatgccatttatgctattttgtcaagaagcagatctcatccttcctttttgggcatttctaatgaagcttctagtatgggtcagggatgggggagtcagatctagaaacaaaggcttaataggaggagacacccctacagctactgtaagtttatgatggagaacatgcaaggatcctcgcagctttcaagaggagggctgggaaacctttctctccacacacacacatacatacatacatgcatgcatgca

SEQ ID NO: 846088 - DNA, 654 bp, Homo sapiens
aatccggaaggctttgctcagggggatccatttctcccccaataaacggatagacacagggaggctaggacgtaagggcaggctgcgccaacygcttggaagacaaaatgcccaaaatcaatgtggaaaagctaaagctaggacgacataatacagcaggacagtgagcgtgaccccctacccacggcgctgaggccagcgtcctgctattaactgagcagctcaccagcgtcacaacagctgctaacgggagaggagcgggcagcggcgactgtgcatttttacacttctcctggacagcattaattttattttttttactaggcaaaatatatatggctcttagcgtgtgccagacacttgttctcagctatgaaaaatattaacttttcatttcatcctcacacaaccctctaagatggatactgccatccccatttcagagaagaaacgggtttagggagcctaagtcacttagcccaaatctaagctaagtggcagcacttaggtttgcaaacagcctgggcccagaatgcatgttctcaacaattgtaccaagctgctttttcacacagtgtacagcaaaagctttaacgtcttacaaatttttgacccagaaaccccttttgtaagaatttatcctaaggaaatagc

SEQ ID NO: 846089 - DNA, 564 bp, Homo sapiens
gaaggctttgctcagggggatccatttctcccccaataaacggatagacacagggaggctaggacgtaagggcaggctgcgccaaccgsttggaagacaaaatgcccaaaatcaatgtggaaaagctaaagctaggacgacataatacagcaggacagtgagcgtgaccccctacccacggcgctgaggccagcgtcctgctattaactgagcagctcaccagcgtcacaacagctgctaacgggagaggagcgggcagcggcgactgtgcatttttacacttctcctggacagcattaattttattttttttactaggcaaaatatatatggctcttagcgtgtgccagacacttgttctcagctatgaaaaatattaacttttcatttcatcctcacacaaccctctaagatggatactgccatccccatttcagagaagaaacgggtttagggagcctaagtcacttagcccaaatctaagctaagtggcagcacttaggtttgcaaacagcctgggcccagaatgcatgttctcaacaattgtaccaagctgctttttca

SEQ ID NO: 846090 - DNA, 532 bp, Homo sapiens
taacaaccgtcacagtatttattctatagcctcacaaactcacaaatcgggaatccatactttaggatttttcccagctgcatgttccaagcttatgttctgtccacagatcaggagaaaactgtacatttacttttaacttctcagactcaattcactctccgcctatcaaataaactgtttgctcccctgtgccaaagagaagtacaagttacatcctcaattctgtaggaaattgctttgtgttcttttatgtgatggtcagtcaagagtggccacaagaggagacaggagaggctcaggaaagaagaaactttattatattcacagatcctagagagaggaggcacagcacaccgtgtagtgctatgtgggaaagacaccagggtgagcaggaggcagaagacaggagtgaggggaaagtttagacaagagcctttaactgagattttcaagggaaagacaaggcaatgcagcataaagagtttcasattggctagtttgaatagttttggtgggctctaagctataa

SEQ ID NO: 846091 - DNA, 333 bp, Homo sapiens
cccataaaactgaagtacaaatattctgggtgttaaccatayactcaagcacagactgaaataaaaattgtagtcgtgatgtcatcaaatgactgggattttccacaattataattgttatttattgactttactatttgccaaatattttgctgaatgttttcgtgtataatctcattcggtcctcaccaaaaccatatggggtagttatttttactattcccattttaaagatgggaaattgaagttaagaggttaagtgcctttcccaaagtcacacaactagtggaaagaggaactgtgatatgagcccaggcagtttaatagtaggga

SEQ ID NO: 846092 - DNA, 333 bp, Homo sapiens
cccataaaactgaagtacaaatattctgggtgttaaccatatactcaagcacagactgaaataaaaattgtagtcgtgatgtcrtcaaatgactgggattttccacaattataattgttatttattgactttactatttgccaaatattttgctgaatgttttcgtgtataatctcattcggtcctcaccaaaaccatatggggtagttatttttactattcccattttaaagatgggaaattgaagttaagaggttaagtgcctttcccaaagtcacacaactagtggaaagaggaactgtgatatgagcccaggcagtttaatagtaggga

SEQ ID NO: 846093 - DNA, 566 bp, Homo sapiens
gcctgtaatcccagctacacgggaggctgaggcagaagaattgcttgaacccgggaggtggaggctgcagtgatcccagattgcacaactgtactccagcctgggcgacagagcaagactctatctcattaaaaaaaaaaaaaatgtggtgacactgaacaaaataaggatataaaacaatttggaaaaccaaacggggttattgtacattgtcttccatgtactctcctgcacttaccaaattttcttcagtgaacatagacttattttatatttagaaaaaagcaataaacatttacaccaaaaaaaacctctcagcattcacagacaatcaaaacaacctgtagaaatgccactaacagtatctttgaaagccaaaccatcacactattctttgtattgcagttacccagaatgccacagagattttcatatgaaggagactggttgctttcttttttttttcttttccttttcaggtccatattgcttkatctgagcatactgcaaagtgtcctaaaagccatatgggagatagacttcttcgcagctgcaaaggaaacatt

SEQ ID NO: 846094 - DNA, 487 bp, Homo sapiens
gtattctctgcatagacaaaaggaagaaacaattttcctttgccatataaattaatgaaattatgccagggccrtaagtagactatgggcccttcaagaaacattttttaaagacaaagatattgggtgaagttcactgatttcacagattcgttgtttgcaagcatgcaaattcaactggagtaatttcctttagcctattagagcaaagttacagagaagcccagtgtaatcttctgaatttatgctatcatctgagaagggatattctgtgactatgaaaaggtatagtagtttgaggctatagggatgggggcaaatggtatgattacactttcttttgtgaatcaattccagatgtgccattagattctttgaatgctgaaggaacaaaatatcagtgctagagaacccatactggtaatctagttgaattttctccttttacagaggaagaaactgagacctagaaagacagattgcctgc

SEQ ID NO: 846095 - DNA, 600 bp, Homo sapiens
ctgctattcaacatagtattggaagtcctagccagagaaatcragcaagagaaaaaaataaagaggcatccaaatagaaaaagaagaagtcaaactatctttcttcgctaatgatatgattctatacctggaaaaccaggaagattcccccaaaaggcacttagaactgatgaattacttcagtgcagcttcaggatacaagataaatgcataaaattcagtggaacataacagtcaagccgagagacaaattaagaatgcaaaccaatttataatagcaatgaaaaaaaaatgcccaggaatactgctaatcaaggagataaaaaaaactctacaagtagaattacaaaacactgctgaataaaatcagagatgatacaaataaatggaaaaacattccattctcatggatagaaaaatcaatattaaaatgcccatacttcccaaagcaatttaaagattcaatggtattcctaccaaactatcaacatcatttttcacagaatttgaaaaaaaaagctattataaaattcatatggaaccaaaataaaaacctgaatggcaaaaggtattcttaagcaaacaaacaaacaaacgaaa

SEQ ID NO: 846096 - DNA, 471 bp, Homo sapiens
ggagtgggtccctgccagccccaactggaggtgcgccgcgcggggtcagaagtgagggcgtccggagcgcaaatatctcgccgtttgtatttggtaggacmgcggccgtaggcactgggtgcccaggtccctcgcttcccgcgctcggcggggcctggggcccccagagggcggggagggcagagggctctggcggccatgccaccgcgcgggagacccggagagctggctaacccggctgagcgttcgcctggcttccgcggctcttccgcgtcttcggctctcaaacaggggaaactcgggcattgagctctcaagaataagaaccctaactctgcttcctgactgtggtaggattcgcgcaaactgaagattcgaagggtttccagaacttctggtccctctccctcgccgcctttcctaggtttggaatgtctcgagggaggttagagacctgggcatgaagaaact

SEQ ID NO: 846097 - DNA, 633 bp, Homo sapiens
ccatattttcttagcttttacctcatgtcctctttttgttccagaatcccactaggatactatactgtgtgtagtttttaaatctcctttgacattgactgtgacaatttctcaggatttttttttttttttttcaattaccgtgaccattttgaggagctctggtcaggtattttgtaaaatctccccctgttaggattcatttgttttccttatttgtctgggtttgttttggggaggaagaccgcagaggtattttcatcacgtatatagggcacatactatcagtattctatttgctaagtataacttaggttttacatcaatgataacattaacactgatgtgaaccttaatcatctggctggggtagtgtttgtcaagtttctccactattaaactactcccacacctccttcctgtctttccatactgtactgttggagagaaagtcactgtacagtccacacttaaggagtgggaagttaatgtacttcactgccttgagggcagagtatctacaaaaaattatttaaaattactcaacatgggaggtgtatttattcagacatttacatcagtatgaactcatgatcmaattgttccacttttggcctttagaaactcgtttat

SEQ ID NO: 846098 - DNA, 670 bp, Homo sapiens
ttaaagtcgtataaaatcagaatctggaaaagaaaaatttgttgaacacaaaacaagagggctctttgggggatattgggaacatatgtgtttgtttgtttttatttttatttatttagttattttttattttgagacagagtcttgctctgtcacccaggctggagtgcagtggtgcaatcttggctcactgcaacctccgcctcctgggttaaagagattctcctgcctcagcctcccaagtagctaggattacaggcacttgccaccatgcccagctcatttttgtatttttagtagagacagggtttcatcatgttggccaggctagtctcaaactcctgacctcaggtgacccacctgtcttggcctcccaaagtgctgggattacaagtgtgagccactgcacccagcctgtttgtttttaattttttgtagagacagggatctccctattcttgcccaagttggtcttgagctcctggactcaagtgatcctcctgcctcggcctcttaaagtgctgggattacaggtgtgagmcactgcactaagacttaagtttgtttttctaaatctctctttcacacaaatgaaaaaaagatataccaaataacaaaatgtatcctgcttgtaaaataatgtaaaacagtttcttcaagatgggcataa

SEQ ID NO: 846099 - DNA, 357 bp, Homo sapiens
cagaccatattattaaccctatgccacttcaatctcccttaacaaccctgtgaggggaacctgagagtctcattaactgggttctggatttagggtcactgttgtcaaaactctggtaactgttctcactrgaaagttatggatcagaagggcagtcttgggaaccagtgggaaagctagggaaacactaccaccctgactaggaggaagagcctatgttcatagcatattatttttgttttatgaaaaagtttatctgttcacccaacaaatatttgttgcatttttaccatgtgtcaggtacagtttaggtgctagggatacagcagggagcaaaacagaccaaaattctgtttt

SEQ ID NO: 846100 - DNA, 592 bp, Homo sapiens
gtaccctcagcccccctggggttctctggatagaatgaggggcaaacaggcaactgaggatctagttggtccttaagggcatgctcatggcctgtgcagtccatagcctgttgcactttgtccagctgagccccagcacaggggcccccagctcatgtgcacacagccatccacagcagccctccctcatcccctgcctacagcctgggaagtgggcagagccagactgagctccgttaaggagacaggcactgtgctgagtgctctccaagcagtatttcatttaatgaaactactctatgtgttaagtgctctatttgcctcattttccatggggaaacagatgcttcgagggaggaagggactcacacaggattattgagctatcaatggaagagctgggattttaatccaggcaggcaggtgacactcagacatcaacaggggctctggagccccgaggaggtatgctyactctgggctggtagcctgggaatgctaccaggagaagggctttggagaagggtggcagggcctcccccagggtgaccaatatccaaaggcaatggatgtgagccagaggcccggggat

SEQ ID NO: 846101 - DNA, 558 bp, Homo sapiens
caaaacaccctgcacaaacggcttagtattttgtattctcttttgattgtgatcccggggagggggaaggctggcagaaaatcacttagygcagcacctggcacatagtgagtgctcagcaagtgtgagccattgcgttgctgtggcttcagtgcgccatccacagtgtctgccgtggtgcccactctgagcagggccccgtcataagggaaacatattaacagcacagcagctacacgcacagggagcgctcactgtgttccgggcactgctctgagcacttttcacccattgactcctctaatcttctcatggcccttgtgctggacactcttcttatccccattgcacagaggaggaaactgaggcacagagaggctaagtgacttgccgagggtcacacagcttggacatgttccccagcagtcttgcttcagaggctgtgctgtcataaatatgtgcaaaaaaaggaagaaatgaacaagactcaggatgtggaggaggaaagaaaggcagggagctaatgttgactgagcatcctccatgtaccagcacatc

SEQ ID NO: 846102 - DNA, 459 bp, Homo sapiens
aaagggcatttgtaccagatattctccaccttcacccaggaaggcaaaaggttgaaacygcagttggaatattccaggttagaaataagaagcaacgtcccaactgatcaggagcaagccagccaaggacactgaagactccatccccttaaatgtgtggccagtgtgtgtgaggtcaagaggcagagctggaacggattcccagaggccctctgcccaccgtcctgccctgagaccattttgacttcaaggggccaagggactcacctaaggtcacatagcaaggagccctgggttctgattccctgtgcctggggcccctcttcattgcaggccttcctggaggctggggagtgaccttgatgaccttagcaacctcccttgaagcagcctggaggttttgagcatgtcaatgggaggacgggaggggctggctttgtgagcctagcaactcagtgt

SEQ ID NO: 846103 - DNA, 459 bp, Homo sapiens
aaagggcatttgtaccagatattctccaccttcacccaggaaggcaaaaggttgaaaccgcagttggaatattccaggttaraaataagaagcaacgtcccaactgatcaggagcaagccagccaaggacactgaagactccatccccttaaatgtgtggccagtgtgtgtgaggtcaagaggcagagctggaacggattcccagaggccctctgcccaccgtcctgccctgagaccattttgacttcaaggggccaagggactcacctaaggtcacatagcaaggagccctgggttctgattccctgtgcctggggcccctcttcattgcaggccttcctggaggctggggagtgaccttgatgaccttagcaacctcccttgaagcagcctggaggttttgagcatgtcaatgggaggacgggaggggctggctttgtgagcctagcaactcagtgt

SEQ ID NO: 846104 - DNA, 568 bp, Homo sapiens
tcagaaaggatttttgcttttgttttctgcttttatttttgaagggtattttccctggccgtagaattgtgaatagatgggttattttttctcccactcagtactttaaagtctcaatccatgatgtgytcatttccctttcacatggcatgcctgaatcgaaacatcttatgtacctcataagtatacacctactaagtacccacaaaaattaaaaataaaaattaacttgtcaattcattgtttttaacttgcataatttctaatgagaagtctgctatcatttttatctttgttcctctgtaattcacggttttggtgtgtgtgtgttgtgggagattgccttagagattttcttgttttctttggttttcatagtttgatgctaagccactctggtgtgtgtgtgtgcgtgtgtgtgtgtgtggtctttcctgcttgaggttctcagaatttcttgtatctgtggtttgatatgtctcaataattctgaaaaaatgttaccacttatttctttaaatacttattcttctgcattcatttcttttctcattctggggctaaaatg

SEQ ID NO: 846105 - DNA, 653 bp, Homo sapiens
gctcacttcgtcaatgaaatgcattttttaacattctttatgctaatgaactgtaccatggatgcacatttaaatagcaatatttgaagcccctgccatrgatactccagaaggtggatcgtttaacaaatgctctcagagcactccctaggtgatggcatggttccaagcactttgaactttacacatcctaacccatgtcattgtcacaacaatcccataaggtatgtacaatttttatcttcatgtcacaggtgaggaaactgaggcatggagaagatgaccatggctgaggtctgttctcccctctctatccacagagccaaactggatactgggaacacaataaataaatacctgttggtaataggtaataatcaccaaaatggagattggttccactgaatggcctgagattggactgtgtggtagaggatgggtagcagctgagagctagcctgtcatgactgatggaacccatttcacacttatcatgcttcccacgtgcctacctccaattctcttgcatccttcatgggtaggagttggccttggccagggcctggttgcctaagtgtctgcagagttgcctatttgggctttcgccaacagagacagaagtatattatgcatcttaggattctgtattaccc

SEQ ID NO: 846106 - DNA, 616 bp, Homo sapiens
tggtagctattttccctctggctttcaggagcccttcttttgcccttgaacagatcagaccccctaatcctgacagagctacaaagatgctgctcagaggggaaggggagagcacccccagccactcaagccaccctggtccctgctcccagcggcacctactcggtgcagtgggcagcagtgagcacccagcaggggtggatcagcgccccaccacagaagtggccctggggcatggagatggtcagaggcagcgaggactggagggacgcctgccatgggtgcttgcccgccgtgctcttaaagcctccatagattctcttgatcttcctctctgctatctcagtctttccacaggagtcaaaccccggaagcttggttgatggctcagtggggctttcctctgggtaggcaacgtctgtgggacacaagaaagataaattgtgctattcagcctccctccagttcctcagcagggctcaggcagaggtatgactctgagcccaasagctgagcaggggtccagagctgagagactgcactggtgcagacagggtgggcatgcagtaggtgcacagttgatatttgttgaatacattgcgtaacataaagcaag

SEQ ID NO: 846107 - DNA, 599 bp, Homo sapiens
gatgcttttggacctgtgtgcagacatagctgttgggggtccacagactaggcagtgaccaccagtgactcatttacttactctacagctgaygtgatgaacaccgacaaaccccacttgggcaaagctctccatttatgcctttagctttcaccatttggcaagtcggagcctaataacgccaatgatcaaattaaagtgctctttttcttctttcttttctgcaaatactttaattggctgcacagattttcaggctcaccatattggactactttcagtataaaaggaaagagtgacaaggataaattcaagtttagtaaaagctcaatagaaaaagcagttgcagccatttacgagtttatataggagaatacttccgccaaaaaccagtgctgcttagcagcaaactgattactgtcagaatgcctcctctctgctcagtgtctcacttctagctggataccaaaagcacaacaatatcactgtgaatgaaatcatgatacaaaaatataacacgaaagcttaaatgcacaggaagaaagtcacattaaatacatttgaaaaaatggctgggagcgggggctcatgcctgtaat

SEQ ID NO: 846108 - DNA, 574 bp, Homo sapiens
ttctggtttatccttcttgtgtttcttttgcacaaatgagcagacatgtactttttaatatccctttcttacacrcacaaaggcattctatagatacttctttgcacttttcttttttcacttaacagtatgtcttggaaatcatttcatataaataaggatttcttttcttcctttttcttgaacagctgcacagtactacttcatggtatggacataacccccacatgtattcacctactctcctacacatcagcatctatgttgtttccaccattttgcaattagaaacagtgctgcagtgagtaaccctctgcatatgagttttcatattgttgcggtggtatctttagggtagattcctagaagtgagatttccagggcaaaagctaggtacatatgtaattttgttaggtattgtcaaattcacctacaaaaaggcggtaccagtttgtattctcccagcaaagcatgaaagagtctgtttccccacagccttgccaacagagtatgctgtcatattttaaaattgatgccagtcttataggtgagaaattatacaagtgttgtttta

SEQ ID NO: 846109 - DNA, 574 bp, Homo sapiens
ttctggtttatccttcttgtgtttcttttgcacaaatgagcagacatgtactttttaatatccctttcttacacacacaaaggcattctatagatacttytttgcacttttcttttttcacttaacagtatgtcttggaaatcatttcatataaataaggatttcttttcttcctttttcttgaacagctgcacagtactacttcatggtatggacataacccccacatgtattcacctactctcctacacatcagcatctatgttgtttccaccattttgcaattagaaacagtgctgcagtgagtaaccctctgcatatgagttttcatattgttgcggtggtatctttagggtagattcctagaagtgagatttccagggcaaaagctaggtacatatgtaattttgttaggtattgtcaaattcacctacaaaaaggcggtaccagtttgtattctcccagcaaagcatgaaagagtctgtttccccacagccttgccaacagagtatgctgtcatattttaaaattgatgccagtcttataggtgagaaattatacaagtgttgtttta

SEQ ID NO: 846110 - DNA, 612 bp, Homo sapiens
gctggcctgctctccaaaaccatcttcatatgagttacacactctcttcgaagaggacagcaatagctcagtgtctgaattctaacactcccaaggcctggattcccasatttgcagccagttttttgtttgttttgttaacaaagcaaatacccttgtggtttgattcttccattcctttgttgacgcatatcaaaatcagatggaaatgttctcataaaaacttcaaggacaaatgaaaaacgagaccacaagtgaaacagctcaagaaaagagtatggccaaattcttttttttttttttcttttttcaagttgccaaagctttgcaattttatattgaaccacgtttctaaaaacaagagtaaaggctttatctacagcctgtccgaatgtgtttaccgtgttcgggctcaatgccaccgctgttagcctcaacttcttctgacggtgagttcttcaacggaagcctgagcactctgccttgtgcacgatattcttccagctcagactggagttcatctacttggtcttgtagtacctgggatttaaaaaccaacactggtcttagatgtgacaccaaaagcataagcaacaacaacaacaaaaaaga

SEQ ID NO: 846111 - DNA, 532 bp, Homo sapiens
ttgagacagagtctcttctgttatccaagcaggagtgcaktggcacaatcacggctcactacagcctccaactctcgggcttaatggattctcccacctcagccttctgagtagctgggacgacaggcatgtgctaccacacctggctatttttagtagagacggggtatgccatgttgcccaggctggtcatgaactactgcgttccagtaatcctcctgccttggcctcccaaagtgctgggattacaggcgtgagccactgtacctggccaagggatgcactttaataggtcactatttaagactgttagaaaattaatctgaaagtctgtataagagagaaattagcccgtaagtaaaattatatatcttagttaccatctcttgcatgatactaaatgctaggattttaaaactaaaagctatcaattgggaataaattttttgttgctgttgttcttaatgttaattcccctggcctgcagcataagagatcagaaagaccgggtgtggagagcacccggcggccc

SEQ ID NO: 846112 - DNA, 592 bp, Homo sapiens
aagaatcttggcggatcatttggttagaaggtccactaaaaactgagatcaaagttttgtagttcaattatatactggagagttaaagcatctaacactctaccatcacaatttaagaactttaatactgggaagttgaagaggtatgtataaagcttccaaaaacagattttaaagctcataaaacaaaaaccttctaaagtttattagaaatacagcataggtacatatgtagagggaaaagtttattagaactgacaagtggtaggagtacttcgtaattaaacatagatggatagtagaagaaacagaactgttcctatgtagagttccagagctaatgtgactgcaaagccactttgaggggattcaaataagagataggaaattccttgtcaagcattaactgagtggcaaggtatctgaacacacaagcgcatgcaaaccagaaaggattaaygtagaattccacaaagaaggacttcttattttattcctagttctgaattaactaaataggcaagctgcaagagttaaacttctgagaaaggatgatgaatgaagcattaaagagaaataactctgaatactt

SEQ ID NO: 846113 - DNA, 592 bp, Homo sapiens
aagaatcttggcggatcatttggttagaaggtccactaaaaactgagatcaaagttttgtagttcaattatatactggagagttaaagcatctaacactctaccatcacaatttaagaactttaatactgggaagttgaagaggtatgtataaagcttccaaaaacagattttaaagctcataaaacaaaaaccttctaaagtttattagaaatacagcataggtacatatgtagagggaaaagtttattagaactgacaagtggtaggagtacttcgtaattaaacatagatggatagtagaagaaacagaactgttcctatgtagagttccagagctaatgtgactgcaaagccactttgaggggattcaaataagagataggaaattccttgtcaagcattaactgagtggcaaggtatctgaacacacaagcgcatgcaaaccagaaaggattaacgtagaattccacaaagaaggacttyttattttattcctagttctgaattaactaaataggcaagctgcaagagttaaacttctgagaaaggatgatgaatgaagcattaaagagaaataactctgaatactt

SEQ ID NO: 846114 - DNA, 380 bp, Homo sapiens
ttggcctccaaacacctctctagctgcatctcttaccattttccaccttacaatttttacacaattgtttgtagttgcacacagacagaaacccacatgcatccactctactcaggctgttatgctctgctggaatcactttccacccttctgtgcctggttaacttttgaatcattcttgcattggggtggggggtacaaccagctggtaagaggatagactctagagccagacaccagggcaaacaagggccccaatttarcctgcccgccctaactttggaggctagattaaaggtagttgaggagatactgacaataattgcaaaaagtctgttacattctagcataaactactttaaaaccattgtattgaaaaa

SEQ ID NO: 846115 - DNA, 636 bp, Homo sapiens
tatacaaaagcatatattcccttcataaaattcaatgaagtacaattgaaaaattgaggtgattacttgagacccttactgattccataaataggagactagagtcatttgtaaaactattaaaatgaatttgcctttgaaataaactcactactacattacatcatgtcattactataaaaatgtaacacaaaattaactgaatctctacattcttgcagcttaaatgaggccttggccaaggatgcatggccagtggttgtgtgggggctgaaatccatttgccaggctgagcactgggcatggaactcatcaggccagcatcagcctggtggaaagggaggcttttttaaattcttacaaatgctctgtaggtccaaccgatgaccctacttctccccataactctggacaagccaaaattaagtgataaattatatagttaaagcccatactgtctttcctggtctacttgttagcatcactgcttagaaggaaacaccaagtacctgsaatcccccactggggagaagggggctattaaccagcttactcctgtgtaaggattccaaataacctgggcagatagatgtttggtttgcccagcctgtccttccaacctccaagggaggatgg

SEQ ID NO: 846116 - DNA, 588 bp, Homo sapiens
tcattttctaccaaggcccagcccaagagctgtctctcagaaggagggtagccatctgtaggtgatggcaacaccttattgtaaaatcctaaaagccggtgctgcaattcatttgtaggatcctgctgaagagtctaaatggcatctatgtctgccactgatagacacttcaggcaatgttggaatctgctggatcatatggccccagtggaagagcaacttgcacggaagcctggatctattgcagagctttatcccattctgggcctcattcaaaactagcagctctttgggtcactcagtaagtgggctagagtaacacgcccaaatgcagaatatgttgcctccaaaatccagatgggtccactagtcattgcactttttgatggtaggaggggccaaatataacaacttgtacttcatcttggaagggatgtcttaacatgccccacacctctggacccataggcatttcactgagrtggaagacctgcattttatcagatttgtttcctgcactcttaacacacaaatgtcttaccagtaagtctggagtagttgctgcttctcactcactagattcagtca

SEQ ID NO: 846117 - DNA, 605 bp, Homo sapiens
tggtttggtttgacatggacttttccttttcagtgaaatggcccccattcacctttatgtctgcaccctcactgtcagcactaaacctgtggagaaggaagagttagaagagggtagtattactacatccaagtgctttgcttgtgctttaagtgggtggagggatttagaccttcagttcttcaaatatgtggcagtactgcatcttaagttgcccttcctaatttgtctccatcccagtccttagtctatacattatgctaaataattccttcatttacttcacacctattgggattccctaatgctcccctacccccacaccgaatgtacagtattaacgtatttttaaaaaattagtcatactttccatcctgtcattgatcctttggtgaaagacattattacttcagtacagcatcattatttagcctaatgataggattagaataataactgctgtgggaatctttttataggtactatcatattttagaatcaaatatactgaaatgaaggatgcatctagtgcaggacccattcatcaagagatgtaagtacattcttcagcttagcttttcawgcatcaagtagtgtttctattc

SEQ ID NO: 846118 - DNA, 605 bp, Homo sapiens
tggtttggtttgacatggacttttccttttcagtgaaatggcccccattcacctttatgtctgcaccctcactgtcagcactaaacctgtggagaaggaagagttagaagagggtagtattactacatccaagtgctttgcttgtgctttaagtgggtggagggatttagaccttcagttcttcaaatatgtggcagtactgcatcttaagttgcccttcctaatttgtctccatcccagtccttagtctatacattatgctaaataattccttcatttacttcacacctattgggattccctaatgctcccctacccccacaccgaatgtacagtattaacgtatttttaaaaaattagtcatactttccatcctgtcattgatcctttggtgaaagacattattacttcagtacagcatcattatttagcctaatgataggattagaataataactgctgtgggaatctttttataggtactatcatattttagaatcaaatatactgaaatgaaggatgcatctagtgcaggacccattcatcaagagatgtaagtacattcttcagcttagcttttcaascatcaagtagtgtttctattc

SEQ ID NO: 846119 - DNA, 728 bp, Homo sapiens
gaggggagtcagtattaacatcaaggaccaaattcggaaggagatagttacaagtccgtgccaatagacatgggtgtgcatgttccttgagaaaggatgtcaggcacacaggcagggacctggtcaacctttggagagctggcttccattctgagtgggtaaggatgctgccttacagggggcttagcattcccgtaaaaactgactgctctggtccctgcctagaaaagtaatataggacattggttgcaactgtgccctgaacagctggcttcaaaccatggtagaagataaattcccctgctctttggaatgctggtgtatttttggtgctgtttttctaaactatagggttctgcacacggctgagatccaaacctgttggaactgtttgtctaacttgcactggatacatagagattaaattcactgcaaagggttaaacacacgatgtctcctggacactcactagtgatgttgatgctgatgctgatgctgatggagatggcgattggtcaactgaggtgagctttccctccttcgcctgtctcccaagctttaaaatggcaggatacaatacaactaagcaatttggcctaggtgaggtagcagagcccacaaacaagtgtattaaatgaaactggacatacygattgtcactacctagttacatggaaatctgatagctattgtacttagagagtagagaaaccaaagtcataagccaa

SEQ ID NO: 846120 - DNA, 537 bp, Homo sapiens
atttcatctctgaccaaccagtactcctggcttactggctttcccccacccaccaaattatctttaaaaactctgctccccaatgatcagggagactgatttgagtaataataaaactccagtctcccatacagccggctctgcgtatattactctttctctattgcaattcccgtgtcttgatgaattggctctgtctaggcagcggggcaaggtgaaccccttgggcggttacagaagcagaatcttgatgaccccaggcaattatggtggtcccagtgactggcttaggagggaatatgtgacctgttctggccaattagacactgggggaaatctggaggcttgtggaaagatttttttctcttcctttgaaaatagagggaaaaaaaagacacagatccttgttcttctctggacttaaccatggctgttttyaatctcgggatttggcaaccaccttgtgatgatgaaaggaaacagcccgaggcaaaataagtctattgagtctggtagactgaagaaatgtaaacaact

SEQ ID NO: 846121 - DNA, 605 bp, Homo sapiens
ccaaccaattggcagcaagcacccattgcctagccacccccacccctttccgcaaactaccttcgaaaaaccctagcccctgaattcttgggaagactgatttgggtaatagtaagagtccagtctcccgttcagctggctctgtgtgaattaaactctttctccattgcaattcccctgccttaataaatcggctctacctgggcagcaggcaagaaaagcccattgggtggttacattatgaggttatctttactcttatggagctggcagatggtacttgggttcaactgctctgagtttttctagctgtggtccattgttccaaagcacacatcctgactctagggtgtcactggggtctgttacaggtagttaggcctgagcagggcaggagagggctctcccctacccaccaggaatgtcaggtgatggtgtcaggtgatggtgtgacaatggtcacactgcccttctaaaagtgmttattcagcagccagcgccagggcgagacaatctcctgaagatccagggctgttaacattaaagagttaatttaatgcagatgccagggagaagcaaaaaggacttccaataaagtctcagtt

SEQ ID NO: 846122 - DNA, 605 bp, Homo sapiens
ccaaccaattggcagcaagcacccattgcctagccacccccacccctttccgcaaactaccttcgaaaaaccctagcccctgaattcttgggaagactgatttgggtaatagtaagagtccagtctcccgttcagctggctctgtgtgaattaaactctttctccattgcaattcccctgccttaataaatcggctctacctgggcagcaggcaagaaaagcccattgggtggttacattatgaggttatctttactcttatggagctggcagatggtacttgggttcaactgctctgagtttttctagctgtggtccattgttccaaagcacacatcctgactctagggtgtcactggggtctgttacaggtagttaggcctgagcagggcaggagagggctctcccctacccaccaggaatgtcaggtgatggtgtcaggtgatggtgtgacaatggtcacactgcccttctaaaagtgattattcagcagccagcgccagggcgagacaatctcctgaagatccagggctgttaacattaaagmgttaatttaatgcagatgccagggagaagcaaaaaggacttccaataaagtctcagtt

SEQ ID NO: 846123 - DNA, 664 bp, Homo sapiens
aaatgggatccctcaggtacctgatttcagacgtcagcacatagcatgatctttcagggtgtgagtctgaattcatccttttgggataagtggaagtggaaaaacatatgtgcctgtctccccagctacctacctgtgctgcttggaagatgagccaagctcggcactaaggtatattcccatcatcactgcttctgtgggcctgagtcccgctctctcacacctataggtctgtctgacaggcccttgcctgtagactctcatcctacatcccctccagagctcatcttatcccccaaaaatccctttcccttctccccataatcactcctctttcagatgcagacttcatgctgcaaagactttggcattactgttgttaggactttgtgatgtctttgaacttttttatgaagtcctagaatccatctctactctcctatgtcatttctgcctagaataatgatgcttctgaaagtgaaaggtgttaactatataaattctcacagactattaaacctgtttttaactggtagcatttttttaattaaaaaaygtaaaaattacaccataagagactaacatttgaacaggttttcttcattgtactttgtgttaagctgaacaacatgaaattgtcatgttaggtcaaaaatggacaagt

SEQ ID NO: 846124 - DNA, 581 bp, Homo sapiens
ttcttctatagccttattctctctgtcagcagattttatattaaactgtctgactcaacttacaagcaagtagatggcacttacaggtaagaaccagctgtggcacaagcagatgggtatgtagtggatctttgtttactgtgagatgttctctgttgtttcaggtgataggctggacattggagtgcccagttccctgagcttcctgttctgtggggatgcagggccacagctgggcaaagctggcttgcccataaatacctcagtgatgagcacaggcatgggatttgatgagtatgggtgagaggagctcctggtaagattcactgatatctctgcaaagggcaactgggctgcaccagctccatgtcctagataggcagaaacaaaatgttttcctctcacacataggcacaaaaattgaaatagtatcaaacatcttctctgactacaatggaataaaactagaaatcagctgggttctttggctcaygcctgtaatcccaacattttgggaggctgaggtgggtggataacctgaggtcaggagtttgagaccagtccgaccaacatgaagaaac

SEQ ID NO: 846125 - DNA, 628 bp, Homo sapiens
catatttgctctcacatattgtaatgtacacatcccaatattgtagacatctcctttctgcatgcttcatgatatttttaatggaactggtttaacactgctccaaaacaagagtcgttcatgcctgttttgaaagcataatatctggataatgaaaatgtggcacatatacaccatggaatactatgcagccataaaaaagaatgagatcatgtccttcacagcaacatggatggagctggaggccgttattctaagtgaattaatgcagtaacagaaaaccaaataccaaataccaaataccacaggttctcacttgtaagtgggagctgaacattaagatcacatggacacaaagaagggagcaagagacaccggggcctacttgagagtggagtgtgagaggagggcgaggatcaaaaaatttcctatcaggtactatggttattacctgggtgatgaaataatctgcacaccaaaccctgtgtcatgcaattaacctayataacaaacctgcatatctaccccctgagcctaaaataaaagttaaacaaaaagaaaacattttatcatgaagtatgagtttattcatttatttatttatttacttttagagacagggtctcgc

SEQ ID NO: 846126 - DNA, 679 bp, Homo sapiens
cagttgctactattctatgttacccttataaaatgtgccataagaggtagattcctaacatccatatttaaagaaattgctccttctgctagtggtgttgaatgtgcctgaacagactcttggtcatacaagtagaaatttttttttttagtagattctgaatagcggttctatttctttaatgactgaacaaaatggtagcataggactttggtttggaatctggttttgccctcaaatcagaaagttcttgcatagtttatccgcagaatatgaagttaaactatacttgatttaaggtagtaatttgtcagtataattttctgtagggatatttttggcagaaatagaaagggtcttgaataatctgaagttattgaaatttttttttgtagaaaattacgaaaaactgtaaatggtgatgggagccgagaaaatggaaataactcctctgataaagtcagaggaatagaaactttggaatctgtacccattattggtggtttttgggagactatctttggcaacaggtgggagtcttttttacttgattttgtattcacrtagtgtttacagaatgtatagtatcatcaggccataggagtaagtagtatagacttatcttggtgtgatttttaagggttatcagagggcttgcttactcaaaatgttgtcttca

SEQ ID NO: 846127 - DNA, 624 bp, Homo sapiens
gaactcttcttgagacatacgtcatcagaaaatacctgagatgaggtccataaagaatgatctggctgggcacggtggctcatgtctgtaatcccagcactttgggaggccaaggtgggtggattgcctgaggtygggagtttgagaccagcctggccaacatggcaaaaccccgtctctgctaaaaatacaaaaaaaattagccaggtgtgttggcacatgcctgtaatcccagctaatcgggaggctgaggcacgagaatcacttgaacctgggaggcagaggttgcagtgaaccgagatcacaccactccactccagcctgggcaacagagtaagactgtctcaaaaaaaaaaaaaagaaaaagaaaatactgatctattctgagacaggtttcctgcctttccacctgtgctaactcctttctgaaccaaaccttctctgtcatacagtttgcagcaagtgttcagtctctgtaagtgaaaactcctcattggagctttccccaggaccctttttctgtctatatgtgaaaaataaaattctaacaagaatactctcaggcctcaacattttatgagattattaactagcatttcagtgaaattatcaattctggtttta

SEQ ID NO: 846128 - DNA, 449 bp, Homo sapiens
ctgtctctgtcacccaggctggagtgcagtggcatgatcaaggctcactgcagccttcacctcccgggctcaagtgatcctcccacttcagcctcccaggtaggtgggactagaggtgtgcaccagcacgcctggctacttttttattttttgtagagacagggtctcactatgtcacccatgctggtctcaaactcccaggctcaagtgagcctcccacctcggcctcccaaattgttggcattacaggtgtgagccactgctcccaaaccataattatataatattaggtgaaaaaaggatacacacatatacacacmaaggaagataatacactaaaagtgcttttctgaattatattttttcctttttgtattttactctatttcacaaatttcccacaatgagcaggaattgtttacatatgcagaaaaaaaaatgtaaacaga

SEQ ID NO: 846129 - DNA, 611 bp, Homo sapiens
cattaaatcatgcttcagacaacatcccgaaggcagacgaaatccggaccctggtcaaggatatatgggacactcgtatagccaaactccgagtgtctgctracagctttgtgaggcaacaggaggcacatgccaagccggataacttgaccttgatggagatcaaccccagcgggactttcctcacacaagcgctcaaccacacgtacaaactcgcacaaacctccagccttcggagagtactcagtctcaggacttctagagaaaggcctggtgcaggcagcttgctgggggatgtgacgctcaggacgtgatgaggtactcatggttctggagctctagagacacttttgaatgcatgaaaaacgtgcgatggtgcaaggaatggattcatgacattgttggagaagcaacaagtttgtggctagtccttaaaacttagctccctgggacattcttcaattccacatctacttctagaaatcagccttctctgccccctcttttgagaaagaaaaaagctttaggcaaataagttattgtccctagcagagccgcttgggtctcctgcatggaaaccgtcaccttgggtaagtgttcagtgactggta

SEQ ID NO: 846130 - DNA, 593 bp, Homo sapiens
catttcactatgttggccaggctggtctcaaactcctgaactcatgatctgccygcctcggcctcccaaagtcctgggattacaggcatgagccaccgtgctcggcctagagcagtttcaaacacaggcaaaagtagaatcaagagtctgatgaggctaggcctggtggcacccatctgtaattccagcactttgggaggctaaggcaggatgatggcttcaatccagaagttcgagaccagcctgggcaacacggcgagaccctgtttctacaaacaattctaaaatgagctgggtgaggtagaacacgactgccgtccggctactcaagaggctaaggtgggaggattggttgagccccaggaattcaaggctgcagtgagctatgattgcaccactgcactccagcctggacgacagagcgagaccctgtctcaaaaaaaaaaagaggctgatggaccccccaggacccacttccaagacagcagttataagtcacaggccgctgggcagccacttcatttatatcccggttttcccttctgctatttctttctctttttaaaaagtgttttgtagagatggaatctcac

SEQ ID NO: 846131 - DNA, 518 bp, Homo sapiens
caggccttgctgggtttccccactctgttattgtgagatcataccctttttatccaatcacatttctacacagtggtcaatcrtacccatccagtaaagtctccataaaaggaccaaaaaggcagagttgggagagcttccagagagctgacctggtggaggttcctggagggggggcaggcctagggagagcggaggagctccatcctcttcctgcatcctttgccctgtgcgtctcttatctgcccactcatctgtagcctttcttatgccctttattaagaaacccgtaaacctaggtaaacggtttccctgagttttgtgagcatgctagcaaattcatcagacccaaggcaggggtcatgataaccatgatttatagcccgtgggtcggaagcacaagtcacaacctgcacttgcgactggcatctgaagttggggtagtcttgtgggactcagccctcaacccgtggaacctgatgctgtctccaggtgtataatgtcagaattatagagga

SEQ ID NO: 846132 - DNA, 518 bp, Homo sapiens
caggccttgctgggtttccccactctgttattgtgagatcataccctttttatccaatcacatttctacacagtggtcaatcgtacccatccagtraagtctccataaaaggaccaaaaaggcagagttgggagagcttccagagagctgacctggtggaggttcctggagggggggcaggcctagggagagcggaggagctccatcctcttcctgcatcctttgccctgtgcgtctcttatctgcccactcatctgtagcctttcttatgccctttattaagaaacccgtaaacctaggtaaacggtttccctgagttttgtgagcatgctagcaaattcatcagacccaaggcaggggtcatgataaccatgatttatagcccgtgggtcggaagcacaagtcacaacctgcacttgcgactggcatctgaagttggggtagtcttgtgggactcagccctcaacccgtggaacctgatgctgtctccaggtgtataatgtcagaattatagagga

SEQ ID NO: 846133 - DNA, 670 bp, Homo sapiens
agggctttagagtcctctcttttggggttgaagcctggcttaactgttgactgttcagaggccacaaagatgctacttcagttttccaactctccagctttcttacgggtaragtggagctcacagcaggattcctaggacgagggaggctaaacgaggtggtgtctgagtctctggcacaggatctagtacgtagtgtaatacacactcaataaacttgagttctctccttaccccaactcattgtattttctaagtgccactgccactggtggcctatggtgtgtcactcactgatagctcgtgaggcccagtcctcagctcagccactgtttcctgctctgggagcttataagccattagacttctgctattttctctaagactgtgtcactcgctctaggctcgcccagtggctggagatgctcagtttgcctggggccagtcatccacgtacttaacaaatatgtattgcattgactataggtcaaaaactatggtaagtactgggaatacagaggtgagcaaaacagttatgtccatggagttaaagtcaggctgttctgttggccacgctcttcctcctgcccttcctggtatgtgcaagcatatgtcatggatcctggtgaactcggactcacattcagagtcccatgagcaggtgctctcc

SEQ ID NO: 846134 - DNA, 533 bp, Homo sapiens
tttagacatgaagtccttgcccatgcctgtgtcctgaatggtaatgcctaggttttcttctagggtttttatggtttgaggtctaatgtttaagtctttattccatcttgaattaatttttgtataaggtgtaagaagggatccagtttcagctttctccatatggctagccagttttcccagcaccatttattaaatagggaatcctttccccattgcttgtttttctcaggtttgtcaaagatcagataactgtagatatgaggcgttatttctgagggctctcttctattccattgatctagatctctgttttggtaccagtaccatgctgttttggttagtgtagccttgtagtatagtttgaagtcaggtagcgtgatgcctccagctttgttcttttggcttaggattgacttgacgatggggcctcttttttcgttccatatgaactttaaactatttttttccaatyctgtgaagaaagtaattggtagcttgatggggatggcattgaatctataaattacctt

SEQ ID NO: 846135 - DNA, 633 bp, Homo sapiens
agagattttccaggcaaactagaaccttaaggcaaggtttccagaaaagtgccactggacgccaacatttgctttcctgcaccaccgcaagtgtctgcttcctgtattccgatgtggtgctccttgggtctgtcagctgtggatcaagccagcccaagtgtgccttaggccaacactcaagaaggtacaaactgaagccttggcagcatccaggtaatgctaattctgcaggtgcacagaatgcagagtctatggtggcatgacttcttgcagttagatttcaaaggatgttggagacagacttggggcccagcaacgtgtcagggggcaggtccactccagagagtcccaatcagggtaatgcttagtgaagctatgggagtaggaccacctgcaaactgcagagctgcagagccactagcacataacttgaacctgagagagctgcagcaggagaaactaacccaggagagctgatatatgggctgagcccagcaacaccatagggaagggctgcctgaggrctttgggatccattattgtcccactatgcccagaaggcagaacatggagtcaaggaagataattttggagctttaagatttgatgttgttttccctattggatgttgga

SEQ ID NO: 846136 - DNA, 507 bp, Homo sapiens
tgttctccaaggccccaccagagtagctagatacagagtgtggattggtgcactcacaaaccctgagctagacacagggtgctgattggtgtgtttacaaaccttgagctagagacagagtgccgattggtgtatttagaatccctgagctagacataaaggttctccaaggccccaccagagcagctagatacagagtgtggattggtgcattcacaaaccctgagctaaacacagggtgctgattggtgtgtttacaaaccttgagctagagacagagtgccgattggtgtatttacaatccctgagctagacataaaggttctccacgtccccaccagactcaggagcccagctggcttcactcaatggatcccgcacccgggctgcaggtggagctgcctgccagtcccacgccatgcgctcgcactcttcagcccttgggtggtggatgggactgggccccatggagcagggagcagckctcctcagggaggctcgggctgc

SEQ ID NO: 846137 - DNA, 425 bp, Homo sapiens
ttttacttctcactgcccagccagagttccccattccagtaacatggaccacccaccacattgaccccaagtgatttttgktgagtagatttgtgttgttccttgtacagtatttgctgcctaaatctctgcctcccacctgtccctgtggaaattgtctgcttacagtcctgcagacagaggaccatgaagtagtgtggaaatgaccacctaggttgttgtgactggtcttttagggcttttgaagtaaaaatacaaacacattaaacaacatgaaaagatgaaaagcagcctcccctctttattcacatagaatttcccaggtagccctcgcttctccaggatggctgggccaccgcacatcagaacctgtcggacactgcttgcctctaccctgtgtaagtccccttgttccctgaatcatg

SEQ ID NO: 846138 - DNA, 425 bp, Homo sapiens
ttttacttctcactgcccagccagagttccccattccagtaacatggaccacccaccacattgaccccaagtgatttttgtkgagtagatttgtgttgttccttgtacagtatttgctgcctaaatctctgcctcccacctgtccctgtggaaattgtctgcttacagtcctgcagacagaggaccatgaagtagtgtggaaatgaccacctaggttgttgtgactggtcttttagggcttttgaagtaaaaatacaaacacattaaacaacatgaaaagatgaaaagcagcctcccctctttattcacatagaatttcccaggtagccctcgcttctccaggatggctgggccaccgcacatcagaacctgtcggacactgcttgcctctaccctgtgtaagtccccttgttccctgaatcatg

SEQ ID NO: 846139 - DNA, 271 bp, Homo sapiens
aacaaggcttgggtgatgggtggacagaagcaataattaaacccattagatcctggagcagggattaaacccatcagaatctaccacactcagcaacaaagaagkctgtgtggctcaacattaagaatgtatcatggggtgtcaataacagaaatcggaagcagagggtacctgagtacctgagctcttaatgacagcaaggaagagaacctcataggacataagatgtcaatgctgtgtaagcactacctcatgggcagctcaagccagg

SEQ ID NO: 846140 - DNA, 639 bp, Homo sapiens
ttttattctcttgctgtttttaggatcctctctttgtccttgacctctgggaagtattatgtgctttggggtagtcttatttggattgaatctatttggtgctcttcraccttcctgtgcctggatatttatatctttctctaggtctgaaaagttttcagtaagtacttcttttaataagctttctactccttgctctttctcctctcaaaggtcaattactcttgaatttgttcttctgaggttattttctagattttctaggtgttcttcattcccttttattctttccttttttcttttctgaatatgtatttttgaaaagcctgtctttgagcccatcaattttttcttctgcttgatcaattctgctgttgagactcttcaatgcatttttcagttccgctaacatgtttctcagtttcaggattcctatttggttttttcaattatttcgacttctttgttaagtttctatgataatatcttatttgatttttagtgttattttggagttcactgtttctcgaagactgctattttgtattcttgaggtgagagctcacacattgacatctttttgggttctcttactggcttcttgatttgtggatttgaggaggttatggttccctgttt

SEQ ID NO: 846141 - DNA, 643 bp, Homo sapiens
aacacttatggcagcttagaagcaaaagtcaacatagctattggcatgtacatactatcaaaacaacagactttaacacattttacaaattgtagctcatgatattgtttcagcattcagttcttgagttctcaactaaaatacagttctttcgtttatgagggcagtatgcaaagaaatgaaattggcttagtggaattggttttgcattagcagtgtttttttcataaaaattcaagtttaattccatattgctttttgaaataatactgtggcaatgagtcaacaggcctttcccctggcattcttagctctctaatggggcaaactgtcttatgataatgcctattaattttatgtgatagtatggtttattacttaattttaaaaattagaatttaagatgattttattgcattgttttaaagttcattttattgtgaaaatacttcaaatttgacattccatattttctttttggttagtggctaattaagttttaagtttttttcttacttttatttagattcaggggtacatgtacaggtttgttatataggtaaactgtgkgttatggggttagatatacatattattttgtcacccaggtaataagcatagtacccgataggtattttttctg

SEQ ID NO: 846142 - DNA, 532 bp, Homo sapiens
acactatcctgaatgataacaccatagattattcttgccacttcaagtaagtggaatcaaactatacagaayatatcgtgtctagtttcttttcctcaatatgtttatgagagtagtccatgttgtagcatatagctgtagtatttttcactgctgcataatagttcattgcatgactatgcaataatttatctactttgtgttcattaaaatatgatgcagttataaaccttttaatgcatgtttttcagtgtgcataagtatatgcctaggaatgtaaatgtatgtcttcaactttggaggataatggcagttctccggttggatacacggatttataccactacgtgtagtgcatgtcagctctaatggctccacatctttgtcaacaattggtattgtcagcactttttaattttagccaatctagaaagtatgaagaaaacactgatttgtggcttaaattaccatttctttgatgactaatgaggttgatcatatttacatgtttgtgggcaatggggatagcctc

SEQ ID NO: 846143 - DNA, 444 bp, Homo sapiens
gacatgatcttatataaaacctgaaagattatacacacacacacacacacacaactaatataaaaattcagtaaagttgcagaatgcaaaatcaaccacaaaattatttgcttttctgtacacttacaatgaacaattcaaaattaatatttaaaaaattccatttataatagcgcttaaaagaataaaatctttaggaattaaccaaggaggtgaaagatgtgtacaccaaaaactagaaaactttgttgaaaagaaattagggataaataaatggaaagacatcccatatttacggattgtgacttaatattgttaagatatcaatactacccccaagtgataatccacagattgaatgatatctctatcaaaatyctaacattgttttatgttgacaaatagaaaactcctacaattcatacagaacttaagggaccctga

SEQ ID NO: 846144 - DNA, 664 bp, Homo sapiens
ataaaatgcttaatcaaacctgctgggtgatgaccctggaactttaattcttacagacttcacactattggttgtcctggaaggcgacctacaatcatgagcagygaggtaatgagctgggaatccagctgtaaggctcaaggtggagtttcctaatgtgcacagacacaagcttgtacatttcaaactagctcctcctgagcacagacctagaggggcagaacttagcgctttggtgctcaacatggggtcctccaaccggcagcagagcatcaagtagaccccatgtctacttgatcagaacatgcgctttaagaagaaccccagaaggtcatgtgcaccctaacactgagccctggagggaatgacctttggcccggtgccagcgggcccctccccaactggcagtcacaaatgcaacaggttagtaattcataaaaccaacaggaaggttatcagttagaattcatgtggaaaaaataagtctggatggacatatgctgacctgttaagcatggtgattttgtctcagtaagctgacagcagactacctctgaccaggctggccttgtccaaacaactgggtacccaccaggactgtctgtcttactggcaggcacaaaacacaagctcaagactgcgaacatggtctcaatgcacacca

SEQ ID NO: 846145 - DNA, 622 bp, Homo sapiens
cagaacacctcagtggactcactcagccgcgtgcccgtgtctyggccaggtggatcagtacaagggaaagcgggatttggagtcactgagggagtacgtggagtcgcagctgcagcgcacagagactggagcgacggagaccgtcacgccctcagaggccccggtgctggcagctgagcccgaggctgacaaggtgggtgcctgctggagtcgggatccccataagtggcccgtggcccccggccccccacctccccaccctcagaggcctcctcaaatgctttggacaaaatgacagtttggggacacagtcatctgatggttggctccagttgcgttttcaacacgtatttttcatcgactttcacatgctttcaggggcgaatgcaaacaaaagctttccttttgaaaacatgaaatggatgtgagacaaatcccaagacaatatttggtgtcaaaaatctctagagaatccttcctttccgcttcattcattttaaagaatgactctgctgggcatgtttctgctatgaaatctcgactgctggccccggggccctgattctattcctgaccttgctccgggcattttcctttacccgttgtaaaggcccctagaaga

SEQ ID NO: 846146 - DNA, 646 bp, Homo sapiens
ccaacagaaaaagagagagattcctgattatcatctgagcccatggatccagccatgcctaaagacagaacccctggccaggcgcagtggctcaygcctgtaatcccagcactttgggaggccaaggtgggtggatcacgaggtcaggagatcgagaccatcctggtcaacatggtgaaatcctgtctttactaaaaatacaaaaaattagccaggcgtggtggcaggcacttgtagtcccagctactcgggaggctgaggcagaagaatggcatgaacccaggaggcggagcttgcagtgagccgagaccgtgccactgcactccagcctgggcgacagagggagactctgtctcccaaaaacaaacaacaacaacaaaaaaaccctcaacctctccattaaatgagccaaagaaatccatcctagagggctgagttgaccttccttcccttccagccaagagcactgacaaatacaagttcatattacacaactgtaccaagttcgcttgcacatcataaccccccagcataacgcaactagaaaaaagaatctaggtgctcccagggttttgatgggaatttaaaaaagagttggagaaatgtaaccaaacagaaagatgcttgtctggatcaacaggcagtc

SEQ ID NO: 846147 - DNA, 648 bp, Homo sapiens
agattgctagtggccgtgatgtcaaattccagccagccttcttctgaggcccatactacacgggtgtccaacaaaaacaggtcagagtctctgaaagaaagaaaaaatggcctggtaaatagcgcactgcctgaagctccttcccactctttcctgtctcagcgtcaggataaaacatgcccgagtcagatcacatctacctgtgaggcacaagcacagtgacttgccatagccctgaaaggcgtggtaccacccaggacacaggcatgacacaattaggagagacaggcacatctgataaggcgcttcatagaaatcagctttcaccccgacacggcagaccctctcaactttaccaaaaatcttgctagtgctgcttatgacagatctttttgcgaattaggataaattacaaataaatgattttttaaaaaacttttttatttttttttttttgagactgggtctcactctgtcacctaggctgtagtgcagtggcatttacattttaatacttctattatgttttaaaaatttatttatgatactattagtgactagcttactttatggctaatragctctaaaaacagggaaagtaggagacagcgagaaacaggattgagaaaagataaaaatcaggatcca

SEQ ID NO: 846148 - DNA, 347 bp, Homo sapiens
catataaaactttgataatcataaaaaattaattttaggaagaaaacataccaactttgttgaaattaatctgggcatatgacccaggtcctgcttttaaaaatcatatgatccattatgatgaacaagacttsacaaaactacctatcaaacagcctacactgagaatgacactaccaggaataggagagtcatgacagtggcatagccttgctgaggatttgagaattcttatcaaaattcctgggaatagattggatctgtaggtcaggtatcaaagaaagaagcgggttccttaaaccaatgcagaacatagtttctcctgattggggtgggtggttggggga

SEQ ID NO: 846149 - DNA, 458 bp, Homo sapiens; identical to SEQ ID NO: 843638

SEQ ID NO: 846150 - DNA, 596 bp, Homo sapiens
gtctgacatgtcgcaggtactgaatgcccactgttactgtgattcattacagatgtgagctcatcctttctactctggctcctgtgactggtttggattctcagatcrgtgttctctctcattctgcatgctctgcccagcagctgtgacccactcttagttttaactatgccgacaaccaattccatgacttcagcccagacctctcctccaagcgccgtgtctatgcgtaaaatagcacagcttctcctagtgctgtccacatacttctgactccacactgcaaaactacagttaccacccttccgtcaaacctctgcctcctcactctgtctttctgcatttggttcacgtcaccatcttccttttcgatcatgctaaagaccagagagctggcgaggtgcagtggctcatggctgtaatcccagcactttcagaggccaaggctggaggatcacttgagcccaggagttcaagaccaacttgggcaacatagcaagacaccatctctatgaaaaattagccaggtatggtggtacatgcctgtagtcccagcagctggggaggctgaggcaggaggatcacttgagcccaga

SEQ ID NO: 846151 - DNA, 635 bp, Homo sapiens
tgtatcccctagaaatactcacacagaactatktacaagttgttagcatattataatagcaaaaataggaaatattgtattactattgtgaaagttgtcataatcaaaatgaagtcactaatgttaagataacttcaacaaatagagctgaggaaggccatgaagagagggttttcatggttgtatacctgatcacaataaagacggaaaaaaccacaaagcttcttggataaagttctcttgcacaaaggccatcacaaccctatacaaaaaatacttcctcaaggacatctgcccagcaactgcctgtccaaccacagactggtatcatccttgctgttgatctttgtggccaaggataattactgaaaacaattatgtaatcttcctcattttttccctttaaaaatctttgtcttcctttacctccctgaatacacacatgttttactatggcacacatattcctattgcagtgctttactcccaaataaacatcttttcttttcaggagctgctgtttgttattttggttgacactattcatagctgatacttgcataaggccttctatgggtgggcacttttctaagcactttacataaatgagctcaatcctccatgacaaccctgtg

SEQ ID NO: 846152 - DNA, 612 bp, Homo sapiens
gagtaaacaactaagattcagccaagaccctgccattatggttataaattatataatgtagagctcagataaataaggctttattactttttagtttaraagaatagccacatatatgtactaaaagaactgaaagtacctgagaatctgaggcatagctgagaattaggataaagtctcatttgaattactgtaataacttaacaattatccaagacatccctcgtaccaacaggataggtaataaaagatttaaattttaattgtcttcatgccacttccctttttttttgagatggagtctcactctgtcacccaggctggagtgcagtggtacaatcacaggtcactacaacttccattccctgtgtccaagcaatcctccccgctcagcctcccgagtagctgggattacaggtgcacaccaccacatctggcaaatttttgtatttttagtagagacagggtttcaccatattggccaggttggtctcaaactcctgacctcaagtgatcggcccacctcacctcccagcgtgctgggattacaggagtcagctactgcatccgtcatgccactttcttgaagatgaattttatccttgccactct

SEQ ID NO: 846153 - DNA, 486 bp, Homo sapiens
atcaacagtcataagtcttgttgatagcctgggcccttgatatgatgagaattgcactctattatctatggccttcctgtctagawctcatagccccagtctgtgagaaagatatccggcaaatctcaatagagagacatcttgcaaaatacataaccagtactccttattttcagttaaggtcatcaaaaacaaggaaagtctgagaaattttcataatcaagagtggcctaaggagacatgtcaactaaatgcaatgtggtatctatcctggttgggatcctggaagagaaaaagaatatgacttaaaaaaagtgactacatctgaataaatcatggacattaattaattataatttattgattataaattatattgagttcttgagttgtgacaattgtaccatactaatataatgggttaataatagaggaactgtgtatgtgctttttaatatttttacctaaataaaaaaaagcttattt

SEQ ID NO: 846154 - DNA, 658 bp, Homo sapiens
actgatacatcagcttaatttattttgcatatataaatgcacagtgactatgactctaaatgaggacaaaaacaaagaacaaggcaataatgtttgcttcaaccacttgtwttttgcatagtagtggaagacttagccagacaaatcaggtgaggaaaaaaggcatgaaaattgaaaaggaagaaatacgtattctctctttgcagatgatataattacatatgttgaaaaactgaaagatctaaaaacagctaatagaactaatgaacaatttccattaaatgacaggatacaaattcaacatgcaaacattggtttccaatgaacataaaaaatgaaattatggaaaaaactccatcttcaatagcatcaaaaacaataaagtattttgtcatatatttagaaaaatattgctgaatgatattaaagaaaacataaatgttgggaataggcctcccaaaatctggccataagctggccccaaaactggccataaacaaaatatttgcagcactgtgacatgttcatgatggccataatgcccacactggaagtttgtgggtttactggaatgagggcaaggaataccttgcccatccagggcggaaaaccgcttaaaggtgttcttaaaccacaaacaatagcatgaacaatctgt

SEQ ID NO: 846155 - DNA, 502 bp, Homo sapiens
cttgccacactatagccctgggggccaagttgcatcataaagaaaaatcatctttttcgttttgttttgttttgttttgaggaatcacaggcaaagccctgtcagttttgcaagttaccacccaaggggttgcaaggggtaacccaatgaacatttttcattctggccagagcaaaatacacgtgacaaaacatagaccttagccactctgcttagcactcagtattgaacttgcaaggctcaaacttgccccgggttgggccccgtcatctttaatccatttttagccatgagggaccttactcacgggagggcctctaacccaatcccatcctttactctggtaaaatatacctcattacgtatccaaagtcagccaattggtgctgcrgtctatttcctttggattaggacagtaattaagctgaaagattagcagacttaattttggggatccctcattttcaaatgcacttcagtgtgttgtgttttatttagaaca

SEQ ID NO: 846156 - DNA, 515 bp, Homo sapiens
ctcctgtccacatttgtctaactaaataagggctaagcttctttcagagaagtcaaggaaatttggtatgtgcacrgagaactgtgaaccagataattttctctgaataaagggaaggccgtttacccagtgtaacagtttgtgaaaaatggtattgctccacacagaaagcaagaatttaaatgcacacgtcagccctcttcacagattgcttatctgtttctcagtgttaacagttgctgtaggtgtttagtttagggcaacgagttgaagagatttagcaactgcaaatcaattaaacaagttattggtgtgactgctgtggcccccctttttttttttttgagatggagtcttgctctgtcgcccaggctggagtgcagtggcgcgatttcggctcactgcaacctccgcctcccgggttcacgccattctcctgcctcagcctcctgagtggctgggactgcaggcgcccgccaccacgcctggctaatttttggtatttttagtagagt

SEQ ID NO: 846157 - DNA, 625 bp, Homo sapiens
ttggagcctgtgcttccctccctcctcccataccacctcttcttatctgagaccctagaattccctgccccgtggctctgagttcccttccaggccctggcagktctcttctccaactctaccattcagaggcatgaagagacagccaaaaaggggcagctgtttgcaaaaggtagacaaaacttgaagactgggctgaggtgtccacaaatctgagcacaaagctgttcataatataagatggggagtgatgaagcagtctagggccagaggctggcgacacgggctggctatgtctatgtcaatattttctggtatggaactcaggggagacagaatttcaaatccaaactcagccttccaagttgttatcaagacatatttgtcaaggtaggtggatagaacagattttatttatagtctgattcataacttttaaaatatttagacacatggtatcctgggccctgtaaattgcagggttgggccaggcagcatatcctttatgcaagtaaaactattggggaaatagaacgaaccttgctcctaatttaacactggctccccttgaaaacacctatattatttaataggaaagcatagcattaatttattctatcagagg

SEQ ID NO: 846158 - DNA, 670 bp, Homo sapiens
ttcttaagatactcctaaaatagctcattctgtatccttgacatatctgttaaaacctgaaatagggataggtcccatgacagaagattttayggtggtcataaaataatgagaagcatcttcagttatcagtgatgactatgactattttataagaaaaaatctgcttactgagattgctatatagtaggagacagaatactttccttgttcaacaagtaatccagttaatagtattttacttcctctgtgcccaaggctccatagtaatgtagaggaaaattagagacatttagtagacaagtgcctgaagcacccacaacataaaagtaacctttgtaggttctctataatggggtaggtatcaacatatgctactataagaaacacagttatattttgggccgaggtccccaggaatattaatattacggatgggcttaaattccttggtttttctttctgtgctcaaatgagtctgacatgattctctatgcttctgttaaaaccaggttttataaataatttcacttactcaagttatttgcaaacaatataaattttcccattccaataataaagacaactaaatgtgtttttaagagatttgtttaactgttcaaaactggagagacgagattggaacgggctaaattttggttaggaaaaa

SEQ ID NO: 846159 - DNA, 553 bp, Homo sapiens
atctgagcctggtgctttcttgtgaaatagccaccttataactttatttctttgatgtaaattggtctctttaaatagagtgaatttgtctctttaaatagagtaaatttctttaggaaattgttcarttcatataggtttcagcatttcaattcaacatttatttgcatacatgttggcaaatgagtctctaattagttttttataattcttctgtttcaatgatatttccccttgccaattcttattttgaatatttgtcctttctcccttttattcttcattaggttagttagcagtttttatattttgctatttttttcaaaacgcagccaggctttaagttattaattatatctacttttatttatttttctcatttttttctttgctttacatcttgacattttctaggtttttcagttgggaatttaatttgttaattttcgttgtttcagttttttaaataaaagtgtttagggctctgaatttgcctctagtcactactttaacatatatattcttctatcctcatctccacttgatttagtgt

SEQ ID NO: 846160 - DNA, 521 bp, Homo sapiens
tagtctcctaacggcaaatgtctgcttgctcaccgtgggygccatgaaaggcaggaacgctggcaggaagagaagagaggaggtgtcagtgatcacagttgcccaggcagagggggccagaaggggactacccacctgaacacctcttccccagcttccagaaggcacagacctcaaaggactttttccactcattctttgtttttctaataaagtggggggtcaaggtctcagcactttggtaggctgaggctggaggatgggttgaggccaggagttcgagaccagcctctattttgtagaggtagcgagacccccacctccataaaaaatttaaagccaggtgtggcggcatgaccctgtagtcccagctactcaggaggctgaggtagaaggatcagctgagcctgggagttggaggctgctttgagctattatggtgctactgtactccagcctgggtaacagagcgagaccctgtctctaaaaatgacaataataataaagtatgtacataaaat

SEQ ID NO: 846161 - DNA, 457 bp, Homo sapiens
tcaggaggatgacacaagagggtctcttggaccctagagttcgaggctgcagtgagctatgattccaccaccaatgcacaccagtctgggggacagaggaagaccctgtctcaaaaaaaggaagaaggggggtggggaggaaaggaaggaaggaaagggaaataaaggaaagaaagaaatgcactagacgaggtgtcagaagacctgatttagagtatcagttctgcactggctccttgcagaaccatgcttccttgatttgttaagattggacaaaaacaatgattctcaaacttaaaggtccacacaaatcacctggaggtctggttaagatgcaacttctgcttcaggatgcctgggtgaggtctgagactcttcttttytagcaggcacccaggtgagctccatgttgatccaaggaccacacttggattaaaaaaggacaggatgacctcca

SEQ ID NO: 846162 - DNA, 549 bp, Homo sapiens
tttcaaagttactttccttgtaaaattaaagcacagccgactttcttattatgccagctgaaactggcctgtgtgggtttctctcctgatttcttggaaggtggaataagcaacttakttttgttttggtgacatggtagtttggcatgagtaacttcattttggttttgtctattgggcctagtgcaggagctcagttcaaaccaatggcctataaattttatttaacaccattagtgagctcttattatgtgctagtgacaaagctgggacttgaactctgctgtgtctgactccaaagtccctggtgaagaaaatgtttaaaatgttacatcaaattatctggccagaattgtggcatattagaaaatgcttgtaatcccaacactttgggaggcaggaggatcgcatgaagccaggagttcaagaccaaactgggcaacaaagtgcgatgttatctctactaaaaataaaatacaataaattagccagacatgatggcatgtacctgtagtcctaactactcaggaggatgacacaagagggtct

SEQ ID NO: 846163 - DNA, 607 bp, Homo sapiens
gaaattaggtgtgtaatcccagcactttgggaggccgaggcaggtggatcccctgaggtcgggagtttgagactagcctgaccaacatggagaaaccccgtctctactaaaaaatacaaaattarccaggtgtggtggtgcatgcctgtaatcccagctactcaggaggctgaagcaggagaatggcttgaacccgggaggcggaggttgcggtgagctgagatcacgccattgcactccagcctgggcgacaagaatgaaactttgtctcaaaaaaaaaaaaaaaaaaaaaagaaattaggtggatgtggtgatgagctcctgtagtcccagctactctggaggttgaggcaagatgattacttgagcctgaaatgtcaaggctgcaatgagctgtgatcataccaccgtactccagcctgggtgacaaggcacaaccctgtctcaaaaaacaaacacagaggatgcagaagaatggatgtcacatttaattttttaaaaaaatatatatcctgtgagacatttaactcaatgatttattaattcaagaaatctttatttagcactttgtatgtgctaggccctggtctagacattgggagcacag

SEQ ID NO: 846164 - DNA, 438 bp, Homo sapiens
atgtatttagttaaactatgaatgctgcattaaaatgaataccttctcatcttcctggaatatgcgtgggcgtcttgcagggattacgagtggactttgagcgttgcacttctcccacaccttctcctgtgtcctaggcatggccaggcgcagaggcccagggaggagcaccaggtgttctggagcttttattttggggatttgtatgtgtattttttcagaggtctcctgaaatttctcaatcctatgccccagaaaatatccagattggcactaggtgttactctttggcttgagactctcttattaaatcttgctgtcatgtgtgtgattttattatttttttaaaggatatgaaatatgcatccttagtaakcaataaaggggagccgcacatggattggagccatgatgtgctccacctgctggaaacatttc

SEQ ID NO: 846165 - DNA, 616 bp, Homo sapiens
atatcaaaatactttaaatgttttaaatagtatatttcttatgtgtaataataatagtaaaactatagtatattctatggtcattgcattcaaataaaataatctaaaaaattaatgatgttatactattaagaaagaagaagtattgggaggctgaggcgggtggatcacaagatcaggaattcaacaccagcctggccaagatggtgaaaccccgtctctactaaaaatacaaaaaaaattagccaggcctggtggcggttgcctataatcccagctactcaagaggctgagacagagaattgcttggacccgggaggcggagtttgcagtgagcggagatcgtgcactccagcctgggtgacagattgagactccatctcaaaaaaaaaaaaaagaaagaaaaagtagaaaatcaaagtgtgatgcagaatagattgaattttcttaaaactgtgttcacatacatctgtaggtatttagaaatagatataaaaatgagaagaaatatatgtgaatattattagtatcctggtaaaaataattatggtgacttttatttttatccttayactagtttctttttcctacgtttttaaaaatgaatgtattattt

SEQ ID NO: 846166 - DNA, 616 bp, Homo sapiens
gatgcatgaagcacgtgtggaggcccaggaatgaaaamtaatttgttcttatcaaagcacagaatgtgaggaagcgtggtgatgaagctgtgcatgtggacaggtggccaactgagtcatgttttccaggaatttacacgggaacattacagatcatattaccctaggaagaattctctaccatttatttaaggacctgctatttaacaacatggcaatcaataatcaaagtccaaggaatggtcactcatagatctgataataatttttccaaagggttgaagacaagaacttgatctctcttccttttcttaatgtttctagtattaacatgtgtactgacaacttgataatcctttgaagtgaagagaatttttccctgggtctctcccttgcatctaccagaaagaagaaagtttaagacacttgtttacttaggccagatccttgtactgacatagactcggagagaggtaaataggctattgactctgaaatctcaataattatcacaatgtagttacagatgaattattctacaatctttatcaagtctggcgtatgtttctcaacatttaactgaatgatttgaattagtagctttacataggagctt

SEQ ID NO: 846167 - DNA, 599 bp, Homo sapiens
acaaggctagcagcctagggaatagtattcttggtggaatccagatgctctctcactctctgcactagtcagaaactttcagaaaaayaaatacatttctattttatttgaacaacactaattttaggtctttttagacattatcctaacatagagatcataggaaatttctaaacatttaaaggaattattctaaaatttgatttgtattctctgcaacaataaacaaaatgagctaaatgacctatcagtaataaattactggcattcgagagggagaggtaaactatctttatttgcagatgacataattgtgtatgtagctttaaaatcctaaagaatctaaaagctgtaaaaactactgagtgaatttagcaagacagcttgatataagatcaataatcttatatccagattcatactaaggccattttaatgcataaacccggatgtgcatgaataaagaattttctctactgaattttctaagaataaaagttcatccaatttgttcattcattctattgaggtgaaattatcaaatagtggtcactacacaccaaacctagtatcaatttctagtgatacatatatgtgca

SEQ ID NO: 846168 - DNA, 538 bp, Homo sapiens
atgattctcaagtaaaataatgggttacctcaagaaaacataacgcaggcttaccattattttgaaagggagatgatgtaattaccaccaacttaagtgtcagtcttaatttcaaaggaagctgaagaacacaccaacagatttgcatggtagacttattactgcttcattaaaacagtaaaaagaccctctcatctccatttacctcatctgcatcaactatttccatgactctttccttgaagaatttgttgaagacttcagaagtgatgctggctgctttcttcattaggttgagctccccatcctcctttacagcgatggtatatgccacaactgcactgatatctatctgcagtcaaagtgacaagagtttctaacatgcaagtacagaattacaaaataaatgcatctctccaatttgaatattaccagtgatatttctgttatttagcaractatcactggtttgcagaatattcaaacattctcttcttgaactgaataaacatttgaaatagctctttgccaggtcatt

SEQ ID NO: 846169 - DNA, 539 bp, Homo sapiens
cctgacagcccctcttccttaccaggtcctggggtagcgctgattgcttcctcctttgtatttttrcagtacccttttcactcctttcttacaggtggatcatcttgttttgtaattgtcaacttgccttctacactgttagttcaagcttcttgcaatggggaactgagtctcatgcttaaaaacaaaacaaaacaaaacctctgcacctagagccatgttttatacatggaggggagtggctcagaaatatttgttgattaaaaaattaggctggaaacatcagctcatgcctataatcccagcactttaggaggctgaggtgggcagatcgcttgagcccaggagtttgagaccagcctggacaacatagcaagacctgtctctacaaaaattaaaaagaaaaaaaaaaaagcagggcatcgtggcacgtgcctgtagttccagctactcaggaggctaaggtgggagaatcacgtgagcccaggaaagttgaggctgcagtgagccatgattgtgccactacattccagcctggg

SEQ ID NO: 846170 - DNA, 539 bp, Homo sapiens
cctgacagcccctcttccttaccaggtcctggggtagcgctgattgcttcctcctttgtatttttacagtacccttttcactcctttcttacaggtggatcatcttgttttgtaattgtcaacttgccttctacactgttagttcaagcttcttgcaatggggaactgagtctcatgcttaaaaacaaaacaaaacaaaacctctgcacctagagccatgttttatacatggaggggagtggctcagaaatatttgttgattaaaaaattaggctggaaacatcagctcatgcctataatcccagcactttaggaggctgaggtgggcagatcgcttgagcccaggagtttgagaccagcctggacaacatagcaagacctgtctctacaaaaattaaaaagaaaaaaaaaaaagcagggcatcgtggcacgtgcctgtagttccagctactcaggaggctaargtgggagaatcacgtgagcccaggaaagttgaggctgcagtgagccatgattgtgccactacattccagcctggg

SEQ ID NO: 846171 - DNA, 491 bp, Homo sapiens
aagtgacagaatttttcagatcttagaattttagaaccttgggatccaacttcttttacagaaatggagctgctatggtctgaaagtttgkgccccctgaaattcatatgttgaaatcctaaccctggataggatgatattaggagatggaggtctttggagaccagttaggtcatgagagagaagcccttatgaatgggatgttactttgagaaagaggtcccagagtgaaccctggccccttccgccttatgaggttataatgagaagatggtggtccatgacccaagaagccggttcttaccagacactgaatcttcagggaccttgatcttgaatttcccagactccagaactgtgaaaaataaatttctgttgtttataaatcacccagtctgtggtattatggtatattaggttggtgaaaaagtaattgcggttttgccattactttcaatggcaacaacctaatagctaccaaaggatctaag

SEQ ID NO: 846172 - DNA, 640 bp, Homo sapiens
gattgatgagcctgaaattaatatatgtcaaggtggaaaactctgacaatttaacggccaatgtgattagcactctagtttttcgggcagctaccatacgcaygcacttgagtaagaacaatagccagatggaaaaaaaaatcagttataagtcaattttttgacaccctaaattcatttttctatagcctcaacatcgtaaataatggtgagttttctccacctgcaaatgtccaatctgcaaatgcctatttggaaggaaagggaaggagaacaatccatacatgtatgcctgctgggtggtaacaggcagggcagaaaccacagcccagctctgcagctccttcctacctctggactgtgcacacgccggcccctttccctggaatgtgcttccacctgatgaactccaattccggggtaaatgctgctgccttccaaaacaggtcgggatccctgtaatgagcccccagaacacccactatggtccactgtggcctgtgccataattgtgattaaaatggcccatcatttaattttacattgcttgtccatgcccctccaccggactgtaagctccctgagggcagaaaccaagatctgggtgtgacactgctgcatccccagtgcccagatgagg

SEQ ID NO: 846173 - DNA, 569 bp, Homo sapiens
taaaaggggtcaattgtactccaygcaaattacaactcagcaaacaaacaagataaaaacaataaacacaaaactaaagaaaaaattccaaagaatgtttgctttgaagggcacatcagacacccccataggcactcagagaagtttctggcgatttctctgcccaccccctttaatacaagccaccatgctaggtacattgaggattatgaaaataaacaagaacacaggccctgcccctacaagctgatctagttgcaaagactgacatgtggacatatctccactggggctgcatttttgaaaccaggaagcaaagcctaagtcacaaacaaacagataggatatgggaaaatgggatgccagacaatccaagatgtgagatggtcacagcaaactcgtagaaaggaaaagagaggataggagaggcagggaggaaggaaaaagaaccatccatttggcaaagactcactgagcacctattatgcttcagggctctgctgagtgctggacagagcagctgacactgtgttctgtagggctagaaggagaggtaaattcagactgaa

SEQ ID NO: 846174 - DNA, 574 bp, Homo sapiens
cacaccacaccaaggatcaggaagatccagagctggaacctcgctggagtttgcaaatccagctataaagctgtctgggctgggtcggaccctcacccctggctggctctggctctagcctcaaacacactgagcctggataaacaaacaggggattacgctgacccagactacgaggagactgcatttttgccttctgaaaaagtcgcaatttgccaagaaaaaccatctctgattcagacaaggaaaatctcgaaataaatcagagctgcacacagacccggcatagctgaggaagtctgcctgcttcctggaggaggagggctgactcaaggtaagcccaacctcctgctttccagcctggcaagccagtgaccagcatcagccatctgggtgccagcctgaagattcagatacacagatcctcctccaggcctggccttgggcaagtcccttctcctcactgggcctcagatstgaagcttcctggacttcattcaaagcaccttttctctttggcaggaatcgcactgcatcgtgcccagcatccctcctttccctacttgcccagttc

SEQ ID NO: 846175 - DNA, 574 bp, Homo sapiens
cacaccacaccaaggatcaggaagatccagagctggaacctcgctggagtttgcaaatccagctataaagctgtctgggctgggtcggaccctcacccctggctggctctggctctagcctcaaacacactgagcctggataaacaaacaggggattacgctgacccagactacgaggagactgcatttttgccttctgaaaaagtcgcaatttgccaagaaaaaccatctctgattcagacaaggaaaatctcgaaataaatcagagctgcacacagacccggcatagctgaggaagtctgcctgcttcctggaggaggagggctgactcaaggtaagcccaacctcctgctttccagcctggcaagccagtgaccagcatcagccatctgggtgccagcctgaagattcagatacacagatcctcctccaggcctggccttgggcaagtcccttctcctcactgggcctcagatgtgaagcttcctggacttcattcaaagcaccttttctctttggcaggaatcgcactgcatcgtgcccagcatccmtcctttccctacttgcccagttc

SEQ ID NO: 846176 - DNA, 605 bp, Homo sapiens
ctgccctgctgaaaaacttggcccagaatagggaagaactcaacattcaattttatagtgagtcagtggaaatgaaaaccagtgcagtctgtgagcctcatgtcctaacagcctcccctgggaaggtccaggcctactgcgtgagacataaggggttggtcaggccctccccaggcactctgtctctccaccagcctgcaagatcttgcccatgatgtaatgaccaaggcagaagtctgcggcgctgggggctgtggagtctagctcactctgaccatggcctccctgggctgtgagtcacagccgaggcgatgctcaggaggcatctggccagccctgcagcgggaagtctgtgcgagagaaggttcgcggcccaggtgctctgagaagctctcaggacacccaggaggaccatgggctttgggcgaccaactatgggtcctcacccacaaggaatggagtgagggaccaggcagtttttgcaccctaagaaatccaggactaaggagcasagagcagggttccccatcttacagttactgtgaactagtttaaacaatgagaagaatttcacctccagccaccaggcctttcactgtgctgtg

SEQ ID NO: 846177 - DNA, 593 bp, Homo sapiens
agcatccaacattcattaatggtgtgtccactatgtgactagaaactgtctttggaatcatccctaaaggccctttggaaagacaccaaagatcactggcctgctgcaagcccctcagcagattttgttcatayagaaacctgaaaaacaatgtttgccatttttgaaaagaaggtgaagaaagaggaaaagaacagcatgactatttttaaaactattgttaaatgaacaaccgatgtgttaccatccgaagtgtaacccgctgaagaccgccagcacacacactgtcttgtgttctcaaggtatttacacaacacttactaacaaagcttctcccaggccatcacactgtatgtttatttaaatgttttctaaatgtgtcattcattgattaagaagctgtacctctacgtgttttgttttgttttcttttaatgcaagctacacatgtctgtccacgtgaaattctagaagcaagtaaagttcaccacaatggcccatgtgcactataggcaaacgctgggcagggctcaggcacacaggctccgtgagcattgtcagcgaggtgtttgggccaactgtctaagaacccc

SEQ ID NO: 846178 - DNA, 618 bp, Homo sapiens
ttaaggcagcatggtacattggaaagcacaggactttgcaactagacagactcagattcaaatccagactcttcccaggggcctaagtacttttctkgaattctctgcacctcggtttgctcaatcgtaagtgggaatgaaaatcggttccttttgcagaaccagttgacagaaataaatgagagtctatgtaaaacacctaacataggacttgatccataaaacatgttcatcatattaaatcttttttcccctaagtaatttcctctatctagaattgttccacataaacctgaaaacataagctaacacagaaagcagaggcagatgatctgtcgccaggaggaaaccatctgctccaggctaggaaacatggttcaaaggagtgaatgacatgtgagcaaagaaaaagaaatttggtctccaatcacgtcctcttgactaataatcaatggagtcctgtcctggggagtgctagacccaaaaacctctgctttctcactccccagtcctcattctcacccagttagaattatttttggccgaagaatcaatgataaacaaattaaatggccaatatccatgagaatacagattttttaagtgttttcattgctt

SEQ ID NO: 846179 - DNA, 618 bp, Homo sapiens
ttaaggcagcatggtacattggaaagcacaggactttgcaactagacagactcagattcaaatccagactcttcccaggggcctaagtacttttcttgaattctctgcacctcggkttgctcaatcgtaagtgggaatgaaaatcggttccttttgcagaaccagttgacagaaataaatgagagtctatgtaaaacacctaacataggacttgatccataaaacatgttcatcatattaaatcttttttcccctaagtaatttcctctatctagaattgttccacataaacctgaaaacataagctaacacagaaagcagaggcagatgatctgtcgccaggaggaaaccatctgctccaggctaggaaacatggttcaaaggagtgaatgacatgtgagcaaagaaaaagaaatttggtctccaatcacgtcctcttgactaataatcaatggagtcctgtcctggggagtgctagacccaaaaacctctgctttctcactccccagtcctcattctcacccagttagaattatttttggccgaagaatcaatgataaacaaattaaatggccaatatccatgagaatacagattttttaagtgttttcattgctt

SEQ ID NO: 846180 - DNA, 591 bp, Homo sapiens
ggatacaggccttcttgattatctttggctttgtacctgaggcaggagagaagagatgtccaaccagtgagatctttaagagaaaagtttgtattttaaatgtcaatgtgcctgagaaatgtcagcttcaccacgctcttgcttcctaatgctctatacaaagagggctgactatatttcttgaagtggtgtaaaaacttagagattttataagagaaccaggggctcccttcacctctcctggtccctcaggtcacatatgaaagcatttttacaagataggaactggaattcctcatttctcccatgttcctgcttgttcttaaacttcatgaagctatttttccagcctatggggtagttcttgctccagtaagaggaatcttagttgtcataatcccttggagcctgggtttttggagaaagagatctccgtgccctacagaccttttctcaacgaatgtgggaaggacctggctttaaaacacgcacacaaacacacaaataaacagacataagatgtcatcacgaaactgcccacggatctttaggctttctgcatygacataaatacattttctaagggggggg

SEQ ID NO: 846181 - DNA, 619 bp, Homo sapiens
catagggttatggggaagctcaagtgagatgacacaaatgtaaagttccacaggacctgataacaaagtagctattatgacagtgctattctaattttgatgatgatgatgatgatcttttctcctccatcgttccccaaagcaatcaaatgcatgggtaagtgaaaaagaaattcaaggaaacaattgttaagggccaagtgagtgtttcagccaaaaaagtgctgtatgttataattcagagctcaccttcgtatcttccacttggtcacagaatgagaattaactcatgggggtcttgcagaccttccagggcctcagggactaggagaccagttgcaaatgttacttccggcaccaggtactacaggcaccaaaaccacttctatttgatttatatttgcctaacagggaaaggggaatagagggggtcctaagaagaagcctaatagatgcctttgcttaaggtgacaatcataaattctttctgattgaagaattttcaaaataagcaccatcattactattcccgttattcataccaataataatgataataataaatatatgtacttacaatttatcagttagccakgcatcagttgagtgccatatagac

SEQ ID NO: 846182 - DNA, 619 bp, Homo sapiens
catagggttatggggaagctcaagtgagatgacacaaatgtaaagttccacaggacctgataacaaagtagctattatgacagtgctattctaattttgatgatgatgatgatgatcttttctcctccatcgttccccaaagcaatcaaatgcatgggtaagtgaaaaagaaattcaaggaaacaattgttaagggccaagtgagtgtttcagccaaaaaagtgctgtatgttataattcagagctcaccttcgtatcttccacttggtcacagaatgagaattaactcatgggggtcttgcagaccttccagggcctcagggactaggagaccagttgcaaatgttacttccggcaccaggtactacaggcaccaaaaccacttctatttgatttatatttgcctaacagggaaaggggaatagagggggtcctaagaagaagcctaatagatgcctttgcttaaggtgacaatcataaattctttctgattgaagaattttcaaaataagcaccatcattactattcccgttattcataccaataataatgataataataaatatatgtacttacaatttatcagttagccagscatcagttgagtgccatatagac

SEQ ID NO: 846183 - DNA, 641 bp, Homo sapiens
atttacttttactagaggtttccaaatattcaagtttacagcaggcttcagtaccatatttttcaagaagtctcttctccccacagctttaaatataaccgagcaaaagtcaagcctgrtctccaaagaacaaagcaggaaaagttcatagatcatcactgggtgaagtaccaaggatgtatcgtatgacaggatcagggtgtcaggccaattttaagactgatgtctacccatactacgaaaaataatactggagaaaaatagatttctggagatcagaaagaaacagtatggtgtgcatttcccaaatgcattcagattagctttaaacaacaacaacaaaaaggctattttgttggccaaaaatgtatttcaaacaaaaaatatgtcagagttctctcaactctcagacttcatttgagacctagaagtaatcatagtgcttgaccagtctagtctccttattgttatttggtatatctatgctgctttacacacaaaactaacctgaaatataagtaaacctatcaagagtgcaatattcaatactgtatgattttatctgcaccaagttcaaaaacagacataatctctagtgttggaagtcagaatactggttctggaagattaagggggtgagg

SEQ ID NO: 846184 - DNA, 693 bp, Homo sapiens
tgggctctgcaagtttagaggatcccaaagggggaaatgttctcccagtggacacagcaagtcccattaaactccaagctatgattgaaaactgggcctgttagaccccctccttccaaaagattggcaggtgtgaagaggggtgaccatcctggcaggggatattaatcctgattgtcaggaggtttggccataatgatacaataggatcaggaataaataaatctatctgcttggacatcttgatcctctcttgattttttttacttatatgaacaaatgcggcagctacagcctaagaaaggcacggtgaccagaagttcagatcctcaaggataaagggctgggtcatggccccaattaagccacagagaccagcaaaggtcctagcttaaaggaggaatctcaagaggagagtagaggaagatgtcaatgaacattagaacagtgtcaaaggcaagagctgcagtttattccactgacttccatcttctaaatttcccagaggccctttggaatcctggaggaactgcacccaatccttatacaagaaagtgcatgcragcagcctgggagcggactgtggcggatgctgtgacgtgctgcccagacccctccagcccacacagtgattccctctgctgaagagaggtgctttgtgtgaggtcacaccacttcccagagtgccccaaa

SEQ ID NO: 846185 - DNA, 563 bp, Homo sapiens
ccactctggttcaatctgatgctggtgccctctactgatatggtggtctctacaaacgcagcatgtgtggttttagggggcgagttcaggctcacctctgccttccccatccttgatgaccccttcagaaaggggcagccatgtgtctggttctgacagtggcccatactctcaatctcctctcaaagttggtcctgtttttgcctcagatgtctcctaattactctcctttctgtttctcacctaacttctgtgctcaatacccatagaagtctctgaagtcattttccacgtaccccgaaggccaaagagaactgaaatgagatctcttcatttaaagcaggggtgtccaatcttttggcttccctgggccacactggaagaaattgtcttgggccacacataagatatactaacactgggctgggcgcagtggctcacgcctgtaattccagcactttgggaggccaaggcgggcagatcacgaggtcaggagatcgaggccatcctggctaacacggtgaaaccccrtctctactaaaaatacatgaaattagccgggc

SEQ ID NO: 846186 - DNA, 612 bp, Homo sapiens
ttccttctaaggtatcatcttcattcacactgtctgggccctttattttcttaattagkctgaggagtagagaaaattggaatataaatttagtaagtagctttatatgttaaaaagacatggaacactagataataatattattaagaatttctactcatcagaaaaatactaagaataaaaaggaagcacatggagtagaaaaaggtattaataacacatatatgcaaaaaattctatcctgaatatgtaaaaactctcatgaatcaacaggaaaggacacacaaagccagcaaaaattgggtaaaaatttctgaacaagggtggagccaagatggccaaataggaacagctccagtctacagctcccagtgtgagcgacgcggaagatgggtgatttctgcatttccaactgaggtactgggttcatctcactggagagtgtcagacagtgggtgcaggacaatgggtgcagcccaccaagcatgagccaaagcagggtgaggcatcgcctcacccaggaagcacaagtggtcagggaattccctttcctagtcaaagaaaggggtgacagacagcacctggaaaattgagtcactcccaccctaatac

SEQ ID NO: 846187 - DNA, 514 bp, Homo sapiens
gccaccgttcaggagatccatgtggtgacaagcacagctcagaggtgarcagtggcctgcaaggaaaaatcactgtgagtggcctggagggatctaaactcagagaagtggctgcccagtgaccatctgactgaggagtaagtgtgagaggacaaaatctctttccccaagattttaggggaaaagtgtccattggggtggcagaagtgacacgtccttaggtcacatagatgataacattataagacaatatgcacaatctagaccagcagtcattaaatcagatcactatctttattttctcacttttaaaaagcatgtttcagccaggcatggaggcatgatcatgcctgtaatcccagcactttgggaggccaaggcgggtggatcacttgaggtcaggaattcgagaccagcctggccaacatggtgcaaccctgtctctactaaaaatacgaaaaaaaaaaaacaaaaaaaaaaacagctgggtggggtggcatgtgcctgtactccc

SEQ ID NO: 846188 - DNA, 626 bp, Homo sapiens
ggggtagtcaaggttgtctaggaataggctatagattggaagagacraggaaaagaggatcagcaatgttcaggggacagcctaaggaggcaggtccagcaaaggagactgaggggtgactgaatgaatgccaagaaagtgtgggctcatgaaaaccaaggaaggagagattcatcaagaaggcaagggtcaaatactgcagagacgtcaaggtgaggatcgaaaagccaatggatttgtcaattataagcttaatagtgacttcacaaaggtggatggctaaggtaggaaccttagcatgtaccaagtgtgcaggaggatacgtgatagagagagcatgggtccaagagtcagacagactaaggtttcaaattccagctccaccatgtactagcaagttactcaacatctctgtgcctctgttcatttgtaagtggagataacaatagtaaatacttaataaggttgttgtgaggcttacatgagcttaatcgtgtaaaccacttagtacagtgcctagcacacatgagatgccatgttctatctattggctcagagcaggaatcataaaccactgaaggtatctcaggcagaaagataatcagttgtctacaaaaccattgggc

SEQ ID NO: 846189 - DNA, 654 bp, Homo sapiens
aatgtagaaggaatgatataaagataaacatgaccacttaagaatgaccatagtagtggttgatttaggcagcgatcatcaatgaatgmtaaggcaggtgagtgggtgtttgaagaacagaatagtagaatagactcagaggatcttcttacaaaatacataacaattacaaggagaaaaaatgtgactccttgttggggaaacatggcagacaccaccttgcccaggtaatgaacattatcatcatcactggtggaacagagttgccataataccccccttgatgcattactctgcttacagtatggcattattactacagtcttcttgccaggaatacatgacctgagtttggacaggagtagttaccaaataaacaagggttgagggacatcatacaaaatgaaagacatgtactctttatactgtcaagatcatgaaagtcaagaaagactgaggaaatgttccagactttaggagactaaaaatacatgaaaattaaatgtaacacgtgactctggattggatcctggaccacagaatagaaagagacatggttgggatacttggaaaaatttgaataaagtctttgggttgggtcatagtgctgtatcaatgtttatttgctgatttggatatttctatttgtgacta

SEQ ID NO: 846190 - DNA, 477 bp, Homo sapiens
tatgataatataataaaaatatgagaaaataacctcatatattgttgatggagctgtaaactctctgaaatcacattttatttggtccagcaactccagtttgatgaatttacactacagatatacctacacatattttaaaatacttatacaaaaggatatttattgtacattgttgcagtagcaaaagatggactataacctaaatgtccatcaataggagactgattcaattattgtgcatttatgctatgaaatatcatgcagtcattaaacaaaaaatatttgatgtggtggattgaaaacatgttcacaaatccttgccactccaatcaagatgtggagtctgactgtttactaccattttaaaatgttttcttacatgaatgtggtrtttaaacacaatttggaattttaccttgtataacttaagaagcagagagagtttgtttagggggtagatcttccttctatgaa

SEQ ID NO: 846191 - DNA, 518 bp, Homo sapiens
tgattccccttgacccccatccttggggtagacacttactgggctgagataggctggtttcagtgcccgtgccaaggtagtctgcatgttccactgcataatctgaggacaaatgtctggtaaaatctttcaraattccagtcatttctcctgtccgcctgttcaaactgaagtttcatttaaagcctttgtgtttacgagaggtttgatcatagaaggcaaatcttcccagtaatgtcatttagcctatgtttttatttctgcatttaataaaatgcagtcaaattccaaattgtgtatttcactcttgcttgagcatattgatagaagctgttgtcagctatgtgttcttcctatcaatcagtcttttcaaagttctttgttaacaattagtcatcagggttcatccatacattgttgtattacacaatcaatcattaaactcaaggggaaaaatgcttattgatgtgcatatttttcccgatatattttaagtgaaaagagcagggtaaaaaacc

SEQ ID NO: 846192 - DNA, 602 bp, Homo sapiens
agaacaattttaacaatatacagtaatcaaagttatgtgaatgtggcctctcttctctctctctcaaaatatattcctggcctttgaacacatttccgtttacaacctccatcctacagtgtccttgycaatggtttatctggcttctgtttgcacatgctggtgacagggggctcattctctccccaagtggtgccttccatcatgggaccattttgctagttagaaagtgctttctgaagctgacttgaaatgtaacagactcacagactctcacaaagagatgggaacttggaggtttcccagcccagaagtccttatccttttcaccctcagagaccttttccttacccacccccttgggcttgttgctggaatatattttgtctgcctcttaagttgcatttattactcactcacctgagagaatgtatttccaagtgacagcatcctctggaatatttcaactacaaaaggcctttgactgagcgctgttcatcgagtccagccccggctttgcaaataaacagctgacaccaagagaggagaagcaacacggctgaggccacagggtgacaaagccttaacaggtatcagctctc

SEQ ID NO: 846193 - DNA, 541 bp, Homo sapiens
atttgtctggggtgaacaaagggataactttgarttctgtctgtcctttgtactgcacgtgtgaagataagccatcaatttacatagccaaggtgaaattcaacagaactgttttagggtaaagaccctgaggcccacagagaatttccttgtgggtaaattatgagaaaggtatgtagctttttttttaaattgaagctttgtggctatcttatttagaaataaaatgggaagtagatttgcctgacttagttcccagcttgacttttccctttagcttagtgagggtctgagacagattttcctttcacaacttaatgaagaaattgcactaggtcttctagatatctgagtttttttgtttctaaagttagtaattaaaccatatctctagagaataactagaagctggcctgtgataagcttacaacactcaggaaacaagcacaacctttgtgatacactgttgaatttccttctgtgacatcacccaggctgtgaaccctgctacatacagggccccagtacagtaactcttcct

SEQ ID NO: 846194 - DNA, 541 bp, Homo sapiens
atttgtctggggtgaacaaagggataactttgagttctgtctgtcctttgtactgcacgtgtgaagataagccatcaatttacatagccaaggtgaaattcaacagaastgttttagggtaaagaccctgaggcccacagagaatttccttgtgggtaaattatgagaaaggtatgtagctttttttttaaattgaagctttgtggctatcttatttagaaataaaatgggaagtagatttgcctgacttagttcccagcttgacttttccctttagcttagtgagggtctgagacagattttcctttcacaacttaatgaagaaattgcactaggtcttctagatatctgagtttttttgtttctaaagttagtaattaaaccatatctctagagaataactagaagctggcctgtgataagcttacaacactcaggaaacaagcacaacctttgtgatacactgttgaatttccttctgtgacatcacccaggctgtgaaccctgctacatacagggccccagtacagtaactcttcct

SEQ ID NO: 846195 - DNA, 552 bp, Homo sapiens
ttgaaaatcattcttttcaactatcatctattcagcaaatatttgttgactacctcttatataccacatgctgagtgaacaaagtaggcacagtccctgccctggcagagtgggarttaagaaggggcagcagttaagaaaacagaccattgttattgctgtaacaatgagctattacactgttgatgtaacccttgtaatgcagtgtgatgaatgtcataacagggtcagcataggaacctgcgagagcacagggtaggggtacctagccagaggtagtgtggggcgggggaatcaggaaaggcttcccagaggaggcaacaagtaagctgagacctgaaggagaagcaagaattggccaggcaaagggagggctggattatcatctagagaacaacacatgcaaaggtctagaggccaaagaaagcttggtgcacttctttagggaagtcatagatcagtcttgctgtttctacctgctgcaggcagccaggagaagccatactgaagtgcattaattccttttgaaaatccccttgacatctccttaaa

SEQ ID NO: 846196 - DNA, 611 bp, Homo sapiens
cacttctttagggaagtcatagatcagtcttgctgtttctacctgctgcaggcagccaggagaagccatactgaagtgcattaattccttttgaaaatccccttgacatctccttaaatgcatttgtagtaaaacattagggcaataaggtgaccagcccaaagtcacacagtcaggatctggccacgccaaattggaacctgagaggccaaagaaagcttggtgcacttctttagggaagccatagatcagtcttaactgattttagctgctgcaggcagccaggagaagccatgctgaaatcaacatacatagccaggacctcgacatccctttcatcttttatcaccagtttgtctttgcatttacttacttaatgttggcacttttgtacatggccatctcctcctccctgtcgatccaaatagtgcagcttccctctagctccttgtctctagaggtgagcaaatacttacctccagtaatgctgggattagaacccagatgggacagtctgctgagctcwtgttgtcacaagcagacgatcatcgcgtggcttgctgcgctgtcccaggctggctgagctccctgagttgctgccctgccaggga

SEQ ID NO: 846197 - DNA, 417 bp, Homo sapiens
gtgaagcttgggtagtttgcatcttccaaaggatttgtccatttcatctaagctattaaatttgattattataaagttaaggagaagtcagtactgaaataaccaaacacatgagtgaatggctcacctaagaagaccatagagaaaaaagaacagagattctgggtttaaaaattacttgaaattcatgaaaaactttatgcttttttgaaatgaaacagtttatttaaaagtacaattatgcacaaggatgtaaagcaaagtcttaatataaaaaattggaaaccacataaatgtcaaggaaagcraatatggtatattcacttgatggaatatatgttattcaaattgtgtcaaaatatgcacagcaaaatctagagagaaatacacccaaatagtagtagtttttgaggtttt

SEQ ID NO: 846198 - DNA, 511 bp, Homo sapiens
aaaatcctcaataaaatactggcaagccaaaaccagcagcacatcaaaaagcttatccatcccaatcaagatggctttatccccaggatgcaagggttggttcaacatacacaaatcaataaatgtgattcatcgcataaacagaactaaagacaaaaaccatataattatctcaatagatgcaaaaaacacctttgataaaattcaacatcgcttcatgttaaaaactcttaataaactaaatattgaaggaacacacttcaaaataataagagccatttatgacaaacccacagccaatagcatactgaatgggcaaaagctggaagcattccccttgaaaaccagcacaagacaaggatgccctctctcaccactcytattcaacatagtgttggaagtcctagccaggtcaatcaggcaagagaaagaaataaagtgtattcaaataggaagagaggagatcaaattgtctttgtttgcagatgacatgaccctttacctagaaaac

SEQ ID NO: 846199 - DNA, 624 bp, Homo sapiens
gcctctcagatagggctgccttcagctccggtggcaaattagcaatgaattccaacatgataattatagtttctgtatctttgttgatgaaggatggtacaatttctgttaagtttaaaaaaaaagtgtatgtgaaggcgtattcacgtcaaagagcattcagaaaaactgtgaatgtttgcatacacaaagaaaagaaagcattgcctcaatataaattaaacattgaaacacaaaagcatcctaatatctaaacacttagctttcttacagttggacaccttaaagtaccataattttaccaaggctctgctttaccccattggtcctctctcgtctctcttcattatcccctcagtgcttttatcatagtacttttgactctccctgacattactctgtcatctttctgaagtcatgtaagtcattggaaacagtttggccacacatagtggtcattttcttggattcttcttacttaactcgttttcttccattgctaagctatgatttctgatattacgagttgtagtaacaacscttgaaaaagatattattttaagctactcaatgtttcgtggtgggaatttactcctggaggataaagttaaagaggcagcattt

SEQ ID NO: 846200 - DNA, 652 bp, Homo sapiens
cttttttttaaacaggaaattcccacaaaaatttcctattaaatttctgtgccagctgggtcaaattccagggcaataaaaatcaggattctgtgacagcagcagtatgctggtgaatatttaccaaccagttctctgaaaataaaatgtatataaatgtataatatatatgtttattacacgtgttatacatgttcactatacataaaaatatgtatcataataaaatgtacataaaattccacatactaaattgattctcacagaatgctttcattgatttttatggaatgcttgaatctgtagccagcctatgttgcagctgatgagagagtataatggatgatggttggtgttttcatttacactaatgagtaggacaaaagtgaaacaattgtttccttcaagacaaatgttggaacttcatttatttgagaatgatgtaaacaacttatttgctgaactggataatagtttttcaatattagaagaatatttcaccaacttttatgctacttacaatgtaatagttacagacaaagcacacttttaagcttaatctgcattattagcattttcttcatcaakttttaaaatctagaccataggttggcaaactgtcttaaagggccagacagtaaatattataggc

SEQ ID NO: 846201 - DNA, 499 bp, Homo sapiens
ttcatttagaacttcacggtcctgtttcccaggcagtaaagttctmtaaacaagaatactcattctcaatattatcaatgactcaaagacatgaacatataattcacagaaaaaagcacacaaaatgttcatatttgctggtaacaaaagaaatgcaagtaaaacatgaatttaaacaaaaattaaatattatttttgtccataaaattgatattacccaaaaatataatattcaataattatgagggtgtagtatagggaaagaagtatacattgatataaactctctggaaaactattcttttgtgatataattccaggcttgaatcacagacacatggagacacatatacagcataatatttagcctatcagaatatatatacacacacacacacacacacacacacatatatatataatgtacacttttgttaaaattgtgaaatcaataacttacttggattctagcagctgaagtatgtctggagtattaaga

SEQ ID NO: 846202 - DNA, 499 bp, Homo sapiens
ttcatttagaacttcacggtcctgtttcccaggcagtaaagttctataaacaagaatactcattctcaatattatcaatgactcaaagacatgaacatataattcacagaaaaaagcacacaaaatgttcatatttgctggtaacaaaagaaatgcaagtaaaacatgaatttaaacaaaaattaaatattatttttgtccataaaattgatattacccaaaaatataatattcaataattatgagggtgtagtatagggaaagaagtatacattgatataaactctctggaaaactattcttttgtgatataattccaggcttgaatcacagacacatggagacacatatacagcataatatttagcctatcagaatatatayacacacacacacacacacacacacacatatatatataatgtacacttttgttaaaattgtgaaatcaataacttacttggattctagcagctgaagtatgtctggagtattaaga

SEQ ID NO: 846203 - DNA, 456 bp, Homo sapiens
gtaattttttttcttcctagttcaaaatcttccacaagttttccttgcatcttctccaaacttgctgttttttttcctgtrttcattatcttagtgagtaacattgtctacgtagtaactctaattaaaaactttggtatcatgttcaacatctcctttgattcttgtgtacccctttacttaccaagtcctattctttttcttagctgctaaaatctgtttctccctcattcgactttttgcaatactgccagaattgtctttcagaaatatatacttctacataatgctattgttctcatacttggaaacatttttgtttttgaatagcacagttgataacatcctaactctttggtgcagcatacaagatcctcaacagtccttatccaaacttgccttcctagctatatttactactcgtttcttcctaaatttccccaatgctcaagcttc

SEQ ID NO: 846204 - DNA, 622 bp, Homo sapiens
ggtttaagctatgttagccacagtagcatattttcataaactatgaattcaagcagtcacttctgccaaactgaagtktttatgacatcgccacccatccagccttgctggtgagatggagacctatgtagtggagagatgcatattgcaaggaaaaaccttcacaaaagttcactcgtttttgaaataatgtttactgaatgccaggcactgtactaggccttggagttaccctacctactttccagaacttctcattctaagaaaagaaaaaaactgatgattacaatgtgataagtgctataataaataggtaccaagtgtaataagaacgatccaactgtctggggcagtaatgtttacattctaaaggattaataggactcatgaggttcaaattagagagaaatagacatttgaagacataggtatgaaaaggaacattgtgttggaataacacaccaaattccagaaattgctgtctgaatgtttgctatgggtaaaagaggggaaactgataagggatgttgctaggtaggtaagtttggaccagttgtgaaggcctggtggcatgcaaaggaaattttaactttggccatgggaaagcactggagattaaaaa

SEQ ID NO: 846205 - DNA, 618 bp, Homo sapiens
atgtcaataattcttttctatgttttcatctagaagtttacaacttcatttcctacatttaagtctttgatcaattttgagtttattttttgcatatgttttgaaataagggtcccattgtgttcttctgtgtagattccacatctttgctattgtgaatagtgctatgatgaacacagtgtgcatgcgtctttttggtggaattgtttattttcttttgggcatatacccaaagatatatggtatatatatttgggattgctaggtcaaatgatcattctcttttaagttcttttggaaatctccaaactgcttcccacagtggctgaactaatttcattcccaccagcagtatacgtgttcccttttctatgcaacctctggcatctcttgttttttgtctttttaataacagccattctgactggtatgagatggtatctcattgtggttttgatttgcgtttctctaataagtgatgatgaacattgtttcagatgcttgtgggccrcatgtatgctttcttttaagaagtctctgttcatgtcctttgccagtttttaatggggttatttgctttttgcttcctgatttaagttccttatagattccagatat

SEQ ID NO: 846206 - DNA, 685 bp, Homo sapiens
ttttcacaatagcaaaggtttggaatcaacctcgatgcccatcaatggtggactggataaaggtggcacatatataccatggaatactacgcagccacaaaraaagaatgagatcctgtcctcgtcagcaacaccgatgcagctggaggccattatcctaagcaaattaacacaggagcagaaaaccaaataccacatgttcttacttataagtgggtgctaagcaatgaatacacatggagacaaagaggggaacaatagacaccaagacataatcgatggtgcagggtgggaggagaaggaggattgaaaaactacgtattgggtctatgctcactacctgagtgacaaaatcatgtgtacaccaaaccccagtgacacacagtttacccatgtaacaagcctgcacatgtacccccaaacctaaaataaaagttagaaaaaaaaaaggagaactatgcaggaaaaacatagaaaagactacttggcaatgtgatcctaccatccaggcaaaaatggaattgtgctgtgtacattatttcatcacttgttctgtcacttgcccctatgtactttgccatggtcaagagcatttcccattccagtctcctctattggagcatgtttagcatcttcacccacttcctgtgaggaagatatttttctatcagtgataaacaagatg

SEQ ID NO: 846207 - DNA, 686 bp, Homo sapiens
catcagatggaactcagcactcaccagctgcaggaccttggttgcatttcctaactacatctggaaaagaaagatgatcataactagaacttaacctttgaaggttttatgagcatgaaaagatgwctggaaagaacttagcccaccaggacagggctccgtgaatgtcatctgtgactgtgggtacccttccttcaaatgagtgaacaataccctcctcattgacttggaaaacaagtgcccctagcatgctccttcaactacttgatattaatttccacatataactcactctttccacttaatcgccttttccaaaatgtacctccacccctgtgttactggatgccattgtttgtgcctcaggctccttgttgttgtcattatcccaccttctctgggactttccttggcctttaggaaaactttatactttgaaacaagtgggctgaaattctgtcttctcttggatgacctggcaccatcgctactatgtgtcacttgtgtcccccacttcttcctgtgtcatctcctgtggttcagttcttagtgtttcagtctttgcttttgacccattcactccaagggcttccagaggatgttgaatgggacaaaatattgctatgtgacccacatttgagaagatccaatgacagttggatccaggcacctccctatgacttacc

SEQ ID NO: 846208 - DNA, 449 bp, Homo sapiens
ctcataacaaacagtttaagagtttagcagttccatgaaggtctccagtggaaaagtttacatcatcaaaaactgctcasgttggcatattttctactccttaattctcatttacaactgaaaattcattgaattttcttaacaagtaatcagaagaccttagggaagaaaggagctgtctcataggggaaaagataatccaattatcctgttcactacgtgtttacatatctttcacacctgaaaggaagagatttggtgctcatgaaataaatgtcacaaaacaactcaactttaactttctattttatatattttaacttccgatttttgtatgtattttatgcatccctcctaatgtagggaaacgcaattttgtatatgtgctttgccatcttgtggtattaattaaaattttaacctgacaaatgtatacctgagacataaga

SEQ ID NO: 846209 - DNA, 557 bp, Homo sapiens
actgcctaataagcaacacagcttccaccyaggttctaaaagcaatagctgtgactcaggatgacagcaaaggagaaggacaataaggtaagtgtagatacgtatctggaaatttttctgtgatataaagggagaaatgccttagggaagagattcctttttctctatggaatcaaaaattttatgataacgtggatacattttataagaccataagatggtcacaattgggtagtttcaaattgctagcacatggctgttttactcagcactccttgacacataggagactcaatacatatttgggactagataatattatatgatttatgctgccgtattatgcatattgcataatcctgactagtgattctgacttgacaacatttacaagcttgaaaatagaagagggtgcaacctctgcaagtagtttgaaaatagaagagggtgcaacttctaagagtagtgcataatgtgaatatggtacctgaattattgtcctatccttgatttctgtagcaaaatcaaacaggaattactatggttcatgaataaac

SEQ ID NO: 846210 - DNA, 573 bp, Homo sapiens
caaagagtggaattttatttttcaagtagttatcctaccaggttatagatatatctttttaaaaaaatkttaattttaaaaaattacaaaatttgctttcagaagcagagattcctggaggatggatgaaaagtctcataattagctttagagtattgcctgtgccagctttctttctctgtccccaaaccaaatatctttataagaccatgacctttttccaatattggaatatttttctattttaaatcatcaaatatatacatttctactaacggatttctcccataagaagctatggcttcaataatacatttatttagtacttctagttacaactttcatgcatatgtattacatttggttcttgcaagcattctgtaggtcagtaaactaactttctgtaagaaaatgcattcaaagatggcctatccctgaaactattaactccttgaaggccacagacttcattcagaacctgaaaaaaaatgcatactctttttccaagaaaaacacaagaatatataaaaatgcatacagatttgaagtttcagagggttcatggacaacctt

SEQ ID NO: 846211 - DNA, 501 bp, Homo sapiens
aaattaagaagctgagatctacctaatcactcacacccagcagatttaactgaccttaaagttcatatcattaattaacagtactaaaagttacataaaaccatgagagaaaacaacttgggggaattagacaaagggacagtattcttaagaatatattatttgttcttcactgatgttttcctagtactgatagggaacaaaataaagggtaggatatattaatagagtgggactttaagtattaatcgtctctcagattcaagttacaaaataaatacactctaattgctttgttgacaaattcaacacagaaggtatagacgaatgcttctcaattctggaagcacattagaatcacacaaggagtattaaaaaaattacccttgtctacgatcctatcccctgagagatactgatttacctggtccattatagagtkttgacatcattatgtttttaaagctcctcaggagattctagtgtacagagttgagaacc

SEQ ID NO: 846212 - DNA, 511 bp, Homo sapiens
gaccaagatgagaatcaaaccaagaacccaatcccttttacaacaggtacaaaaaaataaaatacctatgaatatacttaaccaactaggtgaaaaatctccaaggrgaactacaaaattctgctgaaagaaatcacagatgacacgaacaaatggaaagaatcaatattgtggaaatgaccacacttccaaaagcaattgacagattgaatgcaatccctattacaataacaacatgattctttacagaattagaaaagataatcttgaaattcatatggaaccaaaaaagagcagaaatagccaaggcaatcctaagcaaaaagaacaaatctggaggcatcgtatgactcaacttcaaattatattgtaaggctatagtaaccaaacagcatggcactagtgaaagcagatacacagatcaatggaacacaatagagaatccagaaataaactcaaatacttacaaccaactgatcatcaacaaatcatataaaaacacaaattgggg

SEQ ID NO: 846213 - DNA, 638 bp, Homo sapiens
agtaaatgaaaacacaaacagacccataaacaaattacatgtgcatgtatttatttttttttctatgtaacaaaaattctggaaagtagctgttcttagtttgagkttagtggctcatgtgtatattaaagccttgatatgtgatattatcttaacattttcctcatgtctccatgaaggaaccagtagttctagctatcaaatccattttctatgcaaaagagagaagaaaatgagaaagaagaaaggtaattttctgaaaagcctcagcaaactttagtttattgctcattggttgcagcaaagtcacagagaaatctttactgcaaagaagtaggggaatttttttttttaattttacatattttcacctaggaaaatatcagggtctattagttaaaagtgaggaaagaacaaatattgtataaacaattggtactaattgacacaatttcctgggtcaaaatatggaaagcattatatgcctttctaggagaggatccatttttattgaatgttgcatccttatcaatgaagcataatagatagtcaattagtaatattaatgtgagccctatagaaagggttctagcaacatataaaagtatagtttgcaagaggtacatatgaataacaat

SEQ ID NO: 846214 - DNA, 505 bp, Homo sapiens
tggtgtccctggctcctggaatcacacagaggatttgaataacttgtgcaaattctaaagacaaagaaaaaagtggtagcactgagtttctcactagtgatttccagaatgtgaaggaaaccaggcatcctttgccactagattaactttgagcaacatcttagaatgctgggagatgtgtgcactccaggagaactgccaatgtcacagacaaaaggtttcagcataattataaagtctccatgggggaaagaagcacagtatctcactggagaaatggaaatgatctttaggacactgttaatgtgcataaaattctggatagcaaccaactgtgaacacataaccattaaatcgcaaaggaaaataagaraaaaaaattgcatgtgtctgctttgaacattttccacaagcaacttcatgtatgagacaattatggcaagtttaaattttgtggttttgttcaattcaaaaggaaagctattatattaattacatcaactta

SEQ ID NO: 846215 - DNA, 480 bp, Homo sapiens
cctgggcagcctcattaccaagacaattcacatgaagatggaagggatccaaccatgcagggagttccaaatcccagaagctctcaaggtgatttcttcccagagaggagcaggcctcagagcaaactgggactccctaagaggcccaatgggagccgacttcgactcaagccgttactcctggctagacggtacacttcctaaaggcaacaactcagtcctctcactcacacccttgtccccaacaccagaaccctgcctggcacagaagtcctcaataacattttactaaatggactcaagctgtcccaaaagctggagtccctgtcatgtcactctggaagttaatgagacctattgtgcaggctttcccataatttgtgtccagaagcagyaaagagagacctacatgtctgtcccacaaagtcaagttaatggcctttgcaacagttattgtcacaatcttcccttcttttctgc

SEQ ID NO: 846216 - DNA, 579 bp, Homo sapiens
ggagccatgcttaggaacagataatcccaataattattttatttacaagtgagaaagcttacagagatgggcatgcaatactatggagcccagagactgagcatctgaatcagactgtggggagagagggtactcttggagggtttccttggggataactgagccaagtgtggaggcacagtggatcactctagcaagatggcttctgaaatacaccaaacccctgagctcctgataaacgagttgatctctctaaattcaccataattaatccaaaataagatcatcttccacaggtgccatatttctgtataaatcaccgtggattccaaactgcaatgggctgcttctcacatcttctttcatctccttctctagctaggtgaaccagatgaataattaattctcttgctaccatatttgttcttatggacactctttccactccatcttcttgatatcaccagagctcagaccctttgcccctcatggagagagtggcaactgttccctaggcctcctcactttctccacccacctgtctcctactagaatgtcygataaagccacccccactcc

SEQ ID NO: 846217 - DNA, 674 bp, Homo sapiens
cagcttcctctcccccagctcctttgctcggtggatcattaagcacatgaagcaggcaagcagcctccccargcatctcagaaaggaagcagtgaagtgtgggcctcgggggcttagtggctttgagggggacaccaaaccagtcttacagggtcacccaggacatgtcacgtgtccaggacagctgtcggctaacagctgtaggacttcagaggcacttgtgctgccctccaatgtggggaatgaggaaaagcttcatggaacgaggacattgtctggggcactcttggggggcctcattctggcttcccctatgacagtgtttctcagccccggcactgtaaacattttggggcagatacgtgcctgttggggtgctgtcccgtgcactgtggatccccagtagcagccctggcatctacctactacatgccagtagcactccctccccagcggtgacaaccaaaaatctttccagacattgccaagtgtccgcaatgaagccaaatcaccccccagttccctgttgagaactactgggctatgaatacaaagcatgacccatctgaaaggcaatagcaggcccaccaacgagggtaggattctcatgaccctctttgacaatataaagaaggctctttgcaaactgtagaagactttcttcaggggcatct

SEQ ID NO: 846218 - DNA, 620 bp, Homo sapiens
  misc_feature 467: n = A,T,C or G
agcatgacccatctgaaaggcaatagcaggcccaccaacgagggtaggattctcatgaccctctttgacaatataaagaaggctctttgcaaactgtagaagactttcttcaggggcatctaacctgaggataaaatcagtgatcactaaaagaagaggctttttgatagaggagggcagatggcgaaaccaaggatgccaggccaggtgaggctcaagaggccatggggagaggactctgcatggctcagctcctgtgttgttagtacagagctggggggaggagaggtgcctagaaccctcaatctgagtgccagacaggacctgaagggtcactagccccatctacgtatttcttgattttgccattagtttcacggtgtgaccttgggtacctgattcttcttcctgctattattattgttattcacccatgttatgatattgtttagtgctggggttccggngggtttgcatctcaaatattacattgccttaggtggtctggttatgctgagttagaaaaagtctcagcccatcagggtgattataggcaggwgcggaattgtggatacagcatattcactcactggatgtcaatttccactttcaggatggcc

SEQ ID NO: 846219 - DNA, 542 bp, Homo sapiens
gtctctgtctgtcactctgactcaggctggagtccagtgacatgatcataactcacggcctcccaaagckgccgcattacaggtgtgagctaccgcgcccgacctctcaccctcacttcttggaacggagcctttagtagagggccgcaaggaattgcaggggtgtggctaggggactctcacttggacccggcagatgtgcgggacactgtttcagggtttgggtttggcgtggggttgaggaagggaccaccccatgtctctgctggcggggagcaaaaaaaaaaagggggggttctctggccgtgtgcggtggctcacgcctgtaatcccaggaggcagaggttgcagtgagccgagatcgcgccacactgcattccagcctggcggcagagtgacactccgtctcaaaaaaaaaaggggggggggtctacttatgagcccctctcatccctattcctacccgagcccggcccccagctcaatccccggtacactgcgggcaaagatcagaacactgcggaaaaaaatcagaactttct

SEQ ID NO: 846220 - DNA, 631 bp, Homo sapiens
tgggggtagggaaaagaagacattaggagtatgggccctcactggaaactccctagggatgatgggggtcagatgctaacaatgtctagttgtcacagtcatggctcagcatggycacagggcagagagacgggcctctccagggcagtgaatctgggctggatcatggcctccaagggcgtgtaggaggtagggagctggggaggttgagaaatgtaaggaggtggggagtggacaaaagtatgttctctaagttctagacacaaaggagagaagcctctacataggaatgaagagaggagcttgggagggactaaatcagggctgactttcccaaggcatctctccttggggcagggactaaaagtgtaaaaacattcaaacaaggtgagtccctagatatgggctccatggtagacagtgaagcaaggggaactgaactgctaatgctggatggggcaattcccatggtcctctgctgcctccctctggagagggcataacggtgagctctgctctgctgccagcccctctgcaggtcctcctggcttctcttcactgcacctcacctccatctaggtcctcgatttctccccaggtcctcatacactgtattagtcagggttttcca

SEQ ID NO: 846221 - DNA, 596 bp, Homo sapiens
gtccaggtaattcacgtgcacattaagtttgaaaaggcctggtctagatcagcagttctctaacttagcagcacattagaaccatctgtagagactttaaaaataccagtgcctgggmttcacctcccagagaatctgatttaagtgtctggggtttgccctgagtctaggtattttttagaactcctcagcttatacaaagctggcagggccgggcacagtggctcatgcctataatcccagcacttcgtgaggccaaagtgggcagattgcttgagtccaggagtttgagactagcccgggctaaaaccccatccctacaaaaaaaaaatacaaaaagtagttgggcatggtggtggcacatacctgtagtcccggctactcaggaggctgagtcctcgcttgaacccaggaggtcacggtctggtcaacagagcaagaccctgtatcaaaacaaacaaacaaacaaacaaaaaatgctagcagcttaccagctagggaggcctgtacagccaagttttccaaatggggctacattagttgttccagaactttagctgcatcaaaaccacctggatggcttgttcagctataga

SEQ ID NO: 846222 - DNA, 320 bp, Homo sapiens
gccctatgcgaaccttcaggccggcgggtccggggccacaggctgggagtggagctggcggccactggggagtagagaggacgcccaggaacaggtgcaccagggtcccggcggctgggccgagggtcgcaagcagaggggaccggcggctgccagcaagtcccaagcagatgcctccggcggggcagccgcaytctacagcgcccattccgcgtacatcgagtatccaacacgaataaaatcggtttatacgttggaatgtagcttatgattccaaaatctcatctccaggctgcctagatcacacggccccgtttcat

SEQ ID NO: 846223 - DNA, 550 bp, Homo sapiens
ctttaattaagccataaattcctgcggcagctagggatgtgaagaggcaagtgagaagaggaaatgtgcataagactctcagcagcttggaagtaaacagggaggactgaagtgaccctgttgctccgaaggtggctgttcattagcctccttctgtccttagacccagctggagcattgcatgcactggctcccaggttgcaggggatgtcagcagctccagctcatccgattgaaggaggccatgtggctttccctggactttctgcttgaacagtgaatccctgtagggcctggatccattgccctcttctcctcccaccccacccaagcactcttcttcatgagtttgctttctcctatctttttttcctccacttttccttcacaaattgttgattaagcacctgctatgggccagacatttttctagaggaacacctcaatgagcagacaggttcttgttctcatagatcttccattttagagagaaagctgaaygataaacaaataatacagcaggtggtgaggggtgctataaagaaggatg

SEQ ID NO: 846224 - DNA, 552 bp, Homo sapiens
tgcccaaccttctccttcttacaaagaaaacaagaaaactgagagatagtaaaaattaatattacattagaatacattwtagtttctttttatttttgtggaacatgtaaaacatgtggaacttgaaatggaaaagatgtactgttgacagataaatgcagagatcagcttttaaataatagacattttaacctatgcatgaggtttggttggagttttgccatgtcgtttaaattagccccatagcctagagggggtttttacaggaagccattgtaattttcatcccttagacactggcattttcatgagctgaagttaagtgtctcaagggataatggaatatcactgaaacatttcctgagctcgcttgagctgtaccttggtgtgtccacgtgtgctcttagaagaacagaggttttgtttcattttgtgaggacatgaggttgtccccaagtgcagtttttctttttaatggatttttttttcaaaattatattcagaaagaagagtttaatttattcagtaaaaatgttccatacttagtttgaa

SEQ ID NO: 846225 - DNA, 633 bp, Homo sapiens
attcaagacaaacagttccattgagacatctacctacttttgagcagggttgaaagaacaacagaattgaatcactctaagcgaagaagcagagtgtgtgaggtctaggcagaagcaagayaagaggagttccggaggagaaaagtgtgtgactcattgggcaggcatcacatctcttattcctgacaccctctcaccctagggttgggtgagtcattcccaatgaggagatatacaagcaactcccagaagaagcctccatggaatgactcctcaggtcccagatgtcctccagagcaacagaacctatgagtggctaaggtcaacagaaagcaacaatggaccccaataatctgcaagtgatgttgagggttccttaagaagggcagatagaaaaaggcagaaacaagactatcttcaaccaagttgcatagaaaagtctataacttctgatattcttcagacatttgagctgagtacctggaggtgaaagtcaaatagagggaatcatttgaaagcatgagctccagaaccgcacagactgggctcaaattccagcccatcccttacctcctctgtgctctgggcaagttccttgatcttcatgtagaaggaatcttaattccttcatct

SEQ ID NO: 846226 - DNA, 608 bp, Homo sapiens
tgaatgtaaactataggctttggttgattatgctgtgtcaatgtaggttcatcaagtgcaacaaatgtaccacttttggtgcatatgtcaacagtggagaggttgtgcatgtgtgggracggggtatttgggaactctctgtactttccacacaatttttatgtaaaactaaaactgctctaaaaaaattaagtttaccaattaaaaaaagcacaatatgttctctcactcataagtgggtgttgaacaatgagaacacatggacacagggaggggaacatcacacacgggggcctggcggggcgtggggggcaagggaagggagagcattaggagaaatacctaatgtagatgatgggttgatgggtgcagcaaaccaccatggcacgtgtatacctatgtaacaaacctgcacgttctgcaatgtatcccagaacttaaagtataaaataaaataaaataaaaaacttaaaaaagcattaaaaaaacacacaataagataccaattcatactcactagggtagctataattaacacttaaaaaaacaaaacaagaaatagaaaccaaagagttagcaaagatgtgatgaaattggttgaacccccc

SEQ ID NO: 846227 - DNA, 608 bp, Homo sapiens
tgaatgtaaactataggctttggttgattatgctgtgtcaatgtaggttcatcaagtgcaacaaatgtaccacttttggtgcatatgtcaacagtggagaggttgtgcatgtgtggggacggggtatttgggaactctctgtactttccacacaatttttatgtaaaactaaaactgctctaaaaaaattaagtttaccaattaaaaaaagcacaatatgttctctcactcataagtgggtgttgaacaatgagaacacatggacacagggaggggaacatcacacacgggggcctggcggggcgtggggggcaagggaagggagagcattaggagaaatacctaatgtagatgatgggttgatgggtgcagcaaaccaccatggcacgtgtatacctatgtaacaaacctgcacgttctgcaatgtatcccagaacttaaagtataaaataaaataaaataaaaaacttaaaaaagcrttaaaaaaacacacaataagataccaattcatactcactagggtagctataattaacacttaaaaaaacaaaacaagaaatagaaaccaaagagttagcaaagatgtgatgaaattggttgaacccccc

SEQ ID NO: 846228 - DNA, 448 bp, Homo sapiens
cgtctataatccagctactcgggagactgaggtgggagaatcgcttgaaactgggagatggaggttgcagtaagcccagattgcgccactgcactccagcctgggtgacagagcgagtctctgtctcaaaacaaaaaagaaaaaaaaaagaattgagaaggaaaaagagatatgtgctagttttgttgtcaaacctcaagctgcaaaagttctggccacaatgtgtggtaagtgatcagttaagatggaaaaggcattacatgtgtgggtggaagacgtgaacagaaacgtgttccaactgacagcagtcgagttcagtactatccactggggatcttggaacataytccacgtggatgagggggtactgttatcattagggcatagtcaggcagccgtgcatggtggctcacacctgtgatctcaacactttgggaggccaaggcag

SEQ ID NO: 846229 - DNA, 557 bp, Homo sapiens
actttgggaggccgaggagggcagatcacttgagctcaggagtttaagactggcctgggcaacatggcaaaaccccgtctctaccaaaaatagaaaaaattagccgggcgtggtagtgggcgtctataatccagctactcgggagactgaggtgggagaatcgcttgaaactgggagatggaggttgcagtaagcccagattgcgccactgcactccagcctgggtgacagagcgagtctctgtctcaaaacaaaaaagaaaaaaaaaagaattgagaaggaaaaagagatatgtgctagttttgttgtcaaacctcaagctgcaaaagttctggccacaatgtgtggtaagtgatcagttaagatggaaaaggcattacatgtgtgggtggaagacgtgaacagaaacgtgttccaactgacagcagtcgagttcagtactatccactggggatcttggaacatactccacgtggatgagggggtactrttatcattagggcatagtcaggcagccgtgcatggtggctcacacctgtgatctcaacactttggga

SEQ ID NO: 846230 - DNA, 557 bp, Homo sapiens
actttgggaggccgaggagggcagatcacttgagctcaggagtttaagactggcctgggcaacatggcaaaaccccgtctctaccaaaaatagaaaaaattagccgggcgtggtagtgggcgtctataatccagctactcgggagactgaggtgggagaatcgcttgaaactgggagatggaggttgcagtaagcccagattgcgccactgcactccagcctgggtgacagagcgagtctctgtctcaaaacaaaaaagaaaaaaaaaagaattgagaaggaaaaagagatatgtgctagttttgttgtcaaacctcaagctgcaaaagttctggccacaatgtgtggtaagtgatcagttaagatggaaaaggcattacatgtgtgggtggaagacgtgaacagaaacgtgttccaactgacagcagtcgagttcagtactatccactggggatcttggaacatactccacgtggatgagggggtactgttatcrttagggcatagtcaggcagccgtgcatggtggctcacacctgtgatctcaacactttggga

SEQ ID NO: 846231 - DNA, 623 bp, Homo sapiens
gctcgctgcatgccagacatcagctttcaacagaagctgctacagccagactgttttggtctcatttaagctaaaaatggaaaggtaacagtacagggcayagggaatggggactgtgaagaccagtctgagctgagcagggaggggccccactccttgctcaggacctgcctgccagatctccaaagggaaaggaaagcatcataaggggcatataacaaaaaaagactgagaaggaaagccttccagctgtgggcccccccaatttctggagtgttcttgttcagtccattagaccagcagttcttttttttttttttggagacagagtctcactgtgttgcccaggctggagtgcagtggcacaatctcggttcactgcaacctgagcctctcgggttcaagagattctcctgcctcaacctcccgagtagctgggatcacaggcacccaccaccatgacccggttcatttttgtatctttagtagagatggggtttcattgtatctttagtagagatggggtttcactatgttggccaggctggtctcgaacgcctgacctcaagtgatccacccaactcagcctcccaaagtgctggaatgacaggcatgagccaccg

SEQ ID NO: 846232 - DNA, 578 bp, Homo sapiens
gtgccgggcgatgggggtggagttggaaggggctgtagtggtggctgaagttgagcaagtccgggagcccagctccragggccaggacctcatggccagatcggtggaggcatctgtgcggtcaaggctgcctctgtgtggggagcctcgctttggttttagatccccagggcctgaggcagaagaggacattgagaaatgaggctgccaagtcctgtacccaggctgggaaaccacaccatggcctagaagcagggcagcagggcatgaggaccacagagacaaaagcggggctgccacagctctcgggctgcaacttaaatggggcctggcggggcaggtgggggcaagagggcttggcttcaggtggtgtcagaggccccatgaggatggctctggctttaatgctggggtcatactgccagccctgagaggctgggaggagacaaagggagcccctgaggggataaactgttggtaaaagtcacacatattcactctaggacacatctcctgtgtaacactgtccggaactccaatccctgacttccaaggatccaagcctgtagctgaggatc

SEQ ID NO: 846233 - DNA, 665 bp, Homo sapiens
cccctccgtgatgtgtgcggacattgtgcggcccccagagagagcagcagacagaacagagcacagcaaactgccccctcctcaacacatcccagtgctgttttttttttttacagcatctgggtgtctcatgaaaagcggtcaatttgatcaaacttgccaccttgtggaaaatcaatcagtgtgcttcagatgaatgtgacgccatcacacgcaccctcctctgacatccagaatgctggcgggggacatggggctgggtgcctgctcggccaggacgaagctctccatgtgtcacctcccaccttacggcacccagtttgtgggaggtttgctttgcctgctgacctgatgctaacgctcagcttaaacgctccattccagattttacaaggggactgggtgataacgtgtcaagtacatgctgcccatacttcccatcaagcctcagtacagtcccagcttaaagatcctctctggcaccacactgatcccttgggcctgggggtggatgccaggaagcctcttggccacaaatctgccctcttgtgggtyagaggccagccctctcttgcctgacgtgacttgtctgaagggcctgcacttaaaccatcttcaggcaaccagggcatctgagcataacctgagcagtaacaacataaatc

SEQ ID NO: 846234 - DNA, 612 bp, Homo sapiens
tttgatggggaaggtgacttgaggctccttcccgggccactgtagcctctggctggggcaagatccccratcgcttctcccaagctgagccaatggaaggcgatagccccctgggtcttcacaggagccatgctttgtgggctgtgcccctgctttgggcacatccagtgtaccagatgcaaaatcctgcccaggtggtctggccacaccagaagtgtctttctgctggccggtagcattaaaacttcctgcatgctctgtctcagcctccgagtccgaatcatcatacgctaccaatgaagccattaaagacagagttcttgctgtcattcaaagccaaaccacctaagatcaaacaaggtcaaccgtcagaaaatgtgcatggaagaatatgtatgtagttataagaaaccatgtcacctaggaaatccaataactcaacactcataagaataaacacaggccaggcgtggtggctcacgcctgtaatcccagcacttcaggaggccgaggtgggtggataacctgagatcaggagttcgagaccagcctggccaacatggtgaaaccccgtctctactaaaaatacaaaaagtagcgaggcagggtggc

SEQ ID NO: 846235 - DNA, 547 bp, Homo sapiens
aggaatgtggtccttgtcttcatgagttttgcaaaccaggcagatagattaaaaaataattaggtgactatacaaatgttggtgcctcacttagctcagaaaatgagaatattttatttttttgcwactcaacaagattagagtttgtcctaatgtatatctgaacatttggaggcagtgggtttacaatgtaaaactttgaagctcttttattttgtttactctttgagacagggtctccttctttcacccagactggggtacagtggcatggttacagctcgctgcagcctccatcttatggaatcaagtgatcctcctacctcagccacctgagtagctgggactacaggtgcgtgccaccacaccaggctaatttttaaaatttttttgtagagacaagatttcactattttgcccaggctggtcttgaactcctgagctcaagtgatcctcctaccttggcttctcaaaatgctaggattccaggtgtgagccaccacagctagcctgaaactcttttgtttaaacctgaaaacacgaagaa

SEQ ID NO: 846236 - DNA, 552 bp, Homo sapiens
ctgaccaggctggtcttgaactcctggcttcaagtgatcctcccaaaatgctgggattataggtatgaggcacaatgcccagcctacttgtctactttctacggttattggaaaaatcaaatgagattgatatgaaatgtttcataatctatagaatgccatgcaaatataaatcattattgctcatgtttgctgatttacatattagctaagcctgtgactctgtaacactatattagacttccataactgggttagcactttgctgatccatgaacatttgtcatggtgcatttgctttttagccagatgttggttcaactctaggtttgtcatgaaaaacaataaagacgctaaatgcaagagcatctatttatcgctcctgatgcaagggatagagtcaactttttatctaaasggccagatagtaaatattttagcctttgcctaaaatacagtctctaacttctatttagctctgcccttctagggaaagcagccatagataatatgtaaatgaatggacacagctctcccaggttggagtgcagt

SEQ ID NO: 846237 - DNA, 515 bp, Homo sapiens
aaaaatattggcaaggtctgccaagagtgagtcttccaatacatctgggaacctccgtaaaaaattaactcaacattctggactcttgggatggccagattattaactggtttagcagaagcactttctgtgcaagccaaggcatataagaaatatttaaacctgtagaccattaaatactgtacagttagcctactgcatgagaaaaacagcaaatgtgttaatggagatgtctagttccattcataacaaagaaaagaaaccatgcgtttgttaacaattacacgtagcagtctagattctatggctaaagtgttaatggaagattgaatatcagacttttttgctaaaacaaagttaaacattacaaattatagcataaagcaaattataatcccattggccttgaatttgacttagttcctgtataggaaagagtaggaacatttttccyagaacctcgcataaaatccaaatcccgatttctattttttcctctcatgtcaggtaccttt

SEQ ID NO: 846238 - DNA, 515 bp, Homo sapiens
aaaaatattggcaaggtctgccaagagtgagtcttccaatacatctgggaacctccgtaaaaaattaactcaacattctggactcttgggatggccagattattaactggtttagcagaagcactttctgtgcaagccaaggcatataagaaatatttaaacctgtagaccattaaatactgtacagttagcctactgcatgagaaaaacagcaaatgtgttaatggagatgtctagttccattcataacaaagaaaagaaaccatgcgtttgttaacaattacacgtagcagtctagattctatggctaaagtgttaatggaagattgaatatcagacttttttgctaaaacaaagttaaacattacaaattatagcataaagcaaattataatcccattggccttgaatttgacttagttcctgtataggaaagagtaggaacatttttcccagaacctcgcataaaatccaaatcccratttctattttttcctctcatgtcaggtaccttt

SEQ ID NO: 846239 - DNA, 627 bp, Homo sapiens
ctatagctgctctcataggctgctgttgagtatttatggtttttccaagctcatggtgcaagctttcagtgtggatctatcattcygggatctggaggacagtggccctctttttacaactccattaggcagtaccccagtgggtacctggggggaggcagggctccaaccccacatttcccctccacagtgtcctagtcagatattcatgaggtctctgctcctgcaacaggcttctgcctggacacccagacatttccatacatcctctgaaatctaggaggaggatttcaagcctcaactcttgtagtttgttcacctgcaggcttaacagtacatggaagccaccaaggattaaggctacagcctgtgaagcagcagtacaaactgtacctgggaccctttgaaccatggctggggctggagcagctgggacacagggagcagtgtctgagaactgtgcagggtgacagggccctaggtctggcccagaaaaccattcagtactcccaggcctctgggcctatgatgggaggggctgttggtcttcagaggcagctgacagtgtagcctgccccagcctaagctctgtgtcaaatcttgagtctatgtgtatttcaaagtcta

SEQ ID NO: 846240 - DNA, 529 bp, Homo sapiens
catgatccagttacctccacctggtctctcccttgacacatgagaatyatggggattataacttgggatttgggtggggacacacagcctaaccatatcacatgtcttcggtattgcgaatagtgctgcagttaacatgtgtatgcgtgtgtctttatgatagaatgacttacattcctctgggcatataaccagtagtaggattgctaggtggaatggcagttcagcttctagctctttgaagaatcaccatactgctttcaacaacgtttgaactaatttacactcccaccaacattatataagtgttcccttttctctgcaacctcaaaagcatctgttattttttgactttttaaattaatagccattttgactggtgtgagatggtatctcattgtggttttgatttgcatttctctaatcagtaatattaagtcttttatgctcgtttgccacgtgtgtatttagaaaagtgttcctgtcctttgcccaccttttaatgaggtttcttttcttgtaaatttaa

SEQ ID NO: 846241 - DNA, 656 bp, Homo sapiens
gaaataatgccaacctcatggcacacgatcaatcacactagcaaatctgtctgccaagaaactggaattccaagttactttccyagtagtgaaactgtctggtggaggcaacataactgaaaacacacctcaaacacctgcagccctaggctgccatggatgcaggaaccctgtaaccatgggcttccctgctctgtgtcataactcctatttctcctgctcaaataacatgtcttcagagaggcctggcctagctccatctaaaatccccatacacctctagttaatgtttatacctttattttctttgttttcatcacaacacttttcacggtgtgaaataatctgacttccttgctcactttcttgtctgtcttcactccagaaattgaggtccatgccagcagggccttggtcttatttctggttctgtcccagaaccataaacagtgtctgatggagttgaacagatacataaatgaatgaatctctgcccgtctgatgtgtttccatccttcacacccagcccagatccttcctcccatgaaggcttataaataatccagtccacagtaacttgccctcattcaaagtcgtatcacaatgcctcatctaaactcagttgaatccctagagcagttgcctatgccatgttc

SEQ ID NO: 846242 - DNA, 543 bp, Homo sapiens
cagtcctacagtctcctgtcctcagacccctaccatttctgtttctaaaaggtaagtctgagcctatttaaaacattcaagggctccctattccccacagaggaaaaaaaaaagtcawttcctccacatggtgcctagattcttcataatttggcagcttctacctgcccagccttatgttcctgcaccatatggacactacagccacatcaaattattaccatccctgaatgcgcctgcatgcaccctctgcttagaacaccctttttcctccactcctgcatgttctcaggctcctattctccaggaaaccttctgagacagccccaacactggctcctgtaatggaatgcctccctgtcaaggcgcctggcactctctgggatccccaacaggatcgcctctttgttagattctgagcctctccacagtggggtctgggcactcccccatgatgctgggggatatcacagaggctgtgtatcataaatactcaaaggtgcttggagacagatgctggggttattcatcactgtgtatcct

SEQ ID NO: 846243 - DNA, 606 bp, Homo sapiens
tgtaaacttagaaattcaaaagagaaggtcagcaatgagggcagaggtatttagtgaaagatgtttgcttatcgtatgtcacattttgaaaggtatttatcaaaatctggattctctagattcttagtaactttactggttcgatttggtttctgagccactatgatacgcttctgtcattgctttacaataacactaagaacagaaatagactaggaaactgcacaacttataccactattcccaccatctagcgttgtacatggtatgtaatagatgctccataaatactgattaaataaatgaaaggagattttaagtgatttttagtaggtgagtggagtttggctacctgcaataagagtgcctagggagcagcaagatccaaggtagattagaggaagaataattttgatgctatgggcagagtgaatgttgggaagagcagttaatgagctttatcaaaggctggccttctccaacrttctttagttcaagtgctttacgttcagattcttaaattctccttctaattaaaaagtcctcattactcctatcttactaattctgaacactgaccccactaccatcatcagcctaatgtgc

SEQ ID NO: 846244 - DNA, 550 bp, Homo sapiens
tcctatcaaaagaatggaaaccctcaacttgctgctttgcagattcaggttttgtgcttcattctggcctctcgggktggggccgggttagcagcaaggctgagctgcccctctttcttctgaagccttcatgggggcgaggagcacagggagagctcagtgcagggcctcccagtggccttctcagagtgggtggaaacccagcctggcactggcagcgtggcaccagaagtatgaagtgtaggtgtaaaggtgatgtaaaaggctagtaggttttttggtttttcattgtttgagttttgggcatagatgactgtgaagggcgaacactgccgatggatctgaatttgtagtatgtgcaccacttccaacttacgggatacccagctttgacggctttggacaaacacactgaggccaagatgtgctgagcttatcaggatcaggatcaccaagcagctgtaaaaaccctagcaagtgccttaagctgctgaaatttcatattaattgtctggtttgttcatggtcctagagtttgaggcagaaaagt

SEQ ID NO: 846245 - DNA, 550 bp, Homo sapiens
tcctatcaaaagaatggaaaccctcaacttgctgctttgcagattcaggttttgtgcttcattctggcctctcggggtggggccgggtkagcagcaaggctgagctgcccctctttcttctgaagccttcatgggggcgaggagcacagggagagctcagtgcagggcctcccagtggccttctcagagtgggtggaaacccagcctggcactggcagcgtggcaccagaagtatgaagtgtaggtgtaaaggtgatgtaaaaggctagtaggttttttggtttttcattgtttgagttttgggcatagatgactgtgaagggcgaacactgccgatggatctgaatttgtagtatgtgcaccacttccaacttacgggatacccagctttgacggctttggacaaacacactgaggccaagatgtgctgagcttatcaggatcaggatcaccaagcagctgtaaaaaccctagcaagtgccttaagctgctgaaatttcatattaattgtctggtttgttcatggtcctagagtttgaggcagaaaagt

SEQ ID NO: 846246 - DNA, 584 bp, Homo sapiens
tcttcatcaatggaagaacaattgtaaattcatgaatagagtactattcaacaataaaaagcaatgaactatctcaacatcattatgtggartgtaataaggcacacataaaaaagttcataccttatgattacacttacagaaaattccagaaaatgcaagcaaatttacactgacagagcacagattggtggttgcctgcaaattgggaaggcctgggtgtgggtgggaaggaaggatttcaaagtggcataagaaaacttttgggtgatatgttcattatcttgattgcagtgatggttttgcagggatatatgtacatatcatattgtacattttacatatgcacagttcattttatgccaactatatctcaacaaagctgtttaaaaatgaactgtgtgtttctctgttgccctaacaatttggactggatcgtgattctttcagtatatctcacaaattttaatttttaaaactctgcctgtctttggaggcccatctgaaatgccttctctaaaacacctcctgataattttagccagaagcgactcacctctgtatttcaaaaacctttcgaatac

SEQ ID NO: 846247 - DNA, 584 bp, Homo sapiens
tcttcatcaatggaagaacaattgtaaattcatgaatagagtactattcaacaataaaaagcaatgaactatctcaacatcattatgtggagtgtaataaggcacacataaaaaagttcataccttatgattacacttacagaaaattccagaaaatgcaagcaaatttacactgacagagcacagattggtggttgcctgcaaattgggaaggcctgggtgtgggtgggaaggaaggatttcaaagtggcataagaaaacttttgggtgatatgttcattatcttgattgcagtgatggttttgcagggatatatgtacatatcatattgtacattttacatatgcacagttcattttatgccaactatatctcaacaaagctgtttaaaaatgaactgtgtgtttctctgttgccctaacaatttggactggatcgtgattctttcagtatatctcacaaattttaatttttaaaactctgcctgtctttggaggcccatctgaaatgccttctctaaaacacctcctrataattttagccagaagcgactcacctctgtatttcaaaaacctttcgaatac

SEQ ID NO: 846248 - DNA, 594 bp, Homo sapiens
tatgaaggttcaaaaaaaaaaaaaaaaaacactaaaaatagaactaccacwtgacccagcagtcctactgttgggtatatatccaaaagaaagaaaatcagtatgtcaaagagatacgtgtacttccatgtctattgcagcactatttacaatagccaagatatgaaatcaacctaagtgtcaatcaataaataggtgaatggataaaggaaatgtggcacatatacaaaatgtaatattattcagccataaagaagaattaaatcctatcacttgcaacaacatgaatggaactggaggacattatgttaactaaaataagctaggcaaagaaaggcaaattttgcatgttctcactcctatgtgggagcaaaaaaagaaatggtctcatggaggtagagaatagaatggtggttaccaaaggctgggaaggatagtggggaggttttgcataaagatgagatggttaatgggttcaaaaaaaaaccccaattaggtagtagggataagatctactgtttggcagcatgataattcaactataggtatcaataatttattgtacatttcaaaatatctacagtagttgatttg

SEQ ID NO: 846249 - DNA, 578 bp, Homo sapiens
caaaaatatctaatatgtgagccacacgtaggcagccagatttgaactgcactgctctgagaagagggttgcaaaaaaggagcaagggactattggaaaaaacaggtcccaagccatcaagtactttgaagaactatttcagaaaataaagaaaacaagcaaattcaacccagagactggtacttgggtgtttgtgctcctagcagctcaccccactaagaaggtgaacagctgcattcccacctgcaggaaacgctgggtggtcttgaagctagccttgtatagagcgcttcacaacaattagcttggaggtaacaaaagtctgaagagattggtatttcatcaattttatgtgaatagtcccatatcagatgttacaggaaatgtagaaatgtatatatttctagtttctttctttaaatgtcagagttttgtgttactttataatttctttcccattaakaatactataatgcaatttagaaaaaaaatttaaaaactaaaaacaaatgcattgtaaaggcctttgatacatatgaatttgcttttcagaaaagttatatttttaccaactcagt

SEQ ID NO: 846250 - DNA, 515 bp, Homo sapiens
gcgtaagttacaggacatgtttttcccaagatgtaagctgaatctcaagaatgttacctaatgattaactgctttagttcttgcttctgtaagcctgattcctgcatcamgtagttcctgccaaaaactgcttaaaaggcaacttctttgtctagtgctcagtctttcaggatacatgtccactaagccagtgtacaccttaaataaactctcctgccccccccattcagtctctctggtcccttaattcactgcaacatttctggtgctgaaacccgggactggagatggcagatttctgtctcctttgcctgtgggactgaggccccgggacagaggagacctgggaaacttggtgccaatgggagagcttcagccctgaaggggataggccctcccatgtcccggtgcccttccagacagtgcaacggaaccagtaaaggggattcctggatggcatcaggagcactgcacagacatctgaaccgtggtaaggtttgggccctgaggcagga

SEQ ID NO: 846251 - DNA, 557 bp, Homo sapiens
caccccgtgaatatgtcatcaatctgttatgtgtgaatggacactattttttcctgtacttggccaaatgtttcatttcctgaaaattaaattgcttaaatgcaacaracagatggccagagagtcctgtagtagcttgctctgccatgaaatttatctgcatttctgtggaaagcctgagaagttgggcaaaactctttttgcacactactatgccatgattgatgttgcagtcttcttgccattttaaaattattaataattctgttactttggacattaggaggaaatggtttaaaggctatttcatattttatatgaaaaattaaaactgttcatgaaaagtcacatggaccaccttggttgaacttattttaaaattgtacttaaggtattaaaaaataataattacacatgaaaatggagaaataatagctggaacttttttcttatttccagtcttctaatatattctctaggctaacggcatattcttatcagtgcagtataagaagtttgactaaataaggcatgatctatgtagtctgttttgtttt

SEQ ID NO: 846252 - DNA, 624 bp, Homo sapiens
caatagacctccaaattttaaaaatagagtaaaagatctatgcaaaacagccaaatgcttaattgttaagagagcagyaatgagtacaacttaaacatatgcccctaatagatccttgctgtatgaatatgtaaacaataattcaagagggaacgtgaatccggaagtacagctaggaatgtggaaatcaagagtaaagaatttactgtgcggttaagtctaaaagagcatgaactttatgaaataataataatactactaattttcaactttggtgggcatgaaacaaagtagaactaaaatataggcaacaaaacttacagaaaatgagagaaatgattgcagataaaatgttctaagtttatattattcttgggataaggctacagatagtaatgaatttcagacttgttgagtcaagaactttgtaaaagttaaaattatccactaaaaaaaaaagcaaaatgtagagcttccaaacttcacagagaaagagagaatttatgaaatataattaatttggtataaggtaagccaaaagaaaaaataatgcaaaaatacagtacataagggaaatatctttctaacttaaaggaagcaatgtttcctcagcacagagataac

SEQ ID NO: 846253 - DNA, 638 bp, Homo sapiens
tttttaaaatgttattaatctcattttaagaaatgtgttttaacttgtcttccaaacagatacctttttccctgtgctttgttcttttaaatctcttttacttgaaatctggcaagagaatcactttaaatccctgaaccaaacaaatctcttaagtcagcaggggagcagagagggtgaagatgtgcagttaaggaaataaaaaaagataaaagcattggattacattttttttttttttttttacaaaaagggtgggggggtagaaacgtcacatcataaggaaaggaatgagtgaaattaaatccacctggaactcagtagggcaggaaccctccctaatgcagcctgctcctgtgactgcaagttgtcccatcagtttgtgtaaatgtatctgcgaattgtgtgtcagaaactaattcttttgtgcaaagttcccattagtagctgactttagttccatttgtaaagtatacggatgcttagcttcctgggcctgatccgggggactttcagtgctaatgagcttccttgttccttctggaggtgattctccaataccctyttggctcttcaataacaccgagcaagactaggttattttctaccgagagtaacaatttatggatagtaatagc

SEQ ID NO: 846254 - DNA, 521 bp, Homo sapiens
atactgaaaaaaaattttatgactatggtggtataaaagtaaatattatccaggctgattttattattatatgttcattattactatatctatttttcttctgattttttatttttatttctttaactcattctctattattggacatttattgtatctaattttttacttttataaaccatgctgttttcttttgattttaaaataatttaaaaataaaacatttttgtgggtccttaaaatatcacgggccctaggcactgtgcctaccgagtctactgggtaagtcagccctgcttgggacagggagattagattgggggagaaggactcctcttcatgtcttagtgggacagttttaagttaatcaattatttcttatttcacttatacwacccacgttctcattttctgttccccaccccctgcccagcacattaatactatgaatcggatgtgaatgtcattggggtggaaatggagacagatcagagagatggaatcgcaccctttcccagaag

SEQ ID NO: 846255 - DNA, 548 bp, Homo sapiens
cccaatttatattgtgaaatgtagcatccagaaaacttgtaataaatattaataaatatattgacaacttatccagtttaaaattcttgaaattttaagttcagtattaattracttactttataataaagaaattattttttctctgaaagtactttagcaggttattttattaaactaaaccaactgcagcaacagtggaagcaaatcattgaagttactagactgtctgatttgcagattaaatttcctcatacacactcttatccattctgaatatatttccctctctctgtatgtcattcagaattaaggcctattatactggagcatatgctgatttccttaaaaataagtgagcaagttagtgattttcttttttcaattaaaaataatatttaagatggggtctcactgtgttgctcaggctggtctagaactccttgtctaatccttctgccttggcctcccaaagtgctgatattacaagcatgagccaccatgctcagcttcagctatcttcttgaaagggtcttagcaaattaatt

SEQ ID NO: 846256 - DNA, 530 bp, Homo sapiens
ttgacctcactgtaccttgacctcgtaaatctttcaggagagacatattaaaatattcatacacagaagtgtgtaattataacttagtttaatatgatgaggaaaaattcctaggaatgctaggaaagtataacaggcagattaagatttgtggtaagggaagaggtgtttctctgagaccagaagtataaataggaattagccaggagaaaaagccttctgtatggaagccaaagcaaataacttggcttgttggagaaactgaaggaagatttttgcagcaaaataatggtgcttggagcaaaaaaggaggatggagtagtatgcagagtcagatcttatagaaccatttaactttcgttgtggtttttatctgttatttcccattttttgactttaycttacaagcagtggaaattgttgatggatttcaatccgggatatattctgatttgcatttttaaaagactaacactgactgctatgtggaagataattggaatgagacaagagtagaaatagactcacta

SEQ ID NO: 846257 - DNA, 535 bp, Homo sapiens
aatgaaaagaaaaataaccaaattttaaaattagcaaataaattgaataggtatctcccccaagaacatgtacaactaactggccagcaacacatgacaaaatgmacagcattttcagccatcagaaaaagtgcaaatcaatgccataatcagataccatgacacactcattaggacagctataattaaaaagacagacaataacaagtgttggtgaggatatggagaaactggagccctccacatatagctggtgggaatgtaaaatggtgcagccactttggaaaacagcctggcagtttcttggaagattaaatacagaggtgcaatgtgaccaagcattcctccttctaggtatattccaatgaaaagatatgtttacataaaacttgcacataaatttgacattattcataagagacaaaagttggaaagaatgcaaatatacttcaactgatgaatggataaacaaagtggattacctatacactggaatatttttcagctataaaaaggagtgaagtactgatacatg

SEQ ID NO: 846258 - DNA, 617 bp, Homo sapiens
tcagaaaattgtaatatgatgacataagaagtcttttcyatggagtgcccttaaaacgcattttcataatgtttttacaatacagttgaaatgcactcattttacaatactgcaaagcaccctcagagatgctggtcaacaacattgactagatttaagagaatctagtcaatgttttgttgactagattttggcgagactgccagcacaagatgagacagaatacaggtatttttatcctctctaatcaaagatgcttgaaaatgagagtaattcaattgtaagaggtagaattaaaaataacaaccaacatttactgagtgctttctattaagcactctgcatatttaaacctagatcaaaaaaagagaaaagagacaagtacttactgagctagatatgtcacaatttctggaaacaggacacagatggaggccctaaactgatgaacagaggaagagatgcacagcctgcagcagatgagacagcaatgctgcagtagaagaagaacctgctgacctaccagcctggaggcccagaaactccaagatacagatccaagggaagatggaggaagaaatgggctgagaaatgaggcaggaactatatacccccac

SEQ ID NO: 846259 - DNA, 551 bp, Homo sapiens
atacacttggtctttttgttcttgactttgctgggaatttcctattcattttttttttttttgcacatttttctactgagttgcttttcwatcaactaagagctctaggctgggcgcagtgtctcatgcctgtaatccctgcactttgggaggccgaggtgggtggatcgcctgaggtcagtagtttgagaccagcccggccaacatggtaaaaccccatctctactaaaaatacaaaaattagccgggcatggtggtgtgcacctgtaatcccagctacttgggagactgagaatggagaatctcttgaaatctggacgtggaggttgcagtgagccgagaccaggccattgcactccagcctgggcaacaagagtgaaactctgtctcaaaagctctattgatatcagcattttatttaaaaatgtttattgcaaatatttttaggccttttatttgtctttcaactttgcttgtgatatcttttgcttttgcaaaattttaaaatttccatatagccaaatatgtatctttagtattatgtttatatg

SEQ ID NO: 846260 - DNA, 622 bp, Homo sapiens
ctatctagtgagtagagcccagggatactactaaacatcctacattgcacagggcagatgacacacaacaaagaattatccagccaaaaatgtcaatagtgcagggtttaaaaaaccccaatttaggccaggcrctgtggctcccgcctgtaatcctagcattttgggaggccgaggcaggcggatcacttgaggtcaagagtttgagaccagcctggccaacatagtgaaacttgtctctactaaaaatacaaaaattaggtgtggtggcaggcgcctgtaatcctagctactcgggaggctgaggcaggaaaatcgcttgaaactggaaggcagaggttgcagtgggtcatgccactgcactccaacctgggctaaagagcgaaactccatctcaaaaaacaaaaaaacaatttaggcctaagttagttgagggattttatgggcaaacagtggcattaggttgcattcccacatcccttttcccacacattgtatatagcacttttggagaatcattctatcactgttttttagctatctaaacaacatttatactcacagcttcatatacagaaattatatttcctttcccccaaaaagagttaagtaaactttccca

SEQ ID NO: 846261 - DNA, 623 bp, Homo sapiens
aaatcttcctttctctgagatcaatgtccaggattgtaagcactgggttatacagaggttgcatgtttagacaaaaaactgacaaactgttttccggagtgactgtaccattttacatttccaccactaacatgagtgatcagtttctccacatcttcgccagcatttggtgttgtcactactgtttattttagctgttctgatagatgtgtagttgtggctttaatctctatttccctaatagctaacgatgctgaacatcttttcatgtgcttatttaatatctgtatgtcctcctttcaatgaaatgactcttcacatctttttaaattagactgttttgttttttcttactattaagtgtgtgtgtctgtgtgtgtgtgtgtgtgtgtgtgtgtgtgtgtgtgtgtgtgtgtgtgtgtaagagccaggggtctcactatgttgcccaggctagagtgcagtgactgtccataggcaacatcatagcatactgcagcctccaactcccgggctcaagagttgtttttgcctcagcctcctgagtagctgggaatacaggtgttatgccactgcacctggctcttactgctgagttytgagagttcattgtatgtgctgga

SEQ ID NO: 846262 - DNA, 651 bp, Homo sapiens
agagaaagaaagaaagaaagaaagaaaacacagggttgctaaggccaaggcatcacacacttaacaccaccaagtcattccagagtgaaaggaacgcaaatccagtctcaggctgtctgattgacgaagcttctggatgcacagcttttacatttttatattttattctctgtgatgtgcccagctcaggagccgcaggtttcggccagttgttctgctctagtcctgagcgccctggcatgttttacagttctgagactgtcctatattcagggcctgtaccatggacagatgcaaagccactaaatgtgtgagctggaatagacaagaacagttatattgagtgtttactacatgctcgtcctcacaacgttacgtgctaagcactaggagtcgcagtttttggggtgcagaggctgaggatgagggcagttacatatcttgtcaagtctccccctggcaaggggcagttgtaactcagcacttcctggtggcacagcctgggctctgggctccccccccaacscttcgcaggtggcctggctgccactgttccccatggcactgggcaggccgctcaccttttgttgttgccaggctcttcgataatccctgtccatggggttcatgagattatagcgaggatcagat

SEQ ID NO: 846263 - DNA, 531 bp, Homo sapiens
tactctgttttgagttccatttgctgtgcagaagctctttggtttaatttgttcccatccaccagtttttgtttttcttgtaattgcttttgaggatttggtcataaattatttgccacaactgatgttgagaagggcatttcctaggttttcttctaggacttttataatttgagatctaacatttaattatttcatccatcttgagttaatttttgtgtatggtgataggtatgggcctagttttttctgcatatggttagccagttttcccagcaccattgattgactagaagtcctttccccattgcctatttttgtgaactttgatgaatatcagttggttataggttgattatgataagtgagcaccctttgattcctgtttttttaataaaaaaaaaattggctgggcactgtggctcagttgtgtaatcctagtgctttgggaggctgaggtaggaggagtacttgaacccaggagtttgagaccagcytgggtaacatagtaatactctatgtctaaaaaag

SEQ ID NO: 846264 - DNA, 613 bp, Homo sapiens
tctcccctttctttgaatccctctatagctgtcattttcgtaccattcacagtacacgccatgttctgctagcggtccatttttcttagtctcttctgtctctactactagatctttgagagtttcactggtctagcatggtgccttagtcacagtttgcctgcctctgagttcctctgaaagcgaaccccaaggcaaccctgggttaggtagtttattgggaacatgatcccaggaagtgcaagtggggagatcaaggcaaagaagggaggaaggccaatagtgtgtgcatcagtgagtcgatggccactgtgggcagatgaggaccctatgggaagcatccttcagaactgttccaccaagggatacagaagctgcagtatttattcacaaactctcatacctcattgattaagtgttgcccctggagcatccatttccagcattgccagcagccctgcacatggctgagggagctctttttgttgcagggagagaaacaragagccatggacaggtaagaggggaatctaccagtgtaccctagagctctctgctgtagctgcaggtgaacttagggttggttacccatgccatctactgtagagttcaa

SEQ ID NO: 846265 - DNA, 639 bp, Homo sapiens
ttgtatgtggctttgaaatgaacacttaaagcctttaaacaggtatgaccttgtttatgaattatgttatgaattagtattcaaggtgggtaatgttggtgctcaggtgtttgtccaggtaaaaggcaaatcagcttaatgtaaagcccttactccacggttttgacacacgtgctattgcctaaatgaatgaatcttgcggaccacttctaaggctggtgaatgaagtcaaagaagtcaaagcagggggggacccagctttaggaaatagcatggcttatgttacccttaaaccacttttgttttaaaagaaagataatagggacctaacaaagagaggctgtgtgtccttagagcaccttttatcaatgtaccaggaaaaagaggttaagaactctgaatctggaggttgtcaggcctctgagcccaagctaagccatcatatcccctgtgacctgacgtatacatccagatggcctgaagcaactgaagatctacaaaagaagtgaaaatagccttaactgatgacattccaccaytgtgatttgtttctgccccaccctaactgaccaatgtactttgtaatctcccccacccttaagaaagttctttgtaattctccccatgcttgagaatgta

SEQ ID NO: 846266 - DNA, 591 bp, Homo sapiens
catgcttgactttcttataatctacggacattggcattttaaaagaatatttgtgtatttgttacttgccgtacttccattcagtaaaagttggactgatctttaatgctttatatttaaaaacaaagtagtttcatcagaattctgctgcatgtttgcagtgcttggtttggtctgtatgggccagtgttgcactatccctgcgatgaggggcaacagcgaatggcctgagggtctcatctgggagaccaaggctaaggggagtggggtctagtttcaaggcattgaggcaactggaggagagtgggccctggtccactggtactgactgaggtgacacccatgatcacagagttctgtctgatcctgggactcgcactggggactctgggtgaagaagaggggagggaggttggcccagtcactccacatcaattgtactgcagagagaaataggaaggactgtcctcaccaattagccatccctgtcttttaaaagtctggattaatctggattaatatttcagatctcaaaagcaagtgaaacwatctaaatctgtttaaagaaaataaagaaaaagtacaaggcta

SEQ ID NO: 846267 - DNA, 614 bp, Homo sapiens
acatggatatgtgtctcatgcactctgtttaataattacctaacatcccattgtacacattggtgtccttattttttgtagcataagatttcccaaagtggattcctgggcaaagaggtttatttaaaagatgtttccactttactttccaaaaatattgctgcattttacactcctatccacagtggaagaatgcctgttccttacagctttgccagcattggatgacatcacttttttatttttgccatccagatggatgaagttttctcattgccggttttacttgtttttctcacccagaaactttcctgggtgttgggaaaaaaaaggaatctgctgggctgtagtttataaacacagccattggaaattgatagacctgttttaaatcctggctctgccaattcctacctttgtggtcttgggaaagttaattaagatttctagtttcaggtttgtaatctataaaactgttgtaattattaaataaagtaatgcatgtaagcttataatacagttttgaacagctacaagaactcaacacrtggtagttattattataattaataagtaatgatataaagggctggggatggaactgtggattcatt

SEQ ID NO: 846268 - DNA, 586 bp, Homo sapiens
atatttactccaaagcagcagcctatagcagcttatcattataagtcttatgtgttcactcttaatataaaatatataagcagaatagacatattatatgtaacatgtaatatgtatatatacacatatgcaatagaggagtaagagtgccaagaaataaagataaataatgaaacatgagaagaatatgtgtctctataattttgtggctcaaatttctgattttaattacagattcatatttgaaggtctttgagaattggcattttaccaattactgaaaggcacattatctaatttctaaagaagaatagcatctgaaaattttaaagcactctattctacttctttttattcttttagacacagggacttactctgttgcccaggctggattcaaactcttgagctcacacaatcctcccccatgaacccagctgttctgtttctaaagaaatggtgtgccataggcaaaacttttaccttgctatatctctgttgtattttcacagtccgtagattctargttttattatttcatttagagtgtgatgacaaatacttgacgttccactaaattagataa

SEQ ID NO: 846269 - DNA, 511 bp, Homo sapiens
accctgcttcataaaaatggtatactgttcagacaggttgatggtwgttctgtcattaatgcaaactgaattatgcatttttgtataacatgttatcttcatgacattattgatctactagagcaaaaacataagaaactgttgagttttccatcatgcccaagagacaaaaaaaagcaacttgggtctctcagctccatagtcaagcaaagtaaaataccaccacactatttatacctagttggatcctaattttccttctttggttatttcacaaccaattcatggttaactgttcaatgttacacatttaactagttcaagagtaaaatcacatatcttactccagaaattatgccaacttcatataaaagaaaaatcaactttttgaatgcttttctaagaattatatttttgtacctacttaggaggttagtttaggacattaaagctgaaaaaatatcaataccattcttaggctcattttcctcaaaaacaacttcctaaaaac

SEQ ID NO: 846270 - DNA, 539 bp, Homo sapiens
acgtgccttgccaaggtgagttcagtctgtcttttgaagttycctgcaactgaaccaaacggaggaggatgccgagtagagcagacccctcttgccctgccttcacctctttcctgccagaaaccattcgccaagtttgtggagtcgtggcgctggatgggcttgtgtgtttgtaccttccttttttccaaaaaggacatgagatggcttgtagtataacagtttcaaaaataagtgaagaggtctggatgaagggcaagagtcgaattggtgcccacgatgcatgccgtgggtcttgtgtgcgtgggaaggaacctgacgcttgttccaagcttccccgcagccaccacagaaagaaccacagtcacagccagtttatgacagtgactcagagcacgagctttgaagcgacgcagacctgggctcaaattcaaactctggctcccctgctttgtaaccatgtgtgtttgagaggctcttatctgtgccaagccttagtttacttttctgtaaaatggggctaacaatatctaccttat

SEQ ID NO: 846271 - DNA, 613 bp, Homo sapiens
gcttgagatctacaagagctgcactgggaagaaacggggaagtgagagattcacttctttcctactgtcrctaatatggaggacatagctgagaaaaagcaatcaccggtattggttaggctcactgatgaatctcagggccagagagaaggatgtgggatttctccctcctgaagctgatgcaggaagtttggctgtgaaatgtcacactacaataactgagaagtgggaaatgaacaaggaattctggtgtgacctggcttagattatatctagtagactttctttcaaaatggcaatcatggtaactagaactttagagaaataatcccaacatatctccacaccttgctcttcctctgccttaaatatgcagaagtcgaaatcagttttctgttgtgggaggatcatctattgctttgggagcaattaaagatgttctttttttctgttgatcacaagagttttagagctcaataatataatgtctgtcctctttcagaacaacaaagaaaaggcaaatgaactgaaggaaatctgctattcacaatgtacaggcatgcatgatgcttttgaaatgtttttgctagcaattgttttgtgtttagatgat

SEQ ID NO: 846272 - DNA, 484 bp, Homo sapiens
aatacatatgtattatatatattgcatataatatgtrtaattataatgtgatatggattatagaatgcaaatatatttattagtattatataacacatagaatatatatatatatatacatgtgttctcagtaacagtttgttacctatttattgtttctaatgtatgttttattctcccttaaatagatgctaaggtctttgagggtagaaaaaaaatcttctatttcttaacacttataattagtataatgaaatgaaagtgataaaaattataaatttgtgttcaatctcatacttttacaataggccagatattgtcattagtttcccaattaacccagatatttacaatatgagcttgaaaaagttatctaagaaggcataaaaaatgaacattagatattcatcacagaaatagaaaaaaacccctaaaatttatatggaaccacaaaaaaccttgaatagacaaagctctcctgagc

SEQ ID NO: 846273 - DNA, 591 bp, Homo sapiens
tcattaaactataccagttcttgataaaaatatatatrtatatttttgagacggagtctccttctgtcgcccaggctggagggcagtggcgcaatctcggctcactgcaagctccgccttccaggttcatgccattctcctgcctcagccttccaagtagctgggattacaggcgtgtgccaccacacccggctaattttttgtatttttagtagagacggcatttcactgtgttagccaggttggtctcgatctcctgacctcgtgatccgcccgcctcggcctcccaaattgctgggattacaggcgtgagccaccgcgcctgaccgataaaaacattttttaacttttaacgatacttttaagtgaagatctgtggcaaaataaaattgttttactaagaattagcaaatcagttatttaacttatccattcaattttgttttctgccaggcattgtgttagctatttaggatttaaaaatggattcagtcatgggctctgtcttcaaggaccttgtggtttggaataggagagaaagctataaatcgttcataaaagtgacatagatcctgttgggaaaatttgtat

SEQ ID NO: 846274 - DNA, 591 bp, Homo sapiens
tcattaaactataccagttcttgataaaaatatatatatatatttttgagacggagtctccttctgtcgcccaggctggagggcagtggcgcaatctcggctcactgcaagctccgccttccaggttcatgccattctcctgcctcagccttccaagtagctgggattacaggcgtgtgccaccacacccggctaattttttgtatttttagtagagacggcatttcactgtgttagccaggttggtctcgatctcctgacctcgtgatccgcccgcctcggcctcccaaattgctgggattacaggcgtgagccaccgcgcctgaccgataaaaacattttttaacttttaacgatacttttaagtgaagatctgtggcaaaataaaattgttttactaagaattagcaaatcagttatttaacttatccattcaattttgttttctgccaggcattgtgttagmtatttaggatttaaaaatggattcagtcatgggctctgtcttcaaggaccttgtggtttggaataggagagaaagctataaatcgttcataaaagtgacatagatcctgttgggaaaatttgtat

SEQ ID NO: 846275 - DNA, 591 bp, Homo sapiens
tcattaaactataccagttcttgataaaaatatatatatatatttttgagacggagtctccttctgtcgcccaggctggagggcagtggcgcaatctcggctcactgcaagctccgccttccaggttcatgccattctcctgcctcagccttccaagtagctgggattacaggcgtgtgccaccacacccggctaattttttgtatttttagtagagacggcatttcactgtgttagccaggttggtctcgatctcctgacctcgtgatccgcccgcctcggcctcccaaattgctgggattacaggcgtgagccaccgcgcctgaccgataaaaacattttttaacttttaacgatacttttaagtgaagatctgtggcaaaataaaattgttttactaagaattagcaaatcagttatttaacttatccattcaattttgttttctgccaggcattgtgttagctatttaggatwtaaaaatggattcagtcatgggctctgtcttcaaggaccttgtggtttggaataggagagaaagctataaatcgttcataaaagtgacatagatcctgttgggaaaatttgtat

SEQ ID NO: 846276 - DNA, 655 bp, Homo sapiens
ggtttgtgagtgcaccaatcgacactgtatctagctgctctggtgaggacatggagaacctttatgtctagctcaaggattgtaaatacaccaatcggcactctgtatctagctcaaggtttgtaaacacaccaatcagcaccctgtgtttagctcaaggtttgtgagtgcaccaatcgacactctgtatctagctgctctggtggggccttggagaacctgtgtgtggaaactctgtatctaactaatctgatggggacgtggagaacctttgtgtctagctcagggattgtaaacgcaccaatcagcgccctgacaaaacaggccactcggctctaccaatcagcaggatgtgggtggggccagataagagaataaaagcaggctgccggaaccagcattggcaacccactcgagtccccttccacctcgtggaagctttgttctttcgctctttgcaataaatcttgctactgttcactctttgggaccacgttgcttttatgagctgtcacactcaccgygaaaatctgcagcttcatttctgagcccagccagaccacgagcccaccgggaggaacgaacaattccacaagcgctgcgttaagagctgtaacactcaaccgtgaaggtctgcagcttcactcctgagcca

SEQ ID NO: 846277 - DNA, 616 bp, Homo sapiens
cacagtcatttctggaccctatttggagcaggagaaaggggacctcactgtcctgaaaggaagaacaagcctggctgaattcacaattgaagaaatgaatycttcaattcaggagtgaagaaaaaaatacaaaagatcaacaaaacaaaaagctggcttttgaaaagataatattggcaaacttttaggcagactaagaaaaaatgagagaaaacctgaagaaataaattcagagatgaaaaaggatatattacaactgatagcacaaaaattcaaaggttcattagggactactatgagcaactatatggcaatacattggaaaacccataaaaaatggataaattcctagacacataaaacctaccaagattgaaccatgaagaatccaaaacctgaactgacccaaaacaactaacgagattgaagtcacaataaaaagttttccagcaaagaaaagtctggaacccaatggcttcaactgctgagttctgccaaacatttaagaagaattaataccattactatgcaaactattcagtaaaatagagaaagagggaatacttttaacttcattctatgaggccagtgttatcttgataccaaaatcagacaa

SEQ ID NO: 846278 - DNA, 415 bp, Homo sapiens
cccttcttacaaccttttctagaaggcactagaatggcccactgcgtctgcgcaacatcgtttgaggcgaaggttcaacctcttcccagcggtccaacatccgacttccgttctccgctttcgcgcccttcccaycggctatctaattggacaaaaatgccgaccccgccccttccccggagcctcacttccgtcacagtcctgtttctctccctgttgtccctgcctctttttccttcccgccgtgccccgcggccgggccggggcagccgggaagcgggtggggtggtgtgttacccagtagctcctgggacatcgctcgggtacgctccacgccgtcgcagccactgctgtggtcgccggtcggccgaggggccgcgatactggttgcccgcggtgtaagcagaattcgacg

SEQ ID NO: 846279 - DNA, 415 bp, Homo sapiens
cccttcttacaaccttttctagaaggcactagaatggcccactgcgtctgcgcaacatcgtttgaggcgaaggttcaacctcttcccagcggtccaacatccgacttccgttctccgctttcgcgcccttcccatcggctatctaattggacaaaaatgccgaccccgccccttccccggagcctcacttccgtcacagtcctgtttctctccctgttgtccctgcctctttttccttcccgccgtgccccgcggccgggccggggcagccgggaagcgggtggggtggtgtgttacccagtagctcctgggacatcgctcgggtacgctccacrccgtcgcagccactgctgtggtcgccggtcggccgaggggccgcgatactggttgcccgcggtgtaagcagaattcgacg

SEQ ID NO: 846280 - DNA, 600 bp, Homo sapiens
cttagtctttttgtagtgattttcactcagtcacaggaatagtcatagctttgacttcttgcaccaaccccattgtccattytatcccctttcgtgtttagttgtgaactaaaccaagggaccgctccataaataatctggtcctaaataggcacactggttgtcccccaactatttgcttttatagaacatgtaggagatttgttctcaaacttaggtttttgaaacaatgtaattttaagtaaaatgtgttcctaacaaatatgttctacacacatctaaaacatgtaaaggcagtctgccatcagatgttatacgaagaaaaggaatgctaaatttcaattatctctattacattagattcacaccagatgtggctttcagacatctagtatctattgattattcacttaagttgtaactaaataggtggctacgattcagaatctattaaccagatgtttactaataatgatttcttattgtgttccaaagtaattattatttttaaaatttttatctttggtgtatttgtaactatcacgtttgagcataattttcttcttgaagttcacttctttcatgagttctttgacaaaa

SEQ ID NO: 846281 - DNA, 428 bp, Homo sapiens
agccctgcaggaggcaagagagaccagggcttagggagggacatgacctgggtcacacraacgggaatgccccacaatgaccactcccaggcactctcatttgcttctgttgctttttttttttttttttttttttttttgagatagaatctcgctctgtcgcccaggctggagtgcagtggcatgatctggactcactgaaacctctgcctcccaggttcaagtgattctcctgcctcagcctctggaatagctgggattacaggcacctgccaccacatccagttaatttttgtattgttagtagagacggggtttcaccacattagccaggatggtcttgatctcctgacctcgtgatccgcctgcctcagcctcccaaagtgctgggattacaggcttgagccaccgtgcccggccctgaacca

SEQ ID NO: 846282 - DNA, 428 bp, Homo sapiens
agccctgcaggaggcaagagagaccagggcttagggagggacatgacctgggtcacacaaacrggaatgccccacaatgaccactcccaggcactctcatttgcttctgttgctttttttttttttttttttttttttttgagatagaatctcgctctgtcgcccaggctggagtgcagtggcatgatctggactcactgaaacctctgcctcccaggttcaagtgattctcctgcctcagcctctggaatagctgggattacaggcacctgccaccacatccagttaatttttgtattgttagtagagacggggtttcaccacattagccaggatggtcttgatctcctgacctcgtgatccgcctgcctcagcctcccaaagtgctgggattacaggcttgagccaccgtgcccggccctgaacca

SEQ ID NO: 846283 - DNA, 498 bp, Homo sapiens
aaccatcgtaggaagttgaaagccttagaaagaggacttggtaaagtttttggattatcttgaaactctggcaagatggccaagtatggagaacatgaagccagtcctgacaatgggcagaacgaattcagtgatatcattaagtccagatctggtaggtaaaggaagctcaagaaagctatggatttttatgtatttagaaaacctatgtttcttggattgatttgcattgttcttgcaagaacttcttggaggtgaagttcttttaagaaactgaattctgacaaatgactataattttgtaaaaggtatatgtaaaaggtataatatctctgagtgtcctatcctttctcaacccaattttgtgcttagtgaaactgctgcttgtagctaaaggttgttcatttggaagactactccattaaaataaaatacgaccgaacatttytctttctattttctggaaattgaagggattatatgcttaatgtaggaagt

SEQ ID NO: 846284 - DNA, 443 bp, Homo sapiens
gtatgtagtttttcaaatcgtactgtaattcagattttcaacactttyggttattagctttttctctagaattttcttgatcaatttcttaaccgtttacagttacttctacttcttactgaagttgactactgctgtttttctcacagtacctcttggtcagtttatatggggaacttcaaattcagttcagctgcaataggatctgtatttttttctatatatattctgagagaagggtcatgctttaggaaaaagttgatgaaaatgagaaaagagatggtttattcatgtctatgcagtatactattaacagttctttgaaaaagtagcaaagaaaggtaatgttaatctcatcttaaatgaaggtaaaactcttgcacagctaagagaaaatctatatactaaaagagtttggaaaactacttcagaggaactttaat

SEQ ID NO: 846285 - DNA, 443 bp, Homo sapiens
gtatgtagtttttcaaatcgtactgtaattcagattttcaacactttcggttattagctttttctctagaattttcttgatcaatttcttaaccrtttacagttacttctacttcttactgaagttgactactgctgtttttctcacagtacctcttggtcagtttatatggggaacttcaaattcagttcagctgcaataggatctgtatttttttctatatatattctgagagaagggtcatgctttaggaaaaagttgatgaaaatgagaaaagagatggtttattcatgtctatgcagtatactattaacagttctttgaaaaagtagcaaagaaaggtaatgttaatctcatcttaaatgaaggtaaaactcttgcacagctaagagaaaatctatatactaaaagagtttggaaaactacttcagaggaactttaat

SEQ ID NO: 846286 - DNA, 443 bp, Homo sapiens
gtatgtagtttttcaaatcgtactgtaattcagattttcaacactttcggttattagctttttctctagaattttcttgatcaatttcttaaccgtttacagttacttctacttcttactgaagttgactactgctgtttttctcacagtacctcttggtcagtttatatggggaacttcaaattcagttcagctgcaataggatctgtatttttttctatatatattctgagagaagggtcatgctttaggaaaaagttgatgaaaatgagaaaagagatggtttattcatgtctatgcagtatactattaacagttctttgaaaaagtagcaaagaaaggtaatgttaatctcatcttaaatgaaggtraaactcttgcacagctaagagaaaatctatatactaaaagagtttggaaaactacttcagaggaactttaat

SEQ ID NO: 846287 - DNA, 614 bp, Homo sapiens
ctgatcaaaagactctccacagggcattcagaaccctccaatgactggtagccctatacccattcaaagtgatctcttattgttcccctttaggatcacttcactccarccaggcttgtgacctcacagtctcaccctctttccctgctttcctgtctcatcttaccttctacctcttccttatcaatttcaatctacttagagcagagagtttgagaacacagactctggggatggactgctggagtttgaatctcatttactaccactaactgagagaactcattcatttctgggtctcagtttctccacgtgggaaatgcaaataatgacagaacttaccctagaggtttgttgtgaggattaaatgaattaatatacataaaattcttagaaccataaacattatataagtatgtgatgtgatatgttattattattctagtacaggttcttatcttgttctataagtattttatgactaatgtaattttactttgatttcataaataatgcatcattaatatcttatctgagggcagaaaccatattggtacaactttccaaatatttagtacaaattgggtttgttgatgaataaaatgaaataaaat

SEQ ID NO: 846288 - DNA, 625 bp, Homo sapiens
tagtccaagcaaccagtaaaggattagtaaacaaaatacgtattaaatagaagcctaaaaaacaataaaaaggaaacatttcaatagagaaagaacaaaggacatgatgagtcaattaagaagaaatcttttaaaacataaagtgttgcacaacctcattgatcattaggggagattaagattaaaacaaaatgggacagcattccatgaccagcagattggcaaaacttaaaaactctgatcatataaagtcttggcaataccatgggaacatagaaactttcaaaaacggctactattaggtacttccactttggagagtaatttaacaatatccatggaattaaagatgtgtataacttacaaggcagcaaatctacttttaagctatatatacttgttgaattcttaaacgaggaggtattcttaaatacggtagtgcagcattgttgtgttagcaaaacttgaacaaacataattgttcaagaatagagaaatggagaaactaaagataatttaatggaatactaaatatcattaatcatgaataagttagatctacctgtaccaaaatggatatatwgcaaattacaatgttgagtggaaaaacacaagtcatcaaagt

SEQ ID NO: 846289 - DNA, 622 bp, Homo sapiens
tcccctatttcaattattttcactctgttattttcttctttctgcttgctttgggtttagtttgctttgttttttttccagcttcttaargtagaagattatgttattgatttgccatatttcttcttttcaaaatatagacttttagagcttttaattttcctctaagcccatatttgactgcactaataattttactgtgttgtgcttttattttcattaatttcaaagtattttctaatttgccttgtgatttctcctttgatccaacggttaagagtttggccgggcgcggtggctcacgcctgtaatcccagcactttggcaggccgaggtgggcggatcacaagatcaagagatcgagaccatcctggctaacgcggtgaaaccctgtctctactaaaaatacaaaaaattagcagggtgtagtgttgggcgtctgtagtcccagctactggggaggctgaagctggagaatggcgtgaacccgggaggcggagcttgcagtgagacgagattgcaccactgcactccagcctgggcgacagagcgagacaccgtctcaaacaaacaaacaaacaaacaaacagtttgttatctaatttacacgcatttataaatt

SEQ ID NO: 846290 - DNA, 630 bp, Homo sapiens
cagagacaagggcagaggccctgtgggtagattcattgtagggagagtggcatcaggggacaaatgggccttttctcttctcacctgcagctccattccttaccatgaagagcctctcctgcargcatgtggacaccccatataattgtgtcctagtccctccgcaacaaatagcagcgtctgaggcctgaaggtgtgcagagtagctccatctgcccttgggaggacagagccctgggaagagcctcatgcaggccttaaatcaggcttggagttgttggggtagggagctccagactcttgagtgcttagggttatataggaagagagagattgggctgcaagtatccatatactctgggactcagagactccatgctctgtggggttggtctggtcagaggagggaacgagaggagctccctttggctggactgagggtagtatatgtgaaaggtcttgcctgggcaggtggacttctgggaagagacgtggctttgagactggaggccaagcttgtgttacatggatcctgtgggcaactttggtggatgccgtgccccagctgagctcttaagtggctggaataatctcatagcaatagggaagctaagagactctttgaacttg

SEQ ID NO: 846291 - DNA, 583 bp, Homo sapiens
taaaataattttaaggcactgaaataggaaaaaaaaggtttttggagagtcaagtttttatcaagactccttgtaattagatctctttttcacatccttaattttgattgtctcctgtaaaattatccttattaagtcaacatagaatctcagaataattatttttatagttgaagtatccttccaaacatttcctcaagcagtacttttgcagcattttggggtaattggattacccatttggaggattgagatggaggaaaaaggggagagggagagtaccctgttacagagaaagcaaaatactatagaagtggattgctgaatatcttgttccttgaatgcacttcaacactgcacattagtaagcattataaagaatcaatgcaaacattaatttagctttctcaacattacagtctgtaaatgaaattctttagatttaaattgattactataaaaggtttactttttttcccttcttgtatttccaagggcatactatgccacttagytgtgtatttaacttcatttagcctctatcaaggacctgaaacaaaatgcttataaagaatgctatttt

SEQ ID NO: 846292 - DNA, 423 bp, Homo sapiens
atcatgaatattatggagcctatttggtaacaagcaagaaaaaaattgaaagtgtaagttcagttgtagcggaagataaactactcattaaaataaatataaatgygtggcagatttgataaagcagtaaagatgatttttggccactagagggagctcatactttaaaaactgtttggagcatccatcgtgtttcaaggaccaccgcaggttttaaagatcagtcatgatttgccctcaattgtttttggaggcttcttacacgctaacataccacagggatgggtaaataacaaaaattgtaagtcaatgtgactatttcagaacgggctataaatgttcaaaaaaataatctctgatcatacttatttaaagttagggatttaatttactcttctccccctaaagtatttctttgaaaag

SEQ ID NO: 846293 - DNA, 423 bp, Homo sapiens
atcatgaatattatggagcctatttggtaacaagcaagaaaaaaattgaaagtgtaagttcagttgtagcggaagataaactactcattaaaataaatataaatgtgtggcagatttgataaagcagtaaagatgatttttggccactagagggagctcatactttaaaaactgtttggagcatccatcgtgtttcaaggaccaccgcaggttttaaagatcagtcatgatttgccctcaattgtttttggaggcttcttacacgctaacataccacagggatgggtaaataacaaaaattgtaagtcaatgtgactatttcagaackggctataaatgttcaaaaaaataatctctgatcatacttatttaaagttagggatttaatttactcttctccccctaaagtatttctttgaaaag

SEQ ID NO: 846294 - DNA, 528 bp, Homo sapiens
gtgacaggaaactgtcaccaatatgtctatgtgaaattatttctgttagaccaggtcccctagtgaaaataactcatttgttctttcagtctacatcatttccctcttaggcactacctcagagcctcccaggctcacctgtttcagagcttgtcttaggattcttgccagataatttatggagggagtactttgggggtaaaacctgcaacagtgtgaaggaggcaaggcaagtgaaataggaaaagtagatctgcttcttgaagaacctagggtaacacataccctaatcaaattttaaaactataactcaagcatttttatgcattaaagcatagctttctctagctcctcagttacccattccaagaagaagacaaaacattttgatttcacaccgtaccccasagcgctttgtagtagctactagagttagacacagctcttaaagaaagaagcctcatgctttttctgttgctaattaaactctgctaagaaatgtgagctccctctgaatcaatccaagac

SEQ ID NO: 846295 - DNA, 456 bp, Homo sapiens
gacattctgtgaaaggtaaacatcgaaactggttataagtaaaaccatcaagccaacaacagggtcttgagataacctttgaagcttattgtactggcctgcaccagaagatgtctgcattactcattgctaaaaatgtgtagcacagaactgcactaggattaatttgtttacaagaagaaatttaaactctacgtttggttttcacatacagcagctctattgaataacatgcatctgaattttaagttgcaaaggtatctgaataatttttcatgtgcatcttttgtcgaatgttttggttcaagaaagaatgtttaaagctttttaaaagacttcagttcttaatgtaactgtacccttctgcatggaaaatcataaccaacatggctgcagtagacttcttagtggtatccagcrccacttgcagagggctgctttatcatattgtacttg

SEQ ID NO: 846296 - DNA, 670 bp, Homo sapiens
gtattagggtgggagtgacccgattttccaggtgccatctgtcacccctttctttgactaggaaagggaactccctgaccccttgtgctcttgagtgagggaatgcctygccctgctttggctcgtgcatggtgcgctgcacccactgtcctgcaaccactctctggcactccctagtgagatgaacccggtacctcagatggaaatgcagaaatcacccgtcttctgtgtcgctcacactgggagctgtagactggagctgttcctattcggccatcttggctccatccccattttggtgattttaaacttttttctcacaatgttaacattttcacaataaatatataaatcattttcatataaaatcagatggattctataacgattttttaagtcatgcttttagatgaaaattctgtttttttgaaattagtatggttgtatctctttacttcccgccaacatttgcttcatatttttttctgcctctttgtctttgactcagttatcaatagtaagattaaaagacatgctctttctcagtagtttcaaatgatgcaggagacagaagtaataccagtcaggatgcagtagagatgtttctctttaaccactcctttctctagtgaataatagagctacacagtgaagtgtttttcctttattg

SEQ ID NO: 846297 - DNA, 514 bp, Homo sapiens
gtgacacccccgacgtatcatggagggtaaatatgacccagatcctgcctttgyggggaacaattccttattcctcagcaccttcagcattcctgctcagcaatattccgtgggggagtcccaccagggatgctcgtctcccttggacaaatcacacaccttacagcagcccatgagtcccggcaggaccaccctgtacccctgtacccctgctgctcctctgaatttggtgctgccacccctactcagctccaaccacatagcttctttctggcccccggtcacgctcagcctcctccctctttaggggcttgccatttgctcttctcatagctgtccctgcagctcatacttcacctccttcaggactttactcccggatcaccttctcagtgaggcactccccgaccaccctaccaaaaacagaccctacccccaacacaccctatgctttacttttccctgtggcattatatctaacatatcatatgttgtacatttttaatgttttatt

SEQ ID NO: 846298 - DNA, 514 bp, Homo sapiens
gtgacacccccgacgtatcatggagggtaaatatgacccagatcctgcctttgtggggaacaattccttattcctcagcaccttcagcattcctgctcagcaatattccgtgggggagtcccaccagggatgctcgtctcccttggacaaatcacacaccttacagcagcccatgagtcccggcaggaccaccctgtacccctgtacccctgctgctcctctgaatttggtgctgccacccctactcagctccaaccacatagcttctttctggcccccggtcacgctcagcctcctccctctttaggggcttgccatttgctcttctcatagctgtccctgcagctcatacttcacctccttcaggactttactcccggatcaccttctcagtgaggcactccccgacyaccctaccaaaaacagaccctacccccaacacaccctatgctttacttttccctgtggcattatatctaacatatcatatgttgtacatttttaatgttttatt

SEQ ID NO: 846299 - DNA, 390 bp, Homo sapiens
acctcatgaggggcctgtaaggaatgggaaaatgctggcttccaggctccagggctgcactgtacggtgagaggcaggcagaaagccactgtggtgtctgcatttcttggggcagtggtttcaaaactggccaaacatccggttcacctgaggaacccatgaagatgacagatttctgaggttttcactcactgggtccagaatgaggccaagagcctatgattttgtcaagcattccagtcaattctgctggtcactactcagaagagaggtacaaggtggcacaagcataagccagggcagggcaggctgggctgtgggttggcaatggctascctcacccaaggcatttgcttggttaatgaatggctgcttgcccccagctttttt

SEQ ID NO: 846300 - DNA, 286 bp, Homo sapiens
attactgcaagatgcagctatcaccaccatctcctggccacatacrgacctcctcagaagcttagatgaataaagggaagagactggagttattaaaatttgttaactcagagtaaaagccttcctgagctgaggctagacctctgagggagagatatgttccaactgctgctgttacctctgaagaggcactttctggggctctgaaaaaattggtaaactgaaacaattactgctccttgggcaaggggatgttcttgggagaatatcggcaaggacagcaaac

SEQ ID NO: 846301 - DNA, 619 bp, Homo sapiens
tggtgtgctatcaggggcattgctgaaagcaggaatcttagcggctgggagtcaccgtgtgggcagaggaggagaggagacagagactgtgtggagaggtgrggctctgtgctgtcagtgagggctgttctctgcccccatctcttccagtccctttttatctctgccatcccaggaatgatggaagtgcctgaggaagactacctgggcttcctgatgagttactggcagactgcctctgtgggacaagagggtcacctgcaagccagacagtccaaatcctccctgaaacacatcactctccactcactgcttaccaattcccttcaaggctgctccagctgcacatttttaaaagttgttctattcaatgagaagacatagacacagggaggggaacatcacacaccggggcctgtcagggggtcagggggtcagggtcaaggggagggagagcattaggacaaatacctaatgcaggcagggcttaaaacctagacgatgggttgataggtgcaacaaaccaccatggcccatgtatacctatgtaatgaaacggtacattctgcacatgtatcctggaactttaaaataaaataaaaactttttaaaaagttgt

SEQ ID NO: 846302 - DNA, 619 bp, Homo sapiens
tggtgtgctatcaggggcattgctgaaagcaggaatcttagcggctgggagtcaccgtgtgggcagaggaggagaggagacagagactgtgtggagaggtgaggctctgtgctgtcagtgagggctgttctctgcccccatctcttccagtccctttttatctctgccatcccaggaatgatggaagtgcctgaggaagactacctgggcttcctgatgagttactggcagactgcctctgtgggacaagagggtcacctgcaagccagacagtccaaatcctccctgaaacacatcactctccactcactgcttaccaattcccttcaaggctgctccagctgcacatttttaaaagttgttctattcaatgagaagacatagacacagggaggggaacatcacacaccggggcctgtcagggggtcagggggtcagggtcaaggggagggagagcattaggacaaatacctaatgcaggcagggcttaaaacctagacgatgggttgataggtgcaacaaaccaccatggcccatgtatacctatgtaatgaaackgtacattctgcacatgtatcctggaactttaaaataaaataaaaactttttaaaaagttgt

SEQ ID NO: 846303 - DNA, 319 bp, Homo sapiens
tttgaaccaaattgcataaacgctgagtcatatgttcatacattcaaaagatatttattgagatctactctatacaaagcactgtgttaagatgggatacagttacaaaccagacagacctttgcaaagttagtccatggagaggttattccttgggaaaacgccataagtacatgtgaagtagagacactcacctttttcatgctctgtggtaacagcaagacaaggtcctyctcaggctgcgctgcaggtctgtcctctgaggaccctcaggctccatgctttttctttatttaaatttaaattctttttcttttta

SEQ ID NO: 846304 - DNA, 577 bp, Homo sapiens
aatttcaagccagtggatcttagcttgctgggctccgtgggggtgggatccactgagctagaccacttggctccctggcttcagcccgctttccaggggagtgaatggttctatctcacattctaagcaccactggtgtatgaaaaaaaactcctgcagctggcacagtgtctgcccaaacagccgcccagttttgcgcttgaaacccatggccctggtggtgtaggcacccaagggaatctcctggtctgcgggttgcgaagaccacgggaaaagcatagtatctgggccagaatgcactgttcctcatggcacagtccctcatggtttcccttggctaggggagggagttcccccaccccttgcacttcctgggtgaggtgacaccacaccctgctttggcttgccctccgtgggcttcacccactgtctaaccagtcccattgagatgaaccagrtacctcagttggaaactcagaaagcacccgccttctgcgttgatctcattgggagctgcagaccagagctgttcctattcagccatcttaccagccacccccaagtcttcaaaaattaa

SEQ ID NO: 846305 - DNA, 524 bp, Homo sapiens
aatatcctgccccttgacttgggttctggttatataggtgtgttcagtttgtaaaaaatcatcaagccatatacacatactctccacatttttccttacttacgttatgtttaaatcaaaacttgccaaagctttttttaatgttgcttgttacaagtgaatgttctagtcattagattagggccacctctactttagttaactaaaccatttacttgcatgacttaaattataatgtcttttcaaatattgagtaatttgaaattcctctcactgtagatatgttcacaaaattagaattgatgaagattctccaagcttaaaacaatgtatatttgttgaaatgttgaatgaatgactcttctcttttccacatttctctttgtagccaacatttttcaggaactcctttagcaagtgtagaaagaaaggcaagaaagaaaaggcactactatatatkataacaataccttatatttctcttcttataatacatcataaatttaatcatataattatttgtc

SEQ ID NO: 846306 - DNA, 450 bp, Homo sapiens
ccaaccaccctgcatcttgggtgaggaagaagggcctcttttgctgttccttcccctcagagatccaagaacccaytccagtgaaatgcaggtacccatgcctaccacctgcccctggagacagcaggggagctgaggcaggaaggctggccaggggcccacaagactctcctaatccaagcactttcctcgctttcctaacgtcttggcaacaaagggaccccaccctcccagccggctcctgggccctccctgcagcctctgagcagctaggcctccctcctgtgtgcgtgcatgagtctgcgtgtggtggggtgactacaggtgctggtcctggctgccagggagggcaggagagatctggagtcagccccactgcagggcctgggggtcagtatcaaccaatttccttccactgcttgtagaagtccagaacattcttgatgtcca

SEQ ID NO: 846307 - DNA, 552 bp, Homo sapiens
tttcttttttttgctgttgagttccttaagttctttatatattctggatattaacaccttgtcaggcatatactttgcaaatattttctcccattctataagttgtctctttactctgttaattgtttcctttgctgtgcaaattcttttcagcttgatgtaatcccacttgtccaatgtttgcttttgttgcctgtacttttgtattttaaaaggtccagtcttttagaagaacaatttgacaatatatgatattacttaaaatgtttgtatacttcatcccagaaattccatgtttaagaatttatcctaagaaatgcatgtgtaaatatacaataatatatctacagaattacttaaaacaacattacttgacatttaagaagcagcaacatcccaaatatccattaatggaaaaatgcttaaatgtattatagcatatctatacaatggaatactttgtcattgckaagaataatcaggtaatacttatccaaaattatcaagttgcaaatttaagagttgtactttattgtgtgtaaattatgcctt

SEQ ID NO: 846308 - DNA, 587 bp, Homo sapiens
ttagttctggctctcactgccattcctttggctcagagtggataattgagaatccatgaayagcaagaaccctctactaccgctctccttgtccaaatcagtggccccagctgtaaccttgtcctggtcacctctggatgtcagtgagtgacttgtctcttctttgctctgacacaattagctatggtgggattcttctgggcatttgaatcatcatttacaaaataaagatgttaggtaagttgagctctcaaggttttctcagggacaaatcttaagataatatgatttattctcttagggaaagtgcaaaattgtgattttatcatcacctttggagttttttatgagtgtatgaacatgatgaaatggcagcgtagtgttgattttctctgggacccactcccatgtaaggctacctaactgtgatatttgatggcgaatcctgctggtgtcaccttcctgaaatcattttgctcattgccatccctggtcaatttctcccttgggcgaggtgagggccatagactgacagggagctttaagttatcagtgaccctcccagaggacctctttcagatcctcca

SEQ ID NO: 846309 - DNA, 535 bp, Homo sapiens
cacatgtataccataagcaatgatcaaatcatgttaactgggatatccatcacctcaaacatttgtctttcttttctgttggaaacattgaaagttttctcttctagctattttgaaatatacatcaaaccatttttagctacaatttctatattgcactatcaaatattagaacttattccttctatctgactgcattttaatgcccattaaccagcttctctttattccctcattccccttcctttcccagcttctggtaactatcattctactctctacctcagtgaaatccactttataacatcccacatatgagttagaacatgcaataattatctttctgtgcctgatttattttacttgatatgatgatcccagctctatctgtgttactgaaaatgacarggtttcattctttcttatggatgaataatatcctattgtgcatatataccacattatctgttcatctgttgacaatctgttgacaattccatatattatctattgtgaatagtgctgcaataaactt

SEQ ID NO: 846310 - DNA, 535 bp, Homo sapiens
cacatgtataccataagcaatgatcaaatcatgttaactgggatatccatcacctcaaacatttgtctttcttttctgttggaaacattgaaagttttctcttctagctattttgaaatatacatcaaaccatttttagctacaatttctatattgcactatcaaatattagaacttattccttctatctgactgcattttaatgcccattaaccagcttctctttattccctcattccccttcctttcccagcttctggtaactatcattctactctctacctcagtgaaatccactttataacatcccacatatgagttagaacatgcaataattatctttctgtgcctgatttattttacttgatatgatgatcccagctctatctgtgttactgaaaatgacaaggtttcattctttcttatggatgaataatatcctattgtgcatatataccacattatctgttcatctgttgacaatctgttgacaattccatatattatctawtgtgaatagtgctgcaataaactt

SEQ ID NO: 846311 - DNA, 602 bp, Homo sapiens
aactctgaaaaaaaactcaaactctaaaacccttctgttccaaagtgttttgaataaagtgtactcaacctgtataccatcttggattaaacaaagggaaaggagttttgggcttctgggttggggaggcaagctctggtgggtggactaggaaaaacatggtaaacaagggtttttatgcatatttaagtcaatgccttctctattgatgaaagttgtcaagagtcttcctcttcctggtatgggagaaggagacatatttacaaaaggaaatttcctttataagggaaaacttccttttttacttataaaggaaaacttgtgccttgcttttagacttttcctatttctggtgattctcaatagcctttagctcaaaataatccatatgccaaagagacaaatctggagatggcatcttctggtacccttcacatacaagaactcatcttagagaggtctctgtaacaacaagakcccaggtgagagtctaggagaaatgcaatttccaactatctacctgaggacctggttcactgaaacaagtaagagggtttgtgagcctcccatcatctatcactgctgagtggatcctgccaggg

SEQ ID NO: 846312 - DNA, 624 bp, Homo sapiens
catacaccatcatgccctgctaatttttaaattgttttgtagagacagggtctccctatgttacccaggctggttttgaactcctggcttcaagtaatcctcctgcttcagcctcccaaagatctgggattacaggtgtgagccaccatgcctgcccagtgtacacttttagatggtgaattttatgtgaagcatatctcagttcaaaaaatcttattaaaaaaaaatcagcccagcatggtagctcatgtctagatcattctgattccaaatcccaaccttaacttctgtgctatatagtttctagctaagggttccctcttctgtcagctgtcttcagaaatataccatattctctgaggacatttctcttttgagtcttcaaacaccagagcttacatgatgaactgtttaaaattttttaaaaattaaaaaaatgaaaaacatcagagctgctgcttggatgaaattttgacacgtggaaattttttttctrctgtatgtcagcagtgaggatgaagatatactattcaaagatgagatgaattaagaacagtaaaatgttttggcaccataatttgtgattcttcttaggaaaaggtcattcgtgcagccccatggcaa

SEQ ID NO: 846313 - DNA, 642 bp, Homo sapiens
tcagcactcttctggtggtcaactattaagattgtgaattggattaactacatctattgtaatcaacaaagattcatcagttatacttggaatgcactcamagggatggtaagccagtttgatgccaccagctgagtggcctgggaaacaggcttgcgttaagacatgatactagcagaaaaaggagacgtatgtgttatgctgggtggaaaatgttgtactttcattcctaacaatactgccccagatggcaccatcacaaaaactttataagggctgacaactctagccagtgaactggcagagaatgctggaattgatgacccatttacatgttgggtagaaggttggtttggaaaatggaaaggcatggtagcttcaatccttaaatctcttataattgtggcaggagtcttaacagcagtgggatgttgtgcctctacgtccattctttgggtttggatgcgtgagtgtgtttctcacaagaagcaatactttccaattcatttcatgaggctagcagaaggttcataccaaaccttgaggaaggtaacaactgaaaattacatgttaatttcatttatgaatgtacatgcaaaaatcttaaagaaaatattagcacatttaattcaacaatttata

SEQ ID NO: 846314 - DNA, 602 bp, Homo sapiens
taatgacccttaccttttaattacttgtytctaattgaatctatttctttgagcagaaagttctttataaattattggtgcgcgtgataaattactgttgataaaatatcttgtatttttattattctagctttgcagaaagcagaaaaattagagaaacagaactggctaaaaaaggacagaattttggctgatctagataccatgagacacaaaatgagacagttaaaaggtcagtatgaactatatcaagcataaccatatttaattcaaaatgtagccccaaattgctaatggttattttctaccattagataccaagtgtttaaagagtactatataaaacaatatataaatattgttttacagaaatcatttgagcaaagtctaaaacctaataatatattttttggtctgattttatatctgtaaattttatattaaaatgaatatcaaatgacttatgcatacgtcttaaaaattaaaacttaggaggatacctgggcaagagaaactacctcattgtttttgaaataatccctcaacagacgttttgtgggcttcagaattaatctttaaacaaaccttgctgtcattccttg

SEQ ID NO: 846315 - DNA, 573 bp, Homo sapiens
tatgcattccaaaagcaagacagatttaatgtaattgaatgtaaaaattcactgatacactttaaaatttcacattaccattaacctttaaaaagctaccactctacaagttttggtgtaatattaaaagagaatatccactatcatccaaaaaggctattaaaatattcctttttctctcagctatatattcatgtaataccaaattttcttcatatacttcaatcaaaacaataaatcacagcaaattgaatgcaaacaaataagataatttaaccagcttccattaaactagactttcaagagaactacaaaaacataatattaatatcatactttttaaattttggatatttgtttttcataaaatatgttattttatgaaatgtaaaatgtagtgtcagtactacaaattagtgttgacatgtgattaatctatttttgataaattaatatatttttaayttgtcagttttaagttgtaatatgaaaagtgaaaatagatataatttttaagaaaaaggtctttgaggatcccaataattttaaagaatataaaggaatcctagaata

SEQ ID NO: 846316 - DNA, 619 bp, Homo sapiens
tgctggtttaggatgatggcgctaacaagaagactacctaaaatgtcaccagcaacaacagcaacaaaagcttcacaatgtttatggatttcacatgctcccctttctgtaatmtggaactcaccctagaaattagctgcccagcttacaactgggcaaacatgtgcccagctccctttgcatccaggtactgccatgtgacttatcctggccaatagcatgtgcacagaagtgaaataattcacttccagattagggattttatgtaggctggatgcagagaagaacaaagtgcaggggtggtggtaaaacttcaaggtagaaggagcctggatccctgaactgctgtatggaggaaatccacttgctgaccaggagcacctgcactggacttcatgcaagcaagaaattaaattctactggactaagctaatgaagttctggggtctagttgttataacaatgggcattactctaatatacttatcatttttttttctgataacaacactatgctgtcagcaaatagcattagcctcacatcaaagagaaaaaagctaagtatcagaatgaaatcacttgcctaaggtcactcagctagctagtggcagatgcagga

SEQ ID NO: 846317 - DNA, 641 bp, Homo sapiens
acccttcccttccccacacctcaccaaaggcctatttgccaccgtttctgacccagtgcatcacatctggctatcaacaaacaatcacaaggcataaaaaaaggtaaagaccacagtctgaaaagacagagcaaatgtcagaaccagactcagctatggcacggatgttggaactatgagactggggatttaaaataactatgattcatgtgctaagggctctaatggataaagtggacagtaagcaagaacagatgggcaatgtaaatagagagatcaaagttctaagaaagaataaaagagaaatgcgagagatcaaaaacactaacaaatgaaggatgcttctcacgggctcattagtaggctgggcacagctgagaaagactctctgaggctgaggatatctcaatagaaacatccagaactgaaaagcaaagggaaaaaatgctgaatgaaaaaggcatagaatatccaaggactgtgggataattagaaaaggtatatgtttaataggaataccaaaaggagaagacagagagaaaggaacagatggaaagttggaaacaataatgactgaaaatcagacaccaaaccacagatccaggaakctcagagaacaccaaccacgatgaatgtcaaaa

SEQ ID NO: 846318 - DNA, 616 bp, Homo sapiens
tcaaagaagttattcaaggcaataaaaattgttataggtcagaaggtcatatctacataacaaaagaaagaacatcagagaagaaataagtgaaggtaaaatgaaatttttaacttgttaytcttaatctaacagatcaatttgttcaaaattattgtagccacaatgtattaacatatatacaaatgtgctaccgagccatgaaaagatatgaaggaaacaaatgcatattactaagtaaaagaagccaatctgagaaaagctatgtaatatataattccaaccacaggactcactggaacaggtaaaactaaggtggcaataaaaggattagtggttgtccggggttagggtgtgggagggatgaacaggtagagcacagaggattttttagggcagcgattctttatgatatgacaatggtagatacagctcagacacttgtcaaaacccatagaatgtgcaaatgaaaagtgaaccctgatgtgaactatggactttgagtgataatgacgtgtccatggaggttctttgactgcaacaaacatgccactttggtagagaatgtcgatcaagggggaggctgtgcatgtgtaggggcagggggcatatggaa

SEQ ID NO: 846319 - DNA, 643 bp, Homo sapiens
tcactcatgatttggctctctgtttgtctactattggtgtataggaatgcttgtgatttttgcacattgattttgtatcctgagactttttgaagttgcctatcaactkaaggagtttttgggatgagatgatagggttttctgaatatacaatcatgtcatctgcaaacagatacaatttgacttcctctcttcctatttgaataccctttattgctttctcttgcctgattgccctggccagaacttccaatactatgttaaataggagtggttagagagggcatcctggtcttgtgccagttttcaaagggaatgtttccagcttttgcccattcagtatgatattggctatgcgtttgttataaatagttcttattattttgatatatgttccatcaatacctaatttattgagtgcttttagcatgaagcagtgttgaattttatcgaaggccttttctgcatctattgagacaatcatgtggtttttgtcattggttctgtttatgtgacggattacatttattgatttgcgtatgttgaaccagccttgcatcccagggatgaggccaacttgatcgtggtggataagctttttgatatgctgctggattcagtttgccagtattttattggggat

SEQ ID NO: 846320 - DNA, 590 bp, Homo sapiens
tacatttcatgttgtactctaagactcatcaaagtgagctgaagcctygaggacagagagggagaattgtgatctgaaaatttcttggattaacatttgactatcgacttcagtatttttatagctcaagtctaggtacacgtaagtaagcagaaaaataaaactcctacctcggattttacatgctgctttggaaggtaatataagactctgagatatatctgggcctccacaaaaagagaaaagaggcttgcctgcttgttcttggaatgcatggggccagctggtagagacctatctacagcaatccccaaaatgtgaataagaatcagcttctggctgagcatggtggctcacgcctgtaatcccagcactttgggaggctgaggcaggtggattgctttgagctcaggagtttgaggccagcctgggcaacatggtgaaagcctgtctctactaaagacacaaaaattagtggggtgtggtggcacgcttgtggtcccagctactcaggaggctgaggtgggagaatcacttgaactccagaggccgaggttgcagagtgatcccctgtctaaaaaaaaaaaaaa

SEQ ID NO: 846321 - DNA, 525 bp, Homo sapiens
tgatacactcaacaggaatccgctttgttaatcagctttggatgccccaattccctgtaaagctacacttaatgtgtgcttctttgcaacctagctattcacaaaactttaagccaacatattacatctcttttattaaaaattcaaaatgaaaagtaactcatgctaagaatataggcatgttcagtttctattcatctagcaattaatagaaactgtacttattcataaatattccctgtgtaaaaatggcagaaaagtttaccagtttgaatgacagtcactaccaaaatttaattatttttctattgtttaattatttttcacctatattgtatggctcaataatcatacaatcatacccagggataaaatcttactgatctcgcagagcacggtagytcacgcctgtaatcccagcactttgggaggccaaggtgggcggatcacaaggtcaggagttcaagaccagcctgaccaacatagtgaaaccccgtctctacgaaagatacaaaaattagccag

SEQ ID NO: 846322 - DNA, 463 bp, Homo sapiens
agaggacagtgcgggcagtgagggggatcccttcccattgcaagggggctctgttcctcctgccccaaggcaaggcagcggtgtgagcttctctcaagattcagggagatggcatcgcatgcctgagttgcagtctggtcgtgcagcagatctgtcacttacttactagagctgggaaagaacagaattggagagagatgagaggacagaagggcagtctccctcccactggttgctgtgtcagcaagaagcagatttcctatcagtcaagtggacagtaaagaaagtaactggtctacaagaaggctgccgcctgcagtgtacagctaccagtggcaagatctgagcaggtacagagaaactgagctgggcagggagccctgtgtgaaggacaacacagcaggggagacrtagaccatgtggtggacaacaagggccagtcagtactagcagcagaagtatt

SEQ ID NO: 846323 - DNA, 438 bp, Homo sapiens
ggcagggcgaccacccccaccggggtttccttctacacatcggcggcggcctgccctgggggccgagcgggtggagcgcaggsagaggaggtcgttttaaacccagtggctctagagcctcaagctggagcccccgagtgagtgccagtgagggaggggccttctgtgagagagagtgtgcgtgtggctgcggggtgcatggctgtgtggaagccgagaggaggacgtggacaccttcgcgggtgcaggcatgtggctggtgtgcttggtggtggtgtcgtgggggacggagaggaaggagtcccctgagcgtgggtaccaggaaagagtgtgcctgcatgtgctttgctgtgagcagaggtagatgtttgtggtgtgaaattcattcggaaactcagcgctagctggacaggcaagagataaggatctgagggtggt

SEQ ID NO: 846324 - DNA, 514 bp, Homo sapiens
tattgaataggcaagggactaaattttcgaaagaatctctctggctgtcatggtgagagcagacagaatggagcatagcaaaattggggagatcagttaggacactattgtgataaggctaatgagcgataaggggcttggatgttgcagcaatggaggtggtaataagtattattatagaagtctagatatatttagaaagagccaagaggatctactgatggatccagtgtggaaagcgtcagaggggaacgtcaaaatcaactatgagatccttcctctgaatcgctggagggccagaacaccgcatactaagcaggaaggctgtgggaggagctggttttcagtggggtgagctcaggagctcagttcaggacatcttaygtttgagaccctgtcagtggagtggtctgggttggaaatgtaactttgggagagatctgcatttggatggtgtataatgcagacagggctgggtcatagtgctcagtgagcactatgccaagtgctttct

SEQ ID NO: 846325 - DNA, 586 bp, Homo sapiens
agagtgacaatctatggaatgggagaaaatgttcttaaaccatatacctgataaggcattsatttccaaaaaatataagaaacaactacaacataatagcaaaaaatctagtaccacaatttgaagtggaactgaggacttgattcctaaagcacctaaataaattggtatttcaccaaaaaagccatataaatggccaagaggtaatgtaaaaaatgttcaatgtcactaatccttagggaaatgcaaaacaaaaccacaatgagatattacctcacatttgtcaggttggctgttataaaaaagataagagataagaagtgttggtaaggatgtggagaaatcagaactcttgcacacttttggtgggaatgcaaaaatgtacagttgctatggaaaacagtttgaagatttcttagaaaattacaaataaaactaacatattacctagtaattccacttctgggtatatatacaaagcaattgaaattagcatctcaaaaacataccagtattcccatgttcattgcaggactattcacaataaacaagatgtggaaacaatctaaatatctttggatagatg

SEQ ID NO: 846326 - DNA, 619 bp, Homo sapiens
aagtttcaaacttaacattaaaattatgtcttatgtctgttactgaatccaagttatcatacaaagaaaaactcaaactgaaagtgccttaattttttgaaagaaatcactatgaaaaaattaaatttgaaaatgcccacttagggattcttatttttttttgtctcagtagagagtgagatcatattaaatacataaattgtgttttaatttgtataattattaaacacattcaaaataaacatagaaaaacagaaaatacaagtgaaaaagttaaattagtaaaagctaatgatactgatactactattgacaatatttgaatatattctctttctgcttttctattttatacaatattagggtagtactacttaagtagtattataacatttttcctcaaaatacgatattgtagatattttctcaaatcccaaaatgttttttgtaacataattttagtttgaatatatcatgccgtaactgagtatttttctattttttgacgttcatattgctttaacatttttactattgtatataaaatactttgataaatgtctttttgcgtgaatctttgtatamgtccttatatttgtgatatggagaatattagata

SEQ ID NO: 846327 - DNA, 530 bp, Homo sapiens
tagagatggggttttgccatattgccaggctggtctcgaactcctggcctcaagtgatctgcctgcctcagcctcccaaagtgttgggattacaggygtgagccactgctgccagcccatgtcaacatttatttatttatttatttattttgagacggagtctcactctgtcgcccaggctggagtgtagtggtgtaatcttggctcactgcaacctccgcctcctgggttcaagcgattctcctgcctcagcctcccgagtagctgggactacaggtgcccaccaccacacccggataatttttgttcttttagtagagacggggtttcactatgttggccaacctggtctcaaactcctgacctcaggtgatcctccctcctcggtctcccaaagtactggtattacaggcgtgagccactgcgcccggccctagtcaacatttttagggtgacttcagtgaagactcaggaggtatgctgatcaaatttgcagatttcacaaaattaaagaagggatttgaactaat

SEQ ID NO: 846328 - DNA, 551 bp, Homo sapiens
gtcttaaagtagatttagaggttcataatgtttttattaaaagaaaagaaaaaaaagaaaccatgtcaaataggtttgggatctgatgggctttagggtgggaaagtcagaaggcctggggtacctgatggagaggaagcaaaggtgaaatttgtggtttcttaggtcagtaacctatcttctctagactgcagttgcctctctagacacagctttggtgttaggtctgagtttatccaccagttcttcacaggccactggggcccctaatgaggctcctggggggttctttctgggacatctgagcaggctctggagtcaggaggaccctgccaggttgtagcttgtgtgtctttgggaatgttgtgcaacctcactgaaactcagtttttcttaccgttaaaaagggtgtcatgtgccrggtgtggtggctcaggcctgtaatcccagcattttgggaggccgaggcgggtggatcacgaggtcaggagttagagaccagcctgatcaacatggcgaaaccccgtctctactaaaaatacaaaaaaaat

SEQ ID NO: 846329 - DNA, 638 bp, Homo sapiens
tatgtcctgagaccatgactgcacccaggctgcccaagctaacctcgctacccagaaggtccctcaggaaagtgacctgttcgtgagaggaccctcaccccacccccaggccckgggagaatcactgtggaggaggagtctgaaggggtgagggaggtccccagagggactcctggagcagaccttcctctctcagtgcctggccccaggagcctgcccttgggacacctaggtcattttcctttaggagctctgcaagctttgcctgaaggccttatgacctgggctgccctgggagggatagtcctcctcaggccatctccacactcatccaatctcctctccgcaggccctggagcactgtgggggcgtcgacttcctggtgtgcagcgcaggggtcaaccctctggtagggagcactctggggaccagtgagcagatctgggacaaggtgagaggcctcccctggggaggcggctgagggcccgattccagctctgcactgggctccagcatgcctgtgcccaccaagactctgtttccctccagaggttatgggagaagcaggccctgggtggtagtcctgcctggccagctgtctcccaaaatgtgcccggatgctactttctggcttgttg

SEQ ID NO: 846330 - DNA, 604 bp, Homo sapiens
tctatcttagcctgttcatgttgctatcacaaaatactgcagactgggtaatttttttttttccccactcttgttgcccaggctggagtgcaatggcgcgatctcagctcaccacaacctccacctcccgggttcaagcgattctcctgccttagcctcgggaaagctgggattataggcatgcgccaccatgcccagataattttgtattttagtagagatggggtttctccatgttggtcaggctggtctcgaactcctgacctcaggtgatccacctgcctcggcctcccaaagtgctgggattacaggcatgagccactgtgcccggccgcagactgggtaatttataaagagcagacatttatttctgacagttctgaagcatgagaagtccaagatcaacgtgccagcattctgtgtctagtgagggctgctgtctgcctccaagatggcgccccattgctgtgccctyacatgctggaagagcagaaaagcatgaacccgctccctcaagcccttttataagggccctaatcccacccatcagggctctgcactcatgactttatcatctcttaaagatcccacctcttaatactat

SEQ ID NO: 846331 - DNA, 587 bp, Homo sapiens
gtgcttggctgggttctcatgagagtcaagttggagctggaggctatgagaggtaacacttggcctgtccttttgccactggtcgtgtgctgccaagtgrgagggctcgtgtggcatcaaaccatgccttatcttaaggctaacatcacatttcctcaacttggccagaggtgctgcagagagagacctgcacagtatttgcagaatttgttcaataattattgttaatcgttgatttcactgaagatcaatgtttgctttttgctcttataaacaaaacaggaatattcataacaatggattctagtaaggctcaagtaccatttgtgttgagtgtctgtatgccgtcatagtattagaagtttcatacacgctaacattcatcttcacaggaacgtcagaaggcaggtggtattaggtcacatagctaataggggacagattaggaattggctactgctcagtttgaatcccaaatcagtgctctctctcttgtgcctctaaagccccaggacccagacagggcagtataggtaacccttagcagactactctcaacagtgtttggcccttgacaaaatgccaca

SEQ ID NO: 846332 - DNA, 604 bp, Homo sapiens
tctggggcgctggcaggccggccgggaggcgcgccgggcgggaacgcgcagctctggcgggaagtgcgtggggtcggggggctcgggcggggtgcaggctgctgctgccaccggggaggcccrggggatgccctcactaagcggctccagagactgcgggccccgccctgccctgccactccctctcttgtgacctcggccagtggcagccttttctgagcctgtccccttctctgtaaacctggacgtgtttgatctacgctcgcgtcccggcaggaggcttccagcctgcacattcctgggggcccgccttccccaggcactagcttacccagggctgagctgctgaactctgaaaacctttggaaacctccctgccctctgccctagcgacctgcggctggagaccctgagctggcccagccctctagggtgcctaggagcctaggctgggttgggggtggcttcaggaaccttgggctgccgggtgtggggtgagagccttggcccagctatggccaggtgggaggttttcttcctctgtgctctgggtgctggggctggaggcggtggctctgctgggcttcagtgacagccaatgtgg

SEQ ID NO: 846333 - DNA, 553 bp, Homo sapiens
tgccatttttgtgagtttggagtgcattcttccatatctctttctaagctctgtgcctgggagggagccctgtgggttgggagctctggggtgcraatggtatctgaggactcatttccacatagagttggacaccatgattgctcaaggacaggcagtgaagtgggaaaacaaaatgctgcagctggtgcccagggcagggcaggtaaggagagcaggcaacgggagtagagggcaggaggggaaccgggattgccctctcatggactgtaggaggcccaaagtttctacactgtcacgtccctttgaggtcagggctgaagggccacagtgaccaacagagtacctgtggaactgttaggacaagagcaagggaacagcatccatcctgagtggaggagaatggtgaaaccccagggtgtagttcagttactacaactccaacctgcaatctgggtctcaaggggaggccagaaagactgggagggaccacccaccttcactctgcacagtatcctctctgtggagagggagggcacatggcagtccacca

SEQ ID NO: 846334 - DNA, 369 bp, Homo sapiens
aaaaggataaacccatttgggcaactgtttagggtagtgtctctgcactctattttgatgcatgggataacgaataatacaacatatactccaggcaaagctgagtcagtgcgtttgtgatcttatgtacaggcacttggttttaaattattgtagggcatttggtgggagagtaggagagggtgaaaatgatctactgtttcttacaaaatagggtgatatataatacggttcagaatttttctttatgacttatggtagttttgaatatctttrtagtaggtagagacaaattcagatttaatagataatatgccaaaagatggcattatgaaggttgtaatagttattcattgggctttttagtat

SEQ ID NO: 846335 - DNA, 678 bp, Homo sapiens
atctgttgttttctgactttttaatkatcaccattttaactggtgtgagatggtatcccatttggttttgatttgcatttctctaatgaccagtgatgatgagtttttttttcacattttcattagctgcataaatgtcttcttttgggaagtgtctgttcacatcctttgctcatttttgatggggttgtttttttcttgtaaatttgtttaagttctgtgtagattctggatattagccctttgtcagatggatggattgcaaaatttttctcccattctgtaggttgtctgttcactctgatgatagtttcttttgctgtgcaggagcgctttagtttaattagatcccatttgtcaaatttgggttttattgccattgcttttggtgttttagtcataaagtctttgcccatgcctatgtcctgaatggtattgcctaggttttcttctagggttttaatgcttttaggttttatgtttaagtctttaacccatcttgaattaatttttgtataaggtgtaaggaaggggggtccagtttcagttttctgcatatgactagccagttttcctagcactatttattaaataggggatcctttcccatttcttgtttttgtcaggtttgtcagatggttgtagatgtgtggtgttatttctgaggcctctgttctg

SEQ ID NO: 846336 - DNA, 684 bp, Homo sapiens
tcaaaagatgtcaaagaaatacattttaggataaaatattttgatttctttcaaggggatgcagaaaacatgaactaacttaggtaactttgggaaacagcattttgactggatgctataaggctaaaatggaaagaaggtgtgtccggaataggttccttccggtgggttcttggtcttgttgactttaagaatgaagccacggaccctcgcggtgttacagttcttaaagatggtgtgtctggagtttgttccttcagatgctcagatgtgtccagagtttcttccttctggtgggttcgtggtctcactgacttcaggagtgaagctgcagactttcacagtgaatgttacagctcataaaggtagtgtggacccaaagcgtaagcagcagcaagatttattgtgaggagcaaaagaacgaagccacaacgtggaaggggacccgagcatgttgccgctgctggctcgggtggccagcttttattcccttattcggccccacccacatcctgctgattggtccattttacagagtgctgattggtgtgtttacaatcctttagctagacacwgagtgctgattagtgcgattttacagaatgcttattggtgcatttacaatcctttagctagacacaaaagttctccaagtccccatctgacccagaagctcagctggct

SEQ ID NO: 846337 - DNA, 290 bp, Homo sapiens
gaaatcttcagaaaaaaagaaaaaaaaarcttccataataacaacgaacaagactctaaggagaataaatctcccagcattattggaaccagaaatattccttagtgtcccctgcctcgagcccatgtgttatgtataccagtgagacctacatggaaaagggagtaaaaatgggagtggacattgcttcagtattgttttcagcggtctattggccaacatagctgcttgtatgtgtgtctgggtttttttttttccccagagatttggatttccttgcagccagatct

SEQ ID NO: 846338 - DNA, 290 bp, Homo sapiens
gaaatcttcagaaaaaaagaaaaaaaaagcttccataataacaaygaacaagactctaaggagaataaatctcccagcattattggaaccagaaatattccttagtgtcccctgcctcgagcccatgtgttatgtataccagtgagacctacatggaaaagggagtaaaaatgggagtggacattgcttcagtattgttttcagcggtctattggccaacatagctgcttgtatgtgtgtctgggtttttttttttccccagagatttggatttccttgcagccagatct

SEQ ID NO: 846339 - DNA, 656 bp, Homo sapiens
acaaagaatcacaccagataatgttccctcacgaccacactcccgccccagctggcttgtttrgaacttttagcactgccaccctccccacccctggtccctgccctttcaaatatcccagcacgtctgaaggccacattttcacattaaagacctgagcccagaatggaggggaggaagagtggctcctccagtagccctgttttcagagcacctgcagggagaccttgggaggtggtggtttttctcctaaccagcaaataaatacgtaatgctatcaaaataggatcattaaattggattaggagtgagcgcagctgaatcattttccagaagtcctgttggaatgtgcttcccacggttggggttttggccactttgtgcctggcactggcacacttccttcatgagggagaccataaagctgagacatatcataggctatgggctctctccgttaatctcccttccccttctatctctagctgccaaacaggaagcccaaacgaagtgagatgagattgtggggacttttcttcctaccccagctaacttattcatctccaagaggctcagaaatgagcaagaaggtggcaggcagtctgcagaaacagcaagtggttcccagcttgtcaaaagtacaggaaggccaggtg

SEQ ID NO: 846340 - DNA, 566 bp, Homo sapiens
agcactgccaccctccccacccctggtccctgccctttcaaatatcccagcacgtctgaaggccacattttcacattaaagacctgagcccagaatggaggggaggaagagtggctcctccagtagccctgttttcagagcacctgcagggagaccttgggaggtggtggtttttctcctaaccagcaaataaatacgtaatgctatcaaaataggatcattaaattggattaggagtgagcgcagctgaatcattttccagaagtcctgttggaatgtgcttcccacggttggggttttggccactttgtgcctggcactggcacacttccttcatgagggagaccataaagctgagacatatcataggctatgggctctctccgttaatctcccttccccttctatctctagctgccaaacaggaagcccaaacgaagtgagatgagattgtggggacttttcttcctaccccagctaacttattcatctccaagaggctcagaaatgagcaagaaggtggcaggcrgtctgcagaaacagcaagtggttcccagcttgtcaaa

SEQ ID NO: 846341 - DNA, 615 bp, Homo sapiens
atggcacctccaattatcaggaacccgagcccccttcttttggttctaccattctcaacttgttgctatcatttcatggtcctagatggctgcccagcaacttccacatcatatgcattccagcaagaagaaatgaaaaatgcagggagaggggttatttatcctaacgttaagtcaggaccaggaagtggcccttggcacttccgtttatgtctgattggccagcacttaaatgcctgctgcgcctggttctgtgggatactggaacgttaggctttagctgggaggctatgcaagagttaaaattccattttccgggatacgaagagaatgctttttgcaggtacaatgagcaattgaacctcatgaactaataatgcatcacattttctttttaaagataataactcaaggtacacattaaaatttatttgtaaaaggtgttaaagtaaaaatcccccttaacattccactccatatccattttcctccacagacttaatcactgttaacattttgatgctttcttctttgtattttcatgtaataacatatcatatttactacgcacctattcaactgcyttttttaatcaaataaaaatgttattacata

SEQ ID NO: 846342 - DNA, 615 bp, Homo sapiens; identical to SEQ ID NO: 841233

SEQ ID NO: 846343 - DNA, 634 bp, Homo sapiens
cagtatctatcaagatgattatattactttacattttataatccttcattttttctaagtkttcaaatttattggtctaaagatgttggtaatatcttatccttttcatatctgtaaatggtattccaaaatttcttctgatactgtaatttttgtttttacttttttcttaattagtcttcttaggagtttatcaaatttattaatatttttgaagactccacgtttgctttgatttttttcctatggttttcctgttttctatttcatttatttctgctgttgaatcatttctttttgcctactcactctgggctacattgctcttctttacttttcttcttacagtttcaaattaggtcactgctttaaattttttctccttttctgatatagacatttacaaccataaaggtccctccaagcactattttcacagtatcccactatttttgatatgtgtgtttttgtgatcatttcatttgaaagagtttctaatttctcattgtgattacttctttgatttatagattatttagtggcatgttatttacaaataatatgaggtttttctaaatactttactgatagtgatttctaattaaatcctgttttgatcaaagaacatattgta

SEQ ID NO: 846344 - DNA, 604 bp, Homo sapiens
gattatagttttagctcttacatttaggactatgatccattttgagttaatgttttgtttatggtgagaggtcctggtctaactgcatttatttgcatatagatacccagctgttcgagaaccatttgytaaaaagactgttctgtccccattggattatagtatgcttgttgaaaatcagttaaccataaatgtaagggtttatttctgaactcttgatttaattccattaatatctatatctagccttgtaccagtaccacatgattgtaatgactgtaatgattgtaatggctttgcagaaatttggaaatcaggaaatgtacataccccgattttgttcttttttgccgggtctgtcctgcagaccctggctgatggacgaaatgagtactcagacacaggtatgcagtgtaagagcagttaggtgactgcctggctctagtggccagacagcagcccctagaagctggacctgcttgcttttattcagtgcaggcacaatgccaaaaacctggagccaacacaacctgtaggtaattaaaatttattgttcccctttcggtgaaggtcaggggcatggatgatcaaaggtcagttcctg

SEQ ID NO: 846345 - DNA, 618 bp, Homo sapiens
tgactacaaggggccaaaatacagctccagctgttgcttcagagggtggaagccccagtcctcagaagcttcatgcgggtgcaccgaagttaagaattggagtttgggaatctctgcctagatggcagatgatgtttggaaatgcctggatgttcaggcagaagtttgctgcaggggcagggctctcatggagaacctgttctagggcagtgtagaagggaaatgtaaggttggagaccccacacagagtccctactggggcacctcctagtggagctgtgagaagggggccactgtcctccagaccccacaatggtagatccactggcagcttgcgctctgcatctggaaaagacacagacactcaatgccagacagtgaaagcagctgagagggaggctataccctgcaaaactgcaggggcagagctacccaagaccgtgggaacccacctcttgcatcagcatgacctggatgtgagacacggtgtcaaaggaaatcattttggagctttaagrtttaatggccctgctggatgttggacttgcatggggcctgtagcccctttgttttgaccaatctcccatttggaatgggtgtatttacccaatgcctgca

SEQ ID NO: 846346 - DNA, 476 bp, Homo sapiens
tgtatgacctattgtgtctgacttcttccatttaacataaagttttcatggttcactcatgttgtatcatgtgtcagtacttcatgcctttttatgactgagtaatattccagtgtatgtatataccaaattttgtttttccattcatttgttgatggacatttgggttatttctaccttttgttttttgtgaatagtgctgctctgaacatttgcatacaagtattcggatgcttgacggcctgtttctacttctttgcacctaggagcagaatttctggtcatatgataattctgtgtttcaagtatgacgaacccccaaactgttttccacagtggctgcaccatgtttacatccccaccagcaatgtatgagggctttaattatgcacatcatcgccaatgcttgttttcagtttttaaaattatagccattttagtggatataaaayggcatctcattgtggtttttattt

SEQ ID NO: 846347 - DNA, 661 bp, Homo sapiens
gagttgtttggaggatgcatggctagacctaacctgggcggtgagtgtacagggcagttcatgcaaatgggagagaccctgtctgctgtctgggacctgcatcctattggcgggaagggcgttcctggcctgcccaccctggccatcaggacataaagattccttgcttgggtcttgctcaggtactgtgctttaagaacctgaatgttcttttgactcactattttatagagacagcagcagggtcagttgagaagaattgaaacccactctcagaagtgacttgcagcgcatacttttttgaaaaaaattgagaggtaattcacacaccgtaaaatttgccctgttcgagtatctaattcaagggtttttagcatattcccaaagttctgcaatcatctctgctgtctaattcctgaatagtctcatcactccaaaagatatattgaggccaggggcagtggctcacacgcctgtaagcccagcactttgggaggccgaggtgggtggatcacgaggtcaggagtttgagaccagcctggccaatatggcgaaaccccgtctactaaaaatacacacacacacgcacacacccacgaaagctgggartggtggtacacacctgtagtcccagctgctcaggaggctgaggcaggagaat

SEQ ID NO: 846348 - DNA, 594 bp, Homo sapiens
gctttgacttttgaaaattgttcaatttattttggagacattaaattctaaataaggcctggggatatatggaattaaccatgccccctagctatrtaaagaaggttataaagaaaagagattttatataagagaggatgttgtatggtaaattattgtcctaaagtaaaatgactggttgtttaaaaagagggatgtttaagcaagtcagaaagtctaaacatgtcgtacatggtctgtgtaagttgtgaaataatttattaaaaggaatttatgccagaaatgttgtataatttgaaggtgcttcataagctgccactatgacttttcactgtacagcttgctggctttacagctagctaaggcctgggacacatggagttcgatgctggaataagtcataccttatctgcatttctatctgggtcctaggctccacacctagtacataattaaaatcccttactcaccaaggtttttaccaaaagtaaaagttgctatgagttaacactgtaatatgtaattgagcctactgaaaaaaataggtttacatgcaaggtatgtaaggagaattaaatgtattttttgtaagag

SEQ ID NO: 846349 - DNA, 531 bp, Homo sapiens
aaatgcgggtagttttgttttttkttttttttttttttttccgtcttgaaactgttctgtgggaattatgagctgttctctagcccatcttggtattttaaaagcaaataataaatatatcacatagctagagatactttacagttgcaaagccctttccctcatgatctcatttgatatatttatattgacaagtagaaaatatgttgatgtttttactggcatacaaatattttcaccttaacagtctgccaggcaagttattctgagatagttgctttgcctgagcacttgcctaaaataaccatcgctatgagggccttccattcttgctgtgtgagtcattactatgaaggtaatggagcaaggctggaagtctgaatgcaggcccctagggtagaggggttcaggacagggttaagattaaggtcttagcagacaggaagaaaaaatgcaaataaacccagcactttaaacaaaagatgtcattttctcaaactcagttatgctatgccattttctttaaccact

SEQ ID NO: 846350 - DNA, 551 bp, Homo sapiens
attctccttgcctcagcctcccaagcagctgggattacaggaccgccaccatgcccagctaatttttttctatttttagtagakacagggtttcactgtgttggccaggctggtctcgaactcctggtcttgtgatctgcccgccttggcctcccaaagtgctaagattacaagcgtgagccactgcgcctggcctaaatatctattttcaatggcatcatggaggaatgtaagttcacattagtttccaagtgaaagaaaaaagtgaagcaagtggcatagctgaactcaaggagctattaaaaaataaatgtgtaacttagtatattcccatggttggtgttggtctttcactcggccaggatcagaagccatcattgcctttgcatttgtccacttagcatgtaactctgaaactatcagctccacagggccaggaccattctgtcttgtccatctctgggtcactagcccccagcacattgcccggcatagagtcagtgctcagtaaatagtagttgaatgaatgagactaggcaagtcacttagct

SEQ ID NO: 846351 - DNA, 646 bp, Homo sapiens
gtatttaaacaagctcttcaggtaattctgttgcagttgatttacacatcacgtttgagaaaaaaaaaatgacacaaaagcaaaggtgatagtagaagaccatggytcttgaatgcttagcgtcttgatgaccttgttccctccttagcaggttacaaaaggtctactctgtcaactgctcacccacttaacacaaatgaaccctcgcatttagtcaaagtgatggttaaaaatagtaccacaatgaagctttatcaaaaaatatgtggataaggaatcaacacttcaggtgggttcatgaggacgccattccaaacaactagaactctacccatggtggaaccccttcctcctcccttcggaagcagtcatcattgtctggatgtaaatccccagatgtaaccctgattgatctcattttctcttttctggcactcagtggatatgtggattatagcttgtctgtgatagctttctttccctagcatgaatgatctgtttctttaccataagttttttttcaaagccttacagatatgaaaatgacccacactccagtcttttctaaaaagtatggatggtgtcatcagacactttcccccccgcaaaaaaaaagagagaatatttgcttctttccaaataccat

SEQ ID NO: 846352 - DNA, 634 bp, Homo sapiens
caaagcttatctaccatgtatattctttcaccacgaacacatcacagccttcttgtgcttaggcaatctaracagttctgcagcagtgtagttgaggtctattttcaacagcaaaagcaccaaggaaaagtacaaaaatgaaaaaatatgacaccaaatagaccacaaaaaggacacttgtttacagtaaagcactgaaatgagaaggcagagtgtcgccttgttcaacctcagctggggccacatgtacaccaggcaactcatattttcccctgctttgtacatgtgcaagaatgactgcaaaagtgccatgggtattgattttgcagttacagataaattttagcaacagggcaaatttatatatacagaatccctgaataatgaagatcaattggccgggcacagtggctcatgcctgtaatctcagaactttgggaggctgaagcgggcagatcacctgaggtcaggagtttgagaccagcctggccaacacggtgaaaccctgtctctactaaaaatacaaaaactagctgggcgtggtagtgcatgcctgtaatcccagctactcgggaagctgaggcagaagaatcacttgaacttgggaggtggaggttgcagtgagctgagatca

SEQ ID NO: 846353 - DNA, 634 bp, Homo sapiens
caaagcttatctaccatgtatattctttcaccacgaacacatcacagccttcttgtgcttaggcaatctaaacagttctrcagcagtgtagttgaggtctattttcaacagcaaaagcaccaaggaaaagtacaaaaatgaaaaaatatgacaccaaatagaccacaaaaaggacacttgtttacagtaaagcactgaaatgagaaggcagagtgtcgccttgttcaacctcagctggggccacatgtacaccaggcaactcatattttcccctgctttgtacatgtgcaagaatgactgcaaaagtgccatgggtattgattttgcagttacagataaattttagcaacagggcaaatttatatatacagaatccctgaataatgaagatcaattggccgggcacagtggctcatgcctgtaatctcagaactttgggaggctgaagcgggcagatcacctgaggtcaggagtttgagaccagcctggccaacacggtgaaaccctgtctctactaaaaatacaaaaactagctgggcgtggtagtgcatgcctgtaatcccagctactcgggaagctgaggcagaagaatcacttgaacttgggaggtggaggttgcagtgagctgagatca

SEQ ID NO: 846354 - DNA, 634 bp, Homo sapiens
caaagcttatctaccatgtatattctttcaccacgaacacatcacagccttcttgtgcttaggcaatctaaacagttctgcagcagtgyagttgaggtctattttcaacagcaaaagcaccaaggaaaagtacaaaaatgaaaaaatatgacaccaaatagaccacaaaaaggacacttgtttacagtaaagcactgaaatgagaaggcagagtgtcgccttgttcaacctcagctggggccacatgtacaccaggcaactcatattttcccctgctttgtacatgtgcaagaatgactgcaaaagtgccatgggtattgattttgcagttacagataaattttagcaacagggcaaatttatatatacagaatccctgaataatgaagatcaattggccgggcacagtggctcatgcctgtaatctcagaactttgggaggctgaagcgggcagatcacctgaggtcaggagtttgagaccagcctggccaacacggtgaaaccctgtctctactaaaaatacaaaaactagctgggcgtggtagtgcatgcctgtaatcccagctactcgggaagctgaggcagaagaatcacttgaacttgggaggtggaggttgcagtgagctgagatca

SEQ ID NO: 846355 - DNA, 613 bp, Homo sapiens
ttagtgcaacaacatgaacaaatctcaaaagcattatgttcagcaaaagaagccaaatcaaaagcactacacactgtrtgattccatttaagtaaattcaagaacagaaaaaactaaacattagttatcttggggttagtgttgggaattaactggaaggtgggacagttctatatctgcattttaatgtaggtctcattgttgtacacatttataaatctcatcaaattgcaccatctgtttcattgtaacatttatgttaaaaacttataaagaagggatgtacattttttgtggaaatagttttcgtagtatggtgctggaggtaaaacagaagcaataactatggatagttcatggggccagcaggatggaaggaaataggcaggcagggagagagggaggaaaaaggacaaaacatggaaatataataagcctggaaactttgggtgaaagaaataagaattatttttctcctttgttttctgtctttccaagtcttccacatggagcattaattttatttgcgaagagggcaaagagtgtatttttaaaagtgtaaaatgacacaaaaaagtgtgacaatcagattttcatagaattcaactatata

SEQ ID NO: 846356 - DNA, 588 bp, Homo sapiens
ttgtgtgggtgagacttcaaagacatggcctggcacatgggggctcccttgtccatcccattggtgatgggacatcactgaacaactgcatcatcgtttccccctctgaactagcattggtgtccctagcratctcctatcaaggatcaggatagaatagcttcaacacagtgagacaagctcagcaagcattcagcatcctatggcaaagaattaagtttaattctgtgcaaggcaccaccacagcctttacgactggctcaagttcagttgggctgggctgtgcccattgcagcacagatgcagtgctttacctgcatgccctcccatcctgatgggctttcattcccagcagccagcacctgtgcctctctcatggtaggctactcccagtggtcaaaggcacaaagagaccccagaaggccctggggatttaactcctccaggggctttcttgaccaacaactgataggtataggggtgtaaatagtccagctctcttacctggctgtccccccgcccctccaacatgtacaacttagacagctctgatgcctctcctgagctccccaatgggactgagccaaa

SEQ ID NO: 846357 - DNA, 621 bp, Homo sapiens
atgtacacagcccagttccctatcaaaacccagaaatttctgttttggtcgtggtttaaattaagaaggggacaaktggccaggcgtggtggctcatgcctgtaatcccagcactgtgggaggccgaggtgggcagatcacgaggtcagtagttcgagaccagcctgacctacacggtgaaaccccgtctctactaaaaatacaaaaattagctgggcatggtggtgcgtgcctgtaatcccagctactcaggaggctgaagcaggagaatcgcttgaatctgggaggcggaggttgcaatgagccaagatcgcgccattgcactccagccagggcgacagagtgagactctgtctcgagaaaaaaaaaaaaaaaaaaaagaagctgacaatcttcagacaatactgaattaaaatttcaccagcacacaggtgcagctgcacagcaaaccagagagagcagcctggtgtgcagacctcctgcctgccaccacggatcgaaaggcagcaggggatggtggacatattttttatttacttacccgggagagatggggaagaatctgtatttttaaaactggtcatatatttaaaaaggactctgactcaaatgatgtagtca

SEQ ID NO: 846358 - DNA, 512 bp, Homo sapiens
aacaaaatgtaccacagatctacaataaaatagtattcagccttaaaaaggaaggatgggatccaaaatacwaaaaaataaaaataaaaggaaggaaattctgacacatactacaacatggatgaatcttaagttgagttaaataaaataggccagtcacagaaagacaaatactgtgtaatttcacttacatgagaaatagctaaagtagttaaattcacagaaaaactggaaagtagaatggtggttgctaggtgagtggataaatggagttgttgttgcatgggtcaagttttagttttccaagatgaaagttctggagatggtacagattggctgcacaacaacgtgaatatacttaatgctactatgctatacacttagaaatggttgacaacttttacttaagtatttttttaccagaaaaaagtcaacctggttgccaagcatggtggttcatgcctataatcccagcattttgggaggccaaggcaggagggttgctcaagccc

SEQ ID NO: 846359 - DNA, 512 bp, Homo sapiens
aacaaaatgtaccacagatctacaataaaatagtattcagccttaaaaaggaaggatgggatccaaaatactaaaaaataaaaataaaaggaaggaaattctgacacatactacaacatggatgaatcttawgttgagttaaataaaataggccagtcacagaaagacaaatactgtgtaatttcacttacatgagaaatagctaaagtagttaaattcacagaaaaactggaaagtagaatggtggttgctaggtgagtggataaatggagttgttgttgcatgggtcaagttttagttttccaagatgaaagttctggagatggtacagattggctgcacaacaacgtgaatatacttaatgctactatgctatacacttagaaatggttgacaacttttacttaagtatttttttaccagaaaaaagtcaacctggttgccaagcatggtggttcatgcctataatcccagcattttgggaggccaaggcaggagggttgctcaagccc

SEQ ID NO: 846360 - DNA, 623 bp, Homo sapiens
tgagtattttaagtccaatattgagacccacttctatttttggggggggggcggggggatggaatctcgttcggttgcccaggctggagtgcaatggtgcaatctcggctcactgcaacctccgcctcccaggttcaagcgattctcctgcctcagcctcccaagtagctgggattataggcttgtgccaccacgcccagctaatttttttgtatttttggtagagacggggtttcaccatgttcgccaggctggtcttgaacttctcacctcaaaagatccacccaccttggcctcccaaagtgcttggattataggcatgagccactgtgcccggccaagaaccacttctgagaaaaaaaaaaaaattcaaaataggcgctcattgacaatgcacctcataacccaagagaactgatggaaatgaacaggagattaatgtttttttatgcctactaagacaacatccattctgtagcccatggatcaaggagtaattttgacttttaagtcttatyatataggaaacacattttgtaagacagtagcttctataaataataatttctttgaaggatccgggcaaagtaaattaaaaactttctggaaaggatctattattc

SEQ ID NO: 846361 - DNA, 507 bp, Homo sapiens
agtgaaaaagcaaacaacgggctttatcagaagcaaattcctttctagtatcttcttaatgaccctgtctttgatgcagctattttcctgcagttttacatttytatggtagcaaccctactgctgaaaagccctttaaaaaacattctgatcctctgccatagaggcaacctgttattgagcaagtgattgctcttaggacaacatgatgttaccataagagggtcagatgttgagtgcaagccatactctgtcatgtagagagaattcaacatttcagaacaatagactaagaacttaggaaagagtatcattacaaattctgcaccgtgtttccctgtttgctttttagatatacatgtcatgattttctttgaccctgatcctccttgtcattctgggatgtgggtggacttatcaggtacttggctagaatatggataaggtatacaggtctcaagagatcaagacttatcaggtacttggccagaatatggatgaggtata

SEQ ID NO: 846362 - DNA, 564 bp, Homo sapiens
atcttggaaggggtacaaaagaagatgtgtgcagttcctttgtctccctgagatggggcatagcagttaaatgaggaagtatgagttcaggaggctgctaaccctagcagggttttgtccattccagaaaagtaattgtgggcatgaaccactgtcatggttaaggagacactgctgctatctctgaatggggcaacaataacagatgaggcctgggtgaatactggggaacactgcactaagaaaaacactcatacagccatttggggactctcatgaccatgagtgtcaccagcagcaaggaaaatgaactcaaatcagagcaagaccaggggctagtgcccatgaacagccttcaggtagttgtataaatacaccttgccactaatatttctcccccagaaccccaggagatctaaacgcagaaaatgaaatgggagaaggaggtcagagtagactccatctccccgtcactctagcagccatgattacgagtcaaatctattattgaaaatggacgtggggtagaaagggaagatctaygattaaaatcgagtttcagat

SEQ ID NO: 846363 - DNA, 578 bp, Homo sapiens
aaaaatgatcctgttggccccattcctctgcacaaattgttttgtgttttctctatatcttgccccaaagaggttcctcttcatttcatctgtggtacgaactgtcattagaactcatttaagctgtcacaacaccatcataatggttctacctacctctaacctttcctccttccactttacttcttatgattctgtcttttaaaacctctcagttcatgttcccaatttaatgaagttcaaacaccttggcaagacgccaagaaaaccttcacaaacatgcctaagcataggcttatttaatggcattcttttctatcccaattctatgactcatatatggatatatcatatgtatcatatgtatatattacctactatatattatatgtgtgtgtttcttacttcatctccctctatttcccatgcactttccagcctccccatttttgctcatgcagtttcttctgtctataatgctttccacatctgrtctacctagaacactcaagagttcaaatgtcatatcttccctggataccgcaccacccatcatgcccaacctgaatctccccaca

SEQ ID NO: 846364 - DNA, 567 bp, Homo sapiens
tttatttatttttgagacggagccttgctctgtagcccaggctggagtgcagtggtgcgatctcggctcactgcaacctctgccttccggttttgatgattstcctgtctcaccctccagagtagctgggattacatgtgtgtgcccccacgcccggctaatttgtttgtatttttagtacagactgggtttcgccatgttggccaggccggtctcgagctcctgacctccggtgatctaccttccttggcctcccaaagtgctgggattacaggcgtgaaccacgacacccgacctaaactttttgacttgtaataacgtttgacttaaaacacaaacacattgtgcagcagtatgaaaatattttttctttgtattctttctataagctttttctatttttaaatttttctttttctttattttttctttactttttaaacttttttgttataaactaaggcacaaccacacacattagcctaggcctgcacagggtcaggattgtcagtgccactgatgccacctcacatcctgtcctcctggaaggtctttagagacaatagg

SEQ ID NO: 846365 - DNA, 581 bp, Homo sapiens
atgttttcagcttttttttttttggaatcaatgtacagaaataactgacatgatcataagctgccaattggacaaytgagtcaagcaaacaacaaagctactcaagaaagacaatatgggctgggtgtggtggctcatgcctgtaatcccagcactttgggaggccaaggtggatggatcacctgaggtcagtagttcgagaccagtctggccaacatggtgaaaccctgtctctactaaaaatacaaaaaaattagccaggcatggtgacaggtgcctgtaatcccagctacttgggaggctaaggcatgagaatcacttgaacctgggaggtggagattgcagtgagccgagatcatgccactgcactccagtctgggggacagagtgaggctctgtctcaaaaaaaaagaattaaaaaaaaaagtgtgaatatataattatacaatgctcatttgtctttgtctttatccctgtgtgttgtctgaggttggtcagtctagtatgggtctagtatggtagtctgggctctgctgaactggccgtgtgcttcaggatgggcacgggtgggctggagtctc

SEQ ID NO: 846366 - DNA, 519 bp, Homo sapiens
gggctccacatgagacacagaaaggaaccccaaggaactccctgctcttgggcaccccctttatttactgttcttgaggaagctccaatcagacctgactggggtcggtgagtttatttttaccatctgtgtggacggtccagatgggcccagctccaggcctgaggaagagcctcccttacaatctatccatacgtctcatggtttccagttccaaaacatggatcttccgtcatgtaactccttccagcatgactgaccgacccgctccagcaccgcaagccatcagcatggactcagccatgacggtgtccctcccatgcccaggcctgctcgcccaccatcccttcgccacgcagcttcctaacccatcgagtcctgtttacattcccctcctgagcgaggctgtgttttctcaccattctctccagttggccctccctgggttccaactcagggagrccatcccctccctgcagggcaaggcatcttcacattgactcattgactgccttgtcc

SEQ ID NO: 846367 - DNA, 544 bp, Homo sapiens
gaggaaggtattgaggacaaaagagtgtacgggttgggcaccacagggtggataggcaaaacaatttggtcgataaggtgcagatcttgaactaacctgtaagactygtccagtttttgggcaggtaaaaggcagaacttgaattatgtaaacgaaaaataaaatgctaggcccccccaccgactgaatgaaccacttcttggccaataggatcccaaagaaacctgacaaactagttcaggctttgatgggaagtgggagaaaatcttcaaatctatacatgcaacaaaggactaatatccaaaatctgcaaagaactcaaacaaatcagaaaaaccaagcaaaacaaaaaaacaaacaaacaatcccatcaaaaattgggctaaggacatgaatagacaattcttaaaagaagatatgcaaatggctaacaagcatagggaaaaatgcttaacatcactaattatcagggaaattcaaatcaaaaccacaatgagataaccccctacttctgtaataatggccataataaaaaaatcaaaag

SEQ ID NO: 846368 - DNA, 608 bp, Homo sapiens
aatgagctgtgaggggcacctcttcaggtaggctggattgacccagtggcwgtggctgctgaggccggggtccatattctgtcccccgaggctctgaggttcgtggaggaggagagtgacgttctggaacccacagtccttcaagggcgcagaagccatggctcccctcgcccatcctctcttcccttcacttgacatttccaaatgtcagatgtgagacaaaatctgtgtcttccctacatttttgatcccatacatgttctgctgcgtggggtcaatctatatttttgtgtcgtgttattgcacatttcaaataagataatttccatggacaaaatcctaggcaatggggccctcgtgggctggtgccgcacctgctggtggctcctgccccacagccctgggtcccctcagctgacagggaggttgtcctcatggtactgggttcccaggagcactcccagctgcctgtacggagtacaggacctctccgcttctctgccccaacgtggcctcctgaaccacagatggcacagcccacctgcaggaggcgggagttccagttcccaggtgaagccagggaggacaggtgggtgcccaggccctcc

SEQ ID NO: 846369 - DNA, 608 bp, Homo sapiens
aatgagctgtgaggggcacctcttcaggtaggctggattgacccagtggcagtggctgctgaggccggggtccatattctgtcccccgagkctctgaggttcgtggaggaggagagtgacgttctggaacccacagtccttcaagggcgcagaagccatggctcccctcgcccatcctctcttcccttcacttgacatttccaaatgtcagatgtgagacaaaatctgtgtcttccctacatttttgatcccatacatgttctgctgcgtggggtcaatctatatttttgtgtcgtgttattgcacatttcaaataagataatttccatggacaaaatcctaggcaatggggccctcgtgggctggtgccgcacctgctggtggctcctgccccacagccctgggtcccctcagctgacagggaggttgtcctcatggtactgggttcccaggagcactcccagctgcctgtacggagtacaggacctctccgcttctctgccccaacgtggcctcctgaaccacagatggcacagcccacctgcaggaggcgggagttccagttcccaggtgaagccagggaggacaggtgggtgcccaggccctcc

SEQ ID NO: 846370 - DNA, 629 bp, Homo sapiens
gttagagcttcctctagaagtgtcagggatgccaccataaygcaaactgtggttttgattatctcacaaattcatcccacatctaagacaggccaagtaagaggagatgccaggtttcctgtggaacacaagcatgatggtatggagagccttactgtttgtttttccccagatggaataaaattccctggagtttgaattctcagaagtaaggtgtcagattccaaccctttcatatcccccagggccacaattttagagacaaaatatgcttagcttctggggtagatgtgagatttagccacggttcagtgcgtttgaacacgcatgcctatacgtcgctgtggcctggcttcctctgaagaggatctcaccttagctcccagaggtgagttaactggacgtaaaacagacaggtgcaagaagacagtcattcatggcggcatgaaaatacattttgtctaacgtcacctttaagtcatgacagaatatgagaggaaatcagagggaccatgctgtcgtcctgggtgcaaaataaaagtcgagtttcgtgggtcctggccatttctaggaccagttatatttttgatgaagccacattggatgttaagtaaagtacgctctttgcc

SEQ ID NO: 846371 - DNA, 641 bp, Homo sapiens
aaatacattttgtctaacgtcacctttaagtcatgacagaatatgagaggaaatcagagggaccatgctgtcgtcctgggtgcaaaataaaagtcgagtttcgtgggtcctggccatttctaggaccagttatatttttgatgaagccacattggatgttaagtaaagtacgctctttgcctgtttctgggtaatggatctggagggattggaatacattttttgtattttttcaaaatattacaatgggcatgataatttttagcaagaatcagtgaagtaattaaaataaaaacattttatgctttatgcttttctagaaattgccattttgtttgtcaaccctgtgatttaataactcaatgcttgaatgctgctgcgtgataatgagggaaaaatgggaataggagacatgtttgccgttgggtgtggagtgcaaaaacacaattgtgatttggccaaagaacagctcactagcaaatatctacctccagggaaaaccgagttcacttgctctagcaaagctggcttcatggackgatgggaagattaagtggttaatttccataaagtctggaagagtgcctggcgtagcttaggcacatcaatcaatgtaagttatgcttgtggttattaaaata

SEQ ID NO: 846372 - DNA, 491 bp, Homo sapiens
agactctgtctcaaaaaaaaaaaaaaaaaacacaacacaaaaacctagtgtttcaaagtggttttctatgtgttatattttaaayatcaaatgggtttaattcttctgttatcttgatttgctttgtgaaattcatgtaggaaacatatataaatgcttagttggtccccacataaatatatgccacattaggaagtattcatcctcattagcaagagctgcctgtataaattcaacaaaaagggaaagccagcagatctccatgacatttaagatggaatagatttcttttttattttattgtatcaaactcactgttgctgtcaatatcctactttactttgaaacagcagcattattttgaaaatagcacacattctgcttgagtcttcaagctagaatgtggtggagccaaggacatgaaatgagaacagctctgttcttgtttgccagaacatttacaatttttactattattccttttcctggtt

SEQ ID NO: 846373 - DNA, 629 bp, Homo sapiens
tttccacactcctaaatacaaatgaataattaagaatagtsaagcattggcgaaaagtctttaatagaataaaagaatatgaaacacacattgaaaaaaggaacttggaagaaacagaaataatgtagggaggagaagaagccataaaatccctataattaacattttcagagagatgcatagatacatcatgtccatgaaacatggatgctagaaataaaaagaaacattctaagaataagaatgaattctgtctgtgtcagggtggtgcatggtccacattgagaaacagagatgctcaggctgtgccctcaagatgaccaagtgggagacagaagcaccagtggtggcagaaacccctgacatcaagttctttgggaagtggagcactgatgatgcacagatcagtgacatttcccttcaggattacattgcagtgaaggagaagtataccaagtacctgcctcacagcatagggctgtatgccgccaattacatccacaaagtgtgatgtcccatcatggagcatttcactaactcaatgatgatgcatggccacaacagcaagtagctcatgactctgccttgtcaagcatgccttcaagatcatccacctgcttacaggcaag

SEQ ID NO: 846374 - DNA, 629 bp, Homo sapiens
tttccacactcctaaatacaaatgaataattaagaatagtgaagcattggsgaaaagtctttaatagaataaaagaatatgaaacacacattgaaaaaaggaacttggaagaaacagaaataatgtagggaggagaagaagccataaaatccctataattaacattttcagagagatgcatagatacatcatgtccatgaaacatggatgctagaaataaaaagaaacattctaagaataagaatgaattctgtctgtgtcagggtggtgcatggtccacattgagaaacagagatgctcaggctgtgccctcaagatgaccaagtgggagacagaagcaccagtggtggcagaaacccctgacatcaagttctttgggaagtggagcactgatgatgcacagatcagtgacatttcccttcaggattacattgcagtgaaggagaagtataccaagtacctgcctcacagcatagggctgtatgccgccaattacatccacaaagtgtgatgtcccatcatggagcatttcactaactcaatgatgatgcatggccacaacagcaagtagctcatgactctgccttgtcaagcatgccttcaagatcatccacctgcttacaggcaag

SEQ ID NO: 846375 - DNA, 549 bp, Homo sapiens
cctatcaaaagaatggaaaccctcaacttgctgctttgcagattcaggttttgtgcttcattctggcctctcgggktggggccgggttagcagcaaggctgagctgcccctctttcttctgaagccttcatgggggcgaggagcacagggagagctcagtgcagggcctcccagtggccttctcagagtgggtggaaacccagcctggcactggcagcgtggcaccagaagtatgaagtgtaggtgtaaaggtgatgtaaaaggctagtaggttttttggtttttcattgtttgagttttgggcatagatgactgtgaagggcgaacactgccgatggatctgaatttgtagtatgtgcaccacttccaacttacgggatacccagctttgacggctttggacaaacacactgaggccaagatgtgctgagcttatcaggatcaggatcaccaagcagctgtaaaaaccctagcaagtgccttaagctgctgaaatttcatattaattgtctggtttgttcatggtcctagagtttgaggcagaaaagt

SEQ ID NO: 846376 - DNA, 549 bp, Homo sapiens
cctatcaaaagaatggaaaccctcaacttgctgctttgcagattcaggttttgtgcttcattctggcctctcggggtggggccgggtkagcagcaaggctgagctgcccctctttcttctgaagccttcatgggggcgaggagcacagggagagctcagtgcagggcctcccagtggccttctcagagtgggtggaaacccagcctggcactggcagcgtggcaccagaagtatgaagtgtaggtgtaaaggtgatgtaaaaggctagtaggttttttggtttttcattgtttgagttttgggcatagatgactgtgaagggcgaacactgccgatggatctgaatttgtagtatgtgcaccacttccaacttacgggatacccagctttgacggctttggacaaacacactgaggccaagatgtgctgagcttatcaggatcaggatcaccaagcagctgtaaaaaccctagcaagtgccttaagctgctgaaatttcatattaattgtctggtttgttcatggtcctagagtttgaggcagaaaagt

SEQ ID NO: 846377 - DNA, 513 bp, Homo sapiens
ccattagggcaggaatctctgaagtggaaaggaggtggggtaaatatgtgtgaatgaaactggatcaaacttctgaatataacgattgatgtggccaagaaacaccatccaggcggggagtaccaaacagttgcctgaaagggtaagattgccaagtttggaaaacaacaacaacaacaaccaccaagaggccaatttctcttcgcctaccttagcattaaagccttttaagaaagactttcctagttttctccaaacaaacaacaaatcatctatccaacaaaggtggacttttagtaaaattgactcttcgcagaagtaggggcaggctctggccaggtgcactccgctgatggagctacttctccttggcttctcagtggagccgcccgggacagtgctgctgcccccctcagagatgccagcccctgagttcttggtaktgatggacgctgtctgctttgctgactgacaacaaactgcggcacatagtaggcacttagttaacatttc

SEQ ID NO: 846378 - DNA, 569 bp, Homo sapiens
gatcacttcctgactcctgaaagtgtcactgaattccaagcatctgtggttcagatcattttttacacccacctgagaagctgttcttcttttaccccacctaaaatcatcaagctttcttcaaacacttcctaatgtcccaggccaagactgatgactctttcctctatgttttctctgcacttctataatagcacctgtttgattgtttccttgtttgtatctagttgctactctaaatgtaagcttctttacaaaaagagctaagtcatagttatttgtaactcccacataaccatcagcagttccagagtatcaaaagagatcatttttgtttgactcttagttaggcaactgtatatctgttttaacatcttctctggctcagaaatatactctggactcttaaagattcatttcttctgattttaacaggtctcttttccacattttatagagtcactttcttaggattctgtctggatyggacagtcctattatatttaattctaaacttgcaatttcttctgcaaaaatagtcttgtagaagaacatattaaaagcgtgtg

SEQ ID NO: 846379 - DNA, 547 bp, Homo sapiens
aatcctcttatgtatcttcacaagaaccagtttgaaagtcttaaacaacttcagtctctgtaagtgaaatattacaattatattgattataattttagtggatgtacttagagacacatttatttttaaatgggtattttgcacacaggagcatgcatttcagacaactgtctgaatcacagatcccatcaagtacatactgaatgacaaataagcctcattatttaccattcgacatgtatgaagtccatttctgtacttgaagaaggtttcaggaatgtccttcttgaaaactgggttcatgtggcaaaatctcatcctacagttttcacaaagaattaaatttgcaatagttttgtttctaaaagtttggttaaaacaaattatgtaagacttgcctgcttttcccctttgccstttcctacaaggatctacttgatattagtgtacagtgcattgttttacttttaaataagtttttaaaaaactgtcccacaaatatgcacattcagaaaattaatgtacagtatttttacatttcaaccat

SEQ ID NO: 846380 - DNA, 619 bp, Homo sapiens
aggttctgtgaatatgcaaagttgaatcagaagctgttcctccccataaagctcacagtctaatcctagaaacttagaatagaaactggccattcatgaggttaagtgctatgaggtaaggcatgtgctttgtgcatagagttggaggtgaggttagggaagtagtctagtgggatgatgcttgacttgggttttgaagaatgaataataatttcctcaacgcatgggatacggtagctgaattgtagggaatacgtactgatctattgatttttttttttttttttttcttaaccccaggtaacggtctgatggtaagttctgattttctcaatagttattatttgtacaattttaactggcagctccttatatctggaaatacagaggcatgtggatatagcaagaaagcccattggcatcatattaaatgagtgcatttagacctgggcttcacatatgattatccagtgagtgaaaattttacagaaatggctttctcaacacatagcttgtcattgttttcatcattattggaaaatttgacataatttgtaatctgagaaagaaaaccaaaatttagcttgataatcagcrtcaagctgcaataattgtctaa

SEQ ID NO: 846381 - DNA, 480 bp, Homo sapiens
ccttcgggaacagtccatgctgctagaaattattttcctttattatgcatactttgagatggcacccagtgacttacttgtattaaccaagatgtttaaagagcaaggatttggtagtaggcagaccaataggcacctggtggatgagactatggatccttttgtagatcggattgggtaagtcagtgaattgaacatcatggaacttgcagtgtttagagcattgatactatagtggtatgtaagcaggtagggggtaggtgtacttttcacttaatcggtggggaaataggtctactgccacgttccctttcatgcagggagtaaagactgggattgagagaggactctcaaaatgagtattgtaatctgctctttyacttactgtcttcatttaaggggttcattcattcattgaacaaaaattcgttgaacaactattgtaggccaagcactatgcaaatgctaacaagatagtga

SEQ ID NO: 846382 - DNA, 480 bp, Homo sapiens
ccttcgggaacagtccatgctgctagaaattattttcctttattatgcatactttgagatggcacccagtgacttacttgtattaaccaagatgtttaaagagcaaggatttggtagtaggcagaccaataggcacctggtggatgagactatggatccttttgtagatcggattgggtaagtcagtgaattgaacatcatggaacttgcagtgtttagagcattgatactatagtggtatgtaagcaggtagggggtaggtgtacttttcacttaatcggtggggaaataggtctactgccacgttccctttcatgcagggagtaaagactgggattgagagaggactctcaaaatgagtattgtaatctgctcttttactyactgtcttcatttaaggggttcattcattcattgaacaaaaattcgttgaacaactattgtaggccaagcactatgcaaatgctaacaagatagtga

SEQ ID NO: 846383 - DNA, 473 bp, Homo sapiens
gccatgcaaggtgaagttggacaagacatggctcctgtccccaaggggctggtsgtctcctgtcagccctagcacccgcctgagaggagatttcacgggacagaatttggactttggaaataggcaaaccagggtttgaatcacagctggagctctctaggctgagtgagttttccttgttctccttttgagcaaaatagagtaaataataccatcctaatcagctgtgatgaggattagagaatttagcatggggttgggggagagggtcaggcacaggtaggtgctttctgagttcagcaaagggcctgggtggacacagaagcttcagagaggaggtacaggtggggctaggccctgctagggattttggattggagggtatgccaggcaggggaaacagcttgagtgaagatgggcaacatttattcaaaagcaaagggtggctgggcacagtggttcacacctgtaat

SEQ ID NO: 846384 - DNA, 632 bp, Homo sapiens
ataataatgccaattgaagttattcagttgtaacaattgtactgttttggtgggatgctatttatgtgtggaggcagaggatatatgggaaatctttgtacttttctgctcagttttgctatgaacctaaaactgctctacaaaacaaagcctatttaaaaggaagaaaactcagccagcaggccctactcgttgtcactggttggcttatcttggtggccattcaggtgctatatcaattcccattaccacatgcagactgtttactgtaggctggatatggttttctttttccccacacaaactttgatgattttggcaataattcccttctgattttattcttgactttgttgtaatatttgtggttcctgctttctcttttctcccttggtcttcctgatcttgtaactaaattaggaaaattatgaagcttcagatttccttcccatttgtttacaaagaatatatgaatgcgataggattatgccgaacctggggaagagttgtattaytcagaatgattcactgactcctttgtcattccagtgcaccaccagcactgcatgcatgtgtgtctatggactgctctctttcgttctgacctcgttggagctgcacaccctgggcaa

SEQ ID NO: 846385 - DNA, 563 bp, Homo sapiens
cccagagttgaaatcattttgaatacagaattctgtaaccttcttttctttgcttaacattataacataatgacttaaccttattatgaaagtcttgataaacatactttcaagttgctgcataatacttgyatcaagttggtagatcataattcatttaccattcctctaatgtttgatatacttaagctgactgtaattatttaataatttaaatgatgttgtggtgaagttttctttgttgttttttgagacagggtcctgttctgtcacccaggctggagtgcagtgatgcaatcatggctcactgcaggcttgatatcctgagcttaagcgatctttccaccacagcctcctgagtagctggaactactaatacaagcatatgccaccaagcctgacttttttttttttttttttttgagatggagtctcgctttgtcacccaggctggagtacagttgcgcgatctcgactcactgcaacctccacttccgggttcaagcgaatctcctgcctcagcctcccgagtagctgggattacaggcatgcaccaccacacc

SEQ ID NO: 846386 - DNA, 398 bp, Homo sapiens
atgggtcttatcctaccctctcttctgcttagggtgttgctaggaatgatggggatggttataagcacaattagtcttgatgggtgttacatacaagtagggggctctgaagcaaggttgggggccagttctcacccttggcatacctgcttctgttcttcaatccctattacatgtgagtacaggaaacagtgtccatcttccagctcacaccctttgtatctgcctgtctcagacccagagatgcaagtgcaacactcactggctttgccttctagaacccatgggtaatcttgcaaaactgagctgatcttaatgtgcgagcatmctgtgacttctttgcttccaaccttgttctttcctgggtccccagctcgatgggaggagattgagcactg

SEQ ID NO: 846387 - DNA, 605 bp, Homo sapiens
ctaaacctgagggttccttttagaccctgaacttggcagcaaatgggttcttacagggaatgtttggaggagattcccttgcattccaaagacaggttcctccaagtaaagtctcttgggaaaagtaagtagattaatgccatccttacctcagtcccaaatattttcatctctgagttaaaatcaagttattgcctcatgcctcttgtgctctgttggcactgagtgaggaagaagtggtggagaaagacagaaaacacaactctggtggggaatccacagggttattccttagtggggagaaaaacataaaaattaacaagttgaactgcgagatctgtcttactgagaggtaagcattggaggtagaatgaagggttagcagtataaatcagggaaatcttaaatggccaggaacatctggagaaatgcctggagttctccatatcacttcacttgagaggactccttgtaaactgttaactcatgtaatctmatgtaagatgaattgcatatgccctggtgattctaattgcatatcttggttgcttactttgggccaggtcagtgtgaggcactttacatgggcactgttttgacttgtt

SEQ ID NO: 846388 - DNA, 475 bp, Homo sapiens
tcatccctcactagacttttaattccaggagagtagagaccatgttagttttgtttaccacttttttctcagtatccagtacagtgcctggtacacaataagcrtgtaattaatatttagtaaatgaatgaattcatgaattattaaataatttccttagagtatcaaagagtccccatataccagcttgtcagctaaagtagaaaagctccaatattgtcttcatccagttttcttttgctgtttctagtaattctagagaactttattccagttcttattctggatttataatttagcattttcattaggtctaggagtccactctaataagcagaaccgtagcaacctattttcttatcaggttcccagattcactgcgcaaccatgggctttataaagtattcttgaggctctcctagtcagtcagtgccattgaaggctattctcagacaaccccacatccttgcacagt

SEQ ID NO: 846389 - DNA, 615 bp, Homo sapiens
tcctttcaggttcttgtgtgtgcaaaggcctttcctgcctctcagcctttgcacatgttgttccatagggctgtgcctagagtactccataaatttgtttgtcctccgatctaatataagctctatccccttagaaaaacctccccccgaacaccaaggcctgccttgttattctctatacaaacacaccttgtttgtttcttttattacacacttaatattttataacatacttacgtttaatattttctttatggtttactgtgtcatccctcactagacttttaattccaggagagtagagaccatgttagttttgtttaccacttttttctcagtatccagtacagtgcctggtacacaataagcatgtaattaatatttagtaaatgaatgaattcatgaattattaaataatttccttagagtatcaaagagtccccatataccagcttgtcagctaaagtagaaaagctccaatattgtcttcatccagttttcttttgctgtttctagtaattctagagaactttattccagttcttattctggatttataatttagcattttcattasgtctaggagtccactctaataagcagaaccgtagcaac

SEQ ID NO: 846390 - DNA, 543 bp, Homo sapiens
atgatatttaagatgagattttggacttgagagttgatgtctgaaagacgtttggggttgttgggatggaatattttcattgggtgaaggacatgtattctggtggggagagagtgaagtattatgagctgaactctgtcccccacttccaaattcatatgctgaaatcctaacccccaggatgtggttttaaagtcagaatgtgactttacttggagataagtatttacaaatgaggtcatcagggtgggccctaatcaaatacaactggtattcttatacaaaggggaaatttggagactggactgaacatcagttagaaggcactggctctgccatcacctgttctggagggtcacttaagattttggggcctcagttacttttggtgaaaggaaagggtcggtttcgatgatttccaatctctctttcagcagtaagattctgcaataatgtgatttttatcttraagttgtagctaacataagttacccaagtagacagagttgagctattaaaaaccattatggaaaaaggagggtg

SEQ ID NO: 846391 - DNA, 589 bp, Homo sapiens
ttttgtcaaagaactcatgaaagaagtgaacttcaagaagaaaattatgctcaaacgtgatagttacaaatacaccaaagataaaaattttaaaaataataattactttggaacacaataagaaatcattattagtaaacatctggttaatagattctgaatcgtagccacctatttagttacaacttaagtgaataatcaatagatactagatgtctgaaagccacatctggtgtgaatctaatgtaatagagataattgaaatttagcattccttttcttcgtataacatctgatggcagactgcctttacatgttttagatgtgtgtagaacatatttgttaggaacacattttacttaaaattacattgtttcaaaaacctaagtttgagaacaaatctcctacatgttctataaaagcaaatagttgggggacaaccagtgtgcctatttaggaccagattatttatggagcggtcccttggtttagttcacaactaaacacgaaaggggataraatggacaatggggttggtgcaagaagtcaaagctatgactattcctgtgactgagtgaaaatcactaca

SEQ ID NO: 846392 - DNA, 621 bp, Homo sapiens
cctgcagtccttggtccttttttccattgcttgggtttccccaggaagcctgtggttctcagaggggagtgaggaagcatcctgataatagtgattagttttcctctgcctggtctgtgttttccccagcaaactcccagatatctcaaagacagctccaatatggcttttgcaaatacttctcaatccttctagaatatttattcctgtgtgtccaaaaagcctgtactttttacagcactaatcaaataatactataattattttgtctaatgatttgtcacctgtatattggattattgactccttgaggacagtatacgcacacatgtggagatatatatatatatatatatatatatatatatccacacatgtgtttcatctttttctcccccaagataatgaatgtttgacgaatgagccccactttcatgcacattgctgttcctcctcttcagatgtggaaatcttggtttgctgcacaaatttcaggctcctacaggtgatcaccatgtgttctgctttctctgagttcttttcttctcattkctcagccccaaattgaatatccaggcagaatttttttaaagcaatgatacattgattttcatctgcttc

SEQ ID NO: 846393 - DNA, 589 bp, Homo sapiens
acagttctacatccacatatcttccaagttccttctgaggtttcatggggtcactttaccctgtgtctctgcacccccaaggacttgtgactgcctagaaagaactttctccttactccaggtggcccttaaaaaaatcatttgctggagtcacagtgccaaaagccctcttgggtgttcagagaaattgtggctaaaggaaagagttcttgctgccagattgttaaaaatgactcaagaaaaaaggtataggaggtttaggaggagggtacctgaagccagctaaagttggtgaatccagaagaaacaatcactcaaactcaagaaaggcaggccagagcataaaaataggagaaataaagataccagaacagtcttgggtctgccagtgccaggaaagctagttccaaggtgaaatctgccttcaggctctccaaatatttattgagcacagtgtttgatggctttggaaatttaaaaasaaattatctctcatcccaaagagtcagaaacatggcataggcatacatgtaggataaatttctttctcctagagcacaatcagcttaataaactatgtgtctataaa

SEQ ID NO: 846394 - DNA, 656 bp, Homo sapiens
ttttgaacggagccagtttgccatgtttttctacccagcactctgcaattccactgttggctccctggcatctcctcaagttatttccttctcctggtgcaytgatccatcttaactcttttgtgaagcttacctgtcaagaagccaccccttcccaggctgaagggaactctcccctctgataattcagaacatacattaagccacactcatcactggatacagtttttaaacagccttgggatgtctcctgagtcactgcatgattatctcatttttcccaaccaaagtgtagattccccaaggggagcaactgtgtctttaacctttttgtatttctcacaatcagagagtgggtgtcaaattgtggaagtggggtgatgagtctttgttttcaacgagaactgcagaattgcactgaaaaagcaataagatcgttcgctggtcaccagtatgtctggttctcctccttctgggaatatgaggaattgcatttcccaggcccctggaaattaggtgtaaccatgtcattcattttccaaatgaaatgtgagcagaaatggcataatcactttccagaaagctttgttagtgaataatataccctttttgtcccccttccatggtgactgcagctagatgtcaaggttccagga

SEQ ID NO: 846395 - DNA, 518 bp, Homo sapiens
ccactgcactctagcctgggcgagrgaagtaagttttaattaagcagtttcaagtaaactgcaataactctgaattatattgaacgttcaaaacacttttaaggtagaaatagactaactcttttaatttttagccaggaaaccaatttgatgatttcataaatttcttaatttaaaccaaaacataaacacaagagactttagtaaattggtagttttcaattctattcaaatgaattaaaacaatttactaaaagccacctgaatgcctactaaatacaagctactatacttgtgcattagtcatgtaagaactgaagagtacagggaatatgaaaaagaacacacatctatgttgaaatacctgacagtgacaaactgctaactttaggatcttaaaatgtttattaagatagctacttcaatcacattgcaaatatgtaaacaaggttttaacattcttacatgcactttattctcgtagaaaattttttagatgaaacgacatctatagatga

SEQ ID NO: 846396 - DNA, 518 bp, Homo sapiens
ccactgcactctagcctgggcgagagaagtaagttttaattaagcagtttcaagtaaactgyaataactctgaattatattgaacgttcaaaacacttttaaggtagaaatagactaactcttttaatttttagccaggaaaccaatttgatgatttcataaatttcttaatttaaaccaaaacataaacacaagagactttagtaaattggtagttttcaattctattcaaatgaattaaaacaatttactaaaagccacctgaatgcctactaaatacaagctactatacttgtgcattagtcatgtaagaactgaagagtacagggaatatgaaaaagaacacacatctatgttgaaatacctgacagtgacaaactgctaactttaggatcttaaaatgtttattaagatagctacttcaatcacattgcaaatatgtaaacaaggttttaacattcttacatgcactttattctcgtagaaaattttttagatgaaacgacatctatagatga

SEQ ID NO: 846397 - DNA, 643 bp, Homo sapiens
aatatctgttaaaccacgtattcagtaaaagactagtatccagcacatacaatgaactctcaraactcagcagtaagagccaggtgcagtggcataacacctgtattcccagctactcaggaggctgaggcaaaaacaactcttgagcccgggagttggaggctgcagtatgctatgatgttgcctatggacagtcactgcactctagcctgggcaacatagtgagacccctggctcttacacacacacacacacacacacacacacacacacacacacacacacacacagacacacacacttaatagtaagaaaaaacaaaacagtctaatttaaaaagatgtgaagagtcatttcattgaaaggaggacatacagatattaaataagcacatgaaaagatgttcagcatcgttagctattagggaaatagagattaaagccacaactacacatctatcagaacagctaaaataaacagtagtgacaacaccaaatgctggcgaagatgtggagaaactgatcactcatgttagtggtggaaatgtaaaatggtacagtcactccggaaaacagtttgtcagttttttgtctaaacatgcaacctctgtataacccagtgcttacaatcctggacattgatc

SEQ ID NO: 846398 - DNA, 630 bp, Homo sapiens
aatctgcatgattttacacatatgtgaaatctgcatgattttacacatatgtgaaatctgcatgattttacacatatgtgaaatctgcatgattttacacatatgtgaaatctgcatgattttacacatatgtgaaatctgcatgattttacacatatgtgaaatctgcatgattttacacatatgtgaaatctgcatgattttacacatatgtgaaatctgcatgattttacacatatgtgaaatctgcatgattttacacatatgtgaaatctgcatgattttacacatatgtgaaatctgcatgattttacacatatgtgaaatctgcatgattttacacatatgtgaaatctgcatgattttacacatatgtgaaatctgcatgattttacacatawgtgaaatctgcatgattttacacatatgtgaaatctgcatgattttacacatatgtaaaaatataattttatactactagatattataggacacatatatagatataattttaaaatactagatattatagtacatatatgtaaaaatataattttacaatactagatatagaaccaaatggtaccttagagatgaacacagtcctggaagtttagtaacttgctggtt

SEQ ID NO: 846399 - DNA, 504 bp, Homo sapiens
agccacggggtgtccagggatgcyggcaaccatcagaagccgagagagacatgggacagattttccctcagaggctcccatagggaaccagccctgaggacacttactgtgagataacacatttctgtttttttgaggcacccagtttatggtaatttgttagagcagctctatgaaactaatacacatactcaatgacccaacaattctactcctaggtatagacccaacataaaccatttcatgtgtacaagtgactgcataaggaagttcacaggatttcagttcacaacagcaaaaacctgcaaagaacctaaaagcctaactataaaagacagaataaataaattgtagtaaatccacgcaatggaatgttattcagcagtcaacatgaatgaactatagcaatgagggggtctatctgcagaccctgacccaaacgatggatgaatgaagtacactgacacacagatattctgctatgccagtccagctgagtgtctg

SEQ ID NO: 846400 - DNA, 585 bp, Homo sapiens
agggatgctggcaaccatcagaagccgagagagacatgggacagattttccctcagaggctcccatagggaaccagccctgaggacacttactgtgagataacacatttctgtttttttgargcacccagtttatggtaatttgttagagcagctctatgaaactaatacacatactcaatgacccaacaattctactcctaggtatagacccaacataaaccatttcatgtgtacaagtgactgcataaggaagttcacaggatttcagttcacaacagcaaaaacctgcaaagaacctaaaagcctaactataaaagacagaataaataaattgtagtaaatccacgcaatggaatgttattcagcagtcaacatgaatgaactatagcaatgagggggtctatctgcagaccctgacccaaacgatggatgaatgaagtacactgacacacagatattctgctatgccagtccagctgagtgtctgggccacttacagactccaagcagagtgctgtaaacagtcacgaccatggccctgaccaactagtgagactcgcatttatttagtaaagatgaattg

SEQ ID NO: 846401 - DNA, 609 bp, Homo sapiens
gtgcttgtacgtgtgtgtgcacacatgcmtatatgtgagcacctgtgtgtataagcgtgtgtatgtttggcagtgtgacatgcggtgagggaggacgatttcgagggaggagagttgaggcctaattcccaacggttatttgctcttcagtctgagacaagtccctgagcctgaggatttgtttttcatctataaaaatgtgatggtaagaaacactacattggctaccctgcagagattattaaagccctgcctaaatggcaatgtaccgtgaatacgctaaccattattaactttgtgcttcttttttctcttttgccacagctacctctgatcgttagactgcgtgttagaaccaaatgcccagagctagggttgtaagccactaaaaatagacttgtgggctccctggcaagggtgggctggctgtaaccctcacatgggattgaggttgctatgcagctttgtcaggggctaggtagtttgtgttgtttccaccaagctgtccgccctgtctgcggcttctcttgttgttcaccaagctgatatattgattgctcatggcttcccaccttatcactgaaaagatgtgtgtttgtaaactgcatt

SEQ ID NO: 846402 - DNA, 621 bp, Homo sapiens
agagcgagactccgtctcaaaaaaaaaaaaaaaaamtgatgaatgactggatcatcgaagtggtcaggactaaaagacaccacacaggtacaatgagtgagcaagtcaatgacgctaaaggaggttgttctgtgtaggtctttatcaagtcggataatcttaagatattattgtctaacagtgaggtcagccggtatttatcttttaacagtatacacttttctttgcattcctctaaaactggccagactgcgttgcctaattattgctacaaaatacgtgaggcttttcgaatcttgtatttccacaggcatgattctgctgtatcaaaattatttttgacaactaaactctaattcatatttgatttttttctttccctctatcaaatctgtcacaaaattcagaatattttcccttcaaagacttttcatgtcagacttatggtttaaaatgacatctaaatggcagtctctgggtaggcaggttcccttgattccccattacaatacaagtctcaaaaatctatttggacacataaagagaatgagaggacaagccacagactgggagaaaatatttgcaaaacacatatctgataaaggactggtatccaaagta

SEQ ID NO: 846403 - DNA, 571 bp, Homo sapiens
gaaaaagttttaaattatcattgttgccaattagcacatgaaaagaagctcaawaccattaggtattagggaaatacaagtcaaaaccatagtaaggctccacttcccacacactatgatggctataatctaaaggacagacaatactcagagttggggaggatgtggagaacccagaaccctcacacaatgctggtgggaatgtaaaacggtgcagccgctgtggaaaaaaatatggcagttcctccaaaacttagacggaccacatgatccggtaattctacttccaggtatatatccaagagaatcaaagatgtgttcatacagaaacttgtacatgaacattcataacagcattactcaaatagtcaaaagtgaaaacaatccaaatgcctaccaatgaatgaatgaacaaaatgtgaaatatctatacagtgaaatactattcagccacaaaaaggaatgaaatgctgatacgtgccataacaaggataaaccttgaaaatactatgctagtgaaagaagccagacacaaaaagccacgtattgtatgattccactgacatgaaat

SEQ ID NO: 846404 - DNA, 583 bp, Homo sapiens
tgagcttccattttgtaacccacgatcctggtgaagacaatcgttagggaaaaaacatcttaaggattgtgtgttagggcaacctcatttctggcgtgaaaacaagccccgcaaacaccctgttgttactctggtgttctgactgcaaacacggggggatgtaagatttttacctaatcccaaacctcggccctgaagagttaatgatgttactcatgccactggggcacaaaagaaagacttgcatgttcgggtggttatggcttgcccagagcggtggaatgagccataaggctgaaggccaagggactcgggccacccatgcagtgaaataatcccccagaaatgcggtgccgggagtggaaatgaaagtaaagagaacagtcattccagggcattggctaaacctgactaaacctgactgatcatcaagcctaaagttctctcgactcccaaaactgcaaatctcagattttgggaggtactgcgtagaaaccaggaaatgacagaaatcaagcagttggaacmctgttcttgtccaactctgggtcttaagctctgttctcattttcagttccaaaag

SEQ ID NO: 846405 - DNA, 600 bp, Homo sapiens
gagaaccgcagaagtgaacctgacatttgggttcatttttccgctaggcgtgtttgctgattccagaagacccacctgtgaggacaaacattggaatctatttagggcctgtcaaaggcagaagctcctgggaaaccctctgtgcttaagtctgtctgtagctaatctttgaagggactgttgtctggctttgaattatcatagtccctgattgtctcagttttacaaatcagattaaggtgatcctggattataataaccccaggtgactgtcagaagcaaacaaattctctgcagatgacatcattttcagcttcaatttatttctacaattttaaaaatacaatgtgtggcactcacaaaaacaatattaataatacaatgttcagaaacaagacaagataacataaagaaaagtgaccagaaataagagacaatagaatatacttatagggatttcagatactgrcactatgaaacttaaacttaagccgggagcagtggctcacacctgtaatcccaacactttgggaggccaaggagggcagatcacttgaggtcaggaatttgagaccagcctggccaacatgctaaaaccct

SEQ ID NO: 846406 - DNA, 674 bp, Homo sapiens
aagcaattctcctgcctcagcctcccgagtagctgggactacaggagcccgccaccatgccctgctaattttttgtattttgagtagagacagggtttcaccatgttagctaggctggtttcgatctccagacctcatgatctgccctcttcagcctcccaaggtggagtttttgatttctactgtcacattttcagttttcaagaatttttttttcttgaatgtccctttaatggcatcctgttcttgtttgatagactctactatcttatctctctaaggctattaacgttagttgttattaatgttacttggtgtttttggctttgttcttgttctgtttttaggtttttttcctgcgtggtttctgtttctctcaagtgcccctttattgtgtgtttatttggtctcgtttctcagacatctgatagcctttggtgtcttctcatgtttaagagtggaggggctcaaagatgattggaagtgatgagtgaggctctttgacggcgagttccccatagctgactgccggggctgtttcgtcggggagtcttcaacrgtggtgcctttcttcttgagcagaatcaatccctatgaagactcagtctccctcttggttaaagggtctgcttcccatgttctggaagccgcaggaaaaagtcagggaggagggg

SEQ ID NO: 846407 - DNA, 674 bp, Homo sapiens
aagcaattctcctgcctcagcctcccgagtagctgggactacaggagcccgccaccatgccctgctaattttttgtattttgagtagagacagggtttcaccatgttagctaggctggtttcgatctccagacctcatgatctgccctcttcagcctcccaaggtggagtttttgatttctactgtcacattttcagttttcaagaatttttttttcttgaatgtccctttaatggcatcctgttcttgtttgatagactctactatcttatctctctaaggctattaacgttagttgttattaatgttacttggtgtttttggctttgttcttgttctgtttttaggtttttttcctgcgtggtttctgtttctctcaagtgcccctttattgtgtgtttatttggtctcgtttctcagacatctgatagcctttggtgtcttctcatgtttaagagtggaggggctcaaagatgattggaagtgatgagtgaggctctttgacggcgagttccccatagctgactgccggggctgtttcgtcggggagtcttcaacagtggtgcctttcttcttgagcagaatcaatccctatgaagactcagtctccctcttggttaaagggtctgcttcccatgttctggaagcygcaggaaaaagtcagggaggagggg

SEQ ID NO: 846408 - DNA, 603 bp, Homo sapiens
tcctccccactatttttttttttaatttttatctatttattttttttgagatggagtctctctatcgcccaggctggagtgcagtggcatgatcacagctcactgccacctccgcctcctgggttcaagaaattctcctgcctcagcctcctgagtagctgggattacaggtgcctgccaccatgcccagctaatttttgtatttttagtagagatgggatttcgccatgttggccaggctggtcttaaactcctgacttcaagtgatccgctcacttcagcctcccgaagtgctgggattacaagcataagccatgcgcccgacccccactatttctttatggcacccctgccatgccctcattgtgcctgacatcccccctcaaaagggctcagtttcaacttgtgcagagaagaaacctccaggctttctctggggtgggtggggggagagtctcctgagctgctggagttgrggcggggatgggagtctgacagcttctaacaagactttccaccaatcgtccttaccttggttccctccaccccaacctgcagaggctttgagggatcctgggatgtaaatcagattggttcccagat

SEQ ID NO: 846409 - DNA, 611 bp, Homo sapiens
tttgagggatcctgggatgtaaatcagattggttcccagatttccctgctgcagscttgggattctgtctcttccagtcattcatctctttccagcttccaaaagtttactgttagtctcctatcccattcccctcttccttgtaggtttattatacccaaaagaaaagaaagaaagaaagaaagaaagaaagaaagagagagagagggagagagagagagagagagagaaagaaaggaaggaaggaaggaaaagaaggaaagaaggaaagaaggaaggaaggaaggaagggaagggaagggaggaaggagaaagagaggaaggaaggaagggaaggaaagggaaaagaaaaggaagaaagtttttcccactatctttaattaaagactgcctgtaaggtggtattcaaatattttttagcccatgcagcccattcttccaaagaactcttcaagaaaggtcaccctctcagccccacccccagaccccaggagcctattggcacttccctgaacttctaggacttggaggcacaggtgggaacctgacagtgttgtagaaagtctttgggctttgaactgattcagagtcaaattctagcctcacttcca

SEQ ID NO: 846410 - DNA, 558 bp, Homo sapiens
tgctacaggtgtgatggcagctcccatacctgatcagtgagactcacttcctcttgccttgagcattctcccttggtagtgtcacccatctccttagccccaggcctcatctctgtgcygacattgctacatctgggtctccagccaggacctcacccctgaactgcagacactggttttgatgcctcctgagcatttttgcctgggaaattcacacctcacacttagcatgtgcaaaccaagccttccacttcccaccaacagcatctccttccacatccagatctcagatgacacacccagcccttcacactcagaaccttaacattgtcttggacgccttctccccctttccagttagaccccaatcctggtgtctgcatgaagtagtcagtgactcagtgtggtctctttactccctctgccactgctctggccaccctatctctagaactccaatgttggtgccactgagcatcactaaacatgattctgcctgtgtcatgcttttctccagagccgtctgtggctgcctcacctacaggatccagtttaaac

SEQ ID NO: 846411 - DNA, 607 bp, Homo sapiens
aaactcccaaagccgtcttgggtttggctcccacagctcttgaccaatgtggccaaagctggacacctccttgggacactgggattattcataaatgcagcccgccctgactctccctgaatagcatctgaagtctttgtgaaggtcatggatcctgaacaaagtgtcaagggcaccaagaaggctgagggaagtccccggaagcggctgaccaaaggagaggccattcagaccagtgtttcttccagcgtcccatacccaggcagcggcacagctgccacccaagagagccccgcccaagagctcttagccccgcagcccttcccgggcccctcatcagttcttagggaaggctctcaggagaaaacgggccagcagcagaagccccccaaaaggccccccatcgaagcatccgtccacatctcacagcttccgcagcaccctctgacaccagcattcatgtcgcctggcaaacctgagcatctcctggaggggtccacatggcaactggttgaccccatgagacctggaccctctggctccttcgtggcccctgggctccatcctcagagccagctccwtccttcccacgcttccatcattcccc

SEQ ID NO: 846412 - DNA, 604 bp, Homo sapiens
tggagtgcagtggtgctatctcggctcactgcaaccttcgtctcccgggctcaagagattctcctgcgtcagtctcccaagtagctgggattacaggtgcccaccaccatgcccggctaatttttstatttttagtagagacgaggtttcaccacgttgaccagcttatctcgaactcctgatctcaggtgatccgcccacctcagcctcccaaagtgttggattacaggcgtgagccactgcctcattgcttcttaatgcaaagtatttttcagtcacttatgaaacaccattttttatcttaacaatgagttttctatttaatgtaaattcttaacctatggaaaatatgtgctaattttgaaatgtcttctttagttatcttagttatcacaaaaataaatctagtttgtagacttagtcattacaaaaccaagtctagttcgtaatagttttaatattaaatttaaagcaagtaggcaatctaaattttgttggaggtatcagaatatttgttcaatgtcatgcaaaaattcattttagactgttttataccacagattagatactaaagtctgagttaagaagaaaagtttctaagtca

SEQ ID NO: 846413 - DNA, 596 bp, Homo sapiens
tgttcgaacctgttcaaataaagcaaacactgagctataaccaatccagctgtttctttacctctcttcaattttctacatgtcactttcctttttctgtccataaatctaccatgtggctgctctggagtctcagagactactctggctgtgaaggctgcccaattcatgaatcattcattaaattagttaacaattgtaacaatttggctgaagcttttcttttctttctttttttttttttttttttttttgagacagagtctagctctgttgcccaagctggagtgcagtggcgtgatatcagctcactgcaacctccgcctcccgggttcatgccattctcctgcctcagcctcctgagtagctgggactacaggtgcccgccaccaggcccggctaattttttgtatttttagtagaggcggggttttgcagtgttaaccaggatggtctcgatctcctgaccttgtgatcwgcccaccttggcctcccaaagtgctgggattacaggcttgagccaccgcgcctggcccagcttttcttttattagatagcaatgaggatgggatccgaagtagagcttccaacgaccc

SEQ ID NO: 846414 - DNA, 540 bp, Homo sapiens
ttgattttaaaaaattaaatttgctttgcactttttgctgacagctgtggrtgacaggattaggcatgtataggaccactggacatggggagctttttttctttccaaagcgggaaacatgagagctgatgggactgctggaaaagatccctttgcgactgacaagcaactgcctgaacttttgattcagcattgctgggatgggtgggtctttctctggcttccctgagctcctgccttccccactctgccacaggcaatgcttttctctctctctctctcttttccctttcttaccttttctgttactccgtgcaaccatcttccccagagaccacatgttgaaactcttttaatccactttaaatggattaaagatgacagggcccatctagggccaagtttgagacttgccaatttgatattgggtgctaagcagagtggctaatgtctatgttttgtcacatgtattttgctctggctggaatgaaaaatgtatattcagttctgctggttggggagcaacttgcaaaattgaga

SEQ ID NO: 846415 - DNA, 461 bp, Homo sapiens
tggaagccccaagttctagttgtcccctaaaatgtataaaatgaagctgtagcccaaccatgttctcaggatctcctgagggctgtgtcatgggccatggtcactcatatttggctcaraataaatctcttcacatattttacagtttgactcttttcattggcaataattagtgcccaacatggggcctcagagaagactcaggacccttgaaggagttgcctgaaaccagagctatggtgcatgttgaaagctcctgccaacctccccagtttcagcttctccctggctgcaactgttgttaagtcctcctgagtcccagatatcctgttttggttgatggtccttggtttattctgagcctttgttttttctactaggaagttgcttaagatcctaattttggtttgcaagtgcattctaaagggctttctccattgccttttctcccaaattaatct

SEQ ID NO: 846416 - DNA, 492 bp, Homo sapiens
cagatgtcagaactattcctatatttaactcgggggatgtggaacatggctaatcaacatcaccctttcttttcgtgaaggaccgagatgcccaaatcctggccctcctgctggactttcattttaaagaacaataaaattaatgttaacttctagcagcttccaagctctggtaaggtgatccaaccctaaatcccagtagtcactactggaatacggtgaacctctctctttgaagcctggcttggccgtgtgtcactcccagtggacggaatgcactgtctctggtaaaggggcgtatcccatctctgcaggttttcaaacacaggctaaggacgtgtcagagatactttgacggcrttaacagttctagtgagccgtgtgccaagacagcctggaaagtttaggggttcccgtgcccttttgggtatagtttgcaaactcttatgggcacccaccaggaataaaggatccccaatatcatccatggct

SEQ ID NO: 846417 - DNA, 568 bp, Homo sapiens
ctcgcagactgagaggtgcaattcaagctaaacatccccttaggggaccaattagtaatgattccataggaatcgttgtgcagcacctctgcctgttctgcaatgcaatcttactaaacaagtatgttcattttttctaactgggtccaatcctgtttacaaaaaggtttttgagggtggtatgcctcaattatagtagcagatttattatggtaaatactgagatcagaaagcatgtgtaactgtgttatagagtgattgcatctaggcattattgccagccaagattgataaatatgcccaataagtataattgttctctgtgtcagcccttgctgaaggaatactcatggcagtggtgatcactgctatcatagctaccattaaattactcattgtgactggttgtactgctttcctcaggttttcttctgccatctgtgacagcttcttgatctgtccccatgtgggtggctgtgtttgacgggtgttgctcgtgacagttggggwcctcctcagcgtcagtctcgacatggctgcaactagggggtcctcgggatcctcccag

SEQ ID NO: 846418 - DNA, 559 bp, Homo sapiens
atttccatggccactgttttcccttgtattgtaacaaattacgcttgttacctcaaaaatgaaaggcttatttagggcaaagacattttcttgttcattcttgtatttcccaagcccctctcctagtgcctttcatataaaccgtcagataagaatgtttattaatttgcattattcagatattactaccacttctaaataaactatatttcagacactggtagtattctaaaatggctaagctacgaaaataacaaatggatattacttcttttcggtgcattaaaaattatttttaaagtgtcaaagtttttattaaaagtaatttcttttagaaaaatattctacagtttgccattattttttaattggctgatacgtgtggaatgcagtctgttgtggtccacgtcacattactccttctgagccgcctccagcagccccccagttggccacgcagctgtgctcacctccarccccttatcctcgggtctctagttcagatcggggtggacatgtggcccatgagggccccagcagattctttgctaaaacctgt

SEQ ID NO: 846419 - DNA, 643 bp, Homo sapiens
aatatatccttcattcatttttacacccaatcttctgccattcactctattctaactttctctatctcagcaaacaaaaattacaacgtcaacttttcaggtttcaggctaaaaaagtggaagtcatctgtgactcctttctctccaccctaaatccaatcacacaaaatacagacaactctgccttcaaaatcctgtatatccagatgtcaaccacttcttgccacctccaccacttctagtctggacaatagatacctaaatgttccctgttcttctcagttgtagaatttcaacagagcagcaaacgtgatcctcttaaactgaagccatcacgtcacttctttccatacctccttcttcccagggcttccctaatcacctagttgaaagcagattctcaagtccttgcaaaggcttgacctcaccatgccattctgagtacatctatcccctgacccctgtcacttcactgcagctgtgctggtctccttgctgtccctccaatacacagaccctgccacatagctttctatgtaccgtcccctctggctggcacacttgcacccacgtatccacgtagctccyggctcacatgtcacctttttcatgaagccatccttaatactctgttcctttcttc

SEQ ID NO: 846420 - DNA, 643 bp, Homo sapiens
aatatatccttcattcatttttacacccaatcttctgccattcactctattctaactttctctatctcagcaaacaaaaattacaacgtcaacttttcaggtttcaggctaaaaaagtggaagtcatctgtgactcctttctctccaccctaaatccaatcacacaaaatacagacaactctgccttcaaaatcctgtatatccagatgtcaaccacttcttgccacctccaccacttctagtctggacaatagatacctaaatgttccctgttcttctcagttgtagaatttcaacagagcagcaaacgtgatcctcttaaactgaagccatcacgtcacttctttccatacctccttcttcccagggcttccctaatcacctagttgaaagcagattctcaagtccttgcaaaggcttgacctcaccatgccattctgagtacatctatcccctgacccctgtcacttcactgcagctgtgctggtctccttgctgtccctccaatacacagaccctgccacatagctttctatgtaccgtcccctctggctggcacacttgcacccacgtatccacgtagctcccggctcacatgtcacctttttcatgaagccatycttaatactctgttcctttcttc

SEQ ID NO: 846421 - DNA, 569 bp, Homo sapiens
attaaagggtttttttaattgttaaatctaactatataaattaacatttaaaaatccattttcatcactcaaactaattacagatttttttttaccacataacacaaattttatctggctgatcttgtctctcaattcttactatatagtatagctttactagaagcataatttcctggatagaagcttccatttctggcagggcatggtggctcacgcctgtaaacccagcactttgggagggtgaggcaggtggatcacctgaggtcaggagttcgagaccagcctgggcaacatagcgaaaccctgtctccactaaaaatagaaaaaattagccaggcgtggtggtgagcgcctgtagtcccagctacttgggaggctgaggcacaagaactgcttgaactcaggaggcggaggttgcagtgatctgagatcacaccactgcaytatagcctgggcaaaaaaaaagaaggttctattaaaaaaagaaggttcattaaaaaaaaaaagcaaagaagaaggttctatttctgtaggtttcttatgggcctctggaaggtctatgccta

SEQ ID NO: 846422 - DNA, 506 bp, Homo sapiens
atttggtggtgcacacctatagttttagctactcagggggctgagctgggaggatcccttgaggccaggagttccgtgctgcagygaattatgattgcaccactacacaggctgggtgacaaagtgagcccctgtctcttaaagaacaaaaacaaaactcaaagtggattcaagacttaagacctgaaactataaaactgaactgaactacctgaaactgtaaaactagtaaaaataaaacagggaaaagtttcttgacattgctctgggcaatgatttttttttatatgacctcaaaagcacaggcaacaaaagtgaaaatagacaaatgggattgcatcaaactaaaatgcttctgatacagcaaaggaaacaatccacagagtgaaaagacaacctaaagaatgggagaaaatatctgcaaaccacacatctaataaggagttaatatccaaaacatataaggaattcaaaaaactcaacagcaagaaaacaatctgattaaa

SEQ ID NO: 846423 - DNA, 568 bp, Homo sapiens
taaaaataaaaaaataaaaattaagggccacacacagtggctcatgcctgtaatcccagcactttgggaggccgaggcgggtgratcacttgaggccaggagttcgagaccatcctggccaacatggcaaaaccccatctctactaaaaatacaaaaaattagctggacatggtggggcacgcctgtaatcccagctacttgggtggctgaggcatgagaattgcctgaacccaggaggtcgaggttacagtgaaccaagatcacacaccactgtattccagcctgggtaacagagcaagattgtctcaaaaaaaaaaaaaaaaaaaaaagagagagagagaaaaagaatgacccacctgaatcaaaaaggtgtgtgaagattaaaacaactctttattttgaaaactggtaattaaaaaagaaagaattagacattttaccttcctttacagtgggaaatatatttagggtaactatatcatgtcagtggataagataaggctctattttatcaaagaatgccaggtaatcaatatagaaataatgttagaaatataatatcagcat

SEQ ID NO: 846424 - DNA, 568 bp, Homo sapiens
taaaaataaaaaaataaaaattaagggccacacacagtggctcatgcctgtaatcccagcactttgggaggccgaggcgggtggatcacttgaggccrggagttcgagaccatcctggccaacatggcaaaaccccatctctactaaaaatacaaaaaattagctggacatggtggggcacgcctgtaatcccagctacttgggtggctgaggcatgagaattgcctgaacccaggaggtcgaggttacagtgaaccaagatcacacaccactgtattccagcctgggtaacagagcaagattgtctcaaaaaaaaaaaaaaaaaaaaaagagagagagagaaaaagaatgacccacctgaatcaaaaaggtgtgtgaagattaaaacaactctttattttgaaaactggtaattaaaaaagaaagaattagacattttaccttcctttacagtgggaaatatatttagggtaactatatcatgtcagtggataagataaggctctattttatcaaagaatgccaggtaatcaatatagaaataatgttagaaatataatatcagcat

SEQ ID NO: 846425 - DNA, 606 bp, Homo sapiens
tttctaattttactttctgctaaaaaaaaaacagacacacaaattataatattttattatagaaaaagcatcccaaatacaggatttcgtaaacactggtaggtgaacaagtgcaattttaaaagtaaatacaaagtagaggcaaaacctacaagcattttgccttcagaagaaaatgtaatgttctcctgcactagtgatcccacccagaacacaaatgtggctccatctcccatgaaagcatcatatttgctttctgagctcagtattcccatttcaataattgcaaagtgatggcaagaagtggcactgaatacattactacaaacccttgacttaaaatattgagacagggtcttgccctgtcatccaggctggagtgcagtagcgtcatcatggctcactgcagcctcatcctcctgggctcaagcaatcatcctgtctcagcctcttgagtggctgggaccacaggtatgcactaccatgtccatgcctggctattttttwaattttttacgttgcccaggccagtctgaaactcctgacctcaagtgatcctcccaccttggcctcccaaagtgctgggattaccggcatgagccactg

SEQ ID NO: 846426 - DNA, 247 bp, Homo sapiens
acccattcctgactagaattggctgcagaagttctataaaggcctccttgaacttcttcaaggatttgggtaggatctcagtgagtgctactggcctggcataatgatcagcctagacattttatattttcttagcctccacactagcttmtttcgtataagcacctacttttgtaattggcatctcattaggaagcattatagcactctaaagttatttaatttgctgaatactcttaattggggt

SEQ ID NO: 846427 - DNA, 614 bp, Homo sapiens
aagaaaatgcattatatacctaaatgtaaatcctaaaactatacaaattatagaagattatacatgagacaatctttgtgacctatggttaggcaaatatttcttaactatgaacaccagaagcacaatccataaaagaaaaaattgataaattatactttaacacaattgaaaccttctgctattttaagacatttttaaagccacagactttcaaagccacaaaccatgaaaaaatattttcaaagtatgtatctgacaaaagacttaaatttagaatatataaagagctctcaatacttaaaagtgagaaaacagataccccaattaagaaacgagcaaatgatttaaacagagttcacaaaaaagatggcaaataagcacatgaaaagttgctcatcatcgttagtcattagaaatattcaaatgaaaaccacaatgaggtaccattacacactaccttaggctagcaaaaattactaagatttgctgctccaagtgttgttgaggatgaggaggaactggaaatcttgtaaactgcaaatgagaacgtaaartggttcaaccatttcagaagatagtttggcagcttcttaaaaggagaacatctatga

SEQ ID NO: 846428 - DNA, 643 bp, Homo sapiens
caagttaagtaccctcactaactccaaaatttctctacagtcacgaacattttcaaaacagtcaaatttgtttctgccccttgttatctggctagtttttttattataagaacagaattagatccacagtagccattgtgttatcacgtggtctgaaatgttaactggtcaggctgatggttattaactacttcttaatggactccacaatattatcaagtaagcaatcagacctttaaacacagaattaacgttctacagctctttttcaaagagttatcataatctgaacgagcccacaaaaaacagaatcatctgtatcatcaccaataattcatactgagcattttacactgctctgtacagggctgacaatactagaggccagttctaccgtgggagtttcttaggttttttcagcagttagcactgaatgaaatgtaaaaatttacatataattaactcatatatttcttcctatctactatcactgaatcagatccacgacatttgctgaacatgagaatggggaaattatataaagaatcaaaagaaggatgaggagggagragaggaacagtggtgggcatgggggaggggatcgccaaaactcaacagggagcctgggaatgtagattacatc

SEQ ID NO: 846429 - DNA, 543 bp, Homo sapiens
ctctttattggttttaaaagttgttgtctccatataggagtttcatttttggcaatggaggactaggtaattcggaccagatctcttgttcatgataactagwaaaagctagatgcaatagataattaagttttaaaatcaagaagagcaaaagggtcataaggatttattggccaagatctgggagaagacacaaatcaggagagtgagcctcatatttaaggctccttttgtcctggggaacatttgcagatcttcaaagggcaactgaaagacagagttgcagtttaaaaaaccccttgagccagagagaaagagctgtggtctggagcctgccaggggcagaagtcttgggaagtaccctacaccttgggagtagagccctgaagagctggcccaagaaggaagggtgaagataactaaatgagtctttataaggctcatagcctctcttcaggtgattctgcaggcctagaaaatctcaaactctaaaattagaatagggcgaatccagattgctaatagtgccccctgggattacgg

SEQ ID NO: 846430 - DNA, 593 bp, Homo sapiens
acttgataaagcctcattctttcatcattgaattacaaattgtgacttccactaactcctgagcagctggtcatctttacattttcaaggcgaggagctcagccacctggatgttcttcctctgctcttggtcagaggccagttgttgtcctggccctctaaggacagcactaagatccatcccactcttctttctgtccgcaaaaccaaggcagactggcccccagacttctcccaacacttcatccaatttgtccatgagccaacgactccaaagctgttcaggactatctctccatttctttcttaacctgtcaagagatgggttaccagattccctctattaccactgataaattgaaaataaaacacatttcatcaaggccacaatttcttgcttgtggtcaaagctaacaagaaggatcccaccaggaacctagtaggataaattacataattaatgttattccttagtttgctgaagtcgaaatctgtccccagtagccttatttctcctgctttatatctttccttccagggctgtacactgrtgttaccagtcttaggaagagtggaaataccttgtcattatt

SEQ ID NO: 846431 - DNA, 619 bp, Homo sapiens
gtctgtatcattgtacttcgattgcatgtgaagtgcggaaaaatttgttactagtaataaagtaatcacgttggccagtgataacattttttttttttttgagayggagtttcaccctttggtccaggcccgagtgaagtggtgcgatctcgactccctgaaacctccgccccccgggttcaagcgattctcctccctcagtagctgagattacaggtgcccgccaccatgcccagctaattttttgtatttttcgtagagatggggtttcaccatattggtcgggctggtctcaaactcctcagaccaccgtgatctacccgccttggcctcccaaagtgctgggattacaggcgtgagccaccgagcccagccacaacagttcttttaatgccctggggatacatgagccaacaagattactatggcttctgctgaaatggaggagacattaagtaataatgacaaaagtgattatttaattgcaattatggtagttgccacaaagtaagagtagaacgtgctatgagagcatataataggatttctgatatgctcatgctctggggtcaggaagaagcttcccaagggacttcgcagttaaggccttaacaagact

SEQ ID NO: 846432 - DNA, 521 bp, Homo sapiens
ccttttctgttcataataatggtggggcagtgtcatttcaggtatgtatgctctttgtgtaaagcctcctagaatttctctctaccatgtaaaagggtaatttttttttagaggaattttgaatttaggaataacaacttaggtatgccctgtatcagtcacttaaatgcagtagctctccttataacaagcccacaaggtggatattgttacccatctacttatcaaatcagaagtctctgagagtgaataactttgtgactatctagtgtaggtgacacggtacagtttccaacccagtcctgcctggctgttcccatgacccctttgccccaatcccatgctacctcccattcaaagtgtgccagaagcatagtaccccattctgaaaggaccattgatgatgatttayggtgatgttgtaattttagagatgatttcacctagactcagaggctttgagtgacctgcttagctgtcagagttattaattgcccatgagtgtttaggggcagcataat

SEQ ID NO: 846433 - DNA, 612 bp, Homo sapiens
gatgctgctagaaggagcacctttgagaatggaaaggcccctttgcatacctaccattactcttgtaattcctgccagacttgagccccgggctgcttcttgccctatcccagcccctagcgcagtgcctagatgaaaagcattcaagaaatgtctgatgattaaactgaccaatatctataatgtctctagctttgtttctgatcagagtacaaggaattcaataaatggcatcggctgccattaataataataatttttttatatgccgattatagtttcttgggtcaaaaaccatatatttacttctttgctgccacaaatagttcccacaatggcctagacacaaaaccaagacctggaaagtgtttgatgaatggatgactaaacgaacaaatgaatgagagaccctggcttgtgtcccttcctgagtgtacaacacacatggaatggcacaattaatacatcaccagcctttcctwtgaaccttcttccttctaccttcttccttctaccaattcctacttgtgggtagaaacacagagtttaaacacaaataacagagaccaaagagttactgggcagtccccagagcaaacaaacaagtgacag

SEQ ID NO: 846434 - DNA, 639 bp, Homo sapiens
acgttcaaatataggtcagaaaattattgaggctttatttactctctcttttcagggctgctggctgacatacacccccttctgctgaaaggtgttaaagaaatatgcccagagcatagtaggccctcattgcattctcattgacttgatgtcagagaaaaaaaaaattagcattttcaaaatttgctgttgaaaatttgagacccaaaaaagtgtatatagatcaagttgttgttttacagagcaatggtgaggggagggcagaatgctgtaagcatcaaaccacatgcggtcaattcatctataatgatggttaccaatttttacggacttccttctgcctccacaggcactgcttcatgtgatatgcacaaaactctgtgagttgttcactttcccttcccctcgttcattcatccatccaacaaatatttactgagcatctgctatgtgcccatgcgtgggaacagcacattgatggagacaaactgacccacggccacacggagcattatcttggctcaaagagctgcaggctgtgatcttaggcctcttccagctccctgttggtggttatatgatcygcaagctaagaatggtttttacattttttgatggttgaagaaagatcaaagaaga

SEQ ID NO: 846435 - DNA, 578 bp, Homo sapiens
gcttttatataggttgcatattttccaactcaggactagtgctcaaatgaagtctaaataaatagagcatcatttaaagtttaraaagcctctaaaagctttgggcacaaatacattgacatacctggttgatcttttgtatgccctgattattgtaaatgcttgctttgtacttggccatactggtggtggttctcataaatggaaagacttttagagactgacttgtattggaacttattacaaaaagatctagaaatgataaaatattgatcatatgcccagtccatttatgttgtattctttagaaattagcaagggaaataaaatttctcattaaatacatttaaaactcattagaaacataaataattaagatgggaaattaaaatatgtaattcatttaagaaaaagtaaggaactagagactagaaagtctaaattttgttatagaagtttaattataaaagcctacattaaaaaattttaggcataatttagaaataaaaaatatatatctcaaggtggtgatgatacactttcctatttattgaaaatatttaaagtggtcatgaaaa

SEQ ID NO: 846436 - DNA, 572 bp, Homo sapiens
gtgatatttctgctgggcagcactgtcctagaatgtgatatrtctttatcttccccagagttccttccctggttaaaaattagttctgccatcctaagtgaagaaatttttttcatctgttctaaccctcagcttctcatgtagtagtagtctgcctagagtggaagtctaatgctaattgacttctgaattactgtagccagccaatgtagcacctttttccttttatcactggcttgttttgtgtccctaatgcaaggtcatcaagtaaacagtcctgacctactgtccatagtgtcacagaagagctacttcttgactctaggtatttttcttacggcatggaataactggtttgtcatttagtgcccatgtctgcttttaagcagaatcaaaagaatatgtaaggactttggcaactttgtgttgtataagacagaacttaacacttataaaataagctcagtgtgcttataattaaagcaattttaaaggtgaatgaaaactgagaattctctcttagctttgccatatatgacaaacccacagctagactcatactgaacagggga

SEQ ID NO: 846437 - DNA, 552 bp, Homo sapiens
aacacttagatttaaagtattaacttgatttttattttaattttccatacaacaaggtattaacttagtcatcgagtcacttcatatatcatgctttctattyaatgatttatgcttatacttttaaaagacaacacaagcaactaattttctacaaaggcttttggcttatatgcaggcttttttgactgtttttctgcaaactagtttaaaaaaatcttcactaaatgatcactgctacatttaggaaaacaagagttttccaaaatcttgtggcaatacaaacataaatcttaatgaaagatacaataccatttcacaataaaaaaaattgtagtgcacatatatagtgcacaagttaaaaaattaaaaattccacaatccatagtgtaattgtgctaaggcctctctaaccatttccctgcagctttgcagccctttaatttttctagtatgacttatcagttacagttaccttcttattggtacagtgaatgttttgttttttgataattttgtacatttttgacttaaaacttgttacagtttcct

SEQ ID NO: 846438 - DNA, 658 bp, Homo sapiens
acaagttggtgggtgggggaagccagtgagccaagaacactgatcttaggagcagtttgtggagggtcagaatcttgtagcctccagctgcataactcttaaaccatagtttctaatcttgtggccgtgatggctaatatggagtgtcaacttgattggattgaagaatacaaagtattgatcctgagtgtgtctgtgagggtgttgccaaaggagattaacatttgaatcagtgacttgggaaaggcagacccacccttaatctgggtgagcacaatctagtcacctgccagtatggctacaatataaacaggtagaaaaatgtgaaaagacagactggcctaggctcccagcctacatctttatcctgtgctggatgcttcctaacctcaaacatcagactccaagttcttcagttttggaacttggactggctctccttgctccgtagcctgcagatggtctattgtgggaccttgtgagttaatacttaacaaactcccatatatatatatatatatatatatatatatatatatatatatatatatatatatmtcctctaaagttttgtccctctaaagaaccctaatacagattttggtaccaggagtggttctagaggaacaaaatattaaggatgtatttgtttcgttag

SEQ ID NO: 846439 - DNA, 609 bp, Homo sapiens
tcttctgtcattctgaagtctttgcacattattccagtttattgtaatgtacaaatttcatcagatatgttatatgttccttttccattattagtattcggtgtttttgggtctttgagaggctcaatgccaggaaaatcccaggggaagacaaaacgcatgtgcccagtaggacttgttgaaaatgatttcagatgagtaacattgttttttttttgacatggagtcttgctctgtcacccaggctggagtgcagtggcatgatctctgctcactgcaacctctgcctcccaggttcaagcaattctcctgcctcagcctcctgagtagctgggattacaggtgaccgccaccacgcccggctaatttttgtatttttagtagagatggggtttcaccacatggttcagtctgttctcgaactcctaacctcgtgatccacccacttcggcctcccaaagtgctgggattacaggcgtgagccaccacgcccggctcaaagcaattcttagaggagaaaggaggataaaggcataaggagttgggggtggtggtgtgtgacttgtgagattgasaatcactaaaagctgtaggtgaaggggaaggtcc

SEQ ID NO: 846440 - DNA, 623 bp, Homo sapiens
ttcagggaaatctctaagtgattcttaccragtttcaaaaaggagatgaaaagcgtaaaatgggtgtggtaggcaaaataatggctccacaaagatattctcttcctaatccctgggatttaggaatgtttcataggtgtgattaagctaaggacctcgagatgtgaaaatgactattagatttccccatttaatcacattcaagtggttcaaatctaatcacatgggcccttaaaaagaagagacattttcccagctatagtctaagtaagagggagatggtattatagaaaagtgatcagaaagcagcaatgttgttggctttgaggatctagaaaggtgcccataagccaagaaatatgcatgcatggcctctagacactggaaaagcaaggaaacatattctcccctagaacctacaaaaaagaacacatttctgataacactctgactttagcccaggaagatccatgtcggacttctacagaactgtcaaatcaaaaacgtgtgctgtttttaagatactacatttatataatatgctaaagaacaacagaaacttaacacaatgaggaaagtggcagaattataatttagccttttcttagtcattactaagatta

SEQ ID NO: 846441 - DNA, 623 bp, Homo sapiens
ttcagggaaatctctaagtgattcttaccgagtttcaaaaaggagatgaaaagcgtaaaatgggtgtggtaggcaraataatggctccacaaagatattctcttcctaatccctgggatttaggaatgtttcataggtgtgattaagctaaggacctcgagatgtgaaaatgactattagatttccccatttaatcacattcaagtggttcaaatctaatcacatgggcccttaaaaagaagagacattttcccagctatagtctaagtaagagggagatggtattatagaaaagtgatcagaaagcagcaatgttgttggctttgaggatctagaaaggtgcccataagccaagaaatatgcatgcatggcctctagacactggaaaagcaaggaaacatattctcccctagaacctacaaaaaagaacacatttctgataacactctgactttagcccaggaagatccatgtcggacttctacagaactgtcaaatcaaaaacgtgtgctgtttttaagatactacatttatataatatgctaaagaacaacagaaacttaacacaatgaggaaagtggcagaattataatttagccttttcttagtcattactaagatta

SEQ ID NO: 846442 - DNA, 603 bp, Homo sapiens
tgtttatagatgtttatgccttgcaaaacatattaacacataattttctgatttgatcttttcaataaccttaggcttgaaaagtattactatccaatttgacagatgaggaaagtaactcaggttaagtaagtcatccaaggtagcacagtaagccatggcaggttctagattagaacttgagttttaaaactcttattcaagactgagcctgagaaacagccttaatatatataagtatcaaatgtattttaggattgtgtaaaacttgctttatgggtgatatacaacattttgtaaacttgcttttctgtactatgaaggcagtcaccataaaaattttctgagcatatgaaattggaagaccatgtgtatttttaaaaagagcagaattagcctctaaactcttagtgagaggataagttggatgaccataccttttcatcaaccgaggcattggttcaggccctcaggcctgaaccccagttggaggatcatttagaaarcactttaatacatcttacaatataatgatacatttttcacaattaatgaactaatactaatatttaagtcattaagtataattaatactttactcac

SEQ ID NO: 846443 - DNA, 603 bp, Homo sapiens
tgtttatagatgtttatgccttgcaaaacatattaacacataattttctgatttgatcttttcaataaccttaggcttgaaaagtattactatccaatttgacagatgaggaaagtaactcaggttaagtaagtcatccaaggtagcacagtaagccatggcaggttctagattagaacttgagttttaaaactcttattcaagactgagcctgagaaacagccttaatatatataagtatcaaatgtattttaggattgtgtaaaacttgctttatgggtgatatacaacattttgtaaacttgcttttctgtactatgaaggcagtcaccataaaaattttctgagcatatgaaattggaagaccatgtgtatttttaaaaagagcagaattagcctctaaactcttagtgagaggataagttggatgaccataccttttcatcaaccgaggcattggttcaggccctcaggcctgaaccccagttggaggatcatttagaaaacactttaatacatcttacaatataatgatacatttktcacaattaatgaactaatactaatatttaagtcattaagtataattaatactttactcac

SEQ ID NO: 846444 - DNA, 601 bp, Homo sapiens
aatttctccatattcttaccaaatcttgctatttctgtatttttaaaataatggccatcctagcaggtatgaggtaaaatatcattgtgacattgacttgcatttccccaattattcrtgaaattgaacatctttttgcatatttactacttgtatgtcttctttgaagaatgtctattcaagtcctttgcctattttctaattgatttttttttttctatttagttttaaaagctcctcatgtattttggatattaacccattattatatgtgtgatttgttaatatcttcccccattctgttgattgcctttttattctgttgattccttcctttgctacacagaaactttttagtttggtgtagtcccatttacctatttttgctattgttacctgtactttttgtgtcgtatccaagaaatcattactaagaccaaagttataaggctttccccctatgttttcttccagggggtttatagcttagatcttacatttaagtttttaatctcctttgagttgatttttatgtgtggtgtaagataagggttcattttgcatgtaaacattcagtttccccaacaccaattgttaaaga

SEQ ID NO: 846445 - DNA, 608 bp, Homo sapiens
agcaattcaaaatggaaattttttaaaaaatccatttacaagagcatcaaaagaataaaatacttaggaataaacttaaccaagtaggtgaaagacttgtacactgaaaactatcaaacattgctgaaagaaaattttttgtagatatcaaaataactacaggagtggatttggaatgttcctaacagaatgaaatgaaaagtgtttgaggtaatgaatatccaagtcaccctggttttattattacatattgtatgcttgtatcaaacatcacatgtactcctaaatacataaaactgttatgtacccataaaaattaagaattaaaaaaaattaaagaagacaaaaataaatgaaaaggaatttcctcttttctgagtggtgcctattgcaagtctttaaatatatacttagactggttagctctgactagattaacctacatgctgatccaataactttacaattaaatggatttttaaaaartctctagatgggatgaagcaggttaagtgggtaggcctgatgtggaatagagagcctgaagaggcacagtggagaaaagtgataaagaagggactgggaaataaagaatctgggaaatatat

SEQ ID NO: 846446 - DNA, 610 bp, Homo sapiens
tataggaaagggaaaaataataaatttagggggagtaatttaggaagaactggctcatacaattataaggcaaagtcccacgacaggccgtctgcaagctggggaaagagaagttggtagtggctcagtccgagtcggaaagcctcaaaaccagggaagctgacagtggagccttcagtttgcagccgaaggcctgagggcccctgggaagcaactagtacaagttccagagtccacaggccaaagaacctggactctgaggtccaagggcaggaggagtgaaatcaagcctccagcacaggaagaagaaagagagccagaagactcagccagcaaacttctcccaccttcttccacctgccttattctagcagcactggcagccgattcaatggtgtccacccacattgacgctgggtcttcctctcccagtccaccgacttaaatgtcagtttcctctggcaacaccctcataggcacacccagaaaccatgcttcaccggccatctgggcatcccttaatgcaatcmagttgacacctaatattagccatcacagcagtgaaacgaactcttttccctgagcatctcaaactatgttatggattgaa

SEQ ID NO: 846447 - DNA, 615 bp, Homo sapiens
atagtttaagcaagagctatttgtttgtatgtttgtttgtttgtttttggagacagggtctcactctccctgaggctggagcgcagtggtgtgatcatagttcactgcagcctcaagctcctgggctcaagtgatcctcccacctcagcctcctgggaagctgggaactacaggcatgcaccatgatgcccggctaatttaaaaaatagtgtatgacagggtcttgccatgttgcccagactggtctcgaactcctgggctaaagcagtactcccttggcctcccacagtgatgggattccagcgcaagccaccatgcccagccaagcaagagctgtttgagtttcatgtctagttgtgtgtatagagggcccagtggggtggctaatttaaaaactgggcttataaatcaattgtttaacagtggtaagttcaccatgtgttctgagtacttttttgtagacgtgcctatattttagcatgaggcgttgctttcagcacctcttaccagttaaaatgcacagcggccatttctcctgtttcaagaggcttacrtggaccttcacttggtgcacctggaagaatccccacagatgcatctccagaaacaactgca

SEQ ID NO: 846448 - DNA, 569 bp, Homo sapiens
ttcattgtgagtattcgacatttaataccatgaacccactttttagccagagagagcctactggcaagcatagagtcctgaagcatgttaatgatctaaagttaakgtttccaccttgcaatagcgtttaattctccatatatgtcatcaggaaatgttggcctttgagggtggattacactccttttaacagcaaaaagggcacatcaggtgggaggaggctcatgaagagcatccaggaagtgcggcctcttcaaggagaaaccctgtgtaaaaaaagaaaaaacaacaatcccaaagcactagttgtaagtgaagctgcaaggagcaggtgctgtttcttgggtcttatttgcactgcatattggtaaacagagtacttttgagttgcagcgattccaagtcattctcttggacttattttgttttcccagtgacagaaaaatattcacatccatatccagactcacaaatggaatccagaaatgtaccggagcctgaggaaaatgctctatggtaatagccaggcttccaatcgtgggaaagccaaacatttctttagcgcacga

SEQ ID NO: 846449 - DNA, 619 bp, Homo sapiens
tctcacagtcagcaccacagaatctcaaacataaaaagtcaaaaagtcagccttctaggtcctgggttcggcatcccacaggtcatgtattttctgtggagagctctgtgwttttctctatcaattgatgtgatcacgtggttgtcttctttagatggttaatatggtaaattacattgattgattttcttcctttttcttttttggttcttttcagtttgattgatttttaaaaatgttaaaccaaccttgcattcctgcaataaacccacttgtttgtggtaatattcttttgatatattactgtatttgattggctaatattttgcatctttttttcatgaagtatactacagtttttttcttataaagagaaattgtcagagtacttctggcctgttaaattgtttccagatttccttattaccagtaatccatctatgaactgtttttgtatggatccttggggcacataggtgtggactctcaaagtaaatttgaaaaattcttcactaaaagaactccatcactgtatggtttgtggtaaactgttggctgcccagctaacatctattctaccctttttcctttggtagaaaaccacacttttgttcaagag

SEQ ID NO: 846450 - DNA, 574 bp, Homo sapiens
aatatattcaaagcaaaaagtgcttcagagtttcttcaaataagaaaaagttgggcatgaagtgtagggaataaaccatccccactctctgggtggccaaggtgggaggatcacctgaggtcaggagtttgagaccagcctggccaacatggtgaaaccctatctctactaaaaacacaaaacttagccaggcattgtggcacgcgcctgttgtcccagctatttgggaggccgaggtaagagaattgctcgaacctgggaagcggaagttgcagtgagccgagattgcgctactgcactccagcctgggcgagagtgagatcttgactcaaaaaaacaaaacaaacaacaaacaaaaaacaaaacaaaacaaaacaaaaaagcggagtaaggaataaaccaaataggtgccccctgcatttcagcgcttttgctttctcatgcttatgagattaaatcatctaaaaacaagtagygttaacgggggtaacacagcatggggattttctgtttctttttattgctgctattgtagtcaataagattttatttagacccgaataaagcacctagt

SEQ ID NO: 846451 - DNA, 638 bp, Homo sapiens
ttctgttttgattaatggaccaggaacaggtctttttcctccagactggaaggtgtctcctgggcttgatgtcactcttttagttgttcataaacatcttatcaaagacctatgtatcayggacctgctctgtcacgcactgcatcatggcggcatgagagaagtcgcagaggatttactaggtagatgccgttttcatcttcagatgctaataataaataacatgagttggacacacaaataactctcattcgagccattagggcgatggaccaaaactgaggaacataaagtgtcataaaagttctcgggaagatgtgaccatttcagttgaggtgatcacaggtcacgttaattcatgttttatggctgagggtaaaatttgggctagtggaataggtaggaagcttactctaagtagaaggattggtgtgaacaaaggcacaagctctgaaaggttacaagacatttctggagtggccagtggttcaggccaacaaaggcaacatggtctgtggaaaaagttaaactgcaaaccaggctttccctggtccagctgtgcctatcagttccagcttaactcctacccctcattaccatcatctttggctccagtgccaggaatcttgttatcttca

SEQ ID NO: 846452 - DNA, 186 bp, Homo sapiens
gtggccgagaggtaagacccctgtcctctgcaaataygtaagcacaatatatgtgatccttcctctgccagtttccccgctgatcatcagcatcacctgaagtccttgttaaaaatatccagaaatactctggctccactcctgaaggtctggggtgtggcgtgggatcctctatattgtcgaagc

SEQ ID NO: 846453 - DNA, 670 bp, Homo sapiens
tggggacacacccgaaccatatcaatgcctgaatgrttcattgaaaggaaagcagcaagcccagtgtgctagcccagagagatacctctaagctcttatctttggccactggattgagccatctgggtgggtgcagaactggaaactgtgtcaaggatactgagccttgcctctggcacaagaaagctaagcctgccttcaaaatagatgcctaggcaacataaaattataataatttgctataattgcatctcactgttctttcaatttttgttgcctagactcctaggggtcaatttttggtacatttttagtacatttagtacaacattttttagacattttctgtgcaattggcacacatgattgttaacaacgaggcagctgtactaaagagagatcccctcttctgcacctcctggtgggactggaggcaggaatgaccataaggaagtaggaatggaaagatgcctcggggtctttgtgtctgtaactcaggtaatgtaaagcctagtagttgaactctgatcatagtggaattgtatcattttctttcatttctaattaaagtgttatctctatttagtacagttgatataaaatttattgttttaaacttagaatatattaatttttaagttctgaagtaaaaaataaaacttaggcccct

SEQ ID NO: 846454 - DNA, 645 bp, Homo sapiens
cagagacatttggaggaagacaatgttaagatggaggtaaagattagagtgatgtgtctacaagccaagaacaccaagaaytgctagcagccattagatgatgggagagagagtcatggcatgaattcccccctagagcctccaggaggaaccaacacttacaatgcttgaatttgaacttctgacctcagaactgtgagagaatacatttctgatcataagccactcagtttggggtaatttgttatagctgagagacctaggaaattaatgcaatggtatctatctttccattcttttatagattctgcattcctatatttcaatcgtgtcagataaagagaataaactgggtatctttttatctaatttaacactctttctttgagagtcgcaagttcggttcatttaaatctatttttattgctgatatactttaaaatatttctattgtcccattttgtgttttctatttgtcctactcttttatgcttttctcttcctttctttttgtcttttgattgattctattttttaaccttttaatttcaaaattttgaaagttattcattctattcttactcctttaggaataaactttaataagctaatattcatatataactaaaaattaatcaatatctc

SEQ ID NO: 846455 - DNA, 641 bp, Homo sapiens
ctaagaaacacatttaaagatgctcatcctcattagtaatcagagaaatgcaaattaaagccacagtgagataacattacacacgcttgagactggcaaaaactaagwctaacaatattgggtgttggacaagatactctgataggcatataaacggtgcaatcactttgcaaaactttgtgaggttatttaccttacaaagccaaacattcacatacccccaaagcacaaaactgcaagcaaccttatcactgacaggagagtagataaatagtggtagagaagtatgttcacatgagaaatagcaaacacacacacgtacacaagtgaaacgtatctacattaatgacatgaatcttagaaacagtcttgaagggaaaggaaatgagtatgtttctaacaaggaaagctatataatgtaatgacactttatatatattaacccatttaattctctattcgaggtaggtagtattgctctcattttatagataaggaaactgaggcagagagagctcaggtaacttgtgctaataagtgaaggtgccaagacctacctaacatttctttcatgcttacacagtactaggtactgtactgctttgcctagattatctgtttcatgaaatatgctttttata

SEQ ID NO: 846456 - DNA, 509 bp, Homo sapiens
ttttgtgaaggctgcatgctttytggtggcagagggaagaattaggagtttcttgcaataggtaaagatctgtgaagacactggaggtgatgatgaagtgaggattggagacaaattcaaggaatagcatcgacagaatttgttatcaaattacatgtgttgatgaatgaaaagccaggaatagctccctggtttccagtttggggatcaggctgtgtcattcaatgagattagaaatgtcagggttacagcagtacagcaggctccacattgtcccagagatgagatctggaagagctactatgtacagtaaggcatgctgtcagagatgattatatccaaagaccatttttcagagacccagtggtttgtttcctaaatggaagtatttggacctacttcagaacttaccaaacataagcactggccaggtagcaaacacattaagtggtgagaaagcctctttcaggaagaggactctggtcttaggttagtaccgcagcatgggt

SEQ ID NO: 846457 - DNA, 584 bp, Homo sapiens
ttgatttcataataatcagagaaaaccatcttataaattcagttcctttaaatgaggtttgttttatggcccagtgtatggtctatgttggtgaatattccatgggtgcttcaaaaatatatatattctgctattgttgagtggagtgctctatatcaactaaagtctgttgattgtgttgttcagaacttctatatacctgctgattttctgtttagtagctttatcacttgttgagacaggggtgttaaaattcccaactataattatggatttactatttttcctttcagctccatcagttttgcttcatgtattttgaggctctgttgtttgatatgtatgcatttaggatcaccatgtcttcctggtgaagcaatgcatttattattatgtagtgtcctttcttgagtccagtaattttccttgctctgtactctagtgaatattattatagccatttttactttccttaaacttactgcttgcatrgtataatttttccattcttctactttcaacctacctatatgatgatattcaaagtacattcttttgtgaacagcaacatatgggttacttga

SEQ ID NO: 846458 - DNA, 596 bp, Homo sapiens
aagaggaaaatgagaatggttgggtgctttccaaacatgacattatacgtgttaatacataagaataaaggaaagaaatamcaaagtttcacaaattggaaagggggaaggaaaattaagcattacactttgtatcctaatttagttgtgtggctgagtacaaaattaatagtaattcatcactagatttcacatatgcagaaaataacctattaaaatatataatttggctttgagaggccgaggtgggcagatcgcgaggccaggagatcgagaccatcctggctaacacggtgaaaccctgtctctactaaaaatacaaaaaattagcccggcatggtggcgggcacctgtagtcccagctactccggacgctgaggcaggagaatggcatgaacctgggaggcggagcttgcagtgagccgagatcgcgccactgcactccagcctgggcgacagagtgagactctgtctcaaaaaaaaaaaaaaaaaaaaaaaaaaaatatatatatatatatataatataaatttggttaaagacccaatttgaaaagtaattcaaaataaatagggatttagaaataaacattaaaaat

SEQ ID NO: 846459 - DNA, 611 bp, Homo sapiens
catcacaacttctcctcaaaaccacaacgtactctaatccaagaataaataaaaacttagaactacaaattmgtttatttgggttttgtttttgtttgtgtttttatgacagggtctcgctctgtcacccaggctggagtccagtgccacaatcttggctcactgcaacctctacctcccggactcaagcaatcctcccacctcagcctcccgagtagctgggattatacgtgtatgccaccacacttggctgatttttgtatttttagtagagatggggtttcgctgtgttgcccaggttggtctcaaactcctgagctccagtgatctgcccacctcagcctcctaaagtgctggaattataagtgtgagccactgcacctggcctggtttgttattcctttctatttagatagtatgggtatttttgcctaaggatattgtcaatgtgacagtcacaccagattcgtcacgtcttgtcttctcttcagaagcttaaaatgcactgtgctataggggagggaatacaggagtacagaagttgtctgattatgatgataaattgttagtactgaatggtgcttattgatcatgtagtcaggctccccatt

SEQ ID NO: 846460 - DNA, 511 bp, Homo sapiens
aggcatcctaaatctgacacatctaaccaaaaatcaaaaaacttcaatgatctgttattttaaatgagagaggctggtaacaactgccaattttaaaagattaacaacatataaaattgggcgatgaattttcctgtatgaaaggtaacaagaatgaaaggaattgattcatcttcgagcacaaaatcatgctggaggtgtagaggtagaatgggattaagataagtaggtaaaacttttcactatctcaagaatatgatccatgtagccacccaatagaaactcctgttgaaagagattcagcagccatgcaatgtttccataccacaagagtattcacctatttgtaaacttaaaatacaactgatatctccaagaaatcaaattatttaatagtaagctttccrggccaggcacgttggctcatgcctgtaatcccagcacttcaggaggccgaggaaggtggatctcttgagtccaggagttcaagaccagcccaggcaacatggtg

SEQ ID NO: 846461 - DNA, 625 bp, Homo sapiens
cggcatagtttccagaatgagacacgaaatgggcactagttagagtcacctgccccagtgcatggtgaaggaagaggargtgctcgtcttgaagcgggaccctggctgggagtgtggatgggttgaattatgtgcccccctccataaaaggtctgttggagaccttaacccctgggacctcagaatgggaacttatttggggatagggtctttacagaggtaatcagagttcaaacaggatcattagagtgggccctaatccaatatgactgggttctaataaaaaggagaaatttggacactaatacagatacagagggaagaccatgagaagagacagagggagaagacggccacctacaagccaaggagagaagcctggaacagatccttccctagagctctgcaatcttgccatcgccttggtctcagacttctaacctccacgacagtgcaacaatgcgtgtctgttctttaagccacccggtttgtggtctttggttatggcagctcaagcagaccaatgcagaggccctgttgccagggaaagtccactcttggtgactgtggtgccctgcagcagagaacaaggtatctctcttctcttgcccacagcatggtgttg

SEQ ID NO: 846462 - DNA, 608 bp, Homo sapiens
ctggccagggtgccaccaagctgccctggaaacaattcagagctggtctcaccacccctgaccccacatgccacacataccacacgcatgcaccccaaaggcaaattcaaacattatagagacccagagactgctggaaaatcacactctccacagtcaggcacacatgagaggccgcgatttagggtggcctgacttcctttaagacagaagacaaagaggcggagattaacacatggttggctaactatggtagaacctgctaagagggttgtctatatttgaacttcaggaataaaagccaccagctacagatcgtttgaattcaactgcacttccacatcaacgacacaattctagtcaaagagagaacccacttagcactatgggcagaagagcgtgtggctgtgttcactgttggtgccatccaaggaaatgtattaattaaagtaaggataattgtgattcttccccaaaccacctccytatccttctccctctgcccagagtgggtccccttccccagaaccttctattctctcttcccacattaggtgctgccctcggaacctgcctacactctgaggagagaatggcgactaataggc

SEQ ID NO: 846463 - DNA, 602 bp, Homo sapiens
gtttgtgtaagtacactctatgacgttcacacaatggcaaaattgcctaacgatgcatttctcataacgtatccccaacattaaatgatgtaggactgtatttgattattttgtttctacaaatattattctcttcagtccttttttaaaggataatggtagtttattaaggtctaaatacctccagaaagaatgctaaaggcaaatatcagcaaagatgtctagcagggcttcaatgcatcctcaagcagtgttactcttaaaagcagaaaagagtagaatgcatttggttctgtttaaaaatcagatccagagggcatttcctaactgcagtctaatattttagagctgctataaggtcaaatattgggcccaaatccatagctatgtggcataaacccttgtaaatgacaagatgaaatttgtaaagaaacaagatgaaacagtaaagaaacttcaacttagttacaattctatttctttttcatgttaaaaacaaaaatmcctgacttctttctactcaatatcatttacagtctgaccagtgcttctccaccatctctctccccaacttcatcccatatggaagatggaattggcac

SEQ ID NO: 846464 - DNA, 665 bp, Homo sapiens
cttagtatctggttctcgttgagtttcagatcacctaaaccttagctctttttcacactgtggactgtgaggccatgtccccctcctgtacttaaaaaggttgatttcgtgaaacatagttgcagaaatgctttttatttgttccttcagtatttattgagcctatcctatgcgaggtactggggctataaagtctggtctggtttcctgattccagggtgccttgcgtctggaggaggagatgaacgtgacctaaacagttgcactgcattgtggtcagtgctgcgaaggctgggggcctcggtgcccagtagaggggctgatgtcagagaagcctcctgcgggctctggagctgagtccaaagggttgggaggtagttacatcaagcagtgagtgaaggagggaagcttgtttccttcagaccgagagcagcacctggcagggcaggggtaggaggcttccgcaggctgtgttcgccccctgctgtcccttctccccacagcagccagagccgtcctttggaagcatcaggtcttgtcactctttacctcaaaacttgacagtggctccatgaatcacgcccagtgaaaaccaaggtcaacacttgatctgccaggccgtctgtggtctggtcccggatccsagctgctgtccctcccctgct

SEQ ID NO: 846465 - DNA, 635 bp, Homo sapiens
ccgccaagcccacacccacccggaactccagctggcctgcaagcgccacacacagccccggttcccgctggcgcctctccctccacacctccctgcaagctgagggagtgggctccagccttggccagcccagwaagggactcccacagtgcagtggtgggctgaagggctcctcaaatgctgccaaagtgggagcccaggcagcggaggtgccaagagcaagcgagggctctgaggactgccagcacgctgtcacctctcaatcccccctctaaacaggacaccccaactgctgttgggaatttggccgatgacagctctagctacttcctgctggataggggcgaagaaggggccctgcagttgtggtgtccttcagaggggaactctctaggccaggggaagtgccagcgggtcagtccaggggtcctcggtagaagttgttagttgaactcatttggggttccatttgtaagaccatctgtagcttgatggcctcaattctagaggaaacaaatttgacaagaaggttaaaaatacagggcccaaaggcgagtaacagcaagatggctgccacatgacctagaaagaggggaagccatgttgcccaactccagaggttggtataagaattt

SEQ ID NO: 846466 - DNA, 611 bp, Homo sapiens
aactctccaggatcctttagcactctgcctacctctattatagcacttacctactgtactgcaattgtctcctttttwatctcttcacaccctatgtacaccccgctcccggctgatctgtgcttcttacatgctataagaatattttgcagatagaaatgtgttattccttcccaaagctagataccccataaaaatagctccctcgtgagtgccatggtgaaactcactcaacagtactgttgagaagagttagcaatgattaaggctttggtcccactcgccttatgtacagttagattgtagatgatttgaggacatggaattgatatttcatttctatattcagcactggccactgtgcttggaacattgtaggtgcccagaatgtgtttgctgaatgggttttatttactccactctatgatcattccaagataacactgtttatttttcccagccttatccttactcccacatgcaggatggatggggaagctgatggctctaagtagaatgatttgaccaaggtgacatcttatgttctagaataatatcatatgggtcccagaaaatcaagtttacccagatttcaaaaaagaaagccaaga

SEQ ID NO: 846467 - DNA, 613 bp, Homo sapiens
tatttatttatttactttttggggggatggagtctcgctctgttgcccaggctggagtgcagtggcacaatctctgctcactgcaacctccacctcccaagttcaagcattctcctgcctccgcctcccaagtagttgggattacaggcctgccaccacgcccggctaatattttttgtatttttagtagagacagggtttcactatgttgtccaggctggtcacgaactcctgacctcaagtgatccacccgcctcggcctcccaaaatgctgggattacaggtatgagccaccacgcctggcctatctctgaatttatgtaaggctgatcaggcagttctctttctcacattttagggaaaggccttacccagaaacacaacaaagtgacgggaaactaagaaagtataataggacttacatgtatcagattaacagagactcatgatttaatacttctaatttggaacagggtttttgacatttttttgtgtgattttcttctaaaagataatatttccttttgtgttatttttttttggaattcaaattagttatatttacattaactatagtaatacasaaatctcaagatatctgcagccctaagat

SEQ ID NO: 846468 - DNA, 622 bp, Homo sapiens
ctaagtgggattttttggccatttacatccaaggttagtatttttttttttttctttttgagatggagtctctctctatagcccaggctgtggtgtgatctcrgctcactgcaacctctgcctaccgggttcaagcaattctcctgcctcagactcccgagtagctgggattacaggtgcacgccaccatgcccagctaatttgtgtatttttagtagaaacggggtttcactatgttggccaggctggtcttgaactcccgacctcaggtgatttgcccaccttggcctcccaaagttagtattgatttgggaggtcaggactccggcctgtgccccgcctcaaggatagtattgatatgtgaagttttgttcccatgatgaagttgttaactagttgctttgtagtttccattgagtacttgctttataggatctgtgggccatacacctaagtgtgtttctgttgttaatcacctcatcaaacttctctgcaaggaaaggcagtataaataaaaaattttcaaaagttaaatttctgtgatcaagattacatgcttatgatgttatcacaataattcgaggtaaatggttgattaaagcaacataaatatattactaat

SEQ ID NO: 846469 - DNA, 612 bp, Homo sapiens
ctgcacgttctgcacatgtaccctgaacttaaagtataataaaagatggtaataataataataatttctgtgccaattctgtgggaatgacacagccatatttgcaggaagatattttgattgaaaataattaaacaccactaaaatttcacagatattttaaaaatattaaacatgcacctaagaaggaaatactatgattcaaagcacattggggaagtattataagtaaaatcttcaatattattgaaaatagcccaggttgagattataatataaagaaaggatgggtaagtgtgtccccaaaaagccaaaggtcattcattgatctgcaatggaaattctaagattgctgaatcattttatagatgaagaaacagatttagaaagataaagtgactcgcctgataataagctgcatcacacagatacatcaattcatcctagataacaacctagacagctgatgcatttgcacatttgcctcttcagataaactattctcaaggkaacttactgtataagaggaattttacagggttttttttttttattattatactttaagttctagggtacatgtgcacaacgtgcaggtttcttacatatgta

SEQ ID NO: 846470 - DNA, 612 bp, Homo sapiens
ctgcacgttctgcacatgtaccctgaacttaaagtataataaaagatggtaataataataataatttctgtgccaattctgtgggaatgacacagccatatttgcaggaagatattttgattgaaaataattaaacaccactaaaatttcacagatattttaaaaatattaaacatgcacctaagaaggaaatactatgattcaaagcacattggggaagtattataagtaaaatcttcaatattattgaaaatagcccaggttgagattataatataaagaaaggatgggtaagtgtgtccccaaaaagccaaaggtcattcattgatctgcaatggaaattctaagattgctgaatcattttatagatgaagaaacagatttagaaagataaagtgactcgcctgataataagctgcatcacacagatacatcaattcatcctagataacaacctagacagctgatgcatttgcacatttgcctcttcagataaactattctcaagggaacttactgtataagaggaattttacagggtttttttttwttattattatactttaagttctagggtacatgtgcacaacgtgcaggtttcttacatatgta

SEQ ID NO: 846471 - DNA, 544 bp, Homo sapiens
tcctgggttcaagtgattctcctgcctcagcctcccgagtagctggcattacaggcatgcaccaccacacccagctaacttttgtatttttagtagagacggggtttcacyatgttggccagactgggctcgaactcctgacctcaagtgatccgcctgcctcggcctcccaaagtgctaggattaccggcatgagccaccgtgcccagcccacaaaggtcttaactcagaaacattagctactcattgttagccgtaattagttcttatttagtattttcttctgcatgcaaaacttcagagaaaaaaatgggttctttcctatagatgctcgtcttcttttcctaatagttgttccacaggcaactcctcattatggcaagaatttcctgtgattctttgatgaaaatgagataattgaattttgtttaaattagttcaacatgggcgactccaggtagttcctgcacagggggcccatgaaggatgccaagaaaactgaagaagggttaacttgggttaacttgtgaggtattgaactgaa

SEQ ID NO: 846472 - DNA, 525 bp, Homo sapiens
atctggaagtaatattatctgagcattataccccaagcctggctctccacaagtgactgcatgtttcctgaaaccaactattggcagctgttacacaggcattttctgctttttagatacctataattacaccaattatgcgaatcattgatgtttataaaggatttaaaattttacacacccagaaatgtctatcagaaagcagcatctgaggcagagtgacaccctacagaggggcctatttggccttcacaatcgcttctgagagtcccttaaactgagccatcagcagggtaggcagcttcttatgagcctatatgtctttggcaagttaatcctgtcactggagtacaattctgtttggttaagaactacagaactcaatctaacttttattttcaaaggaaagaatgatgtgtcgaagttartaaaattaggcatttgactttaaactctctgaactgcaacacgaggataagatggttgacattcccctgttccagcctcctcctttagatacagtga

SEQ ID NO: 846473 - DNA, 617 bp, Homo sapiens
ttcaccatgttacccaggctggtctggcactccttggctcaagcaatagcagtctgcctgctgcarctctccaagtgctgggattacaggtatgagctaccaagccaggccatgactttttttttttaacccaaacaactccagtagttctctcattgtagactatttcattttagaaataaggaaaaccaagagaaatttaaaggtttttttttttttttttttgagacagagtttcactcttgtcacccaggctggagtgcagtggcacaatctcggctcaccgcaacctcctcctcctgggttccagcgattctcctgcctcagcctcctgagtagctgggattacaggtgcccactaccatggctggctaatttttgtaattttagtagagatagggtttcgccatgttggccaggctagtcttgaactcctgacctcagatgatccacccaccttggcctcccaaagtgctgggattacagtgtgtgccaccatatctggccaaggttcttaattattggtgttagtgaatatgaagtatacatcttaaaatttatagttcagtattctatttttctcagagaagtggtagagaagcattacagaagtactt

SEQ ID NO: 846474 - DNA, 595 bp, Homo sapiens
attacattttttaaatgctgtaaatgttcattcttatgttcatatcattgccagcatgtacaaatatttctttataatagatttcagggaatgggtttcctgggtcaagttgtatgtacatgtttaattttgataactattctcaaattgctctccacaaaaggctgtgttagtccacacaacaatagtatgtgtccatgcccattttcctacatcctggccaaccttgatatataaccaacattttaatttataatttgatcaccatggtttttagcagataagttttaatttctaaaagcttgtattttttatgttgttggtagtggttgtttaatctcttactattctttcaaaattttcttgcaacaattcaatacaagaatgtaaatggtaaaaattatgtttttcaaaatgtgttgagatttcttctgcagcttctattggtaaaatgccatgagtgcctaaaagaagcattttctctaaaaaatamacactttaaaatcttttcaacattaatgtattattattatattgtttgggttatcatacctgtattttgtatctagctactattctttcaaaactaaaaagt

SEQ ID NO: 846475 - DNA, 638 bp, Homo sapiens
gtcttaggcgaaagagtcctggttgggtatatcaaccctgtgcctagatttccaccagttcccttctattttcctggtgttttacagtttctagggcatcttcacatttgtgccaggcaacaactctgttcaagtattcttagcagccaacccttctgtctttgactcttcacccacaactcttacccagggagacagccaggacccaatgtccggaagagtcagtaaggaccagatcagcagcacaacctggcttgacatttgggtgaaggaccacaaacagccacagtggagggcgcctttgctctgtgtcagacacagtgctgaggcattgcctgcattatctgattgacttctcagctaagtatcaatgttatctctctttcatagattaggtaactaaggttcaaaggttttaaccaacttgctcaagatcacacagctggaaactgctggagctaggatttagatccaagcatcaatggacatcaaagaagtgtcccagctctcccagaytggagttgcagtgtaactgacttagagctccaccacgacccgaccagcccatagcaacaatgacttttaggagagacaatttacctgctttctgcattcgtgtaaatttcaggcttttgtcc

SEQ ID NO: 846476 - DNA, 559 bp, Homo sapiens
aagtataattagaaaaaccctccaggaggaaagtgrcagctatttttatttgcctgggtatagactccttcccaccctctgtctgactttctggatcctcatggatggtcacctgctgtcttcttcccagggagaggtcattcctgattcttcccatctgatataggacttattttgtaaacagtgacttaaatagtcatttacagttaaactgacctgtttacagtttaaaaacccttctaccaatttcacttagcaactgatctgtttcagtatccttggaacagaaagatcatgcagttttgtttggttttattgcaaactcttactagcacctagcaccactaaggacaggtttctgtctccagccctgctgtacttatgactgagacgatcttgcctcgattttttttggcccaccttaaatgggattaagaaattttttgttaatttaaagccgcaaattttgaaatacaaagtaatttggatcagagcaagaaaaaagcttatatctcatgctcatgctcttgaatttataaaaataaaatatttattatgt

SEQ ID NO: 846477 - DNA, 559 bp, Homo sapiens
aagtataattagaaaaaccctccaggaggaaagtggcagctatttttatttgcctgggtatagactccttcccaccctctgtctgactttctggatcctcatggatggtcacctgctgtcttcttcccagggagaggtcattcctgattcttcccatctgatataggacttattttgtaaacagtgacttaaatagtcatttacagttaaactgacctgtttacagtttaaaaacccttctaccaatttcacttagcaactgatctgtttcagtatccttggaacagaaagatcatgcagttttgtttggttttattgcaaactcttactagcacctagcaccactaaggacaggtttctgtctccagccctgctgtacttatgactgagacgatcttgcctcgattttttttggcccaccttamatgggattaagaaattttttgttaatttaaagccgcaaattttgaaatacaaagtaatttggatcagagcaagaaaaaagcttatatctcatgctcatgctcttgaatttataaaaataaaatatttattatgt

SEQ ID NO: 846478 - DNA, 628 bp, Homo sapiens
aaaaatagaaagcatattgcttcctgatgtagggatactcaacatagtaaagatgtcagaactccctaaaataagctgtacattcatgcctttctgatttaaacaccaacatttatagatatatacgtacatgtgtatgtatgcatacatatttttagaacttgaacaaatgatactagagtttatctggaggaacaaccatgtagaaataatgagagagagagagagagagagagagagagagagaaaacagtaatgacagaggtagctatctaatggtctaaccaaacatgcagaatattaaaatgcaaaaggaagataataacaaaacagtttggaacttaagggaaaaatagatatatacaaaaaagggtccaaaatgaatatacctatacacaaatttgggtaacattttaaatgagtgggagaaagatcaattagtcaattgggatatttgaatattgggataatttagataactctctgtgaaaaaaaaaaaagctggactcctacctcacttcttataccrataactattctagctagatcaaagatgtaagtattaaagaaaaaaatggaagaaagaaagaaaaaatcgaagagtataggaaggaaacaagagtagatt

SEQ ID NO: 846479 - DNA, 552 bp, Homo sapiens
aaaccagtgaggggctgggagggcagggagatggcttgtgttgactgaagctttggacagtcttaggacctgcgctagcagaatctgggggaatgttttctccagcagtttcagccgcacgccctctgcagatagagcacctccggccctcttgtcgctgatacatccaaggagaatcaggacaagagtggaagaggcagatattgggggtgggaggtgtcaggactgggctgtgagtctggggagctggtgtgcagctgaggcgaataaagggggtgagaatcagctagggacaaggatgctacagacagcctgtttcctctttcgggcagtgatcatggatgatcaagtcagttgaggtccaggcagcaccctacagctggagtgctagtcaggcatgcctacgtctgcaccttaggctggaaggacaccctggggcacacaagccattcctgagactcccctccccaycccagctgagctgggggtctcaccttgagaatagtactggtgtagctctcacctgatcaggcctttggggtactggaagga

SEQ ID NO: 846480 - DNA, 582 bp, Homo sapiens
gaaaaaagcatttagttgtcagtcaacatttgtgattagagtaagaaatcccagtgctaagatgctgtgctgaattaattccagtccaaagcaaagacacctgacatttaacccacggctgagaacaattaatttgtgttgtgtcattcatctgtataaaaaaccctctacgaacccatttcactcaaagcaacaaccagctacctgggaaaacaggagaaacagggtgaggtgtttagttgggagggtggaacacatgcgaatgggactcaaatcacaggtgtcctctcctgtgagtgacaggatatggaagctactacttatccagtactggccacgtgctggcttggtgctgaggctttgagaacatcatgtcacctaatgtctctgcaactcagggaagtagctaaggtcatcgtcctcattttcctgacgggaaaattgagttttacaggatatagrgaacttgtccaagatcacccaacagtaagaagcagtgcaggagcttgcaaccaggtctgggatgaactcaacttgtgctctttcagaaaaattttatagcttgattttatttttaattaa

SEQ ID NO: 846481 - DNA, 605 bp, Homo sapiens
agtaagaagcagtgcaggagcttgcaaccaggtctgggatgaactcaacttgtgctctttcagaaaaattttatagcttgattttatttttaattaacatataataattgtatgcatttgtgggttataatatgrtattttgatacatctatatacattgcagaatgataaaatcagactaattagcatgtccatcacctcaaacttctaccatttctttgtggtaagaacattaaaaatcctctcttttagctactttgaaatatacacttttattaactatagtcaccatactgtgcaatagaacagagtttattccacctgtctgactggaactttgtacttgttgacccttttccctgtccattttctgtcctcatcccccagcctctgctaaccaccattctacattctattctgtacttctacgagtttgactgttttagattctacatatacagaaacgagatcatacagtatttgtctctctgtgcctgacttattccacttaacataatgtcctctaggttcaaccatgttgtctcaaatgacagaatgtcctgttttcgaaaggctgtgtcatactccactgtgcatatactaca

SEQ ID NO: 846482 - DNA, 608 bp, Homo sapiens
taattcaatttccaaactaagaccatctataaaaagtttccactctaacttttgggtataattagttctctttttcctttcatttcgtgaagcttattgaaaccatctgtgatgcactgacagtttattcttgagaatcaaaagaatgtttttaaaaaaccaagactcctctgggtcagcacacttgtcatttcatcccagcagtttgacatctgtcattctgagattacaacttcttaaattcagaaatacatagggatatacagagatatatagggaattctaattctcctcagtactctttaagtgatttataattcacatagatcatttctacctgactaccctctagtatattgacttttgataggttattgcttactatttaaagaagtgctccaaaagataagcttaggttaagtttcaaatcccactaacattaatatccttaggtctgttaaagaatcaatatgtrtcccacctaatctattctactcatagataagcttcctgatggcaaggatcctgcctaattactgcattttccacaatggctaacccatggcaggtccccagtaaaggttaatctgatgaatgctgaatcacta

SEQ ID NO: 846483 - DNA, 617 bp, Homo sapiens
tcttgctctgtcacctaggctggagtgcagtggcagtcacagcttactgcagcctcgaactcctgaccttaagtgatcctcccacctcagccttacaaagtcctgggataataggcgtgarccactgtgcccagctactttgcccagttctttaaggtggctgaagaaagtcatatcagctgccaataccaactagtacagtccctcgctaataaatataaatcacgtgcaagaatcatgaggtgtttgatgaaaatcaagaatataaaagagaaatgtaaaaataaatagagcaaaccctgggggggatggtaaaaattatattatatttatataaccaaaagatatactatgctatcacatccataaaataagaacaggctgctatgaaaaagaagtaaacaatgaatgagaaaacattcttggaactaagaacatgcaatgcaatagaatagctgattggtagaagggtatagaattgaaaaacaaatccacaatttaaagaccaagccatggaaatctggaatgaagagtaaaatacaaagaaaagcaaagaactaattcacagaaaagttggaaatatacagggtagagctggagagccaatattgattgaa

SEQ ID NO: 846484 - DNA, 625 bp, Homo sapiens
gggttaaatgaaggttaccaggtggaggttgttagggagaaggcattaagtgaaaatgctatgtaaactgcatgactgttgcaagcagttggttctcttgcctagcccrctgccactggactctcttccctgtatgtaaactccccccaaaaccctctgtctcctttgctggctctgggtctccttggcctctagaacctggtgccatccccactggagttgataggggttcagcacaaattggtgttccttaatattgctgtactacagtttgtttaaccacttctctatatatagacatacaggtaggtgagggtgttgttttttgtttttgttttgctatcttataatctattttaaaattagtcactgataacataaacaaatcagaatttaaaaacacaatgttaattctccttggaaaaaaagccataaagtgattatttgtattattctaataatacagataaataaaatttacctttgccatttaaaaaaaaaaaaatggcaaaaaccacaattacttttgcaccaacctaataataagcatttttttcattttaaatattttggtttctcacagttgataaacatgcaaaatctgtcattgttttcaatacaatgt

SEQ ID NO: 846485 - DNA, 625 bp, Homo sapiens
taacactccataaccatcgttgttcaagtaggcaataaacaataagggataaaatactcaaggtggacttcagcatgaaacaagatcttagatcaggccaaaaaggaagtttagaatagtgaaataaatgttacttcaaaatatgatctctaggcctttactaatgaagcagcactgagagagttaaagcaagaaagtctttgagcttttgttgaatgttggaaatacttggaaaacacttgcttttcctaattataaaatcaacaggtgagaattccattaaacgtaatgagtgaggcagattcacacattcttcaattctttaataaaataacaaaaataacaaaactgctaaaaaaaagaaaaaaccatcagcaaccaaacaacaaaagggggtataagtttaagccacaattttgaaaaacagcagtcagagaaacagtagactcaggtgtgggatcgtctagcatgtctcctaatcctaccaccaccccgaccccgcttctcagaatgtcagattactgccttaggaggaattcattamatgaattcatttaattcattcattaattcatttaatgaattccttaggaggaattcattaaaatcttcaattctgcaataa

SEQ ID NO: 846486 - DNA, 631 bp, Homo sapiens
atgatggggccggtcccagaccctgcaaaacccgtttccctttgcttgctggcgacgtgctaggytctgccgatagggggcagtagagggagcctgcaagccgggaggagggaaaggggctcgttcctctctgtgtccggtcagtgttatttgtgtctgtactcagccttcatcctggcagcggttagtaccagtctcctggttttttttgtgtgtgtgtgtggttttttttatgttttgttttgtttttgttttgcactcccggaaccagccacattgtgtcctctccccgctcccgccacccgcccaggcactggcaccaggcgcctcttgggaacggcaggcctttctttccagtttctggattttaatcccccagcctcttctcttagtaccctggaccagggagtggtagctgcttccagcatttactttcttctttgcttcttcactcttctagcacctgtttaaccagctccttctattaattttttttctgttaagctccccttccccagtcctaaaaaaaaataataataataatctattgaaatacttaatgtggaccctgactcatacaatgaccatgtgtcaggaactgcagatttataacacaggtagataaggaggt

SEQ ID NO: 846487 - DNA, 631 bp, Homo sapiens
atgatggggccggtcccagaccctgcaaaacccgtttccctttgcttgctggcgacgtgctaggctctgccgatagggggcagtagagggagcctgcaagccgggaggagggaaaggggctcgttcctctctgtgtccggtcagtgttatttgtgtctgtactcagccttcatcctggcagcggttagtaccagtctcctggttttttttgtgtgtgtgtgtggttttttttatgttttgttttgtttttgttttgcactcccggaaccagccacattgtgtcctctccccgctcccgccacccgcccaggcactggcaccaggcgcctcttgggaacggcaggcctttctttccagtttctggattttaatcccccagcctcttctcttagtaccctggaccagggagtggtagctgcttccagcatttactttcttctttgcttcttcactcttctagcacctgtttaaccagctccttctattaattttttttctgttaagytccccttccccagtcctaaaaaaaaataataataataatctattgaaatacttaatgtggaccctgactcatacaatgaccatgtgtcaggaactgcagatttataacacaggtagataaggaggt

SEQ ID NO: 846488 - DNA, 589 bp, Homo sapiens
tcctattttacaggaggagaaactgaatctcagggagattagttaatttctacaatgcatagctaataagtggtaatgctgggatttgaatccaaatatccccaactccacaatctrtatctttcccatatgctttaaagttgtttagacctcaattcaatctatccttaactgtgttctgcaatataactcagtccttaggctaatccacaactgtcttcttacctaatagtgtaagtaaatatagcactattctaataagtactagagaatataatcaccataatacaagactgtttctgtgactgaagttatggggaggttgagaaaactgtaggaaaagcatggacatttctaactccaagttacttgtcattcattcattcagttaatataatatagtgcctattatgtgcctgaagatgtgctggactcacggtgataaacaaaatagaaatagtccttcctttaaaaactttccaatctaaggaaagtgacagtctttaattaaataatcatgcataggagaaatacctaactatatcacacagagacttagcatagactgggtacttgactacaaaggctg

SEQ ID NO: 846489 - DNA, 602 bp, Homo sapiens
tcttttatctcaaatccacaagwccagatgaatttcaaaatttagatttttgtgatataaaattaatataattcttatgttatatacaatacaccatccttgatgagatacagcataggacttcataatcaaatattagtatttctacagctaaagaagtagtaaataaagacatgaaataatggcatcagttcaatataggtttttatcactaaatccatataggttagatttcctcaccaaatgagttacaaaaaccttaattttggagctttttgagttttagaattgcaaataaggggttgcaattaatgaaaattggccttgtgttaggcttttaaaaaaatcttcacttttaaaaaaaggtctaaggagtcagcaccaaagagaccatgttttctgatctcagtgaaataaaagttgaagtcagtaacgaaagtatatcttttaaaaacctcaacatactcctatgcctagaaagaaaacaaaatagtaaataacccttcagaagaataggaaattataaaatatatatggaatgcaccataaaagtacttatgagtatatttattacttcaaatgtatttataacaatgtaaata

SEQ ID NO: 846490 - DNA, 532 bp, Homo sapiens
ctagccatttggcttgttgtctttatattattatttatttttagtaattaatatacacaaaatgattatgtcagtcacgggcctaagcactttacaaatattagcatcattttgaagtttctttctatttatttatctctaattggcaaataataattgtgtatatttatggggtaaaatgaatttttttttgagacagagtctcgctctgtcacccaggctggagtacagtggtggatctcggctgacaacctccgcctcccaggttcaagtgattctcctgcctcagcctcctctcctggattacaggtgcccaccaccatgcccagctaattttttgaatttttagtagagacagggtttcaccctgttggccaggctggtcttgaactcctgacctcaggtgatccacctgccctggcctcccaaagtgctgggattacaggygtgagccaccatgcccggccaaaatgtgatattttgatctatgtatacattgcagaaaaatcaaactgatatatccatcacctcc

SEQ ID NO: 846491 - DNA, 624 bp, Homo sapiens
actcctctgtaagccttaaaacctgtaagggtggactgaataattcactttagaaatcatgaattttgggttttgtattagccttaaatatagtcacatttggtttaagtaatacaaaacttgatgctaagcttagtgactctggtaaacattagaaacaattttttttttgagatggagtctcactctgtcgcccaggctggagtgcagtggcgcgatctcagctcactgcagcctccacctcccaggttcaagcgattctcttgcctcagcctcctgggtggctgggattacaggcacccgccaccatggccagctaatttttgtaatttttaatagagatggggtttcgccatgttggccaggctggtctcgaactcctggcctcaggtgatccacatgtcttggcctcccaaagtgctgggattacaggcatgagccactgtgcctggccttgtccagtgttttttagtcattcaagaatccagcctcatttcatcccagctggaagaaaaagttcaacatagtgtttataatgtattatttttaaaattttcaattagtacatagattttcttaaatayacttcttagaaaagaaattgcatttaaatattatagatgt

SEQ ID NO: 846492 - DNA, 641 bp, Homo sapiens
aaattccgttatcccattctaaaagtgcaaactatcaagtgattagaggttctccaatttgtagaggctcctgaggaaactggttataaaagtagtgcgggaggccagtgctcctagttcttgttcagtgaaattctcaagcagatgcagtaaggaaaaatcaaggaaaatgcaacaaaaaattattaatttggacttcatttgagtttgtgaagatcataatctgagctacattttaccctgtttactttttttgtttgtttttttgagacagtcttgctctgtcgccaggctggagtgcaatggcgcaatcttggcttactgcaacctccgcctccggggttcaagtgattctcctgcctcagcctcccgaattacagctgggattacaggcgtacgccaccacgcctgactaatttttgtatttttagtagacacagggtttcaccacattggccaggatggtctcgaactcctgacctcaggttatccgtccgccttggcctcccaaagtsctgggattacaggcgtgagccaccgcacacagcctaccctgtttacttttaaatgcctttctgaacaataagtttttttttttctttttttggtaagagatggggtcttgcactgttgcccagact

SEQ ID NO: 846493 - DNA, 605 bp, Homo sapiens
ttgcccattcatccagcttctcttgtgaagttattgttaaggtcttttgtccatttttgggttgtttatcttttcattatctttattcacttttggagttctttattctgaatacaagtccttcgtcagactcattttgtgactattttctcctaggctgtggcttgtttctatggtggcttttgatgacagaagtttttaattttaatgttcaatttaccactttttttcatgattattgttcttgtgtccagtaaatctctgccttctctcaaatggcaaaaatagtttctgtgatttatttatttacttttatttatttattttttgagacagttttgctcctgttgcccaggctggagtgcaatagcgcagtctcggctcactgcaacctctgcctcccggattcaagcgattctcttccctcagcctcccaagtagctgggattccaggcatgcaccaccaagcccaactaattttctatttttagtagaggtggggtttccccatgttggtcaggctagtcttgaactcccaacctcatgtgatccacccrcctaggccttccaaagtgctgggattacagggcttttttttttttttc

SEQ ID NO: 846494 - DNA, 387 bp, Homo sapiens
ttttgcccactgtggatttgcaataatgcatcattatttgcagtgaaacgtagtggcaggagtaggtgctagctacctgcttgccaaattggttaagtttccattactaagagccttakgaggaacagcggacagttttggctctgtagcttgtgcttagaatggctgtggagataagggcccaatgatggcaactggacaaaatgttcttgaagtcaacatgaagctgatcagttatgtgctcagttctgatacctcagcttcacagcaacaggtgtatccaggaaacttcagaggaaagaggcagaaacctccaggaagcaatggagagggtttgagctcaatgagcaaagactcaagcctagacccaatgaaataccaataaat

SEQ ID NO: 846495 - DNA, 406 bp, Homo sapiens
tactgtaaatagtcttgcacaagtcttttggtgcactacatggtgatggttaagccagagacagctaaagagttgtggagatagctgggtagactacagatattaagaaggrtgaaggtaaatagccctaaattatacccaaatgctcttcattgctcaaatataataacaatagcaataagtccaaaaagtgttaccctcaatggtatgtatcactttcagccttggtttcataaaatagcacatagttttttaacaagcataagctaaaaaaaaatgtgccacttaattagcttcacaaatggctgccttgctgttttctacttattttagggtggatttgatctgtatgtattcaaccctgaacttcagcaatataaatgaccatgcttgcccttatccacct

SEQ ID NO: 846496 - DNA, 652 bp, Homo sapiens
tgaggcagaactcagaggaaggataacttgtctgttgaaactaagagacaagtacttgaayactttctggtcctgggaagcttctggaaaccaattcaatgccccaaacactgataggcaccttccatatatgtcaggaaatatactaagtgatcagggatagacagatgagttgggcatgatcccttccctcacagagtttagatctgggtaatccaggtctaaagactctgcaagagaatatgacaaaatgtttacctcttgatagtgagattacagctaatattattattaataatttttttttttttgagacggaatcttactctgttgcccaggctgaagtgcagtggtgtgatctcggctcactgcaacctccatctcctgggttcaagtgattctcctgcctcagcctccaaagtagctgggattacaggcacacgccaccatacccagctaatttttggtatttttagtagaaacagggtttcaccatcttggccaggctggtctcgaactcatgacctcatgatccacccgccttggcctcccaaagtgctgggattacaggcatgagccaccgcgtccagcctattattattaaattttttaggacataataggatactgtagctgagtagttttgaagcct

SEQ ID NO: 846497 - DNA, 652 bp, Homo sapiens
tgaggcagaactcagaggaaggataacttgtctgttgaaactaagagacaagtacttgaatacyttctggtcctgggaagcttctggaaaccaattcaatgccccaaacactgataggcaccttccatatatgtcaggaaatatactaagtgatcagggatagacagatgagttgggcatgatcccttccctcacagagtttagatctgggtaatccaggtctaaagactctgcaagagaatatgacaaaatgtttacctcttgatagtgagattacagctaatattattattaataatttttttttttttgagacggaatcttactctgttgcccaggctgaagtgcagtggtgtgatctcggctcactgcaacctccatctcctgggttcaagtgattctcctgcctcagcctccaaagtagctgggattacaggcacacgccaccatacccagctaatttttggtatttttagtagaaacagggtttcaccatcttggccaggctggtctcgaactcatgacctcatgatccacccgccttggcctcccaaagtgctgggattacaggcatgagccaccgcgtccagcctattattattaaattttttaggacataataggatactgtagctgagtagttttgaagcct

SEQ ID NO: 846498 - DNA, 652 bp, Homo sapiens
tgaggcagaactcagaggaaggataacttgtctgttgaaactaagagacaagtacttgaatactttctggtcctgggaagcttctggaaaccaattcaatgccccaaacactgataggcaccttccatatatgtcaggaaatatactaagtgatcagggatagacagatgagttgggcatgatcccttccctcacagagtttagatctgggtaatccaggtctaaagactctgcaagagaatatgacaaaatgtttacctcttgatagtgagattacagctaatattattattaataatttttttttttttgagacggaatcttactctgttgcccaggctgaagtgcagtggtgtgatctcggctcactgcaacctccatctcctgggttcaagtgattctcctgcctcagcctccaaagtagctgggattacaggcacacgccaccatacccagctaatttttggtatttttagtagaaacagggtttcaccatcttggccaggctggtctcgaactcmtgacctcatgatccacccgccttggcctcccaaagtgctgggattacaggcatgagccaccgcgtccagcctattattattaaattttttaggacataataggatactgtagctgagtagttttgaagcct

SEQ ID NO: 846499 - DNA, 643 bp, Homo sapiens
ttacattatactatgatgattaaatttatgtatcaacttgactaggttgagggatgcccagatagctgataagacattatttctgagtgtgattgtgagagtgttactggaagagattttcatttgcatcagtggactgagttaaatagatctgccctcaccaatgtgagtgggcatcaatcaatccattgactgtccaaatagagcaaaaaagcaacagaatggcgaattctctctcttcgtaagccaggacatccattttctcttgccgtcagacatcaaagcttctggttcttgggctttcagactccaggattatcaggcttttggccttgaactgggagttacaatattggcttgccttgttgttaggcctttggactctgaattacagtgtggactttcctggtgttctagctcacaaacgacatatggtgggacttcttggcctccataatcatgtgaaccaattcccataatacatttccatatatatatatgtataatgtatgtatatgtatatatatrtatatttatttcctataggttttatttctgcagagaatcctgactaatacaccaagtgttgccaaacacactctccaaacacatccttttctatggaaattgtctgtgcttggaa

SEQ ID NO: 846500 - DNA, 613 bp, Homo sapiens
acatattgagtattcgttacccactaaaattttataccaaagttcacgattctgagaccactggtatgtagaaaaatacttggcctctgtaaacgaacatttcaaatgtttcactgaccaagagccaacaattttgggaaaattttaaagccaattttatgataaaaattatgtgagttttagtcatgacaaatatttaaacaatgcacatttaaacaatacactctttattcacctaggaaccgttaggataatatagttaaagtgtctacatgcttttgcattgtatcttgttaaaaaaagccaagttttgcttgagatatataaacctactgtccttacatatctttcttccccaacagaatttgagtggcattcaaaactcacaatgttgcaatgagctctgcacttgggaatattcatatttataatctgtatattttagccaatatggttttttgttttatgaggcctggaatattttttcaattcaatatcaatctattcttcaagatggacatgagatataatattttatatatgctagccctacwttgtgagataatacttaatggtcttctcctccatcaatctctccaaatgcaacacaacc

SEQ ID NO: 846501 - DNA, 460 bp, Homo sapiens
ttataaaaagagagccaaaaagaaaagtggcaaactccaattttgtagcttctggcacagctgtatagatcttgttttagaattttttttttttttggttataaataaaattaattgacagwgcaaaccaaatggtaaagagaagcaaaagtattattatatagtgtactacctttaagacaactttatgtattccatagcctctttccatttcctaagtagtctttgcttttttctttttcctctttgcttccttggaatctgattatcttatgttttaaagattattcattttttttcaggttttggatatgatgctttataattcaggcagatccttgaactgttactcagataaatatagtaatagaaatgtatatataaagaactgaaaaataggttttttctattggggaaaaagggtaagaggggggttgatacaagtgaaggcttcccagag

SEQ ID NO: 846502 - DNA, 648 bp, Homo sapiens
gtatatataatcacatggaggttgtagccttgccttgtatgattaaacagagaagaaaggtggtatttgttaacatttctgttttttacatgtatcattcttttatcacatctcataggtgatagcatcctatttttttctttattttcttgggattcagcccaagtctgtctccaaagtccatcttctttcctactgctctactacactgcagagaaataggacggtgaaactgaatatatatgtatgtactgtcataaaactggttataatgcgttctttttctccccccaatctaccttttctttttccccagaatccagattatcttcagtattctatcagtacagctctctgcagcttaaactcggtggtacataaagaagatgatgaacccaaaatgatggacactgtataatttggttaagactgctgaggccaagtgctattttgttacaagaaaggaagaacttggctattttcttgacacttttatgggtgctgcactttatttttgttyggtttttgatgggagggaaagagtactgaaatgttttgtaaattttttttaatgtgctgctaggttttttgttttgttttgttctgaagagaagagtggtaccatatgttgcaggaagtcaaactgga

SEQ ID NO: 846503 - DNA, 595 bp, Homo sapiens
gaggcccagttgcataatctgtgagatgggaaaaaatctgcctatgtcattgggttgttttaaggactgagtgagctcatgtgagtggagcatctagaacagcgtytggcagcccatacatgctcaataaatggcaagttttattgttatgattagaatgagttggaccattcaggccccaatcaacaacacttctctctctctctctctctctctctctctcacacacacacacacacacacacacacacatatggaatacagcagaacatctgggtgagaaagtaccttcagtgaccctcaaggttaaagttagaaccagcctggctccaagctttacccttgatgcccacttctgtgcatggatcttacagcatttaggtctggctctgtcccctggcattgcaggtaagtattgctccacatggagcctttgctcagaaccagctcaggctcactggggagtccagtgctatgtactgtagtttgcaggtgacagatgagatggaaagggaagcagagacatcctattgggcttgaaaacacagattcacatttcaaatggcaaaagcccctgcacctggcttggaagctg

SEQ ID NO: 846504 - DNA, 648 bp, Homo sapiens
aaaaataactgatggacgagcttcctataggcactcccrtaattctcacgaccgctcatgtccttttaacccacaaacactatgaaagaagagcttgctatagactggaagctgcttgacacactcaaaaggaaggagacgagggacaagaggcacggagagaggagaactcacacttaccgagtggccacagagctagatgccgccttctgctccaaaccgggggaagggaaagaatgggaagagaaccagaggacaatgaggggaccgcagcgggccccaaagataatctactatcatgttaagccacttagcctaagacaaccatgacctgttcttcagtcggacctatttataagtatactgaatttactcaaaccatgactaaaaaccaacagaagaggggtggaaaaaaaagatttaaaaacaaaaatggaaagacccaaacaaaaggctgtgtggcctaggtggatcaagcaggacttaggggatgggggctctgggcttgacagtgccacttactggctctgcccagtttgccaagttatttccctcctcggagcctcagttccctcatgagtcaaataggatgctgggccagataagctccgtttctgactagtgagactctaactgtagtcacgtatc

SEQ ID NO: 846505 - DNA, 560 bp, Homo sapiens
acctaacttttgcatcacacaaggattcccatgttgcaggggtacmgcgtaacactcgcatggagttttttggtttgggttttttgttttgttttgtttttttgttttgttttgttttgttgagacagagttttgctcttttttttttcttttttttttttttgagacggagtttcgctcttgttgctcaggctggagtgcagtggcgtgatctcagctcactacaacctctgcctcccgagttcaagcgattctcctgcctcagcctcccaagtagctgggattacaggcctgcaccaccagacccagctaattttgtatttttagtagagacggggtttcaccatgttggccaggcttgtcttgaactcccgacctcaagtgatctccctgttttggcctcccaaagtgctaggattacaggcgtgagccaccacacccagcctcacgtggatttttgataaagcaaggttcttctgtgatagcagcaggcctccattatcctggtcaattggcctgcacaactagggaaacaatggtggaaaacttcgagaagcttg

SEQ ID NO: 846506 - DNA, 638 bp, Homo sapiens
tttttaatttttaatttttaatttttttaagaccttttttttccccttttttgagatgagttcttactcttgtcgcccaggctggagtgcagtggcgtgatcatagcgtactgtagccttgaacttctagggctcaagtgatcttcatacctcagtttctggagtagtttggactacagttgttcaccaccacacccagcaaagaatgtgacaaaaagtactaagtgtgttttagctaagtatcgataagaaaagagtgtctttttatttattttttatttgtttatatgtactttttgagacagggtctggctctgtcatccaggctggagtgcagttgtgtaattttggctccctgcatcctcagcctctcaggctcaagtaatcttcccaccttggcctccggagtagctgggtttataggctcttgccactatgcccagctaatatttgtattttttgtagagatggggtttcaggttttgttggtcttaaccctggcccaggrgtgtctgtaaatttttttttcttttttttgccactcagtttcctcctgtgaatgtatctttcttttgctatttttcttttttttcccccttagggtcttgctctgttgcccaggctggagtgcggtggct

SEQ ID NO: 846507 - DNA, 596 bp, Homo sapiens
ccccctcattcgtcctgtctttattttyacacttctctaattaattgatatcttctgctcttagcactgcagcaaatgtgcctgcatttttatgtggatcttcactatgcaggctatgcttttaagtttctggaatagaatgatggtaaaaatgagtcatggcttgtttctatatttgtttctgagtcaagaagcttaattttcttactataatgcctgagatatcaagctatacagtttacttttaagggaaacaatcacaatttcatcaattcctttaagtagatgttttcaaatattatagaattctttggatttgtgtttccaaaatgaacaacacaatggtagtgctattattgttttaaggagaaaaagaagcatatccaaaataggtaaaatcttcccctaaatcccctgggaacaggcctatgggtgttgccctggcctgctcacagccccaggacaaccggcattaattcactgagggcctcatacctacatctcaatgactgcttaaaccagatacctgagggtctggggtctaacagaagaaaaaaggagagtagagctgagggttatggaacattcccaggaag

SEQ ID NO: 846508 - DNA, 456 bp, Homo sapiens
tgtctggctgcccttaacattttttccttcatttcaaccttgataaacctgatgattatgtgtgttggtgttgctcttctcaaggaatrtctttgtgttgttctctgtattttatgaatttgaatgttggcctgtcttgctaggttggggaatttctcctggataatatcgtgaagagtgttttccaacttggttccattctctccgtcactttcaggtacaccaatcaaacataggtttggtcttttcacatagtcccgtatttcttggaggctttgttcattccttttcattcttttttctctaatcttgtcttcacgctttatttcattaagttgatcttcaatctctgatatcctttcttccacttgatcaatttgggtattgatacttgtttatgcttcatgaagttctcgtgttatgttttttcagcttcatcaggtcatttatgttctt

SEQ ID NO: 846509 - DNA, 584 bp, Homo sapiens
aaaattcattcctttggttcattttagagatgcatttgttccaaagagaggtacttttttattatttgtcatttacatcaaggatggccagactttttctgtaaagagctaaatagtaaatagtttaagctttgttgaaccaggagacaaaatcaaggatagtatttaggcacttatataacaagagagaaaataatttccacaaatttttaattgatgaaattcaaaacattattaatggatacggaaatttaaatttcatgtaattattctcacttatgaaatattcttctttttaaaaaacaccattaaaatataaaagaactgttcttagcttataggccaaacaaaaacaggtggtgagccagatttggtctgtgggcccttcctttgccaacacttatttacattacactgtgaaagaaagagtctgttagtcattttatgggatcagggttttctctttggaacaaaggagagaccatgaggacattggccaytgttacttgaaagtgtgtgtgaggtggtgggggcctggtgtgggcattttgggtttgtctgatcttttggttttctacttttag

SEQ ID NO: 846510 - DNA, 578 bp, Homo sapiens
ctactcgggaggctgaggcatgagaattgtttgaamccggcagttggaggttgcggtgagccgagattgtgccactgcactacagcctgtgtgacagagcaatactctgtcaaacaaacaaacaaacaacaaacaaaaaaacacaatagaataaaactagaaatcagtaacaagaataattctggaaactatacacattgaaattaaacaatgtgcttctgaatgaccagcaagtcaatgaagaaattaagaaggaaattgaaaaatttttttgaaacaaatgataatggaaacataacataccaaaacctgtggatgcaacaaaagtagtactaagagggaagttcatagctgtaagtgcttacatcaaaaaagaggaaaaacttcaaatgaacaatctaatgatggatcttaaagaactagaaaagaaagagcaaaccaaaccaaaaattagtggaagcaaagaataaaggtcagagcagaaataaactgaactgaaatgaagaaaacaatacaaaaggtcaatgagataagaaagttggttttttgaaaagctaaacaaaattaataaaccttta

SEQ ID NO: 846511 - DNA, 531 bp, Homo sapiens
attgctactttagctacaatgtgacaattttctttttttgtttttgatataactccatggcttttttcatcagccagttgaaatctttaattaaaaaattaaagkactacattcacatatttcgaaagttgtaatagaacaatagtatagatgtaatagtattagtaatttttaaattattatttcaataagttttggggggaataggtggtgtttgtttacatggacaagttctttagtggtgatttccaagattttggtgcacccatcacccaagcaacatacactgtacccaatgtataatcttttatccctcaccactctcccacccttctgcctgagtccctgaagtccactgtatcattcttatgcctttgcttcttcgtagcttagctcccacttacaagtgagaacatatgatatttggttgtccattcctgagttacttcacttagaataatggtctccaactccatccaggctgttgtgaatgccattatttcattccttttcatggctgagtagtatccc

SEQ ID NO: 846512 - DNA, 638 bp, Homo sapiens
ccgaacaatgtcctgggggtctccaaagcctgcttctttggcatccagatccttcattctgagtcctgccaatatgtggagatgtgggtgcatgaactttggctgcattttgggttcgttaacagagcaaagaatttgccagtgaagccccgatgcgttttgccccaagtaccttgcccttcatttatagactcctgggaaaaccaagcccatctgtttctcattcatttacactttactcatcaaaatgttggttttggttggattcctttgttttcatttcaagaaacctttaagaatgtagagtggaaaaaagatgggtaattagcaaggagtgctgaggaccctaacctctccgtcctgtttttaacattacttatggtccattgtgtggtgacaagcatttttttcctactgtcccacttatcaattcccctaagttattaaaaaaggaaggaagaaaggaaggaagaaaggaaggaaggaggtcctttttgcttctgttccacaaccaaagatttggaaacaagctagaatctgcatgcttccatgaggtaatagwcataggatctcagattttgcctttcctttctcaatctcttgtttttaaagagacaacagcattttcttaggttcat

SEQ ID NO: 846513 - DNA, 314 bp, Homo sapiens
gtacaggagaacacagagtgtatgtagggttcagcgccatctgcggtttttaggcatccactgggggtcttggaatgtaaaccatctggagagggggacattagtttctctgttttggtagtaattgtatctttttatcggtgtattctccttagtttctgggccaaagagcaagtattgtaaggtcaagaaggatgtttctctaatttttggttttcttgcccacagaagmtcaatgataaacattggttgatttgaactgaaatttgtgaaatatacactctctatgacattttagagtaaggaaggcacag

SEQ ID NO: 846514 - DNA, 618 bp, Homo sapiens
aaaagcaaaagcaagtgaaagaaaagcttctgctaggccaggcgcrgtgactcactcttgtaatcccgggacactgggaggccgaggtgggagaatcacccgaggtcagcagtttaagaccagcctggccaacatagcgaaactccatccttactaaaaatacaaaaattacctgggtgtggtggcgtgcgcctgaagtcccagctactagggaggctgaggcagaagaatcgcttgaacccaggaggcagaggttgtagtgagccgagatcacgccactgtactctagcctgggtgacagagcgagaccctgtctcaaattaaaaaaaaaaaaaccaaaaaaaaaggcttctcccgcccttccctcccttgacctgcctcctggccctcagatggattccttgagagagtcatcttcacttgctcctcagctccctcagtgcacactcatttttcaacagattcctaaaaggccacgggtggaatcattccaggccatagcgaaccggtggtgctcatcctaaaacacaggcgcttgaaatgcgtatttaaaagcaacacacgcgcagtgcagaaaacaaaaacagatacaagcaaaaagtaagacgcctataatcc

SEQ ID NO: 846515 - DNA, 617 bp, Homo sapiens
tgggggaggaggatccaggcagtggtaaggaagggggctctgtgtcctggggagaaatagagaaagtcttggaaagtaagttcatgtcaccttacagggccttgaatgtcaggcgaaataacttaytcaacttcgtaggtgatgagagctgtggaaggctttgagcaggagagcaacatggttatagctgagtggaaatcatttgagtccagaagttgctggattaccatatggagctggagactatagctgcagaaatcgtgtggctgttgaaataatctagtggagagggctgttggggacatgtacagttagttatcttattttcattttcctcctgttgatgtaatttctgtgaccagagtcttgttctattttaatctgcaaagcatgctgttcagtatgacatgtaataaatgttgaaccctctttggggagtcagtcaatcatgaagacaattattttgacttgagacaaagaaaatgaaagtcctgaggaaaagtgttcacatttgctattttaagctgggagagcaaatgttctcagaactctgcggtcccttggattgggtgcagtttgctctgctgagcgtgagttggcagccctgcctgcttgaa

SEQ ID NO: 846516 - DNA, 618 bp, Homo sapiens
ctagtgagtagagcccagggatactactaaacatcctacattgcacagggcagatgacacacaacaaagaattatccagccaaaaatgtcaatagtgcagggtttaaaaaaccccaatttaggccaggcrctgtggctcccgcctgtaatcctagcattttgggaggccgaggcaggcggatcacttgaggtcaagagtttgagaccagcctggccaacatagtgaaacttgtctctactaaaaatacaaaaattaggtgtggtggcaggcgcctgtaatcctagctactcgggaggctgaggcaggaaaatcgcttgaaactggaaggcagaggttgcagtgggtcatgccactgcactccaacctgggctaaagagcgaaactccatctcaaaaaacaaaaaaacaatttaggcctaagttagttgagggattttatgggcaaacagtggcattaggttgcattcccacatcccttttcccacacattgtatatagcacttttggagaatcattctatcactgttttttagctatctaaacaacatttatactcacagcttcatatacagaaattatatttcctttcccccaaaaagagttaagtaaactttccca

SEQ ID NO: 846517 - DNA, 647 bp, Homo sapiens
aaatcttcctttctctgagatcaatgtccaggattgtaagcactgggttatacagaggttgcatgtttagacaaaaaactgacaaactgttttccggagtgactgtaccattttacatttccaccactaacatgagtgatcagtttctccacatcttcgccagcatttggtgttgtcactactgtttattttagctgttctgatagatgtgtagttgtggctttaatctctatttccctaatagctaacgatgctgaacatcttttcatgtgcttatttaatatctgtatgtcctcctttcaatgaaatgactcttcacatctttttaaattagactgttttgttttttcttactattaagtgtgtgtgtctgtgtgtgtgtgtgtgtgtgtgtgtgtgtgtgtgtgtgtgtgtgtgtgtgtaagagccaggggtctcactatgttgcccaggctagagtgcagtgactgtccataggcaacatcatagcatactgcagcctccaactcccgggctcaagagttgtttttgcctcagcctcctgagtagctgggaatacaggtgttatgccactgcacctggctcttactgctgagttytgagagttcattgtatgtgctggatactagtcttttactgaatacgtg

SEQ ID NO: 846518 - DNA, 652 bp, Homo sapiens
agagaaagaaagaaagaaagaaagaaaacacagggttgctaaggccaaggcatcacacacttaacaccaccaagtcattccagagtgaaaggaacgcaaatccagtctcaggctgtctgattgacgaagcttctggatgcacagcttttacatttttatattttattctctgtgatgtgcccagctcaggagccgcaggtttcggccagttgttctgctctagtcctgagcgccctggcatgttttacagttctgagactgtcctatattcagggcctgtaccatggacagatgcaaagccactaaatgtgtgagctggaatagacaagaacagttatattgagtgtttactacatgctcgtcctcacaacgttacgtgctaagcactaggagtcgcagtttttggggtgcagaggctgaggatgagggcagttacatatcttgtcaagtctccccctggcaaggggcagttgtaactcagcacttcctggtggcacagcctgggctctgggctccccccccaacscttcgcaggtggcctggctgccactgttccccatggcactgggcaggccgctcaccttttgttgttgccaggctcttcgataatccctgtccatggggttcatgagattatagcgaggatcagata

SEQ ID NO: 846519 - DNA, 695 bp, Homo sapiens
agtcaggagtgttggcattctcattcggaaacagtgtaggtcctagtcagagccctgttatgtcgggaaatccactctataggttatttggggtttggacggagtggaagagtgagtttgagggaaaatccttctgtgaatagttcttctgtggatcgcctcttgccctctgagtttttggtttgcttttgctttttaaccctactgcaaagacttctgaaacagccaggttatttctccctctgttcactgttaccaggttgcccatagtttataactaatttcggcctcactgggtgatgcttacctgatctgaggagaaccagaaaccaaaaaacaatccaaccaggtgggcatgaggacatgagaaatgaacattaggagagacacctggctttattacatttaaatctcatcagtccactaagtgtcttggggaaagtacaaatctaatgtccacatagaaaggtctgagtgtagcctgcagagctggtggacacctccattttaggacatcagtgctgacgtgtgggattggcaggttctgccacaagatccagaccctgggtacccctgggcaccacccagtgggccccagacacggcccctcataatgtataattkgaaaaatcaggaatgtgggaagaacagtggaggcctggctctggccagcctcagtgtggggcttccaccag

SEQ ID NO: 846520 - DNA, 650 bp, Homo sapiens
ggccatagaaatgtctggcctgtccttggagctagaagttcccttccaattgtgccagtcccagtgctggctccagagcagccctgtgccctctccccatggagaagcagcaggattcagctaagagaggcatctggctctcttcccacctctgaagaggaaccactccctgagaccatctgagatcccagagcaaccagaaacaagataaatcaggcactgtgtctctgctggggggcttcacttgcttttgagtgtgcgggggacttggattagaaagcaggaagccaggtgggacctgaaagctctttcttttgtaggtatgtgtcgtgaagaaggatgagaagtccacctgtggaaggctaggttaggaaatgagaagaaggcccttttttttcttatttggtccaagtccatttttacacacattttggtgaaaatactctgtgattttcctccttttcacttaacaagggcaggcattgctatttttttttttttgagatgcacagaacattcttggtagagcacttccacattcataactattccattcctcttgtgggctcacgcgcatcctcrttcaatgctgcgttgttaggttagtacttccttaggaacaggtaggacaggtccacccaggaaccgtc

SEQ ID NO: 846521 - DNA, 506 bp, Homo sapiens
ttatataagaaaatccagtatcctattaaatcccttcatatgcttaagctaatttgagttgatcttttatcacattcaaagaaaaaaaaagcaactcatgattaatgcaccattgaactgaaaatatatgaactatttgtctcaaggaatttcagggctatgtcaggatttttcgttcttgatataaggaggccaaatcctttgatagagctgccaaatgatccctaccttaaaagggctctgcaagatctgagggagatgaaagcagtcagaggatagccctgttgtggatcagacatttacataaaaggaaagcacccagcacatctgcataggagcacactgcctggctgaggacagatgctaataagaatctcatacccttcccctgggcttgctgagctacccataaaggggatgcactaatgtgcccrtgagacctgagcctttgaatatcgagatagaatcttcaagatagtattcagtagagaggtcgtatatgagcc

SEQ ID NO: 846522 - DNA, 631 bp, Homo sapiens
aagcttgatgggaatagcattgaatctataaattactttgagcagtatggccattttcacaatatkgattcttcctatccatgagcatggaataggattgtttgtgtccactcttatttccttgagcagtggtttatagttctccttgaacaggtccttcacatcccttgtaagttgtattcctaggtattttattctctttgaagcaactgtgaataggagttcactcaagatttagctctctgcttgtctattgttggtgtataggaatgcctgtgactttcgcacattgattttgtatcatgagactttgctgaagttacttgtcagcttaaggagttttagggctgagagaatggggttttcttaatatactatcatgtcatctgcagacacaatttgacttcctctcttcctatttgaataccctccatttctttctcttgcctgattgccctggccaataggagtggtgaaagagggcatccttgtcttgtgccggttttcaaaagggaatgcttccagtttttgcccattcagtatgatattggctgtgggtttatcacaaatagcctttagtattttgagatatgttccatcaatacctagtttattgagactttttagcatg

SEQ ID NO: 846523 - DNA, 479 bp, Homo sapiens
ggaaaataattttggaaataaaatctcagagctaggaaaaagaaagtgagaaagaagaaactctaatacagcataagcaccaaactttcttccacttgatcatatttaytctattttaagggcttttaactgaactacccctttgatgagagaaaaagagggggaagagtcagctccaccacaggaggtgacttgcctgacatcactgatagagcaatgacactgagattctccccttggaaccacacagaaggtactactcaaggttaggattttaatgaggagcacataagaagtttaaggttgtttttaatggtgacaaggcaaaaaaatagaatgaacatccatttggataatttatctgatttgtatttatatcttttcccttgagtaactggaagaaacctacgcattatgaatttttaatttcaaaattggtaatagcttttctgacagacatgaaataatctgaccactag

SEQ ID NO: 846524 - DNA, 452 bp, Homo sapiens
tctgcacacacagcatgggtataattttcagccacagctttttttttgtttaaaaaaaaaatggaaagrttaaatttagaagttaggcctatccacacaatgtctaacaaacttactaatcaaaatatttacaaatacagcttccaactgctgaaattagataatttaatatttcctagtttaggcagaacactcaagaacacaggaaaagattgaaagtctaaaaaaatggagtgaagctttttggaatttatattgttcatttcatccaacaaaagtcgtgaaacagttacacattgagtagtactcagggaatgtcatgacatccaagcttcagatccaatgggactctaattttcagaagagcttccattttaaaatttagtcttcccacaaaagaggagtggaatatagcctctgtgtgggcagaaggcatgctgcagacacgtctg

SEQ ID NO: 846525 - DNA, 505 bp, Homo sapiens
aagatgttgtggtaattttgtggagaagacctccctccccaccaccaacccatgatgggcatgttgcatgagggagaaatagcctctcagtgtgttcagcctccgagattttggtggtgtttgttgctatagcctatcctagcttatgggttggcaaactatggcccatgggtcaaatctggtcattcacttgtttttgcaaatgaagttttattgggacacagccatacccattcacttatatattgtctacacctgctttcacacagcaatgacagcaatgaacagttgtgacagatgctgcatggtctagaaagtagaaaattgtactatttggccctacagagagaaggtttgctgatgcccacctatcctgactgatacactcgataaaagtctcttgaattattaaattgacaatraaaaggtagaagcccaaagctgatgctaaaataatgtgagataactttgcacgataatcaacgcagcttaattggcaagcatt

SEQ ID NO: 846526 - DNA, 618 bp, Homo sapiens
tcaaagagactgaaacatagccctgaaactctaaaactcccagmagaaaacataggtgaaaagcttcatgacattggtcttggcaatgatggtttggatatgaaaccaaaagcacaaaggaacaagtgagactacatcaaactaaaagtttctgcacagcaaaagaaacaatcaacaacaacaaaaagcaacctacagaatgggagaaaatatttgcaagccatacatctgataaggggttaatatccacaatatatgagcaactcatacaactcaacagaaaaaaacgaaacttgattaaaaagcagagagaggagttgagtagacattgttcccaagaagacatacaaatgactaacgggtatatgaaaagatgttcaacatcactaaccatcagggaagtgataatcaaaaccactatgagatgtcacttcacgcctgttaggatggctattatcagaatgacaagagataacaaatgttggtgaggatgtggagcaaataaaacccttgtccacgatcgatgggaatgtaaattggtacaggcatcatggaaaacaatagggaagtttctcaaaaaaggaaaaatagaaccaccatgtgatcagcaatcccatt

SEQ ID NO: 846527 - DNA, 421 bp, Homo sapiens
taatctaggataattgcatcatctcaagatctttcacttaatcttccaagtctttttgccctgtatgacaatgcattcacaggttacaggaattaggaagtgggcatctttgaggagccatcattcaacctaccaaagaacctaaaacctaataggaacataaataaataacttaatttccaatagtgacattttgaaaaacattgagcagggaaatagaacggaaggggaatgttggtggtgttgatggtggggagaaacaagggggtggctaattttgatagaaaggttgasaaactccctcagaatgatattcaagcagagatcctatcaataagaagtgtcaaatatctggatgaagaatgttccagggaagaactagccagggtaaaaggatcctgaagtggaaacaaacttcagg

SEQ ID NO: 846528 - DNA, 618 bp, Homo sapiens
tcaaagagactgaaacatagccctgaaactctaaaactcccagaagaaaacataggtgaaaagcttcatgacattggtcttggcaatgatggtttggatatgaaaccaaaagcacaaaggaacaagtgagactacatcaaactaaaagtttctgcacagcaaaagaaacaatcaacaacaacaaaaagcaacctacagaatgggagaaaatatttgcaagccatacatctgataaggggttaatatccacaatatatgagcaactcatacaactcaacagaaaaaaacgaaacttgattaaaaagcagagagaggagttgagtagacattgttcccaagaagacatacaaatgactaacgggtatatgaaaagatgttcaacatcactaaccatcagggaagtgataatcaaaaccactatgagatgtcacttcacgcctgttaggatggctattatcagaatgacaagagataacaaatgttggtgaggatgtggagcaaataaaacccttgtccacgatcgatgggaatgtaaattggtacaggcatcatggaaaacaatagrgaagtttctcaaaaaaggaaaaatagaaccaccatgtgatcagcaatcccatt

SEQ ID NO: 846529 - DNA, 629 bp, Homo sapiens
ggctagttcattcacatctcttgcttagattaatgcaacagcccccactctgtctcctccgatccatgttgcatcttgcttctcccctygcctgccccccagctttaaaacatttccacaacttcccgtttcctttaaaataatgtccagctaccctaccaaggcttacatggtcctttgtgatctggtccttgattcccttgctaacatctctcaccacctctcccctaacctactccaacttttacatgctgctctatcagctgcagccctgtctctttgggccttcacactgtttcctaggcggggcgcccctctcacggcacccttctttctttctgtcattgcaattctcacactcacaatgggtttatgaagcggtctgaactcagaagaaagcatgaatggaggtttttttctattgcctccccaattaaactatgctaaatatcctttccttccccatattgacaaagtgggcagatcctattactatttaataaaattctgttatcagaaacccatttagattaaaactccaatctcaaacctaattccagtttccttcccctacgacccagcaaggcttcaacatgaagatttcagagtgtgggaaagctgttgatctg

SEQ ID NO: 846530 - DNA, 605 bp, Homo sapiens; identical to SEQ ID NO: 810715

SEQ ID NO: 846531 - DNA, 619 bp, Homo sapiens; identical to SEQ ID NO: 810716

SEQ ID NO: 846532 - DNA, 425 bp, Homo sapiens
gtaaacttgtaacacatctatggcattccatcttaaattgtggctcctactgaatagtacgcacatctcaagtagacttggaggctctgctcacatggcctctgcaccccctctcatagcttgttttctgatgtaccaaggagattcttgtatctttgaagactgctagctctaaggcagtttcttgttttttctcatgaaggcggtgaggaatagccttattttgaatcactgtgaccccttgtgggcatgtgtggggactgcaccccaacctctgttctaagtagtaggccccatgccttgcttggggccaccttggctcactctccacygacaatctcagtatagtctcctctcctcctaccgccccccgccccccgcctcacccactgaagactgagtgacctggaataggagtattctaa

SEQ ID NO: 846533 - DNA, 592 bp, Homo sapiens
tttttttttttaagagtaagacatggtcctggactccagtattatgtaattgaccaataarctgtaagtttcttgacattaggaatcatattctacatttccttttttcttttaagacagggtcttgctttgttgcccaggctggagtgcggtggtgcaatcacacttcactgcagccttgacctcctgggcctaagcgatcctctcacctcagcctcctaagtaaccggggccacagacgtgcgctactgctcctggcgaatttttttttttttttttttttttttttttttttttgagaatgattcttgctctgtcacccaggctggagtgcagtggtgcgatcttggctcactgcaagctctgcctcccgggttcacaccattctcctgcctcagcctcctgagtagctgggactatgggctcctgccaccagtttttttatttttgtagagatggagtctcccaatgttgcccaggctggtcttaaactcctaggctcaagggatcctcccagctgggcctcccaaagtgctgggatgataggcatgaaccaccattcccagcccatttcctttttccctttgcacag

SEQ ID NO: 846534 - DNA, 386 bp, Homo sapiens
aaagtagacaccactgaaatgtyactcagtagatgtcatttcagttgggttttgagataagcagaagttaagaacatgaaggaatattttcatgtggagcgtatgtgctgaggaatgaaggcattcatgcgtttgggatacatcaggatgatcactatatctggaacagagtgatatgagataaatctattaagatactcagtagtgtggagattgaagagaagctattggttttggcatcctcaaagttcgtgaaaaccgagtaaagtgtttttggtagagtgttggtggaaggggctggattgcagggagttgaagagtgaatggaaactgagaacagaaaggttagactcttcaggaagtttgtcctgagaaggaaatagaga

SEQ ID NO: 846535 - DNA, 630 bp, Homo sapiens
gtcaaggtgatcagggaaggaatggcagaagacaaggtgggaatggctggagaaatgcagaggatgagggcttcatggcatttcatttgttagcaatctggaatcaaaagagcaaagcaagggcttcaccactgggagcaaactgagacctttccattttctgattgcactggtaacgaagccaaagcaagaagagaagtttagagaaaaaagggtgaaaagaaatgaacaaagcctccaagaaatatgggactatgtgaaaagaccaaatctacatttgattagtgtacctgaaagtgatggggagaatggaaccaagttgggaacactctttaggatattatccaggagaacttccccaacctagcaaggcaggccaagattcaaattcaggaaacacagagaacactacaaagctactactcgagaagggcaacgccaagacacataattgtcagattcaccaaagttgaaatgaaggaaaaaatgttaagggcagccagasagaaaggtcgggttaaccacaaagggaagcccatcagactaacagctgatcactctgcagaaaccctacaagccagaagagtgggggccaatattcggcattcttaaagaaaagaattttcaacc

SEQ ID NO: 846536 - DNA, 630 bp, Homo sapiens
gtcaaggtgatcagggaaggaatggcagaagacaaggtgggaatggctggagaaatgcagaggatgagggcttcatggcatttcatttgttagcaatctggaatcaaaagagcaaagcaagggcttcaccactgggagcaaactgagacctttccattttctgattgcactggtaacgaagccaaagcaagaagagaagtttagagaaaaaagggtgaaaagaaatgaacaaagcctccaagaaatatgggactatgtgaaaagaccaaatctacatttgattagtgtacctgaaagtgatggggagaatggaaccaagttgggaacactctttaggatattatccaggagaacttccccaacctagcaaggcaggccaagattcaaattcaggaaacacagagaacactacaaagctactactcgagaagggcaacgccaagacacataattgtcagattcaccaaagttgaaatgaaggaaaaaatgttaagggcagccagagagaaaggtcggrttaaccacaaagggaagcccatcagactaacagctgatcactctgcagaaaccctacaagccagaagagtgggggccaatattcggcattcttaaagaaaagaattttcaacc

SEQ ID NO: 846537 - DNA, 564 bp, Homo sapiens
agtagaataaaatcatggttaagaaaagaaaaatgttacatctgtatcagtatgtggatttcataggatttttttccttcttctgtgggacctgagaytcatttgaagtaaccttggcagaaagaccttagttagtcagactctaaaggatattttgagctggaatataaaaagcacatgtaataattaatgtaacagcagctaaaagtgcctgaggtcagtagttgctacatctatattgcatgtaaacaaagtgttagccaaaactactttcagagagccctaattacgtctgttttaatttaatttagtttgatttaatgatactttttatatgaatttgcttcatggttactctgttgaatttcctttccctgagaagaacccataagagatttttttcccccaaatgatttagtttggtgactttggatacagccaaagcattgtatcttacggcatagcatcttcaagtggaagaatgtaccagatataaagtcagtaatttaagatgaattaaaattttgtttagtttttaaaatatgagatttacatacaatgaag

SEQ ID NO: 846538 - DNA, 454 bp, Homo sapiens
gatggaaacttctctgaggtacctgccccaggacttggagtctaggggagggatgatggcaatgaaaggtttcttttctcctgtcacatcttgctccagacgtcatcttgtctcctgttacacttrgatctcaggcatctatcctggcttgatgttggagtcccccaggtgcctcatagtcccctggacactggcagggtcacctttcttttctgaaattgcagggcagcttgatgtacattgtaatgaacccaatttatgatgcctggcaatgcatttactaagtgccatttatctttttgtgtgtggaacgcattcagtcttctaagcaatgcctggatgttcattcatgtctggacttcaggttaggcatgagggtgaggtaaagtcatttgcaacagggttgcagctttcgaaattggggacgtgactgggcgcggtggctcacgcctgt

SEQ ID NO: 846539 - DNA, 626 bp, Homo sapiens
tgtattatctaattagtagtttatgaaagtgaggcacttttataatcaaagaaataaaaccttccagagagatacagaattactctgacctgaattattttaatgggaaagagttstttttgtttaaaaatttcaggtgaagtttgataattttatcttaagtccacttggcttcattttgttgggcagcattggacaggacagtgcagccttatacagatgactctcagttctttaaaaaaaaattaaaatgggtccatgagaaaataaaaatttaatgtatcttaagtagaggatcttgagaaagctaaaaactgcttacctaaactgagacattaccacggatttgtagctaagtcatttagaatagactttatttgtaaatgtaaaatgatactggcaccaagatatggttgtgaaataggaagtctccagaaaataatgaaaaattataaaccgtgcccatagacaatagtcagcaaaaacagattgtggaaagacaggaagacagagcttatcctagtcatggtactgagtggagaaaatctcagaattgtgtgcactcaaaaactgtgcagccctgttgaaaacatttcttgtaatattatcttataatagttacatct

SEQ ID NO: 846540 - DNA, 602 bp, Homo sapiens
aaaagccatgcttttttaaggaatgtaatatattttttagaacggtattatcactctttatgaattcatatttggcaaagaatttyctggaaatattaggaatcagccttactcagaaatttggtgttaaaggtttgtaaagaatatctacttatgcccattcataattaacagggattcttctttttcttttaaggttaaaaaaatttttctttttaattatttcagctttattcaggttgaataagggcattccagccaagcaaagtaaggtgaggggtgagaggggtttcaggcggagaaaaaaaacacgtaaaaggacaccaagttgtagcatggtctggccagcgaactttaaataggagggaagtccattatcatggaaggagcaggggcttcgggaaaggtttaaaaaattaattattcttgagttttggttttaccctctgtgaaaagaggtaattgttgctcttttgaggattagaaataattttatgtttgttttttgcttttgttttttttttttgaggcaaggtctcactcttgtcacccaggctggagtgcagtggtgcgatcacagctcactgcagcctcaaactccc

SEQ ID NO: 846541 - DNA, 602 bp, Homo sapiens
aaaagccatgcttttttaaggaatgtaatatattttttagaacggtattatcactctttatgaattcatatttggcaaagaattttctggaaatattaggaatcagccttactcagaaatttggtgttaaaggtttgtaaagaatatctacttatgcccattcataattaacagggattcttctttttcttttaaggttaaaaaaatttttctttttaattatttcagctttattcaggttgaataagggcattccagccaagcaaagtaaggtgaggggtgagaggggtttcaggcggagaaaaaaaacacgtaaaaggacaccaagttgtagcatggtctggccagcgaactttaaataggagggaagtccattatcatggaaggagcaggggcttcgggaaaggtttaaaaaattaattattcttgagttttggttttaccctctgtgaaaagaggtaattgttgctcttttgaggattagaaataattttatgtttgttttttgcttttgttttttttttttgaggcaaggtctcactcttgtcacccaggctggagtgcagtggygcgatcacagctcactgcagcctcaaactccc

SEQ ID NO: 846542 - DNA, 488 bp, Homo sapiens
aattctcaaccattatctcttcaaatattctgtctcattgtattatctcctttagaaacttcaattagatatatggtaggccatctcactctrttactgtgtttctcaattccttgttaatatttttcctctttacatctctgcgatacattctggaatattccttcaaatttatttttcacttcactaattctctcttcagagatgtctaattttctgttttaacccaacctttgcattcctaactttattatattaaatttattttgtgtgtttattttattttccaccttttccaattttagaagatatggttttttcatgattattaattttgcatcatgagtttcgtatcttctttaatttcttcaaacatactagatatgtgtattttatatatatatattttgataattctcaattctacttctttgtgggtttgcttgtttatagtagcttttatccttgtatgcattgctcgactttga

SEQ ID NO: 846543 - DNA, 542 bp, Homo sapiens
gaaaccccgtctctactaaaaacacaaaaaattagccaggtgtggtggcggatgcctgtagtcccagctactcgggaggctgaggcaggataatggtgtgaacccgggagrtggagcttgcattgagccgagatagcaccactgcaatccagcctgggcgacagagcaagactctgtctcaaaaaaaaaaaaaaaaaaaaaaaaaaaagacacagtagcaaaagtttatagcatgatgaaaaaaattgaagcttccaaagccaacttcaaaactgcctcctgatcttctcaggcttctaaaatcatatttttctcatttgcacaacaaattttatttgtgtcaatttcttcaataaagtatcttgaatgccttttctgcttttcactcccttatcattcagattatcttcctagtcataatttgagttttcttttcttattattttgttctcacacaatgcttggtgttttttttccttaagtacctttgaaatatatttttatgtatttattaactcactttggatactaaatcaagaagg

SEQ ID NO: 846544 - DNA, 603 bp, Homo sapiens
gatagttctcattgattcatttatcccaacacttgcaagagttgagggagtaagccctatgrctctctgggcagggagcatttcaggaggagggactgcccagtgtgaaagaactttaggtatgtcagacaagtctgtagaaagggagaggccagtgtgactgaagagagtatgtaaattcagagagttaatggagtaggaagagaagctatataatcttatagacctctgtgacaatgttggcctttgctcagattgggatcctttgaagagatggagcagagtaaattgatctgatttaagatatcattgttatctcttgtagctgttttgagagtagttagtaaagggactaggataaaaggagaaggattagctaggggaatattgcagtatctaggagggagataatggtgactcacctcaaaatgtatcagtgaagggataagacatggttggagcctgcatgttttttgaagggaaagccaataggattttttagaagtcattttctcactcaaattcactttttccagaacacttgaggccatggccatttgtgtgaaataagaaggaataaatagaacatagagatcagaaatt

SEQ ID NO: 846545 - DNA, 519 bp, Homo sapiens
catagattctaacttccgtagtgaatggatttttatgctcctagactgttatgttactgtcgtcagactccagtcacccattgataatgacaattgcaytgattgcctcagcatcagctggcctcctgtgactaaacgtcttcacatagcagacagttcattcaaaaaattggacctagaattgctgatatgcctttctctttcaatgcccaaagtccccttaaatttttgactgaaatgttgtattgagatagagaaatggatctttattccagatgtttaaacagtctttttaggccttcatagggtttttcatagacatttattgttacttttataagtgccatttaggctgcttatgattgagaatgtaaattctcccagcccaaatttaagaccaaatataaggacttttattgaagaattattgattcttcttgtttctgtctccagcccacttctctgccacctcaaaatagtttttatttcagagagttaatcgtgaaatgtattaatcat

SEQ ID NO: 846546 - DNA, 627 bp, Homo sapiens
aagtgtgtaagaggtgaagctggagagtaagacaaatgtgcgttggactgagttgcaaattggtcactttttagttgtgtgatcttgattaaggtatttcattccttcaagtccayttaccacacctttaaaatagtgttgataataatacctcatcagtagaatttgtgtttataaagacttaagttttttagagaaattttaggttcacagcaaaattgaaaggaagatacagagatttcccgtatacacccagcctccacacatgcacagcctcctctactatcaacatcccccacctcagtggtatgtttgttataactgatgaaccttcattgatacatcattactcaaagtctatactttatgttagagttcgctcttgatattgtacattctatggctttggacaaatatataatgacatacatacatcattacagtatcatacagaatattttcactaccctaaaaatcctctctgttctgcctgttcatgcctccctcacttcaactcctggcaatcactgatctttttactatctgtgtagtttttcctcttccagaaagtcatgtacatggaattatgcagtatgtagccttttcagatttgcttatttcatttag

SEQ ID NO: 846547 - DNA, 615 bp, Homo sapiens
ggtttttaaggggattgtggcgggtgaggttctggagaattggggttgtcaattgctcaggtcaaggaagattaaatcatcatgatgtgaaaactgcattcttctgtgagtcggctccttgctgggaccttcagatcaactggcatcaacaattttatcagtatgcgtaacataaaggagaaactcaaacagaaagcatatcatctcatgtgccttagatcttatctatagaaaagaaaaggaacacattcttgtgacaagggctacactatcttgggggagtaagaagtaactagctacaaggaagtaggccaaattgggaagtggatttcatgattgccactgattattctgcaagcctagttgaattttattttctcccttaattggtttataaacttttctttgggacagtttcatcctttatcccctttagatgagaaaagaaggttaaatgaggaggtgccaagatggccaattagaagcagctgtggtctgtgactcccatctagaagaacaaaaatggcgagtgaattctgcaccttcatctgaggtatccagattctctcactgggastgacaaggtgattggcctgacccacagggagcaaggaa

SEQ ID NO: 846548 - DNA, 308 bp, Homo sapiens
actccatctcaaaaaaagaaaaaatttttgttgagcacctacttatgagtcaagcaccagggatacaaagtcaaaacccactctccacycttgggtcactctgtttaatagaagagatgggtaatggcaacaccaccagagagaagcagcctgggactgggggaactcaggggaggcatgggaggtgaggcctgaagggagttttgaagaatgggcgggtggtggcctgacatggccatgggggagtagggtggtggtagaaagaatggtggaagctgtgcacattctagatattttaggagattggt

SEQ ID NO: 846549 - DNA, 308 bp, Homo sapiens
actccatctcaaaaaaagaaaaaatttttgttgagcacctacttatgagtcaagcaccagggatacaaagtcaaaacccactctccactcttgggtcactctgtttaatagaagagatgggtaatggcaacaccaccagagagaagcagcctgggactgggggaactcaggggaggcatgggaggtgaggcctgaagggrgttttgaagaatgggcgggtggtggcctgacatggccatgggggagtagggtggtggtagaaagaatggtggaagctgtgcacattctagatattttaggagattggt

SEQ ID NO: 846550 - DNA, 587 bp, Homo sapiens
acagaaaagtggaaatagaagttcatatrtggttgtttcactagctctaatcttatgtacagtttttagtcagttgacagccatataattcttagttttatatactgatagtcattagaaattacaaattttaaaaaatattcatgtctcattctacgaatcaatgtaaaaatttcattcacttggttatatttcttcattttacctggccttgactacttctttcctgcccagcattaaatttaattaatgtctaatttgtttacttggtttagttattttggccatgttcagtacacttgttatgaagcaggcatgtaggaatgttgacaagtttatggtcctcactcttccaaatccctaatggcggcaccccaacagacacataccacaatgtaaatacatacacatacacacaatccacacccacccatactcacccacgtacacacagacacacacacacactccagtggatcaacacataaaacactccacaggcaggcatcgtacagcagggatctcttagtgcactacacacttctgtaaattatcaggactcttcaattgaggtgagtctacagaga

SEQ ID NO: 846551 - DNA, 598 bp, Homo sapiens
ttgtgtggtatacagaatattagatggtcatgaccttagcctcccagtgttactttgatgattatattgtattacatggcaaaatggattgcgcagatgtaattaatgttaataatcagttgatgtgaagacaggaagattatccaagtgtacctaatctaatacaatgagctctgtaaaattttatttatttttgcccgactgtcttatttctgagagccagttttcaagctctgaggtcctttcctcaacttggtccattctgttgttaatacttgtgattgcattatgaaattcttgtggtgtgttttccaactctagccagtcaatttggttctgttttatactggctatttcaccgatcagcacctgaattattttttgtgtttgttccttagtgatatggtttggctctgtgttcccattcaaatcttatctggaactgtaatccccatgtgttgagagaggaacctggtgggaggtgattgkatcatggtggtggttcccccgtgctgttctcatgatagtgagtgagttctcatgagatctgatggtttaaaagtgactgtcccccttcactctctctctcttctgccac

SEQ ID NO: 846552 - DNA, 598 bp, Homo sapiens
ttgtgtggtatacagaatattagatggtcatgaccttagcctcccagtgttactttgatgattatattgtattacatggcaaaatggattgcgcagatgtaattaatgttaataatcagttgatgtgaagacaggaagattatccaagtgtacctaatctaatacaatgagctctgtaaaattttatttatttttgcccgactgtcttatttctgagagccagttttcaagctctgaggtcctttcctcaacttggtccattctgttgttaatacttgtgattgcattatgaaattcttgtggtgtgttttccaactctagccagtcaatttggttctgttttatactggctatttcaccgatcagcacctgaattattttttgtgtttgttccttagtgatatggtttggctctgtgttcccattcaaatcttatctggaactgtaatccccatgtgttgagagaggaacctggtgggaggtgattggatcatggkggtggttcccccgtgctgttctcatgatagtgagtgagttctcatgagatctgatggtttaaaagtgactgtcccccttcactctctctctcttctgccac

SEQ ID NO: 846553 - DNA, 597 bp, Homo sapiens
ctataagtttaagtatcttttgattttgccctagatattatttcatgattccttgacttattagtgtctgagtataaagtaaaattttcattacttttcttagactatgaagatcttataatacttttgatattttgttaggtagttttgttgatatttattttaaattttatatgatggattttatttatatagtcactatttatttagatttatccagatgttttgtcctttcttttcttgatttcatttctaaatttctacatttacatgtaaaataatttttcttctgcttgaaagacattattatttcatttggtgtaatgtataaatgatatagatagttcccttattttttgttttcctgaacatgaatttatttttttctcatattccataatattttattaggaataaaattctagttaccagttggcttccatttgagaagtcatccctaagtcatattgccactttttgaaggtaatatgcyttttcctagaactatttttgagatagtctctttgtcgttaattctctaatatgagctatgtagttgtctccatatttatcatgcttcactctggcacttcctga

SEQ ID NO: 846554 - DNA, 613 bp, Homo sapiens
cccatttcaactgaataagaatctctgaggttggatttcaggaattcgtatttttttaaagttccscaggtgatgcttatgtgtaggcaaggttgaaaaccattgctttagtagtttcatctcaatgaatggcactgttttccacacaattgctcatccaggactgggagtcatgttaaacccagactttatcctcacctttctcttattccacactcaaataaaatccacatcccatgaatcctacatttataaaatattccttttaaacatcttcttttgaatgtctaatggccatttcaagttttaacatacataaaattaagtttttgacatttctacccaaaacaggacttgcaaagtccaaaatatcattttgacattttttcctaaaatagtactacaaataaaaaatcagtattgccaattttttgaagcgaacttatttgaataatatagactttttaaaaagatctttggattttgtttttctttgttcctttaggaaagagtattaaataataatatttaagattatagtactttgagtatatttagatagaatgatagaacaagaaatttaaagaacttctgttgttggaagaaaaaaact

SEQ ID NO: 846555 - DNA, 634 bp, Homo sapiens
cagggtcaaacattatagttttcacctgctgctattcctttgcagtagactagaatagagaattatataaaacttctatgactgtcaaaaaaatgatatattttttgaaatcatgtaaaatcaaccttctttattttacagatatagaaatttagatctgtaaggaccatcagtgtggtgaaggtcacatggtaagttaattacagaatcaaatttttccctttcatttcaatctgtttttaagttttacatgattccactttcaggaaaaagcaattaaaatacagactggctttggtaagagtgatatatatttttatgtttcagaccagcatgttgtttcatgctgatgttaaaagataatggttgatatcagataaatacccacacatacacacaaacacaaactaacttggggtccaataaaataagactgggtggttcacatatttttccattagtgcaaatattttacagagataattttctttgataaaatctgtgttcttaaaactgattaacacatagtccttactagaaactctttacaaaaaaaaaaaaamaacaacaacaaaaaaacaaaaatgagagtgcaaaaattgagagaataagtcaaaggagaaagagaagttct

SEQ ID NO: 846556 - DNA, 570 bp, Homo sapiens
aaacaaagaggcttgaaatggtgaacagctattcttttctgcctactagggatgasaaagtacaggctgttttcaaattaaaaccagaagggccaaagatgtaaataaatgtgactgatagaggacagcataaaagaaaaaataagtttttttttttaaagcaggactgtgagaattttaatagagtctagattggtgaataaaaaagaatagaatatcccaaaaagtgtatattaatgctcaaaccagtaaagaaatatgagttaccactttgtggaaaaataacatgggtagattcatatgcccctactgcgtgtaagattatttttaaagagattaaagcattaaatgtagaaaataaaaccacaaaggctctagaagtaaacataggacatttcctttataacctttaagtggttaaggtataagtaattataactaaaagtctagaagctaaaagattaaaaaatgggtatatgtgaatacagtaacaataacttcatgaaaaaatattgtaaacattcacttctcagtcttttggctaagatcaagtgaaatattgtaaacaaa

SEQ ID NO: 846557 - DNA, 615 bp, Homo sapiens
acaaagaggcttgaaatggtgaacagctattcttttctgcctactagggatgagaaagtacaggctgttttcaaattaaaaccagaagggcyaaagatgtaaataaatgtgactgatagaggacagcataaaagaaaaaataagtttttttttttaaagcaggactgtgagaattttaatagagtctagattggtgaataaaaaagaatagaatatcccaaaaagtgtatattaatgctcaaaccagtaaagaaatatgagttaccactttgtggaaaaataacatgggtagattcatatgcccctactgcgtgtaagattatttttaaagagattaaagcattaaatgtagaaaataaaaccacaaaggctctagaagtaaacataggacatttcctttataacctttaagtggttaaggtataagtaattataactaaaagtctagaagctaaaagattaaaaaatgggtatatgtgaatacagtaacaataacttcatgaaaaaatattgtaaacattcacttctcagtcttttggctaagatcaagtgaaatattgtaaacaaattgaaactacaagtaatcaagtaaagaataatatttactcttcatat

SEQ ID NO: 846558 - DNA, 615 bp, Homo sapiens
acaaagaggcttgaaatggtgaacagctattcttttctgcctactagggatgagaaagtacaggctgttttcaaattaaaaccagaagggccaaagatgyaaataaatgtgactgatagaggacagcataaaagaaaaaataagtttttttttttaaagcaggactgtgagaattttaatagagtctagattggtgaataaaaaagaatagaatatcccaaaaagtgtatattaatgctcaaaccagtaaagaaatatgagttaccactttgtggaaaaataacatgggtagattcatatgcccctactgcgtgtaagattatttttaaagagattaaagcattaaatgtagaaaataaaaccacaaaggctctagaagtaaacataggacatttcctttataacctttaagtggttaaggtataagtaattataactaaaagtctagaagctaaaagattaaaaaatgggtatatgtgaatacagtaacaataacttcatgaaaaaatattgtaaacattcacttctcagtcttttggctaagatcaagtgaaatattgtaaacaaattgaaactacaagtaatcaagtaaagaataatatttactcttcatat

SEQ ID NO: 846559 - DNA, 644 bp, Homo sapiens
gttatgcaatagcagctttattttaagaaaaaaatattttaaattgcttattttggttttcttttgtgaaactgaaaattatataagtctatggtttaatttcagataatgtcaatgtaagaagtagatacctaataaagcctatattatactttaggcattactttgattatagattatcagctgaaagtgagtataaatttgggttatttctcacttaactatacaactatacagattctgtgataaaaaagaaatcttaagaagtaaccctaaaattaatatcaggtaataatgaaaacctatccacactaattctatttattttattataaagaatattctacctagattatactccttatcaaaatagtttatcttaaatttctagttctttggatgttaaccacatagtctaatagaagcacttaatttcataaaatgatgactaagaaaatgtaacagacttgcctaaaaccccacaaaaatataaagacagagccaggagtcaatgtataatctggagtcatttctaataattatttcctctwttttaggggctcagtgaaatttatgggttgggcaaaaagtctcttcccaacttttaagactatgattattgcttcagctcttgttccattttt

SEQ ID NO: 846560 - DNA, 607 bp, Homo sapiens
tactataaaccacaccctactaggtgtggacatcccatcttttcttatgcttaggaactaagtaatttaagagaacctaagatattcttttcttataagtttcacagaaaattacatctgtagcattttaaaatatgacatttattatatataaaaataaactatttgattgctcatatttttaaataagatgctaacatattgagatttctcttaagtccctgttcaatcaaaacatggctttgaaatgctttacttgtaagtctctgcatgcataaaagtatatatgacttctgagcatattttaaaatataaaagtatgttactcatcaactataaaatgaactcatagctattgtgctatgttccacaaatccattagaatgttttataaaccattaaatacataaagatccaaaaagacaaaaagtttcatttctaagtgtgatatcaccttgtataatggataaaaatataaaatcacagattatattttatgcttaaaacattyttatggccgggcgcggtgactcacgcctgtaatcccagcactttgggaggccgaggcgggcggatcacgagatcaggagatcgagaccatcccggc

SEQ ID NO: 846561 - DNA, 601 bp, Homo sapiens
ttccttcccttccaccaactttagatgacactggagcactcctggaagctatggtcactctggtttagaatgtggcatccagccctcaatttgatgagtaaggttcaactcacaacacagcagcaagcctctccaacgaaatctccttatagacccactccttcaaattgcctctgaagaattttcacacatccctgacataagtataaaccttttggccaggcacggtggctcacacctgtaatcccagcactttggaggcccaggcgggtggatcatgaggtcaggagtttgagaccagcttgaccaatatggtgaaaccctgtctctactaaagatacaaaaattagccaggcgtggtggcgtgtgcctgtaatcccagctactcaagaggctgaggtgggagaatagcttgaatctgggaggcggaggttgcagtgagctgagattgtgccactgcactccagccggggctacagagygagactctgtctcaaaataattaataaataaaataaataaaaaataaaaaagtatgtacctttcaaaaacctaaagtctgttatctgtatttactttaacatcttgtgtttttatttct

SEQ ID NO: 846562 - DNA, 535 bp, Homo sapiens
ttctacatcatcagtttacccattgtcctggggcatccctatcagcaccaacatgctgtcatatttcctatcatataaaattctctcctgtggccctcatctcactccaatatctaccccattcctcaacaccccttttcagcaaaacatctacagaggagttttctgtatttttggtttcccttttcttgtctctcatcctctctggaacttaaactaatttggcttttctcatcaccactccatgacctccacatggtcaaaacacaatgtccagtctcaagtcatcagcttacctgacctctcgtaagcatttgaaacaattgtcactcctcttgaaatattttccacacaatgggacaccatttcatcttgattttcttcttacctcactgtccatcccctctccatctcttttgatagtttcccctcattccttaaactctgctttatttttttccatactgtttatcaccacctgagagactgcgtattttttkttgttgttgttgttctcaattttctctatctagaa

SEQ ID NO: 846563 - DNA, 638 bp, Homo sapiens
tgcagctggtcctctctggaaagtgcaacctcctggctgaaggccaacaaactcagacatgtacagtacctcttgacagaataacaytgtgaccaggaaggagaaaatggctgcatgatctcagctaacaccactgcctgaaacaccgtgactaaccagaggtcctgcgtctatgtgacaatttcactactagtataaccagcatttgagagagccagctcactaagcctgtctacaaccaaggattctcacaatctatcttactcccctgtgatgccatcagagtgggtgctggtacctactgctgggagacttgaagacaggtcgtatcactggatcctttgcagacattcccgaggaccagcctggagtctggtagctgcaccgggtggctagacacagaagagcaataacaatcattgcagcctggctctcaagaagtcccattcctaggctaacggggagagtccaacatgaagggaatacttccacagggtactgtggaagaaaaaattctgaacagtaggccttgagtcctagatctttctgctggttggaagtttcttacaggagagacacaattgcagcactgagagcagtagggaaagtctgtacctctaccccaacaggcaggcagc

SEQ ID NO: 846564 - DNA, 554 bp, Homo sapiens
agatctatttgatttcacatgccatgtttttaggctaagaataaatgctgacattgagtaataacgtcttgctccctgacactcaaaaacctcatctcctcccatgacaaggtacaacacagcagtctcgtaacaccaagtggggtaaatgcccaagtatttaaaatattaataggatttgggggccagtgatgttgtagcagggaaactagacaattaaaggaaaagaagtaaggaggaatataaacaggatttactgaaagcatgttttacgccagatactatattagatatgttaatgtataacatttattttaatcctaagactcctgtgagaaagacaatactagtcaagaaaaaagagatttaggatagctatggtgtttggatacctccaaaattccccacttttttctaaggatttgagyctcccacttttttttatttagctaggaataagactgtctggaataaggatagtatttcccagtctctattccagctacctgaggtcatgttactaagttctaggcaatgacatataacaagaagta

SEQ ID NO: 846565 - DNA, 647 bp, Homo sapiens
acaatgagcaatctgcaaaggaaattacaaaagcttccattgaaaatagcattgaaagaaaaaaatgcttatgaaaactacaaagcattgccaaaagaaattaaagaagagataaatggaaacatatctgatgttcatggattggaagacataatattgttaacatgtcaatactatcgaaagaaatcaacagattcaattcaatctctatctaaatcccaaagattttttttgcagtaatagaaaaaatcatcctcaaatttatatgaaatagcaagggaacccaaatagcataaataatcttgcaaaggaagaacaaagctgaagaactcatgttttctgattttgtaccttactataaatctataataatcaaaacagtgtggcactggcataaagacagacagacagactaatggaatagaataaagggttcagaaataaactctcacacatacaatcaaaggattttcgacaaggatgttaagaccattcagtgtggaatggacagtcttttcaacaaatggtgctgataaaatgggataaccacatacaaaagaatgaagttggacccttacctagcaccgtatacaaaaattaactcaaaatgaatcaaagaagtaaatrtaagacctaaaataatgcca

SEQ ID NO: 846566 - DNA, 626 bp, Homo sapiens
atattcatgtccaaaacttaatcacatgccacactggaatcagtatacatgataattctattgtgaaacactaaaataaacatcaactcacactttaaaaaatgaaaataacaacraaaaacatggatataattagaatctgttttctgaagtcctagaagtttcatcagttatacctgcttccctgagagctgaatgttctgactaaaggcaagttttggtaagtagtttatttttacactgttcctttccgttcagaataaacaataatgtgtgaggcagtgtgtttggtgtcctatattcctgatagctaatattattcaaatttcatttgatttgaataattcttttctttgaactttagtgcaggagtgtgtggcaggtgaggggaagctctatttgctatgctttaaagactcactttcatctttctggaacaaagcaagagaaaacacataccacgcaccacaattccatatacacagtactgtttacctatagtgttttccagttttgtgtaggtgcagttaatagatttcttcatagttatatccaaaatgaagaggtggcatcataatgcctagacccttagggaaaaacatattaaagatgtacatttcccaaaa

SEQ ID NO: 846567 - DNA, 534 bp, Homo sapiens
aatacattttctttctttctttctttcttttttttttgagacagagtctcgctctgttaccaggcttgagtgcttgagtggtggaatctcggctcactgcaactccacctcccgggttcaagcrattctcctgcctcaggctcctgagtagctgggacttcaggtccgtgccaccacgcgcagctaatttttggataatatattttgaagtgtggtggaatagctgtacccattttcaagtagaggaatgtcagtttcatcccttggtagatttgatttctgaccaggttttccctctttcttcccaaatggacattagcctcactctcttgcctttagactacagtgaatttttcctttttcctcctcctccatatcttaacctaggaaactactcatttattttgttttttcatggtttggtaaagttaagttttctttaatttggttttactattgcaaatttggttcattctaaagcatggatcctggaaaaagcttctaagaagctgtagtgttgcattatagaggcag

SEQ ID NO: 846568 - DNA, 654 bp, Homo sapiens; identical to SEQ ID NO: 825762

SEQ ID NO: 846569 - DNA, 637 bp, Homo sapiens
aaactcccatcaaataaaatagatagatgccgaggcacagggaaccaacacatacattccagtaaagagayaggtcccaaaacagtgaaccaacaaatgcattttaatacatagttagatgtccaggcacagtaagcaacacatacaaatttcaataaataagtagatgccgaggcacagaagaccaacacatacatttcaacaagtagatggatgctgagaccgtgaactaatacacacagtttcaataagcagatagaggctgaggcacagcgaaccaatgcacacatttcagtaatggatagatgcccaggcacaaaagacctacacacatttcaataagtagatagatgagaaaaaaattctcattaaataattaattattgtaccacaactttgagaatgctttgaaaaatctttccaaactactgtagcaataaactaaatgggccagttggaaatttcttgctggaaaaaacataatgtgttataggagagatggtttactgaaacgcctaactggtatggtctgtttttgctattaaaacgacgttgccagtggtcaaataaagtagccttttattcctgaatcattgtacctccaatattacaactaattactggactagttttttct

SEQ ID NO: 846570 - DNA, 637 bp, Homo sapiens
aaactcccatcaaataaaatagatagatgccgaggcacagggaaccaacacatacattccagtaaagagataggtcccaaaacagtgaaccaacaaatgcattttaatacatagttagatgtccaggcacagtaagcaacacatacaaatttcaataaataagtagatgccgaggcacagaagaccaacacatacatttcaacaagtagatggatgctgagaccgtgaactaatacacacagtttcaataagcagatagaggctgaggcacagcgaaccaatgcacacatttcagtaatggatagatgcccaggcacaaaagacctacacacatttcaataagtagatagatgagaaaaaaattctcattaaataattaattattgtaccacaactttgagaatgctttgaaaaatctttccaaactactgtagcaataaactaaatgggccagttggaaatttcttgctggaaaaaacataatgtgttataggagagatggtttactgaaacrcctaactggtatggtctgtttttgctattaaaacgacgttgccagtggtcaaataaagtagccttttattcctgaatcattgtacctccaatattacaactaattactggactagttttttct

SEQ ID NO: 846571 - DNA, 637 bp, Homo sapiens
aaactcccatcaaataaaatagatagatgccgaggcacagggaaccaacacatacattccagtaaagagataggtcccaaaacagtgaaccaacaaatgcattttaatacatagttagatgtccaggcacagtaagcaacacatacaaatttcaataaataagtagatgccgaggcacagaagaccaacacatacatttcaacaagtagatggatgctgagaccgtgaactaatacacacagtttcaataagcagatagaggctgaggcacagcgaaccaatgcacacatttcagtaatggatagatgcccaggcacaaaagacctacacacatttcaataagtagatagatgagaaaaaaattctcattaaataattaattattgtaccacaactttgagaatgctttgaaaaatctttccaaactactgtagcaataaactaaatgggccagttggaaatttcttgctggaaaaaacataatgtgttataggagagatggtttactgaaacgcctaactggtatggtctgtttttgctattaaaacgacgttgccagyggtcaaataaagtagccttttattcctgaatcattgtacctccaatattacaactaattactggactagttttttct

SEQ ID NO: 846572 - DNA, 567 bp, Homo sapiens
aaaatagtggtgagaggggacatctttgccttgctcctgatcttagtgagaaagttttstatgtctcagcattaaataagttgttagctgtggattttttgtagatatttcttaccaaattgaggaaatccccctctacttctagtttactaagagtttccagcattaatccatgttgaatttttttcaaaagcgtttttgcatttattgatataattatgtgacgttttttctttagcctgtgcatgtgatagattttgaaattttgaaccagatttgcagatttatgataagaccaatttggtcatagtgtataactttttttatacattgttggattttatttgctaatattttattaagaaattttataactatgttcatgaaggatattagtatgttgttttcttttcttataataactttgtctagttttggtattagggtaatactggcctcatagaatgagtttttaagtatattcctctgcttctatcttccagaagagattatagagaattggtacatttttttccttaaatgtttggcatttggttcaccagtgaa

SEQ ID NO: 846573 - DNA, 626 bp, Homo sapiens
aaaattcaggctgctctctggaagaagcgggtgaatctgaataacaaataacatataccagaatccaaatgtcaggacctgggtctgtccctaaagagcagaggctaatggcrgtgaaaaagggctgcagaggtatctgggcatagctaaaggatgattctaggtgtcaacggcaacagagtggaaagagggaggttctaatgagggcggtaggaaaccagcgggaaaaactggaaaagtaaaattgctggttatttgtgagaaggagggtaagtttccccagactgattcaaaactcttaacttgaggaagatggcttgtctctcaagttagtcatttcttggcatagtggtagccaccttgactatgggcatttcagtgaattccctgtctttcttgcttaatggtaggtgtcatgggtgtgccacttcctgacagattttgtttacaggatcctctattccaaaattttaatgtacctgccaatcacccagggattttgttgtgatgtagattctgatttactgggtctggggtgaggcctgagtttttacatttctagaaatttcctcgggtgatgctaaagcagcaagtggttatctttctcccgcccttacagccttcct

SEQ ID NO: 846574 - DNA, 605 bp, Homo sapiens
acttcaaccaatttttttttttcggcagtctcgctctgtttcccaggagggaatgcggtggtgccatcttggctcactgcaacctccgmctcctgggttcaagcgattcttctgcctcagcctcccgaggagctgagactacaggcgcccaccaccacacctgtctaatttttgtatttttagtagagagagggtttcaccaggttgatcaggctggtctcgaactcctgaccacaggtggtccacccaccttggcctcccaaagtgctgggattataggtgtgagccactgcccccgggtgcctaatcaaatttcaaggagtttaattgagcaatgaacgattcacgaattgggcagcccccagaatcacagcagattcagagagactccagcacaggcacatggtgggagatttatggacagcaaaaggaaagtgaggtacagaaaaaggaggtgaagtagagaaacaagtggattggataaagttctccagttgccttatttgaccaggatttgagtagttgggtgcatttgattaaccaaaacccagtgattggcatagttgtgggctacggttggtttacaactccgcttgttatagttc

SEQ ID NO: 846575 - DNA, 585 bp, Homo sapiens
tattttttcaccaaaggactcaattaattgtgggagaggttttccctttcaaattaaaggtaaatatattcatagttttaaaatacttttattttatgttgaggggtactatatgcaggtttgccatatagataaaccagtgtcatgggattctttgtacagattatttcatcactcaggtactaagcctagtacccgatagttatttttttaggatcctctcctcctcaagtaggccccaatatctgttgcttgcctctttgtgttcatgagttctcatcatttagctcccacttataagtgagaacatgcagaatttggttttcttttcctgcattagtttcctaaggataataatagcctccagctccatctatgttcccgcaaaagacgtgatctcattctttttatggctgcatagtattctataatgtataaatgccacattttatttattcaatctgtcattgatgggcatttgggttgattccatgtctttgctattgtgaatagcattgtaatgaatatttgtgtgcctgtgtytttatgatagaacaatttctattcctttgagtatataattat

SEQ ID NO: 846576 - DNA, 521 bp, Homo sapiens
ctgtcttcactgcaactatcttattctaaacatcatcctttcttacttggattattacaacagtttccttgcttctattccacacaacagcaagggtgatctttaaattaaaaaataataaataaataaataaataaaatcactttgttgtcctgcttcaattctccaacaacttcttactgtagctagaataaagtacagaccctttaccatggcccctcagggttctcaaactctggcctatccctgcctatcatgtggcactgactctgctccagctgctcaggccttctttctcatcctcaagcatgctaatctcccttctgatggagagtcttgtgctctgcctggaatgctctggccccagagttatgcatggtttcaagttacagttaactaccatcaccagctgaggtgttttcagaattcccaaaccaaatgaacccctattatatgaaataattactgtgtccatttatttattgtctrttgcctgcccatgccatgtaaactcaaagtga

SEQ ID NO: 846577 - DNA, 629 bp, Homo sapiens
agtgggatggcattgcatggatcccacttgtgctgccgttgttaagaacaaatagttcctcttcaaagggttttggttcctggttctttgttctattctaaaaggtaatcttacccattcatctattagccctccctatctccactgtgcctaaacacacccaagatatactgtacctgttctccctgtcaaacgcccaccctcgcctcctttgatgatgtcaacagtagccaatcggaattagcctagattgtgtggtccgaccccagcccacagggggaggacacaggaacagggtctgcttcagggataaaaactcctggtctcctttgttttgcaagctctcccttgcctctgctttgcatgcaggaagcgcccttctatagaagtaaattgccttgctgagaaaacttttgcctgaatgctgggtttcacttcacagcactgacaatttgtttctaacaatctggggccttgcccaggattcccattctcctctggggaaggggtctctggtcatctcccagggggagacgygacccactgccttgctgacgtggcctcaagggctagagattgggaccccacccactgtgacgaataaacctggactctcggcaacgttggaa

SEQ ID NO: 846578 - DNA, 635 bp, Homo sapiens
gatcctgccatggggcttatacctgcatgccaatgctaagagggacctaatttcctgtgaaggaagtggccagataggatgaagtgaatggaaaggagtgcaagaaacctccattaatgggggttgagcctctagagaaaagggaaggcaagagaactctagtaagagagattgggccacacacacagtcaagggggcatccaaaacttccaagatgggaaacactcctagtacaacagggaaaggtaaggacggggatagtcagatcccctctgatagtcctctaggtctcatgctgaaatattagaaggagaatgagaggaataggcacaagaaaaagcaacagatgataaaatattgttgtttcatttgggccaaggaacccatccgcaaacctgccatcttcttgccaaaatatggatcagatgaggattgggtctgttaacttttaactcagtatgtgaatgacaaaagtctggtcttgcgggaagagactatgccctcttctggagaaaacaacctgttctcctctttcccctaaagaatacaggggaaggcgtagtaaaaccaacccstaggcagagggatcccaactcctggaaccctctaaaccacctttccccatttaattcccc

SEQ ID NO: 846579 - DNA, 587 bp, Homo sapiens
tcaggatccgaactgcccctcaaacagatgttggcctatccccttatgaaatgctctataggttaccatayttaagttccactagtgacagtcccacttttgagaccaaagatcagttccttaggaattatatacttggtctgtcttctaccttatcttcccttaggactaaaggtctcttagcgcaaacgctgcctcttgagtttccagtccatcagcaccggcccggagactacggcctcaataagagctggaaagaagagaaacttgaaccgtcctgggagggaccatatctagtgctcctaacaactgaaactgcagtctgaactgccgagaaaggatggacccatcacacccgagtcaagaaagcaccgccccctccagcgtcatgggccatagtcccaggggaaaatcctaccaaactaaagctaaggaaagtttaattctctttcatctattctgttactccttcttctttccttgtgctcttgctagccacctcattattaacgtaactagatcagactcaccccagaccattaccttcgatgcttgtttagttataccttgtggggatctccaaagcc

SEQ ID NO: 846580 - DNA, 637 bp, Homo sapiens
cttacaaggctttggtatctagtccccttgctgggttagctgctactgcaggaactagggcttattcgctttggcagccagggcccaacacgacgctagacgcagaggcccaaatactgttttactgttaaaaccccagatttgtaaaatcataagtaatgcttaaggctcatgcttgtttctttgcaattaaacctctcccctggccccagcccctgccctttctgccacctttccattcctgactatgcaaacagcatctcttcacacgaaggcaacacacggggagaccctgcatgctggggcagggtttggtccatctttgagtctcccttagcatccagcacagtgcatgggagactgatgaatgtttactaaaagtctgtctgggaaagacaccctagaggggtaaaggccacaggggcatcacggacagggtcttggacctcttaccacgtggctgatggcccttccctctagggccccaaagggacaccttggacttgaggaagtcccaacaaacagcctcrcacctttctagaacaaaggtgagtgcagattggtacaagacaaacaatcctttgttctgatgggtggtgggcttagcttctagactgccccctgtcctgtactgcac

SEQ ID NO: 846581 - DNA, 637 bp, Homo sapiens
cttacaaggctttggtatctagtccccttgctgggttagctgctactgcaggaactagggcttattcgctttggcagccagggcccaacacgacgctagacgcagaggcccaaatactgttttactgttaaaaccccagatttgtaaaatcataagtaatgcttaaggctcatgcttgtttctttgcaattaaacctctcccctggccccagcccctgccctttctgccacctttccattcctgactatgcaaacagcatctcttcacacgaaggcaacacacggggagaccctgcatgctggggcagggtttggtccatctttgagtctcccttagcatccagcacagtgcatgggagactgatgaatgtttactaaaagtctgtctgggaaagacaccctagaggggtaaaggccacaggggcatcacggacagggtcttggacctcttaccacgtggctgatggcccttccctctagggccccaaagggacaccttggacttgaggaagtcccaacaaacagcctcgcacctttctagaacaaaggtgagtgcagattggyacaagacaaacaatcctttgttctgatgggtggtgggcttagcttctagactgccccctgtcctgtactgcac

SEQ ID NO: 846582 - DNA, 627 bp, Homo sapiens
atgctctcactgcagcctcccaagtagyttatattacaggtgcatgccactgcatctgaccttgtcttttcatcctcttaatagggtctttccaatatttaagaataaaatagtgctatccaagcttgtctggaaaatagtaggcacataatgggtgttacataaatgattcaatagggccattcccaatctgctttaattaacggtcaattcttctctctattgatatcattaatgaattgtgggcctttaaccagttattatccttatctaggccaaagtcctctctgtaattttattgacactattatttcccttcctagatgctttcttcacagatggtgcaaaggtaaatttcagatatgcccagttttaattactgcaagttcccagtgattgaggctaatgtattcaacaaatgaaaacttaaacttatccttcatcacactgactctagggaaagaatgtctattgacacatgccttcattacagtctcatttatctttgctaacatatgaagtgtgagcgtttgttaatccaagcctgatccttgctttgagaaggaacagatcatgatatgaaagcatggaacgaggatgtaccttgccaaggatcattatttttga

SEQ ID NO: 846583 - DNA, 624 bp, Homo sapiens
gcaacctcgaactcctgggctcaagggatcctcccccctcagcctttctagtagttaggattacaagcaaatgccatcacacttggcttccatttcctcttcttcttcttcttcttttttttttttttgagacagagtctcactctgcagcccaggctggagtgcagtggtgcgatctcagctcactgtaacctccaccacccaggctcaagtgattctactgcctcagcctcctgagtagacgggattacaggcatgtgccaccatgcccggctaatttttgtatttttagtagagatggggttttgtcatgttggccaggctggtctcaaactcctgacctcaggtgatttgtctgcctcagcctcccaaagtgcaaggattacaggtgtgagccatggtgcctggccctatttcttttgtattgaaaaatattttatcagccatcctggtgactcacgtctatgatcccagctactcacctcctattaggtgtattacttgaggccaggagttcragacctgtctgggcaacatagtgagacctgccaaagaaagaaaaaaagaaaagaaaagaaaaagagagagagagaagaaagaagaaagaagaaagaaagaagaaag

SEQ ID NO: 846584 - DNA, 428 bp, Homo sapiens
acagaggcatgaagctattaaggacgtgcacagggtttgcagctgggctggagcccaggtcttctggctctagttcagttcttcccactgtactgctgagtaggttttctgaccctgaagmcaaacatttcagtttcctgctggcttagggctgtgtgggctgcaaagaggaggttctggtacagctttcctggaagccagcatttcccagcaaactggggaggagaaaagctaccactgggaggtggcacttttctctccaaagcccttctccatgtgaccttcctgtgaaggtaaggcctgctgccagccacagctgcttcctctcctccaccaatgagccctctgagccctggatcccagccagctgagcgggtacctggcaaccagactcgcaaatgtgtgcccagctttgccctgatgagtgg

SEQ ID NO: 846585 - DNA, 573 bp, Homo sapiens
ggagttgtacagtgtacaacctgggcagctgtatgctgatggcctgaatgcccagtaaatgactggtggaattattcttgatatctcccttccaattcccacacccacttgactctagtctcaaaaatacagtacatccagaaccttacttttttatcacttctgtggctactaccttgacctgggttggtcaggctaccaccatcatctcttgcccaggttatgtcagtcagcttttgccctggcccttatagtctcttgtcaacacagcagctggtgttgtcctgttatgacatctttgatcgtaacatgcttctgtttggaaacctccaacggcccccatctcccatgcaatcaaatcaaagccaaagactcctcatggcctaagaggccccgctgtgatcgggccctgtgacctctcactcattgctttgcttgctccccatgctcaggctgctctgccaactgccaggcctgctcctgccccrgggcctttgctcctgcggttccctttgtgtggtgcagtcgcctcgcagtcgtccacatggctggttccttcactgttcgaatgtc

SEQ ID NO: 846586 - DNA, 638 bp, Homo sapiens
tgtgattttatgatgttttgtgaagtttattcagaaaaaaaaaaaagtatttccccaaccaaactgcctaacttgggagctgataaaaccattttccccacctgaaattctttcccacagttctgtaaacccaaccaaaatgaatattaagaatgccctgctcagaagagtttgactctgcagccagcttttcacctttcccttttcctcctgagattctctttatcaaacattgactttcagcatcaagagaggaagacctctgttggtgtgaggaaagatgagaagttgccctgaggtatgtatagcacagaaaattaatatgtcaaacaaacttcctttaagattaggaatgttgacatttgagttgaatctatgtacttaacaaaatttacttcattatgcaatgctctaaagttactccatgacttaaccaataacatggaggatatatacatatattcttcctaagcaactggaaattacaattcaattaagattattatgctgcatctacaatccatttttataacatattaggcattttctaaatagcagcaagcagctttccccaaatgtaatttygttaaaagattttacatgctagcagcctaaacagcaccagaagagagatctgg

SEQ ID NO: 846587 - DNA, 498 bp, Homo sapiens
taaatttctaatatcatttacactaataagtaatttcaagatgaaatttgcttgtataacatgcaaataatgcagtagtctttttcttgatttatttccttccatctctcattcctatggagccccccaaaattttataggttcttcattatcatttgcagtactcatttttttcctgcaaattggctactccaactttagttttaattacttagaccccaaacatgttgagtcatggtgttatcacaacaccctgcagagatccctgggagggaatgtgagttcccacctacagctatgtgtgacttcaagcaaatcatttaatatgtataagcctcaggagttcttatttgtttgttctgttctgtttttgcyaaatgagaaattaaagtaacattttccccattctttgccagtgctagttattaatattgtcgatttgatagtatatgtcctaattccatcttaattttttattggtttcttcttgcacgacat

SEQ ID NO: 846588 - DNA, 684 bp, Homo sapiens
tgtctttacaacttgaagagcttatgggatcctatccttgcatgacacagaaatgtacctgtatctgtagttaatctaaacattgaytctgtcctcattttctaaaactgcccaaactcatatcaggtattcaagttaatttaataaactttaattgaacatccacttttaaatacaagcgtgtgccatattctaggaggagaggatgaagagggttataaatacagaaatgagtaagacctggcccctgtactcaagagcttgaaatcaggtggcgagacagacaaaaactgtgagacagaaatagaaccaaattcacacagagaacctgggaagatgagggtttgaagtagcaggaaagttcacataggggataatttttgagatggactttaaaagataggttggagttcacaaatagagacaggaaaggaagtcattccaggctgagggaacagcatgaactactcactaaatccttccccatctttccaagtaaaggacctgtttaatatcaaagatttatcagaatcccacaagacagctattgtacttttaatagctattgatggaaaaatacaaaaggacctaaagctactaagaattcagtaatattattgcacaatttatatatttatatgttattaaccacaactagagcaacatatatttgaaatttactca

SEQ ID NO: 846589 - DNA, 486 bp, Homo sapiens
atatttgaaacactattttcagaaactggtctccaagtagtacaggrcagtgatccttgagagaagagaaataatgcagtgagccccacaatcaccctggctttcttcctgacagtaacttccagaccttggccctagaaagggaaagataagcagaatagtatggtcttgtttttagttgaggggacaaaaactggagtttagagaggccagatggctgaaatttgctgaatagagtatgaaggaagagggaactaggcaaagaaagagatccagaaatctaaataggagtccttttgagtctttggctttatactaagtaaaatgtatgtaaggtaaaactctatgaggctggatagagaaaaactgtgagagttctgtgagctaagcaattcctagagcttgtacagggctggaagatattcaaggtccaaccagtcagagtagggggaaatcactaaatacttggagcaatcatagaaactt

SEQ ID NO: 846590 - DNA, 555 bp, Homo sapiens
aacttgaaaaactcactgaatgggcttaatagaagaatagacaaygcagaagaaaagatcagtgaattaggagacataacaaaactacccaaactgaaataatggaagaaaaatagagatacagtgaactgtgggaaaatttcaggcagttttaccttacatatattttacttagtataaagccaaatttttatgattgctccaagtacatgtgatttaaagcacaaaagaaataaaagggggaaatatttgaagagacaatggctaaaaattttcaagtctgatgaaaacaacccccaaatccaagaagctcaatgaatcctaggcaagataaaagcaaagaaaataacaccaaaattcattataaacaaattgatgaaaaccaataagaagaaaatcttaaaaatagccaggagggaaaaaaagacacattacttacaggggaacaaagataagaatgatcgctgatttctcgtcagaaacaatgcaagccagaagacaatggaacgacatctttaataggctgaaagaaaaaaactgtcaacctagaattct

SEQ ID NO: 846591 - DNA, 595 bp, Homo sapiens
tttgctgcttgacttctttataatgagctatattgttttcataagttcagtagagttattctttatgaaaatatatatagtaattgaaagaagcttaatatttggcatctctaatttttaaaaagtagtaaacacatattatgcacctcttatgtcttctttttccttaaacctttctacctactgactttctttcttttcttaaagacagagcctcactctgtcacccaggctggagtgctagagtgcagtggcatgatcatagctccctgaagccttgagctcctggtcccaagagatcctcttgcctcaggtagatcctcttgcctcccaagtagctgagactacaagtgtgtgccaccatacctggctaatttttttttaagagatggggtctcgctatgttgcccaggctggtcttaaactcctggcctcaggcaatcttcctgcctcagcctcccaaagtgctgggattacaggcataagccaccaaacctggygctacctactgaattccaagctctgtgatcctagagggtaaacattaagctatgttaaaactgtaaggggccctcagaaaagccacctaccttct

SEQ ID NO: 846592 - DNA, 642 bp, Homo sapiens
tgggtttttttttaatgtccttatcttttagagatamctgcagaagcacttagagaatttcttctctgatctttgctttagaatactgtggtaacaagtgaagcaaggaaagaaagtgatatggcaaaagatgaaataaaattggcagcatgttgaaatcttctgacattgtgtggtgggttcatgggttcatttgtactattctctctaatcttgtgtatacctgaaaattcagtaataaaaattctctattttttattttttattgttattttagagataggatcttgctttgtcacccaggctggagtgcagtggcatgatcacggctcatggcagcctcaaccccttgggctcaagcgatcctcccacctcagcctccagagtagctgagactgctggcaacatgcaccaccatgcccagctaattttttttttaactttttgtggagacaggatatcactatgttgccccagctggtctcaaactcctgttctcaagcaaccttcccacctgggcctcccaaagtgcggagattacaggcatgagccactgtgcctagccaaaatatcttttttcaggcttcccaggcccactcatgttgaccaactaaacagtgcattccattacaccaggcactt

SEQ ID NO: 846593 - DNA, 584 bp, Homo sapiens
aattatgagataatccatattttcctactgagctagaaaaatcaaagggtttgctactataatccaaatgatttgctaactgaggataagaacttkgaacattatcagctgaaacttcagaagaagaaaataagactccttaccttttgctatctttcctgtagatactcttccctcattcttgtccttcaaattctacatgctatcttgttccagaacctctgacaaaggcttctgcacatcaaacttgttcttcagaactgattcaatcaatatttcatctggcacagcatctccaagtactttctctcatgtgatcaaggcatgaataaaaacgagcttgattaaatccactgagctgatggttcgaaacataattgaaagattctttcagatcttcatgatcgtattcttctataggctcaacggaaggtttgtcacgctgtgaataaataaactgagcagctgttgatagcaaaatacaagaatcatcctctacagactggccatggtgatcatcatcttcaagatcttcatcgcagtcacagcctcgaacattccgatgctgggccatgacggtggag

SEQ ID NO: 846594 - DNA, 556 bp, Homo sapiens
cttccttcatttatttaggggtctggtatcttagggatatcattctgaaaattaaacttttctacataggaccatagatacagggtgactagatgactgggctggatgtgttccacagtgtatcagtcagggttctccagagaaacagaaccaagagggtatatagacacatacatgcacacacaccaggagagccagtgatgtaagccctgagactcaagacccaggaagagctgatgtttcagccagagtctgaaggctggaaaagaccaatcttccagctcaaacaggcaggagttccccttactcagcatttttgttctgctttggttttcagttgattggatgagacccactcagcagtagggagggccctcgcctcactcagtacaattcagatgttagtcttatgtagaaacatcctcacagacacacctggaatcatgagggactaactgtccaggtgccccatggcccagtcaagttgacacataaggttaaccttatgcatggyatctgctacaacttgtgtttctgaatgaaattctacaaccag

SEQ ID NO: 846595 - DNA, 497 bp, Homo sapiens
tttacatggctattataaaaaatggcaaaaaaaaaaaaaaataacatgctgtcaataatgcaaagaaagggggaactctgatatactgttggtgggaaagtaaattagtgcagccactatggaaaacaatatggaggttcctcaaaaaaagaaaaattaaaatgccatatgatccagcaattccactgcaggggatgtatggaaaagaaaggaaatcagtatgacaaataagtatctgcactcccatgtttactgcagccccgttcacaacagtcgagatatggaatcagcctaagtgcccatcaatgggtgaatggataaagaaaatgtggtaaatatacacaatgaaataccattctgctataaaaagaatgacatcctgtcattcgcagcaacatggataagcctggaggccattatgctaagtgaagtaaaccaggtatagacagacaaatactgcatgtttaawtccagtatatgtacatagtggtagcaga

SEQ ID NO: 846596 - DNA, 622 bp, Homo sapiens
cctgtgcggctggagcctccctgatgagcgccgccccctgctccatggcgcccagtcccatcgaccacccaaaggctgaggagtgcgggygcacggcaccgggactggcaggcagcttcacctgtagcccctgtgcgagatccgctgggtgaagccagctgggctcctgagtctggtggggacgtggagcacctttatgtctagctcaggggttgtaaatacaccaatcggcactctgtatctagctcaaggtttgtaaatacaccaatcagcaccctgtgtctagctcagggtttgtgaatgcaccaattgacgctctgtatctagctactctggtggggacttggagaacctttgtgtggacactctgtatctagctaatctggtggggatatggagaacctttgtgtctagctcagggattgtaaatgcaccaatcagcgccctgtcaaaacagaccactcagctctaccaatcagcaggatgtggatagggccagataagagaataaaagcaggctgcccgagccagcagcggcaacccgctccggtccccttccacactgtggaagctttgttctttccctctttgcaataaattttgctactgctcactctttggg

SEQ ID NO: 846597 - DNA, 622 bp, Homo sapiens
cctgtgcggctggagcctccctgatgagcgccgccccctgctccatggcgcccagtcccatcgaccacccaaaggctgaggagtgcgggcgcacggcaycgggactggcaggcagcttcacctgtagcccctgtgcgagatccgctgggtgaagccagctgggctcctgagtctggtggggacgtggagcacctttatgtctagctcaggggttgtaaatacaccaatcggcactctgtatctagctcaaggtttgtaaatacaccaatcagcaccctgtgtctagctcagggtttgtgaatgcaccaattgacgctctgtatctagctactctggtggggacttggagaacctttgtgtggacactctgtatctagctaatctggtggggatatggagaacctttgtgtctagctcagggattgtaaatgcaccaatcagcgccctgtcaaaacagaccactcagctctaccaatcagcaggatgtggatagggccagataagagaataaaagcaggctgcccgagccagcagcggcaacccgctccggtccccttccacactgtggaagctttgttctttccctctttgcaataaattttgctactgctcactctttggg

SEQ ID NO: 846598 - DNA, 568 bp, Homo sapiens
accttaagagctataacactcaccgcgagggtctgcggcttcattcttgaagtcagtgagaccaagaacccaccaattccggacacagyaccatcttggctcactgcaacctccacctctggggctcaagctatcctcctgcctcaacctccagagtagctgggactacaggtgcatgccaccatgcccagctaatttttttgttttttgtagggatgaggttttgccatgttgcccaggctggtcttgaactcctggactcaagcaatcctcctgccttggcctcccaaagtgctggaattacaggcatgagccaccatgcccggcccgattttattttttttttacctttaagctctgttggacttgatgtttgtggattttctatcttggtccattggcctatttactgaccctcgagtcaacaccacatggtattgcttaattaattcctagtaattcctattgccttataagtagtcttgatattcaatagactatgtccttaaatagtgatcccccgcgcccagattattttggctctttttagtgtttagtatttccacag

SEQ ID NO: 846599 - DNA, 608 bp, Homo sapiens
gcattctcatgggtgagactctgggaagccattgggcrttattgaataaaactaagcaacagcttccctgtgtcccagcagcactagtcacctcacagcccacagaaacctgtgcccacaggcacagggaatgcactcagaggtacagcgtggtttgtaacgactgccacttggaaacaaccacacgcctatcggcagtgggacagagacaccaagggcagcacagtccacagcgggaaactccacagcactgagtgacacacagaaacacaggtggagctgagatgtagaaggctgggtaaaaggccacacgtaagtcactgtttacttacagttcaaaagcaaagctaaactacattgcttaggctttgaagtgggaaagctagaaagaaaagcaacgatgaaaaggctacaaaagtcagggttgcagttacttttggcagcaagaaaggggttctgatagggaaagcacacaggactctggaaagtctgtgctttgaaccaggtgatggttatattggggtttcctttaaacattttattttaaagatgctcctggcatgtgctttagcctttttaaaaatttgtgcagatgtatgaggtacatg

SEQ ID NO: 846600 - DNA, 606 bp, Homo sapiens
ctgggtaaaaggccacacgtaagtcactgtttacttacagttcaaaagcaaagctaaactacattgcttaggctttgaagtgggaaagctagaaagaaaagcaacgatgaaaaggctacaaaagtcagggttgcagttacttttggcagcaagaaaggggttctgatagggaaagcacacaggactctggaaagtctgtgctttgaaccaggtgatggttatattggggtttcctttaaacattttattttaaagatgctcctggcatgtgctttagcctttttaaaaatttgtgcagatgtatgaggtacatgagaaaatgtattacgtgtatataatgtgtggtggtcacgtcagggtattcagagcacccatcattcaagttcaatacctttttgttaagtacagtcatcctacgctgctatcaaacactgaatttatttcttttattttactgtatgtttgcaccctttagcctgcttctcttcatctttgccccgccccgccactgctcacccttcccagtctctgtgtctattttcccactctccacctacatgtgttttcttaaraaaactgaagtagagcatttttaagtattttttc

SEQ ID NO: 846601 - DNA, 539 bp, Homo sapiens
tgtgttccacacataagtcatccatggttgcccaatctcagacttttttcacaatctggactgattctttcttcgcacctcccgctctcgcatctgwcaggagggcgaggtgggtggggccacgccaagacccgctgcagtcatgtggttagacacctgatacgagtcttattgaacatgcacctagactctccactgaacccaaagcagaggatgaacatgagaaaaaggatccttccattcaagagtgcccaatcaagttagactcagccctgctaagtcaggaccaacattactagtatcactatactgaggatttccaatttttagacaaacaccagatacacctaatgaacaaagatcatcagtaaaacatgtcacaactgagaaaagcaagaaagggagaagggatcatgaagcttttctcaagggctgagattctgaaaggtgtggctgaaaactgtcctgtccccatagcactagagcagcgctgcccagggaatgacttgccactcctgcactcatactccatctcaccc

SEQ ID NO: 846602 - DNA, 603 bp, Homo sapiens
gactggcttatttcactgaacattgtcttcatggttccyccctggtgtagcatgtgtcagaatgtcctttttttaaaaagctgaataatattcctttttctgtatagaccacattttgtttatccattcatctgttgttagacacttgggttgcctccactaagggtggttattgtgcataatgctgctatgaacacagtgtgcagatgtctgtttgagtcctagctttcatttcttttattttattttttatttttttatttttgagacggagtctcgctctgttgcccaggctggagtgcagtggtgacatctcggctcaccgcaacctctgcctcccaggttcaaacgattctcctgcctcagcctcacaagtagctgggattacaggcgcctgtcaccatgtctggctaatttttgtatttttagtaaaaactggatttcaccatgttggctggctggtcttgaactcttggccttgtgatctgcccgcctcagcctcccaaagtgctgggattacaggcatgagccaccgcgcgcagccctagctttcatttcttttgggtatataccaaaagcagctgcaccatgttacattcccat

SEQ ID NO: 846603 - DNA, 603 bp, Homo sapiens
gactggcttatttcactgaacattgtcttcatggttcctccctggtgtagcatgtgtcagaatgtcctttttttaaaaagctgaataatattcctttttctgtatagaccacattttgtttatccattcatctgttgttagacacttgggttgcctccactaagggtggttattgtgcataatgctgctatgaacacagtgtgcagatgtctgtttgagtcctagctttcatttcttttattttattttttatttttttatttttgagacggagtctcgctctgttgcccaggctggagtgcagtggtgacatctcggctcaccgcaacctctgcctcccaggttcaaacgattctcctgcctcagcctcacaagtagctgggattacaggcgcctgtcaccatgtctggctaatttttgtatttttagtaaaaactggatttcaccatgttggctggctggtcttgaactcttggccttgtgatctgcccgcctcagcctcccaaagtgctgggattacaggcatgagccaccgcgcgcrgccctagctttcatttcttttgggtatataccaaaagcagctgcaccatgttacattcccat

SEQ ID NO: 846604 - DNA, 563 bp, Homo sapiens
gaaataagatatttttctacaccctgattttttgtgtattcctttaggaagagagaacaagtgggcttgtcctcatatatacctgtatatcctcaaagatagagataaacagttaaatctgaataacacctgcatatcatagggcataagaatacttttaagcaagaggttatggctcaaaatcaaatctctatttctaatatctaaagaaacagattctgcaatggtaagtaacctatctctactcattttataaaataattcaaatggtttgcaaagaaaagtcttgataaaatgctgttgtccatttttttttcagttatttaaaccagtgtgtgggatgtcaacaaaacaaccatgctagatattactattttttaatttaatgttttatatatatatacacacacacacacacacacacacacacacacacacacacacatattacttttttgtgtggtgctggatatttttaaatagcaaaatataaataggtaaaaaggaatgaagctttatgaataaaaaattcrtatataatttgtgtttaatgaaaacagcta

SEQ ID NO: 846605 - DNA, 503 bp, Homo sapiens
tactgctggctgattttaacatgtgaaagacatttctctctctgactttcttctgtaggagtgaaaggtacttctgtgtaccactcttgtggtgttggtctcagtttgccttttgttgyagttgcatgtttgcctcctgtttttgcctttttttttttttttttggagacatagtcttgttttgtcgcccaggctggagtgcagtgtcgcgatctcggctcactgcaacctctgcctcctgggttcaagcaattcccctgcctcagcctcccgagtagctgggactacaggtgggctaacatgcctggctaatttttgtattttttttagtggagatggggtttcaccatgttggccaggccgatctcgaactcctgacctccggtgatcggcccacctctgcctcccaaagtgctgggattacaggtgcgaaccaccactcctggccctgtttcatttgttaaacagtaagtaatgtaggatacaatctactcttactggta

SEQ ID NO: 846606 - DNA, 494 bp, Homo sapiens
ttcctgttggttattagtcaagactgagtctggacagagaatgatgttagagagaggtgagattgttcagatttcatctcagtccaccccttcattttccagtcatccttgtgggaactaaatatccttgtttcctagaactagaagtccacttctccactgcatccatttggggaaagtgtctagaaaggccaaatcctagtgtcaaatttgaatgagcgggaagtaacaccggaaggaaggccacgttggcttgaattctctcccctgggtgctaaggaggaatgtgttcttttttacacatgtgaaacctgagacatagacagttatgggattggccaagtttactgaattagaaagtatctgaatgagtttatctgtctccaaagctcaatactcaatgtgcttactgcactaggtctctaaattacacaggtctggagctgtactgtccgatatsgaagcccctagccacatgtggctttttaaattta

SEQ ID NO: 846607 - DNA, 598 bp, Homo sapiens
tgaaatgtagatacataagctacttttggatcagggcccacaaccatatgcttccaaaggaataatatgtacaggttagtctggtgtgtaccagatgttaaaaaaaagcaaattcaaaaacagaaatatcagtattcaatgcagaaatatattttaaattaaatcccattcttcctctccttatagacacagaatcaaagaaagccaattgtatgtctaattttttaacctttttcctgaacaaaaatcccaatttgactcatgactctagattctttatatacataagatcacaagacaagaaatggtcatttataaattatcctgtctcagagtgagcctcctaccatatgctgatattcaaccagaagaatttgtttgaaaaggcaaaaaaaattccagaagttaagcctataaggcaaaccagccagcaaaaggcgacagagtccacatgtctatcagatatttaatatgttaaacctcaattaccaaaagttttaagattctctgtaaacataactagtgagtctttatttttcagatgattctgaatgcaaaatgagcacattatctgcacaytgaaagaatttatgtgttt

SEQ ID NO: 846608 - DNA, 600 bp, Homo sapiens
tgcaaggacatctatatcttgatgcatttatttgaagaaaagaaattcttacctacttaaggaaaatatattaagaaaaataaaaataataaacatttcattaactcaaatattcagtaataacatcatcttttttaattatttaggtaaaatgtataccattctccttctcaggtattttaaataataggtatggtatgcagtttctgtattctttttaagatttatcttaaaccagtgtaaccagtccactttctgttttttgttctgtaagcagcgctgcgactttcctcctcggtaagttttatgaatttacatacaagtaaactaacattattaagtgttcccaagtaactctgggaacatactataaataatttaaataataactcaattccatttaatcgacagtgaatattgcacaatcaaaagtgatgatagaaatattaaaattaagtaaatctaggtctacgtaagatatacttttgatattatctatcttragcattttgtaatagtaaacattagttctattttcagtgcgataccactaagttcataaacaaagtccctctacctcattaattaataaggttaata

SEQ ID NO: 846609 - DNA, 638 bp, Homo sapiens
ggtcaggagttcgagaccagcctggccaacatggtgaaacccatctctactaaaaatacaaaaaactagccaggtatggtggcacgtgcctgttatcccaactactcgggaggctgcagcaggagaatcayttgaacctggaaggcggaggttgcagtgagctgagatcatgtcactgcactccagcctggttgacagagcaagactctgtctcaagaagaaaaaaaaaaagaataaaattaaaatctgtggtcagaaggttacagaaaggaaagacacacatatccgctagggaataggaagtggtcttgtcttcagcagcaggactgtctaataaatctggagagttttattgacttcataggcgcaaaaataaccacccggagaagacatcgggtttcacttattttttggaaagtaatttttcacagacgcgaggttaaaagaaagtggttgcacgggcctcggctgtggtggtgtgtcttctggtatgcgtaatgcaactggatctcaattctgggacgatgcccagattcaggggcctaaagcctctgttgaaagcaatgaggacagagtgttgccaaaattttatataatgcaactgtagatcaattgtcttagtgcaagggtagactttg

SEQ ID NO: 846610 - DNA, 575 bp, Homo sapiens
tcctgttgtgaggctaattcgtgcgggagctcggcctcacagtaagtgcctcttaccccaccctcacccgaagctgtcgatgcagcgggtttagggggatgtttgcgagacagcaataggtagcagttgataggagaccctgttctgacgtcttcttgagttctttacacatacaggtaattagagatagaaaagatccccccctcaaggttctataactccttgcgcaccgccaggtgaccatcacagaaaccgccccaagctagttaatttgtggcctattatgtttttattttgtctaggattaacgagatttgagattttgtagccaaatttactaccccggggcttcaactttcaaaccagcaagccaacgggaacgttgtggcgaaactggatctccttctgcgttgctggggcgcgtgcggggaatagaaacgaaatccgtcgccgacggtgtggcgtggactgytgggcctggggacgctgggcgggcttttctgaatcccatcgggttgggcttgaaatcggacttgaccctgccagggttgtgctctgcgcttagcctagatttt

SEQ ID NO: 846611 - DNA, 546 bp, Homo sapiens
cctgggcatgtgtcccccgccaccccagtggggctccaaatgccaactcagggttaraaaatgagaactgaaattttaaagtgaggagatgtgcacttccgagtatacacataaaatgtctaattcaaagaatatagagtaaacaccaatgcaataatgaccccaagtcaagaaatataacattgccaggtccgcaccccatcacctccctctcctgagaggtaaccattattatgatttttctcaccatcatttccttgcttttacttttttattttgatttcagcacttttgtatgcctgtttttgaactttacataaataaaatcatactgcatgtatccttttatgacttgcttctttctttcaaccgtgtgttgtatataaataatacaatgcatttatccattctgtggttgagggaacttttgcttgtttctcctctggagcatttatggactattctactgagaacttcttgtatatgttaccttctgcacatgtgcaggagtctccctagggtagcagccagaaaactatcacccac

SEQ ID NO: 846612 - DNA, 546 bp, Homo sapiens
cctgggcatgtgtcccccgccaccccagtggggctccaaatgccaactcagggttagaaaatgaraactgaaattttaaagtgaggagatgtgcacttccgagtatacacataaaatgtctaattcaaagaatatagagtaaacaccaatgcaataatgaccccaagtcaagaaatataacattgccaggtccgcaccccatcacctccctctcctgagaggtaaccattattatgatttttctcaccatcatttccttgcttttacttttttattttgatttcagcacttttgtatgcctgtttttgaactttacataaataaaatcatactgcatgtatccttttatgacttgcttctttctttcaaccgtgtgttgtatataaataatacaatgcatttatccattctgtggttgagggaacttttgcttgtttctcctctggagcatttatggactattctactgagaacttcttgtatatgttaccttctgcacatgtgcaggagtctccctagggtagcagccagaaaactatcacccac

SEQ ID NO: 846613 - DNA, 578 bp, Homo sapiens
cttaacatctggttggtgaaccaggacttaaagggctgtggaataacaaggacacagctgaagtgcagtagagtgaatgtgcgtagatgtatcagcaggctctctcctggtaatgtccagccatccagaagcaggagccaagaaccacagcccagagcatggtagtgcctaaactcatgcaccggccacatctgcaataagcacaatatcttccaagataaccagttcaggaatttaaattcacttccagtgcaactggctgagtggtgaatgcgccatttcttcttttgtgctaaaatatagaaagtaatcgaggtgagagggctgatgaccaggcaagaaaatattttctaggtatgaccacactataaaggtgtggccaaataaatgcaacgctgaaggtcagatctttagagcagagttgagaatttatgatctttccatgtctttatgacacattctgctagtgtcaacacaggagagacttaaagcaaagmgaggattaatgtcaacttaactaacaagaactacattatagttttccttccttctgaaccatttttctttaaaacattcct

SEQ ID NO: 846614 - DNA, 641 bp, Homo sapiens
cctcaccagcaagggaaattctaaagrttacatttcaggcagaaagaaagtgatcccagatggaagactggaaacacaaaaaggaatgaagagcaaagaaagtgacagatgcatgatgagtaaatccaaatgaacttccactgtgtagaacaatatattttgttggtgttctttaaaaatatagaattaaaatacaaaacaatgagagaaaataagttgggagtggttaaacatttttagagtgttccaaggaccttgagttactctatgggaaatgaaagctttgataaactttagactgtcagtataaatattataatttcgccaggcacggtggctcacacctgtaatcccagcactttgggaggccgaggcggatcacaaggtcaggagttcgagaccagcctgaccaacatggtgaaaccccgtctctactaaaaatacaaaaattagccgggtatggtggcgcacgcctgcaatcccagctactcagggggctgaggcaggagaattgcttgaacccgggaggcagaggttgcagtgagccgagatctcactgctgcactccagcctgggcaacagagggagacttcataaaaaaaaaaaaaatatatatatatatatatatatatatgtataaa

SEQ ID NO: 846615 - DNA, 608 bp, Homo sapiens
gcctacatataggttaattatgtggaagaaaatatttggattggagtgactctgggtgatttttyccttccttttatttacttttttttctgtaaagaacataattctaaaataaacaaacaaaaacgagagaattcttcgagagtcccggtcacagcagctgcagagagaggtacagtgtgaagaaatgaaatccaacaagtgaaatatcagaaatgtcagaaatcaccttcattgttcttggaaggaggctgatagtaggagaacaggccagcggcaggccatggaatggctaagtgcttaccacaccgccgagtccatcccttacattcacaacaacctgtgaatgaagtgggtgtgagtctctttgtgactgttctgcaagtgaggaaactgaggcttggagaagctcagtaaccagccaaggtcaacagcaagtgaggggtggagctcgtggctcccatttctacctgatggctgccaggacacaggggcctgcctcccatgccatcctaaccctgcgtgtctatcccccatcgtttcccaggggtggagttcgtggttcccaggactggcttttattgcaagctgtgtgggctgttctacac

SEQ ID NO: 846616 - DNA, 612 bp, Homo sapiens
gtttaatatatgctgaaccaatgtcctagttggagtccaaaggccagaaagcttctgcagaacmaaggagatccaattatccagtttgaaggccatcaggcaggaagagctaatgttcagttccaaggacatctagcagaactctttcctggctggaggagggtcatcattttgtcctattcagacttccaactgatttgataaagcctacccacattatggagggcaatctgctttactcggtcttcaaatttaaatgttaatttctttccaaaacatcctcacagaaacacctagtggccaaatacttgggcatccattgtctagtcaagttgacacataaaagtaatcattaaagatattgggctttttttttttttttttttttttttttttcagaattgagttgagcttgactcaacagtcatctcctaggataaattgtacctgtattgataattgttctaaggtgctccaataatatggggatctgttggggctgggggatgatggtctgatctcagtctggttggctactggtacagcagaagaataacatgttgaatttccaataaaaagaagcagcaagcccaattcaataaaaacttcaaa

SEQ ID NO: 846617 - DNA, 480 bp, Homo sapiens
tgccccagtggaggcttcatgaggcagcgtgagtacaacatcatgaaaaaattggagccagaatcatccagmaaatttactcttgaattcctgatcagataattgtgaaacaaatgtcttgttttaaagttctaaatttaggaaaaattttaattgttatgggcatcacatagttctgtaaagagaaaaatgggtgacagaaacatttgtgatacctttttattcatcacaatccacaaactccctgtttgctagaggtaaattacagtaactctcaaattacaaatttttgtttgaagagtaggatatttcctattagaactactcaagcaaaaacactttcttgtttctctgtctatgaggtatgctcttaatattgccactttatttaattttcagaatcgacttaatacatttatgaaagaaaaatgcctgtttggattccctactattccgtaaaaaccccaagcttcctgtcct

SEQ ID NO: 846618 - DNA, 480 bp, Homo sapiens
tgccccagtggaggcttcatgaggcagcgtgagtacaacatcatgaaaaaattggagccagaatcatccagcaaatttactcttgaattcctgatcagataattgtgaaacaaatgtcttgttttaaagtyctaaatttaggaaaaattttaattgttatgggcatcacatagttctgtaaagagaaaaatgggtgacagaaacatttgtgatacctttttattcatcacaatccacaaactccctgtttgctagaggtaaattacagtaactctcaaattacaaatttttgtttgaagagtaggatatttcctattagaactactcaagcaaaaacactttcttgtttctctgtctatgaggtatgctcttaatattgccactttatttaattttcagaatcgacttaatacatttatgaaagaaaaatgcctgtttggattccctactattccgtaaaaaccccaagcttcctgtcct

SEQ ID NO: 846619 - DNA, 633 bp, Homo sapiens
gtgagcaacattaacacatttacscttgtctctacttgatccctccaaaatttggaaactatgagtattattattttatggcaatgtaattgttttaatctgttttctctgtaacagggtacaattgaagacaatacttatcttaccaagattgaagagttatattttcagatatgaccagattattttgagggattgaggttgactttataaagacaagagatttggaaaaagactggcctgatacttagtctacgtggttcccttacaaagttccaggccttgtagtaagcagaatgtcactttctgtgcaggacatgcatgtttgttacatgcacgtgtgtcccagaacttaaaagtacatttaaaaccaaaaaagaatgtcactttctgacaggactaggaacttcaagatactttggggaccttctgaagaaagcaatttatcttattgaataggtgagtttttggtttggtttctaagccttcaaaggcttcagatttagaagaattagatatgttcagggggtggtcagaaatgtttgtttgcaattttaaagagttatgaggattggagatgcataaaggggaatcattagcagtagttgaagacgtgttttaattttctgttgc

SEQ ID NO: 846620 - DNA, 633 bp, Homo sapiens
gtgagcaacattaacacatttacccttgtctctacttgatccctccaaaatttggaaactatgagtattattattttatggcaatgtaattgttttaatctgttttctctgtaacrgggtacaattgaagacaatacttatcttaccaagattgaagagttatattttcagatatgaccagattattttgagggattgaggttgactttataaagacaagagatttggaaaaagactggcctgatacttagtctacgtggttcccttacaaagttccaggccttgtagtaagcagaatgtcactttctgtgcaggacatgcatgtttgttacatgcacgtgtgtcccagaacttaaaagtacatttaaaaccaaaaaagaatgtcactttctgacaggactaggaacttcaagatactttggggaccttctgaagaaagcaatttatcttattgaataggtgagtttttggtttggtttctaagccttcaaaggcttcagatttagaagaattagatatgttcagggggtggtcagaaatgtttgtttgcaattttaaagagttatgaggattggagatgcataaaggggaatcattagcagtagttgaagacgtgttttaattttctgttgc

SEQ ID NO: 846621 - DNA, 619 bp, Homo sapiens
gtttcccttctccttttttttccactccacccataatattctcatcaactgagtcctctgaaacttctcctttcattatggagaagtatagtgtattggtttaaaaacacagactctagaaccaagctgccggttttaagtcctagctctgccactatctataggacttggacaagttaatcaacttgtctgggctttagtttccctatttaaagtggagcaaataatagtacttacctcatagagttatttggataattaaatgagttaacatttattatcacttagaacagtccctggcatagagtaagtgctatatttatgttttttaaaaaatgggaaaaaaatgtattaggaacctggtcacaaatgttcagtgacttcctgtattccttttctgggcattcatagctctccattatcacaggaccttcttcaggaagcttcctgaacactttccttcaaagcactcatgagctatcctgcctgtttggtcatttatatttttatacctgtgattcttttctctctaataagctatttttctggcattctttatagttccatgaattatayattaggtagattgagaggatcaaaataataataaaagcagcat

SEQ ID NO: 846622 - DNA, 575 bp, Homo sapiens
tcagctcttctacgctactgatcggaaagagacctacgggttagtggagacctttaacctcagaccaaatgagttcaaatatatgtctgtcatcgctgaattggagcaaagcggacttggagcagaactgaaatgtgcccagaaccaaaataagacttagaactgtacaggttggcccttcacctagttgactcagccctcgatagtctagagcccaccccctcctcaggaactcaagagctcagcatttataatgagcagttggtaatgagttgccctatgtgcttgtcgcaagcagtcacagagatgagccctattacttgatattcaggaacaaaggtacctgaacattctgataattatctcagcatacttgaggtttccttttttaagtgttcgaggttataacaagagacagccaaggacctacaagacagttgacttgattttgcacagtgtaacagcgcagttgcattctggccactttgacsttatagctcccaaatgatgagtttgtcatctttatgaactcatgacaggataataagcttgaagacctgctgtagttagatatg

SEQ ID NO: 846623 - DNA, 598 bp, Homo sapiens
tagcacaatgcattatgtgtttgtggtgatgctggtgtaaatctactacaccagcatagtgtataggggtatagggtataaaagtatagtgtacaggggccgggtacggtggctcacgcctgtaatcccagcactttggaaggccgaggcaggtggatcccttgagtttagaagttcaaaaccagcctggacagcatagcgagaccttgtctctacaaaaaaaatttaaaaattaactgagcgtggtggtgcacgcctgtagtcccagctactcaggaggctaaggtgggaggatcacttgagcccgggaggttgaggctacagtgagctgggatcacactgctgcactccggcctgggccacagagcaagaccctatctcaaaaaataaaaaggtatagtgcataaaactatgtacagtacataatgcttgatagtaaatgactattactggtttatgtatttactgtattatttagagtstgctccttctacgtataaaaaatactaagtcaattgtaaaacagcctcaggcaggtctctcaagagttgttccagaagagggcattgttcttataggagaggacagctccatgtgt

SEQ ID NO: 846624 - DNA, 602 bp, Homo sapiens
tggaggaatgtgggtgtggccgaggtgatggcaagaaaggtgcaagaaagtgagcagtctgcctgtgagtgagcacagatgccggggtgtgtgtgtgtgtgtgtgattttcactgtggggtgtgtctgtgagagctagctgccttacccctccttggcacatagtaggccttccataaatgttggatggatggataaatagattgggaccatcagaccatgggaccatcagaccatgaccactgtaggagtgatgacagctcagcgtccccactcagtgtatctgaccatgtgtgtaagtgcacaaaaatgtggttgtagatgttgctctacattcaaaccttccaggctacactcttccatcagcatgagtcctggagagctgggggaacgtaggaagaggagccttgccttgagttcctaaaccgacccactgcagacacaggctctgattctcttacccagagatgcccatgagctgacattttactcatccctctgcctccaagaaggcctgtattatacgtgtcctcctgggggttggagatgayccctcaagtacacaaaggtcccctggcccttcatctgggaatcatatactcc

SEQ ID NO: 846625 - DNA, 516 bp, Homo sapiens
taaatctctcctaataaacacagaatttgtcaaattcatacacttccgtttacttaaagagatctgcttcacataagattaagttgtttggctgggcatggtggctcacgtttgcaatcccagtactttggaaagccaaggcaggtggactgcttgagctcaggagttcgagaccagcctggctaacatggtgaaacccctgtctctactaaaaatacaaaaattagccaggtgtggtggcacatgcctgttgtctcagctacttggggggctgaggtgggagaaccacttgagcctgggaagtcgaggctgcagtgagctgtgatcatgccactgcattccagcttgggtggcaaagtgagaccccgtctcaaaaaaaaaaaaaaagtatttacgacttccatcaactgatataaagatagatgcaytggactagaaaatattaattttgtgcaggtctcatatattttccaaactctcaggcttacatcaatcacactgatgatcaagagcgaa

SEQ ID NO: 846626 - DNA, 562 bp, Homo sapiens
aagccactaaaaaataccctggccaacatacctagattctaatgtcatactatcctggtggtaaatggtgatgcttcatgctgtattcatttctarttcaacatagtttatgaagcggcctcttcatgcctcagtttttccatctgcactgtgggacagagcaaatcgtgactatcatgagtaatcctgccttctctcctctgatatcttcggaagaaggcagatgtcactggaggtgggtgtgtgtagctcagaaaaacagagccatttgtcacatgtagtgacaggcactaagggcagggcttgagaggagaaaagagagtgagagagagaatcagaattgcatctttttttcttaattttactctgatacccactccacatggaattatcctaacgggcacataggaggagagactagcatttactgcacagctagcacattacgggaaacttttatttaaagtgggatcctcagaccaacaacattgacaccgcctggcgctatctcggctcactgcaacttctgcctcccgcatgcaagtgcctgcaccagcctctg

SEQ ID NO: 846627 - DNA, 468 bp, Homo sapiens
tactaaaattatagctgtacatgcaaaacaacatattcatgagtggttggttaaaacctgaaattatggagaaggctgaattgacatatacagcattatcggcaaaaaccttcacacrctgtgccctctaaaatgaggctttattttctgtctgaaacattgacaagggatattcaatatgggatatgccaatgcatactcgtttatctgtcatgcatttttcttattctaatttctccatagagtttagcagtcatgacttttgtaattattattgcattattccctccattcatataaaattataatttctctttagtaaaataaagcatgcaatttgactaatttgtatttaatgcttatataccagcagtagaatatttagcagattgatataacaccataattcatgatacagtattccatatataatactcatgatcagaagtgagaacttgcaatttttac

SEQ ID NO: 846628 - DNA, 614 bp, Homo sapiens
ggaaaaggagaaatatcaagtgataatttcaggagattcattttaaaacttttacacctatttatgataaattgaacctttcagcaaattactmtaagaaaggaactttctcagctgataaaatcacctataaaaaaaactaaagatcacatcatgaaatagtgaaagggcaatttccctaccccatcacactcccaagatttggcccaagacaggaatgggcatttttcactgcttctgtattgcattataatggaggtcttacccatttaaaaaatttcaaaatacttaaataaatgaaatataccaatttaaaaaaaagttaaagctattattatttgaccccacctgatttgttcatagacaattttaaggaatccacaaaaaagctatttgaaataagtatttagcaggttgtaaaacacataaccagttgcatttcaaagttgtcaaaataaacttggaaataaaaataattccatttacagttgcatgaaaatatataaaatgttcacaggtttaacaacatctgtgccagatctctacactgaaaacatcacagcatcacagaaagaaggttgaacaccttaatatttgcctagatatatcatgtt

SEQ ID NO: 846629 - DNA, 633 bp, Homo sapiens
tgcaacatttaaaaataatttctggtaatgatttatatgagatgacaatatgcattgttgagcaaatccagtggaggagtcccagtgcatggaagacagtaaagagtgaagcaatgcccacatccaggagcagctgtttcaggatgtcaacccactgcatggtttgcaggtatcagtgtcaccaagaaagacacaatttacacaggtaccaaataaaacaatgctttactcacatagagaaataaagcacaagatcaccaacagtgaacataggtctcccatggccagttggtcttgcccaatagtctatacagggagacggtctgtgcacatctgccctgtgctatagctgaagaacactgttttctccccaccagaagtagatataggagttgggttggccaggttctgtatgatgcacgtgctttaagcaaaacaaagaagtacttatcaagtccacaggaaggaaagataatcccaaacaacacaatatgcccagcacaggctgtgagatctctttatttccgtgtaaaaaaatgttccaggccaagggaactcttatttgaccacgcagggataaacaagctcacatgactgtctttcccagcrtgcagccaatacagaagttattaa

SEQ ID NO: 846630 - DNA, 643 bp, Homo sapiens
tcccaagtatgccgccctgggatcctgtccggggttggggaggmatgctgtcagcacatgtgagggccttcgcaaagggaatttcacctctgcaagaggcctgacaggccacgtctccctgggaaccaacctcctggggtacgaggtgaggagctgcagatgtgcggtggttagcccctgccctttgcgtgtcatccctatcaagtgtgagaaaggacaggcaggctgcagctaactagtgttcctgaggaaaggggtcagagaaacaatgcagatgctcaagacctaaggctacgtgggagctgcacatagatggatatacttgcaagtgtggggacaatggctgtgcaccccaccatgcctgggtgagggcgtgcagtggcccagattccttggggagtgggacctgtgggcccccataggaaggctggaaaagtcaggccctgctgtctgcacagactctagcctgggaggacacagagtgagggaacatgatggggcctaggggctcctccagcacgtgcctgccctgccctgggcttgcaattgtgattggctggaatccatggaggtggagacaggagccccaggtcaagttgttgctggctgtggcaaaaccaggctccctgcatcctgggggctg

SEQ ID NO: 846631 - DNA, 627 bp, Homo sapiens
taggtagatgagactgaaaacctaacttaggagtatgtgcctgtactaatagctgagaattggccaatcccagcagccataattcaactactcatacactgctgagtgttcaaaccgtgttcaaataaggcaaatgccgagctgtaaccaatccagttgtttttgtacctcacttctgatttctgtacgtcacttcctttttttgtctaaaaattgtcaaatgcctctgaccatgaggcatccttggagtctttctgaatttgctgtgattctgggggcttcctaattcatgaatcattaattgttcaattaaactcctttaaacttaattcagcttttctttctacagatggtgtcagaagtgggatctgaagtagagctttaacaaccccaggagcgctgagtgaacaagcaaggtacctgcaaggacccacttatgtccattgatctctcagagtgactggggattgtgggtaagctctctctcagatttcagagctccaaggatttgtgttttgagctgtccaagtttctttgagcaaatttctgatccaaactaggtttggaagtcacaagagaaacttgastgggtccaggattggacttgatccagtaattagctggctt

SEQ ID NO: 846632 - DNA, 557 bp, Homo sapiens
ctaatgggaagccaaaaacaccagactgtgcaatcgtagatggttcaagggtgccttcacggttagcaatagggatgttacgtagcctaaggctatcatagaggccttggagcttttgatgctgaagatggcgttccataagtttctcagatgtcactgaactttttcttgtattcttctagcactttcttcatggaggtgacttcccctttcatagaggtcaattctacatcctcgctttgtatttgctgagtatatattttctccgtctgtttcagatggccctcagccttgatgaaattgtgttcttgatagagatgttcctgatgtacctgatatgtccagaagcccactgctcaggagctaacgtccaacacgatctcttgtcgcagtcctgccaataccatagctttatatttctctgatggattgagttctgtgcggacaatatctagctttccagaaagggtactgttycaggcagcacagatagctggtgagcgactaaactcaccactgccatgctgatcacagaatatgtgagagcaggcagtgac

SEQ ID NO: 846633 - DNA, 513 bp, Homo sapiens
ttgacacaggcatgcaatacgtaataatcacatcagggtaaatgggggtatccattacctcaagcatttatcytttgtgtgacaaacaatccaattatactctcttagttattttaaaatgtacaattaaattattttttattatagtcaccctgttgtgctagcaaatattaggttttattcattctttctaactaattttttgtacccattaaccattccccactcccaccacccccacactctctaccctttccagcctctggtaatcatccttctactctctacttccatgagttccattgatttttagctcacacaaacaagtaagtgaaaacatgcagtttgtctttctgagcctggcttatttcacttaacataatgacctccagttccatccatgttgtagtaaatgacaggatctcattcttttttatgtctgaatagtacttaattgtgtatatgtaccacattttctttatccattcatctgttgatggacgcttaggttgc

SEQ ID NO: 846634 - DNA, 551 bp, Homo sapiens
tataaaatcaatgacacattttataaaagtcataaaaatttttattcaaataacacattttaagtgtgtttctgaaatcactttggccgggtgcatcgtttcaaatagggaatatacaaaaaataaatagaactcatagaacaagaaaaataagaagaagtaatctaaaagggtacaaccaaagtaactctgattagaaacaattgcccactgatgataccaacaaaaaattatacaacatgctctttgctattcaataaaacttctaaactattatccacaagtatgcacatctctctcttcctgtcattcatacacatgcacacatatatacacaattttagggacaaggttaaagaaaagaattaagtgaggcaataaaactaaactttagaaatgaattatatatggtagttttcaatgacaaaactgaagacacagaaaacacttaaaatcaaatattcagggttcattatagtgttatcagtaatacatttcaaataawaaaatatatgtatttttatttttcattttctttgttatgcatttaa

SEQ ID NO: 846635 - DNA, 564 bp, Homo sapiens
tgattaactcagatagtttttttagttcacatctagaatattatacatcatactagttttaaaaactagtttaaaaaaacataattgagctagmaacaatccaaatatgtaccaatgttcaaaggaattggtagctccccaaatatattaggactcttcactttgaaagacaaaatcttaaagatatgattataatctttaagaaggctatagacgagataaacagatttttttaccaaattttaatttactagatttagggggcacgccctgacactagagttacattaaagataataaaatactgctttatccaataaagtaaatgtatggaagtcattattccaagaccaaacacaggtttagataaattaatgactataagagtcataagataagtattattgaggacatgtttctatcattgaatgtgattgtaactaattggcatgactatctctttggcatacctcttggtgacatgatgagagacggaatattaggctgggtagatgagggatgtgatttaatgtggtaactcagatgcttttatttcaaattatt

SEQ ID NO: 846636 - DNA, 564 bp, Homo sapiens
tgattaactcagatagtttttttagttcacatctagaatattatacatcatactagttttaaaaactagtttaaaaaaacataattgagctagaaacaatccaaatatgtaccaatgttcaaaggaattggtagctccccaaatatattaggactcttcactttgaaagacaaaatcttaaagatatgattataatctttaagaaggctatagacgagataaacagatttttttaccaaattttaatttactagatttagggggcacgccctgacactagagttacattaaagataataaaatactgctttatccaataaagtaaatgtatggaagtcattattccaagaccaaacacaggtttagataaattaatgactataagagtcataagataagtattattgaggacatgtttctatcattgaatgtgattgtaactaattggcatgactayctctttggcatacctcttggtgacatgatgagagacggaatattaggctgggtagatgagggatgtgatttaatgtggtaactcagatgcttttatttcaaattatt

SEQ ID NO: 846637 - DNA, 645 bp, Homo sapiens
gagaataaaatacccatccccgaagcatttatcctttgagttacaaataatccagttatacactttaagttatttttaaaatgtacagttgttattgttgactayattcacccttctgtgctatcaaatactagatcttattaattctttctattttttgtacccgttaaccatccctacctacccccggcccaacctcccactacccttcctagcctctgataaccatccttctactctttatgtccatgagttaaattgatttgatttttagatcccacaaataagtgagaacatgtgatgtttgtctttctgtgcctggtttattttacttaacataatcacctccagttccattcatgttgctgcagatgattagatctcattctttctatggctaaacagtactccattgtgcatatgtaccacattttctttatccattcacctattgatggacacttcggttgcttccaaatattagctattgtaaacagtgctgcaacaaacataagagtggagatatctcttcaatatactaatttcctttcttttgggtatatacccagtaatgggattgctggatcatatgatagctccatttttagtgttttgaggaacctccaaactgttctccatagtggt

SEQ ID NO: 846638 - DNA, 394 bp, Homo sapiens
tgtccacagaggtcattgctgaccagcttccctttttggtttgaaatctctccacacacacagcagcaaaatgaatcctttaaaagtcaaggcctcaccacgtccttcactgcttgatgrggcctccctggcctcctggcacctgtgcttgtgctctcccaccgggggcttgtgacacacccagttgtgtgtctgactggtccctttgggtgtgcccagattgtgacagaattccaaacattctgaggtagaggaaagccctctgatctgtgccacgtaccaatggccatcactgccaggggcctgctggaggctccagtatgacagagccggctctgggccacataggatccttgcagcactagctgaacctctccccttcttggacatgcaa

SEQ ID NO: 846639 - DNA, 445 bp, Homo sapiens
ctgagtaaagatctgataattaaagttaattcttttttattatgaataatatacacaaagtctggacatgctctaaatatattyacaatttaaaaggaatgtatttgccatttcaaacaaaaaaagaatatcatcacaaaatacattttcggtattactagactagtgttcttttaaatatctgaattaggccgggcacagtggctcaggcctgtaatcttagcactttgggaggctgaagtgggcggatcacttgaggtcaggagttcaaaaccagcctggacaacatggtgaaaccctgtctgtactaaaaatacaaaaaaaataatctgcatgtggtggtgcatgcctataatcccagctactcaggaggctgagaaacgggaatttttttttttttttttttttgagacagagtctcactctgtcacccaggctagagtgc

SEQ ID NO: 846640 - DNA, 631 bp, Homo sapiens
tatggtctattgatgtaatcttaccttaaaatcattcttgtcaaaaagtctttcaaataataatattaatactaaatggtcttttagataaaagmaggtgaatttacttagaagaatataaaattaacagcttaaaaaacccataaaagcataataatcacaattcactttagcaggaatacactatggataataaattgtcataatataaccagcagtgttcagaaagctttagcataatgatctgagcagaggccttgaaactggaacatccatattctcattttaacagattccaagtgtttttatgttattcaccaagatgtaaaacccctttggtcttcagtatatattaatagatagaaatggagaagtagaggcatttgtacgtcaattacttaaatttgaacataatctttgcattaattttcaagttgttacaatatcgtttccagtacggaacatttcagtaaggacattcagaattcaccaatctgggtaaattaatgcttatggtgtatgtatgttataatgacatcacccaagtatgtacaatgatattgccacccctcctccttgcccatctggatattaaaatgtaggatggctcaaaaatccttcttatcctaga

SEQ ID NO: 846641 - DNA, 376 bp, Homo sapiens
ctaaaagattggaagttttcattgttttttcttgataacctrtttagcgtatctcattgtgtgaataatggagtagttatgaattctttttttttttttttgagacggagtctcactctgttgcccaggctggagtgcagtggcacgatctcagctcactgcaacctccgcctcctgggttgaagtgatactcctgcctcagcctcccgagtacctgggattacaggcatgcaccaccacacccagctaatttttgtatttttagtagagatggcgtttcaccatgttggccaggctggtctcaaactcctgacctcaggtgattcgcccgcctcggcctcccaaagtgctgggattacaggtgtgagacgccgcg

SEQ ID NO: 846642 - DNA, 403 bp, Homo sapiens
ctgggcaacaagagtgaaactccgtctcagaaaaaaaaaaaaaaaaggagaaaatccattttttcatttgcaaattgtttatctcacaagagacatgtatccaggatacaatatataaagaatagttacaactcaacaatggaaagacaaatattaggggagcatagtggcgcatgcctatagttccagctactcaggaggctgaggtgggaagattgcttggcccaggagtttgaggctgcagtgagctatgattgtatcactgcactgcaacctgggtgatagagtgagaccctgtttaaaaaaaaaaaaaaaaaagaaacccaacaagttagttyaaaaataaagggtttgaagtttgaatagacatttctctaaagatgatatatgaatagccaaataa

SEQ ID NO: 846643 - DNA, 514 bp, Homo sapiens
gtagcctgatttttccatacctgttcttgtactccgtcartccaccaggttttaaattgtagatactgagagggtgaaagagaagatttagccaaaatttcccaatcataaggaataagtctattcccattagcaatggaatctaataatgttctcatataaggagagttgggtccatattgtttaactgcctccttcatatcttttaacattttcatggtgaaagattcatatctagcctcagtttggacagacgctcctgcttgactccgttttccagccggtattggttgtaaaattaccaggaactgccctgcctcaagatctccctgttttctggctttatcaatgattttttgcagtgcactatcttgtccactaggtggtagtgtaggatcaaacaccatcgccatgggttgttgctatactgccctgctatttggcacaggacacaacacctgggatctatactgaaccactggagacggccgatactgaaattcggctgatggct

SEQ ID NO: 846644 - DNA, 368 bp, Homo sapiens
taatatatttcacacacacyctttaattacaaagctttaattaaaatatttgtctttgtttattaaggttaatattcccacatgattgggaaatgctaatttttatgatctcccatggttctgcgttttacactgatgttgtattagtctgttttgcattgctataaaggaatatctgagctgggcaatttataaagaaaagaagtttgttttggcttacgatactgcagactgtacaagaagcatggtgccagtatctgcttctgatgaggcctcaggaagcttacaatcatggcagaaggaaaaagggagcaagtgtgtcacatggcaagacaggaagcaagagagagataccagtctcttttaaa

SEQ ID NO: 846645 - DNA, 622 bp, Homo sapiens
attgacttctgatctagcctttacagtattattaattcaatgacatcacaaagctggcaagggaaagcttcacgcttgccctacaaagacagatagcagtgccttagagaggtccttacaagtttcttaggaaagtgacttgaaaaaataaaagtcagcttactttttctttttcccccaccatcctgataaaggactacgaacgcttttctctcgcttttgggaaaagcctaccgaactggatttcccacttatttgccttacatctttgctctgccttcatgcatttgcagcaaagcattctctttccagtggtgtagagatagcttatctcagggcaagcccctgggatttggtctaaggttaatactggagaaagggcagagcatcctccaacgttcccccagctcagacagacaaccattgaaaggcgcctggcatgcagttggcctcaaaacctgacttggcagcaaactctaattaaatgaaactcgatcgcagagtgcttgttgatcttaacttgcctraagttccagacttggacagcaggttgaaacctgctatgatcataatcagcacaatcgatagcttttagaaagaactttttctaaatagatttcaa

SEQ ID NO: 846646 - DNA, 478 bp, Homo sapiens
ataatcagaattgtatcctttaatatttattttccaaaaaaaactggaaagttcatcaacaatttgatgggatagacataatcacaccaataaccrttcaaaaactcaaatagtctactcaggaaacaagtgactgactgcaactgcgtgtacatccagctccctctgctcgctccctctctctctttctccacaccctattgctctcagtgagccattcatgtcccagtatttgagctttttagaaatttatttactaagatagacacagtcatatattattgttgctggacaatggatctatcaatcagaaatatctgtaaggttggaaaggattaattaattcaatttatttttattaaatattgagtacatatcaggttttggagatagagtagtgttttgttttttttttccttaaaaaaaaaagacagatgttctctgccctcaagatgtttaaattggggctgggcccaat

SEQ ID NO: 846647 - DNA, 637 bp, Homo sapiens
tgcagcatatgcagttagtgttctaaaatcagcatgtctggtttaaatgccagctttgctgctgtttgagtgtggacaagttacatcgcacctctgggtgccttggcttcctcaygtaaaatgaagatcatctaacagggacttaggagttggtggacattaaataagtgaatacagtatgtgtaaaacacttaaagcaatggacggtacattaaaaggcccaataaatgtgagctgctgttgttattacgattatggtagaatatatggaaccaccagcaaaggtttcattcacctttaacctcctttaggaaatatgctacattttcctgaagatctgagtgctctattggaaacagccaattttgttttcatgaagtagagttactattttgctctcctgggttgaaagagaaaagattttttgctcaatcacatccccctgctttacggcagcttcatctgccatcagcaagagcacttgaaatgctttgagggcagcttccagagaagggagtccttaaaaatccatgcagacaaatgttcaggggaaaggtccttgttcatctaaatacactcagggacggaggcaaggccacagggactactctctccaggctcttctgcagcccacagc

SEQ ID NO: 846648 - DNA, 325 bp, Homo sapiens
tcatgtagaaatggctgggcaggttttcataaaatatttggggtgacccgacttaatataaagtctatgtagtactcttgtaatttactctgaaaacctctaggcaataactcagagaatcaggcattctccagagcaattaaaacaggtatgtgaaaaagtctttgtactgatggtcacttgatcactttatgcaggcaaygaagacagtttcaaatattaactcaaaattgaaagtcacaaggcagatgttggaattgcaagcactgctgtgaaaatccctttgtttctctgaactttttacagtcagtgtgggaaaaggtac

SEQ ID NO: 846649 - DNA, 608 bp, Homo sapiens
ctatttactctgctctttcaggatccctggtagaggactgaagtgaaaaagtaccctatggagaataatgaggtaaattaacatatggtttcttactgaagtggcaataacatcacgatctactaatttgcatatcaggtctgggctgataaactggcaccaaagatatctgtttaaatgtcaaaatgcttcaggttttttttgaaatttgatctggccatatgtagtaagataaaatataaacatatactttgtctagaaattctatttctggaaatccacttctcataaatgaaagcagcggtatataaaaacccatcttgttttgcagtattgttggtagcagaaaacaaaatagaaagcacagacaaaaaaaaaaacaaaaaaccctgaagttctttagtagggggtgattgcagcaaatctatgaactagaaacacctatcttttaaaatgttaaatttataaatatggaaatgaaacaatgcccaagaaacagcakgagattgacaaaggaaaaggcaaaataaataaataggtaagtaggcaggaaatcaagggaaaaagatcagaaatgctattatagagcaaaggttgtcaggaataat

SEQ ID NO: 846650 - DNA, 480 bp, Homo sapiens
tgtggttctaaatgtatatagaggaaatattaaaaacaattaagagctgggmatggtggctcatgcctgtaatcccagcactttgggaggccaaggcaggtggatcacctgagtgcaggagttcaagaccagcctgggcaacaagatgaaacccatctctaccaaaaatacatacaattagttgggcatggtggtgtgtgcctgtgatccctgctacttgggaggctgaggtgggaggatcacttgaacctgagaggcagagattgcagtgagccgagatcatgccactgcactccaacctgggtgacagagtgagaccccttctcaaaaaaaaaagttataaataggagagaataaaagggagtaagatttaaatgactcaccagaactggtaaaataatgacatcagtagattgtgataaattacataatacccaaagcaaccattaaaaaaagctatgcaaagaggtacactcaaaa

SEQ ID NO: 846651 - DNA, 600 bp, Homo sapiens
ggagtccagtatcattcttctgtatatatggctaagcagctatcccttgaaaggayaaacagttccaggagcattttggcagagtctttaggggtttctaggtatagaatcatttcatccacaaagaaagatagtttgacttttcctcttcctatttggataccttttatttctttctcttgcctgattgctctggctagcacttccagtactatgttgaataggattgatgagagtgggcatccttgtcttgttccagtttccaaggagaaggcttctggtttttgcctgttcagtatgatgctggctttatgatgctggtgtgtttgtcatagatggcttattattttgaaatatgttcctttgatgcccagtctcttgggggcttttatcatgaagtgttgttggattttattgaaagatttttctgtgtctactgagataatatatggtttttgtctttaattatttatgtagtgaatcacatttattgattcacatatgttgaaccaaatttgcatctaaggaataaagcctacttgatcatggtgaattaactttttttattttattaaaatattgactttatttcatatgtat

SEQ ID NO: 846652 - DNA, 600 bp, Homo sapiens
ggagtccagtatcattcttctgtatatatggctaagcagctatcccttgaaaggacaaacagttccaggagcattttggcagagtctttaggggtttctaggtatagaatcatttcatccacaaagaaagatagtttgacttttcctcttcctatttggataccttttatttctttctcttgcctgattgctctggctagcacttccagtactatgttgaataggattgatgagagtgggcatccttgtcttgttccagtttccaaggagaaggcttctggtttttgcctgttcagtatgatgctggctttatgatgctggtgtgtttgtcatagatggcttattattttgaaatatgttcctttgatgcccagtctcttgggggcttttatcatgaagtgttgttggattttattgaaagatttttctgtgtctactgagataatatatggtttttgtctttaattatttatgtagtgaatcacatttattgattcayatatgttgaaccaaatttgcatctaaggaataaagcctacttgatcatggtgaattaactttttttattttattaaaatattgactttatttcatatgtat

SEQ ID NO: 846653 - DNA, 546 bp, Homo sapiens
agtgtgaagtttataacatataagtgtaaagatgaaaatatgtatcaggctaatatcaatcaaaggaatgctggagttgctacattaatgtcaaacaaagtatatttcatcaaaaagactatttcagaactagaataaagagggtaattatgtaatgacataggagtcaaaaatgtgtacatctaataatagattttgaaaaatatgaatataaaactaatagaattataaaaaggaatagaaaagttcacacttagagattttattatccttgtttcaataattgatagaacaagtacacagaaaaacagttgagttgtagaagacttgtatagcactataaaccaacttgacttaattggcgtttatataatactccatcaaacaacagcagaataaacatccttttaaagtgctttcagaacactgaccaagatcaaattcttgggaactaaacagtctcaataaacttaaaggattcaagtcaaacaaagtatgttctmtgaccacaatggaaataaagtagaaatcaataatagaaatata

SEQ ID NO: 846654 - DNA, 363 bp, Homo sapiens
cccagagtccgcagatccacagctgtgagccaggtccgcgtggggccagttttcccaggagtgcacgtttcctcctctcggcttcccagggattcatttccggaagaccaagctttcagctttctagtctgccttagcgagcagcgggaggaaaaaagcaagcctccttgtggcgatcccagttgttgccaaggtggtgacgggagcgcagcgctggggacctggaggcggctgcggcgcaccagagctctcaagcatcccgccgccagcagagacygcgttcaagtcccagcacactttcgctcaaacactcctcaccctgcaacctctgacctgaatgcagaaacagtttgcgtcttgtgc

SEQ ID NO: 846655 - DNA, 519 bp, Homo sapiens
ggagacagagtcttgctctgttgcccaggctggagtgcaatgccacgatctcagctcactgcaagctctgcctcccgggttcacrccactctactgcctcagcctcccaagtagctgggactacaggtgcccaccaccacgcctggctaatttttttgtatttttagtagagacggggtttcaccatgttagcccggatggtcttgatctcctgaccttgtgatctgcctgcctcagcctcccaaagtgctgggattacaagcattagccactgtgctcagaccatcttttaacttttaatctatgtgtctttatgtttaaagtggattttctatagacaacataaagttggggcttgttttttaatctactatgagaatctctgtttttaattggtgtatttaagccatttatagttaaagtgattattgatatggctggattaatatctaccatatttttcactgttttctcttcattgtctccctttcttttgtcttctactcttcttgtcttctt

SEQ ID NO: 846656 - DNA, 635 bp, Homo sapiens
ctcttcaatattattttctcctcaaaggaggggtccaggaagccaatagagaatataatggggtttctaaccaagaggggataatgggaggattgtttcccacctcyagccttagctgtctctgtctcactaccactttaacctcctttattaacaacacacgtctgaatcctgtagcttagagtccactgtgagaacagagccttttcagcttctcctggattgatcaatacacctttcacttaaattctcttttgaccttcaaaggtaacctttattggtgacttgtactcttgcttgtgttaaggatgtcaaattgctagatttaatcattatgtcatttctatctatttctgtctggctgaagactaatttcctaattccaaagttgagaagcaggttcttgtttctatcatcagaatgggtccttaagttggaaactagactcgacagatacgagtaaaacaaaaactaagtgttggttttattcccacatttcccctgacccaattagaatgaaagggaatagatctcaccagtcacagttatggcatgtgctgatggtcaagaggaaagcgggcaacacctggcaacccacctgtcccggaagtcctgcccaacactgtcacatcaaa

SEQ ID NO: 846657 - DNA, 402 bp, Homo sapiens
ctttctctactccctgcctcaaaccacccctcccccagatggtacttcagtttggatctattgggggagtgtggccacagaccgggggatgattgaattgttcagaacctgattggaccgtgtccaatgtgcggaagatttccttgaaatcttctcaagctcttatgactcactgggggtttaagagatcaggattggttccactgtctggggttagtgttttacaaggtcattacacagtctttttgacctcttttgaaggtagagttttagaaggctggatggaagattctgagcctggaattaggaccccatggaggcagttcagtaactaaactaataaagttttgaaaagttacacgtaaagtakaagaatctagtgcgtgggacagtaaaggatcc

SEQ ID NO: 846658 - DNA, 570 bp, Homo sapiens
cgccttggcctcccgaagtgctgggattacaggcttgagccactgcgcccrgacaaatcttaaattcttaaatattttttgtcagagattggttttctttgctaagattttctatattttcattgatttcaagataattttcaattgcttgttaaagcctttatatgaaagcagcttttaaatccttgtcagataattctagtgtctgattcatcttggctctggcattagttgattgtcttttcttggcatggtgggttacttttaattgtatcatagacgttctgaaaattgtgttaggagactctagatcctatttaaatcttttattttaataagaagttacttgcttaggtttagcccacagctctaggcttattttgtgggctgtggttctagcaacaatttaattttttaaaaatcgtgcacctcaatagttttcagtatagtcactgatacatgcaaccatcaccacagtcaatattagagcacttccatcatacaaagagaatccctgttctctttgagaatcacctccccgtctccccatcacccagccctaagtaacca

SEQ ID NO: 846659 - DNA, 654 bp, Homo sapiens
gatgatgaagttaaagattaaaattgatagatacttgatttaccaaattacataatcacagagttggaagaaatttttaaaaagtactttaagtacattaaaaaaatgtacctgatggtatctaatgtaccatcagacagatggatgtttactccatgttttcagatacagtagaagtatctgtaaggactttgaagttttccagtatctgacaagagctgtggtttcagtgttactagtatttatgctgcaactatccctgaatttgatatttcttcctcccacacttagtattgatgtgggagaaagtcaaaaggaaaaatggctgtgcttatcttcctattaaagatagtgctctatctctttccttcagtttattgaaactctttttagagtataatatatataaccacaatatatattgtggttccttgaaatgtcataatattaaataatagcagcaaatagtcacatagagcttgtgtcaggtggtggtatcagtactttaaatatggtaactcacaggatcctcatgccaactctctgaaataggcactatcataatctccattttacagatgaggcactaaggcagaggtagagtaaagaactggcccagsttggcacagctagcaaggatgtggcaggatgcaa

SEQ ID NO: 846660 - DNA, 648 bp, Homo sapiens
cttacaaatatgtgaagttggcccaaggtgraagacatctatccattcatcagattgtcacctaggctatttgcactgactgcacaatacatggtgcatcttaatttgctttacttaacatgtttgcatagagattacactacaaagcagccttgaaatgataagacattgtatatgcagaagaacaagaaatacattaagtaaataaagttggagaacacaaatttaccataaatgaagcacatatttgcccctgaaaaacttttttttttaccataaaacaatgagctagtgtttttcaggctctgaaaattaaagatagccacaagagataaactggggctcatggcagggtagtagtgaggctgaaggagctgtcattaagatatgtacaaatgttacctaggctgggcaccgtgactcatactggtaatcccaacacttttggaggctgaggcaggaggatcacttgagtccaggagttcagggctagcctacgcaacatagtgagaccctgtctttacaaataaatatataaaaatagctgggcacggtggcatgtgcctatagtcccaactactcaggaggctgagatggggggatcccttgagccgagtttgaggatacaatgagctatgacactgcgct

SEQ ID NO: 846661 - DNA, 557 bp, Homo sapiens
atgtgggcagaaatcatttctgttttgttcacctgtctcctccacacctagctttagtgcctggcagctgatgcccaataaatacttgttgaacaagcaaaccatcttgaaccatgaaagaagatgaccaattacattctgcttttttagactcctgagaacatgatatagaagaacagaaacaaaagaacattgttaaccttaatttctttctttcttttttttttttttttttgagacagagtcttgctctgtcacccaagctggagtgtggtggtacaatctcagctcacttcagcctctgcctcccgggttccagagattcttctgcctcagcctcctgggtagctgggattacaggcacacgacaccacgaccagctaatttttgtatttttagtagagatagggtttcaccatgttggccaggctgatctcgaactcctgacctcaggtgatctgcccgcctaggcctcccaaagtgctgggattacaggcrtgagccattgcacccagcccattaatttatattcaatcatctaaaagaacataagtaaa

SEQ ID NO: 846662 - DNA, 613 bp, Homo sapiens
catttcctcttccaactcactggccagaactagtcacacaaccctgcccaaccacaggacagcaaggaaatgcaatgggatcatgtgcctggaatgagagaagtggaacggcactaaggactaccaaagtttattaagtattgaagctgctaaataaggctattcaacaggggaggggaaatgaggggtggcaagtaaacaggtgaaagagttttgttgttgttgttagcatttggattttcttaaactttgaaagattgaagtatgaccatagagataagtgtgcaaatcataaatgtacagctcaatgaattatcagaaagtgaactcatttgtaaaattaccacctagatcaagaaataaaatattaccagttccctagaaacccacgttgtgacccctccaatttctacttctgttcttcctcccaaagttatcctatagactgaaaatttaaaagaaatacacattttcacactcatcatgarggaagtagaaagtatcattcctttggggtttctctaaaccttggggagaatgactatattgttattttggataactgaaacctacagagggtaaagaatgaatctgagtttactaggaagtagca

SEQ ID NO: 846663 - DNA, 568 bp, Homo sapiens
acaactggtctaaccttagatcattttatgaaagtgtttggctaaatattaaacactcctgatgccctgtgatttattacatatttcttaaggaaaaaaaaaacagaaccaatgaagttttctgctatgaaggcggaagtatgggatttgctagagacagggatttggaaaatataggtcaaggcattttctgcagtcttttatttctattctcttgagaaatcaaaggtaagcatctgtaacaaatgaacgtaatgaaatggaaataatttttgcctaggcattgggaagttaacgattcattaaaatgttaactcctggaaggcaaggattgtttttctgaagctgtgtgacacctagcgggtatctgtacaaaacaggacttagttgctctttggcagtgagtcttttgaatttttggctttcttttcatagttgcgtaacagcaaaaataaattaattcmcattgttcatgggaaatgtggggtggaatgcaccacagccttaccaaagcctgacattagtatctcgcgtttacagcaaacaaactctagttttgcaataagtg

SEQ ID NO: 846664 - DNA, 607 bp, Homo sapiens
ttacctcatgctctctagggggtgtgagttcctgtgttcccttgagcatcactgaataccaggggtatgaggattaatgtcgcccatgacggatgtatctgggccatattacattagtcctctggtcaattagaaaggttgagcctgggctgggctggatggcagagtggggtaaagaggggacagtgagagacagggtgtggtcaagagacagcaggaggaagccactgcaccctgtggtggcaaaggcctcccctagctcctcaatcatttgacttgctattcatttctccggagccatctgtcctcacagtcctgacgcctgactctaggaactttagccaagattctgactccagcctttacttcataggaagtttgaatttgaattcactgttaaaaaaattatacaggctgtgatttttggatgctggcatcattatttaaaatttacttacttagattaatattaaaaattaagccatgtatttgattgattttatagatcagaggtcaaatttagccaaccagtggcttaaycaagtaatactaacttggagacagccttttctctttcctccttgttgatttcccatatgattataat

SEQ ID NO: 846665 - DNA, 599 bp, Homo sapiens
tctgaattctctaagtacttctctgaaagtacttagagggattaaaaawtttttataaaccaattatcccatgatggtgaaatgggatgggaggaaattgaatacaaatagagatctgaattctttgagagctaatgacaaatgtgatagatttaaaaatttatattttcattgactagaatatgaaagagattttaaaaaaattatcagaggctgggcacgatggctcaggcctgtaatcccagcactttgggaggtcgagacgggcagatcacaaggtcagaagatcgagaccatcctggctaacacggtgaaaccccgtctctactaaaaatacaaaaaattagtcgggcgtggtggcaggcgcctgtagtcccagctactcgggaggctgaggcaggagaatggcgtgaacctgggaggcagagcttgcagtgagccaagatcacgccactgcactccagcctgggtgacagagcgagactccgtctcaaaaaaaaaaaaaaaaatttatcagagaaagtgaagaattcaccaagtatatgaccataacaaatatactgcaaactttgacctgaaggaagagacattttgtcttc

SEQ ID NO: 846666 - DNA, 529 bp, Homo sapiens
aggttattagcacaatctcaaacaccacccgaaaattattttctgacagctgtttataggctggtcaaaatttatggggctggagaggtggctagctgccctcccaccccaccccaaataaaaggcacatagaaggcaaggggggaaattggaaaccctttactatgcttatgttagttctttaataacaccaaagtttaaataaattaagtgactctcaaggtgagagagctgggattagaatcattgacctatggggttctcagttcattggacatcctagagtactacgctgtaaaagacatgctaataattaataccttgctctgaatgtgcttataatacttcatatgccatgcacataaaatgttatttatatatttattggttaaatgaattaacatttaaatattggcatcgtaagtgaataagtattcagtatctttgtaatcaatgggtaactcatgcttttacacataataagagtamtcttctgatcagctattaaaaagcaaaaagcatttttttg

SEQ ID NO: 846667 - DNA, 570 bp, Homo sapiens
tatattttcagtcttctgcctttgtctgatctgtatcctaaacacatatttaaggggtkgttttagtctttcaacaaactactagaaactttgttaaatgtattttaataaaatagaaaaaattgcaaacaatcatagagcttaatgatcaacagatttagtaagcagatttagtatacatattttaatcatttcatctgagaaacaatagcacacatattttattacaaatatgttaaaaggattcttcaaatatgtagtccactgactgatgttttgtgacttagagatgcacagaaaacaatttgattataaaatattatgacccctactaattctttcatgctctgttttatgaaaagattggactttcttttttctgtatgcttttcaacaggttatagacatatatgttcacagtctagataccatatgtacactaagttcttcaggaagagaaaaaattttttttcttatctgcactttgttttctctcccactttaaaatctttgcataaaatcaccttgcagagtgatattctttactctctctcttcttgtctgagttgt

SEQ ID NO: 846668 - DNA, 511 bp, Homo sapiens
tccctcaagtctttaatccatcttgagttattatttgtatttgatgagaggtaggggtctagtttcattcttatgcatatagttagccaattatcttgacaccatttattgaacagggtgttttcccccattgctaattttcattgactttgtaaaagatcagttggttgtagttgtgtggctttatttatgggttctctgttctgttctattgttctatgcgtctgtttttgtatcagtaccatgctgttttggtcactgtagctttgtagtatagtttgaagtcaggtaatgtgatgcctctagctttgttctttttgcttgggactgctttagctgttggggctctttttcagttccatatgaattttggaatagttttttctaattctgtgaggaatgacattggtrgtttgatggaaatagcattgcatctgcagattgctttgggcagtatggccattttagcgaaattgattcttccattccatgagtgtggactatttttcca

SEQ ID NO: 846669 - DNA, 527 bp, Homo sapiens
aaagagaggctctgttcaagtcttggtgggaggagggatagtctccgcatccctatttggggtaggtgggrttgggggcggtggtgaatggggcagtaaactcctgctcggtccatactctaacccaataaccgggaggcctggtgggtgtttaactgtgtcctgcccatgcaaagaccagtgtgtgtgtgtttgggaagggtggggtccgccccaggggcgtctgctcaactgctgggcagggggacgcgaagtgctcgggccttctggatcccgcagcaggatccgggccggggctccactcgtttccctagcgctccggctgccaccgcgcgggggtcggccgagccgcagcgtccggcctctgggggcgacgtctttaggccccgcgccggtccttgggagccgggctcgtgcggcggacggtcaggtccctccgctagcaaacggctgtctggggcgcctcgatcgctctcccgcttcacggtagaaggcggcggcgcgcgaggggaggggagggcaggccg

SEQ ID NO: 846670 - DNA, 569 bp, Homo sapiens
tcacacttgccctgacccctttgcttatatgtcatggggctccatcttaatgagggaagtagggttgaatggggagaaaggggctggggtgggggatcttgtcagaaggctcccagatgtggtcacactaggctcagccatcagcagggaccctgagcctgaggagagctcaagttcagccactggggtcagcccaacagtggggcggctgggaggagacaaagtctggttgcccagaaggctcggattgtgggaacccctggaaaccacctgggttggaagtggctgaagatgagcctgatctctcaggagctccctcagggtctcttcaggaaccagcagcccctccatgggggcccccgtcaccataccctgaacataggaggaggacctcagtggcccctccttgaccctaggggctgctgtagtgccagaagtcctgatgaaggcagcaatgacagtcccagggggctgagagctgggccctgctggtccagcccctgtgacygtgggtggcgccgggttggtcggacggttggccccagccagaagttgggggaggccactga

SEQ ID NO: 846671 - DNA, 509 bp, Homo sapiens
ttgagtatgttctaagagatggaattgcttaatcatagggtttgcacattttaaatggtactggatgctgtmagtttggcccctgtggtgatttttatcagtactcacccctcccggtgatttatggaaagtattatttgaccagctgccctgcccacatttggtattagcatgctttcaaaatgtttgcagtctcttgggtatgacatggtacatctcactgccatttacaattttcattttcctgccaaatttgaaaaataatttcacatatgtattgtcttttttgttgtgaattgcccatgtatattattggttcatgtttctgttggcttgcatgacttttagttattggtttctaggacatctttatatattcagggcatacacacacacacacacacacacacacacacacacacacacacacacatacatctggcctcgatgcctcatacattgcaattattttcttctaatttgttgccattcagctttatggtaccctt

SEQ ID NO: 846672 - DNA, 509 bp, Homo sapiens
ttgagtatgttctaagagatggaattgcttaatcatagggtttgcacattttaaatggtactggatgctgtcagtttggcccctgtggtgatttttatcagtactcacccctcccggtgatttatggaaagtattatttgaccagctgccctgcccacatttggtattagcatgctttcaaaatgtttgcagtctcttgggtatgacatggtacatctcactgccatttacaattttcattttcctgccaaatttgaaaaataatttcacatatgtattgtcttttttgttgtgaattgcccatgtatattattggttcatgtttctgttggcttgcatgacttttagttattggtttctaggacatctttatatattcagggcatacacacacacacacamacacacacacacacacacacacacacacacatacatctggcctcgatgcctcatacattgcaattattttcttctaatttgttgccattcagctttatggtaccctt

SEQ ID NO: 846673 - DNA, 628 bp, Homo sapiens
ccttcttcttcatccctatacttaccacatcccaccctcacccccagcaaacctatgtgaactcaagaggtggtagattgaaagaagcttcaatgaagggtacatatgccttagactgaattctgatcaataaatgtaagttaattaagtaaaagtcgggggaaagaaggggcttcaagctcatttatagccaagaagagttagagaagaccatagcattttacactttagaaagatgatttcagaagaagggatatgatgtgatgggccaagagtctaaaatgaaaaatagctaaagaggaattttcaacagtgccatcacattctcagaaaagaagaaaagggccaggcatctagacacctgtgtaactacatgggataaaattttaaaatggggcagaattgttacagaaatactgagttacacttaataagcacatttctctttgttatatcagctattctttatagcagctctgtgattttggtccaacatggagtagtgaccctacttcgtgaatgaggaaactgaggcccaagrattttagggacttgcctaaagtcacagtgctaataaaaggcagaattaagtttcaagagacctaggtattatggctccatagtgtag

SEQ ID NO: 846674 - DNA, 609 bp, Homo sapiens
ccaatacccatcttaattattttctttttaaaaagtactgcatgtcatattctagaactttccacggatgctttttgcacatcaggtagtatgtgctattttataatctgctgtttccagctaacatatcaaacgtgttttcatgtttctgcctaactttcataaccgccattttaatggctaaataaagcaccgtaatattaatgtacattttttttttgagatgcagtttcactcttgttgcccaggctggagtgcagtggcatgatctctgctcactgcaacctccacctcccgggttcaagcaattcttctgcctcagcctcccagatagctgggattacaggtgcctaccaccatacctggctaattttttctatttttagtagagacagagtttcaccatgtttcccagactggtctcgaactcctgacctcaggtgatacaccctctttgttgaaaatttagattgtttccactccttaatttgtactaacaacaacataatgaacatctttgtgtacctrgctttttactttcgttaaataattaccaggatttcttgatgaaagctacattttcatgagtccttcagtgattttttttct

SEQ ID NO: 846675 - DNA, 584 bp, Homo sapiens; identical to SEQ ID NO: 821426

SEQ ID NO: 846676 - DNA, 622 bp, Homo sapiens
taactaggaagcatttgtaggaaaaaagtgtatgtgatattaatcaagttttttttcttgcatttctattttgtctggagcaaacagtagctcaagtgagcacttaaaaatggcccagaaaacaaatgatcgaagtcttggcttttgagttccaaaataaagtcctaaaatttacagaactgataaaggtcttaaaagccttttatttgcaagtgaaaagttttctctactttaaaatggttgtcttaaaaaaaacgcataaaattgtcattaggaaaattaattttaaaaagatctcaaataataaggagatatattactacaaagtagtctttactaaatttttttaaacattttgtcttttgcaaagtaaattttaagtttttttcctctaggtcatagttattcatttatctttctagtttttctactttattttgccaatagaactttagaaaacaattcatcagaaaaatctactttgctttgatagagatcctagcactctttaaaaaactgcttctataaatacacctgcytcttccaattctgtactattccttgttagatttcccctaactgaaatttctcctcatccctctttgcttaaataaattctgtt

SEQ ID NO: 846677 - DNA, 617 bp, Homo sapiens
gtgaatgtgtaatcatatcttacgtagtttcagtgtggactttcctgattattaacatgttttcctaaatggtcactgagtatgaataacatttgctatgtttgtagaccaattgagttttgtctattcaagtacttgtaaaaatatcctataatttgttaatagattttgtctttctcattaatttgtatgaatttataatatattgtggaacttcgtaggttacttgtgaatattttcccatttagtgatttcttttaaattttattgcatactttaataaacacacatttttaaaaacatagctattatttctttgtgattagtgcttttgactcttgtataagaaaaccttcactaccatagtttcagcatgactttctcaaacctacttttatgagctctacagttttttctttcgtatttctataatcctgaagctctttgattttaagtagttatagtctaatattttctcttttttccttcckgtgaatacctagtttttccaacaccatttattaaatattctgttctcttcccaacaatatactgtgcaacttttgtcagatataaaatgttctaaatatgtatgagtctatttctatgctctattc

SEQ ID NO: 846678 - DNA, 632 bp, Homo sapiens
tctttttctgcttgacttatttcacttaatatgatgtcctccaggtacatccaagtatccaagttgttgcaaatgacagcatttcattctgtttcatggatgaatagtattctattttatatatatatatatatactttttattgattcatctgtagatgggcattttggttgattccatatcttggctattgtgaatagcactgcaataaacatgagtaagcagatgtctctttggtacactgatttcacatagaccaatgaacaaaatataggccctgaaaatatatccatacatttacagccaactgatttttaacaaaggtgtcaagaatacacactggggaaaggagaatctctttaataaatggttctgggaaaactggatattcacatgcagaaaatgacactagacccctctctctcaccgtgtataaaaatcaactctaaatggattaaagaaataagtgcaagactcaaaactgtaaagctactagaagtaaacataggaaaaagcttgatatttgtctgggcaagaatttttttagtaagwtctcaaaagcacagacaacaaaacagagtagacaaacggtattacatcaaactaaaaagcccctgcacaacacacaatta

SEQ ID NO: 846679 - DNA, 614 bp, Homo sapiens
ttttaatcccagtgctttgcgaagccaagatggaagggttgtttgaggctgggagttcaagacctgcctgtgcaaaatggcaagaccctatatctgccaaawctttaaaaattagatgtgcatggtggtgtgagcccatagtcctagctgctcagaaagctgaggtgggaggatgacctgagcccaagagtctgaggttataatgagctatgactgcaccactgcactccaggcttggcaacagagcaagacactctcaataaataaataaataaatagcacaaattcattaggaagacataacattcctaaatgtgcttttgcctaataacagggccttgggttatttgagtattcaaagcaaaaatttacagaattgaagacagaatcgaagaatttcacaaatatcattttagcatccttctcaacaaccattgatagaataataatacaaaaatgatcagtaaagagaaagaatatctgatacagccctactaggtagacttgatatttatagcagaccacccttaacaacaacagaatacatattattttcaatatagtttacaagctggccataaactgtcttaacaaattttaaaagaccaaaatag

SEQ ID NO: 846680 - DNA, 589 bp, Homo sapiens
ggatacagcaatgatgaagatatatgtgaattttgtttccatagagcttacttagaaatatgcaagacaatatataatgaaaataaagcaggctgtgaaaacagctaaaaaaaatacaagcatartaataaaatagagtttacagatttggaagctatttaagtagggaaaagccaatctttgcaggcaatgtcttagatgagacatgaggataaaaaagcaccaagagttttgctaaaagagagaaagtgcatgtaaagtcctaacctggaaaaccagaaaaaatcaagagttccctttttggatataataattttgagaagtttaggaaatattcaagtgagaatgttgcaagcactagggtaaaagatatgaagttcagcaaagagacctgtgcttgatacagatgtttgagagtcgttaccatacaagctatttaaaaccgtggagcaggatgaaatactgaacatgtgagaaatgatacaaaccaaattttagtgatctgattgtggaaatggaagaagtaaaaagggtctgtcaaggagtgtccagtggaaaaagaaaatgatgaaagataagggataaatgt

SEQ ID NO: 846681 - DNA, 610 bp, Homo sapiens
ttcacaataaggggagtatcttcaattattcagataaacccaatctaaatactaaaattttaaagctaaagacattctctagctggagtcagaaccatgcaatagaagaaaacagagaaatggagctgaaagagaagtcagaaatattctaagtgtgagagaaaccagatacactgttactagctttgagttttaagggctcttgtgcaaagcccagaaagaggcctctaggagctcatagaaagcatgagaaggaatatgggcagtctgtcggatcctctttttaacatccagcaaacaaactggtaactcagtttcagaactgcaggaactgaactacagataacctgaatgtgcctgaaggcaaatttctccaccgagcctcctgtaaggaaagcagccccgtggacaccttcattttctccctgcgaaatccaatgtcggacttctcatatcagaacttctcgtattcagaactgagctaataaatctgtgttaggctgctacatttktgagaatttgttaaggcagctatagaaaactaagcacccattaaattacatttctggacttcaaatgaaagaaaatcagttttatcataatgtctgac

SEQ ID NO: 846682 - DNA, 583 bp, Homo sapiens
ccagaattttggatagtatggactgtacaaamcacaaacaaaaaaactgagggtggaacagaattgtgttcaaaaagtcaggcagagttctgggtgggaaactccacttctctctctctcctgggagtcactgtgccctgagttactcagggcctgggcttggtgcttgggactcacagaaaagtgccccagggcagagttctagctctgtattcaaaattattcttctgcactggagttagagcactaatcttgctctggctccagcattgtgctagaggagttagttgagaaaggatcaagtgggggctgtggtgctgaaagcagtacagcaataatattagcagtacaaccatgttacctaagtggaggcaccagcgtattgtcattttcaccccaagaagacttaggtgtttgaaggccttctcatcctatggtcactcaagaaactaacaaagcagataacagtgttggtgcactcaccaggatgaaaaaatttcatttttctaagttaagacctggcttcctaaaggaaagatgattcatgtatatttctggaaggttatataatctaggcactaga

SEQ ID NO: 846683 - DNA, 500 bp, Homo sapiens
agctatcctaaaatctgtatggcaccaaaaaagggcctaaatagccaaagcaatcttaaraaaaaaaaaatgaagccagaggcatctcattatctgacttcaaactatactatatagctataataactaaaacagcatggtactggcacaaaaacagacatgcagggcaacagaacaaaacagagaacccagaaacaaagttgcacacctacaaccaactgatctttgacaaagtcaacaaaaataagaaatgtggaaaggttccacatgtcaataaattgtgctgggataaccagctatccatttgcagaagaattaaactggatccccttctagtaccatacataaaagttaactcaagatggattgaagacttaattaagacctaaaagtataaaaatcctagaagaaaacctaggaaatgcccttctgtacatcagccttcacaaagaatttgtaactgagtgctcaaaaacaattgcaaccaaaacaaaaattga

SEQ ID NO: 846684 - DNA, 616 bp, Homo sapiens
atggtgggaggtgcctgtaatcccagctgctcgggaggctgaggcaggagaattgcttgaaccctggaggcggaggttgcagtgagccaagaaggcaccaytgcactccagcctgggcaacaagagtgaaactccgtctcaaaaaaaaaaaaaaaccatatatatatatataaaatagctttacaaataattcactttttgatcaacatatgactaaatctgtacatctatcaatataaatatagtaaacaatacattttagaatggttccaaaatataatttacactttcatatattaagagactctcaaatttcaatctcaaaagtttttaaaatttaagtaatgattttcatcaaaaaaagaaaaacctttttttcccacaaaaatagaatgttttatctgcatatagtcaatactattgcatggcacaaacagttcaaatcattaaatattgactcaaaattacctttaagaagttttttcaaatttctcctttctgttactgcttgaaaaatatctatggttatacttaagtcttatgaagactgtatccaactgaattaaagatgtcacattcaattttcacactcctagcagataataaccatgagtca

SEQ ID NO: 846685 - DNA, 611 bp, Homo sapiens
tttttttgtgtctttccaagagaggtaatattaagaattaataggtatttcagaacctccaaaacgaactcactaaacragtaccaacaagttacaacctgagctggattttattttcaaatgataagcaacagcaataaggcagtccatattctataagctacttttgttacacattaatgactaaaacagcttctgtgcagatttcaaattaatcggacaaagaatatcagctttatggcattaaactcatttgaaaaaggagtggatggcaatacaactaaagttttaccagaaaacaagagttatctaagcaataatccagcaagaaaagagaactacttctgatttcctagaatacatccctaacaggttattatttctgattaccatggcagcacacagcattttccatctaacactttacaaagatgcttggtcatgccatgctctgctgtattaaatgatctttgttgaaaccattcatttccatttctcttacacctacgaaatgtcaaataagagtgaaaagacagtcatttactctcaattttctctataatttagagtgtattagaactctaaaataatagactaatatattttctcaa

SEQ ID NO: 846686 - DNA, 496 bp, Homo sapiens
acattcctcagtcctggaatcatgacatcccaactacaatgagtacacaaagcaccgaaatcttggttcttaaataccattctccattagaaagactaagacttcctcagaaaaatggcagattccagggctagagcaggcaaagtgcaatatgaaccaagactatcttgtaccagaaagtaagaaagtgtcacaaaatgatgggaacatgtgaaaaggatatagatgtcagagtgcaagagttcacactgaccaaatcagggataatttaaatatccaaataagtaatgatggtaatatattataactccagtgaatagaacaggaagccatgaatccataatacatacatacacacacacacacacacacacacacacacaatttttttttccttgtgtaaccaatgtttatctttaaaactaaaccctagtggcagtctaatctamagaacccttggttctcactacactacactacattaatgctgtaccct

SEQ ID NO: 846687 - DNA, 481 bp, Homo sapiens
tcctgagttacttcatttagaataatagtctccaatctcatccaggtcactgyaaatgccattaattaattcctttttatggctgagtagtattccattgtatgtatataccacagtttctttatccactcattgattgatgggcatttgggttggttccatgattttgcaattacgaactgtgttgctataaacatatgtgtacaagtatctttttcgtataatgacttccttgcctctgggtagatacccagtagtgggattgctggattgaatggtagttctacttttagttctttaaggaatctccacactgttttccatagtggctgtactagtttatattcccaccagcagtgtagaagtgttccctgatcaccgcatccacaccaacgtctaccgtttttatttattttttgattatggccattcttgcaggagtaaggtggtatcacattgtggttttgatttgtatttccct

SEQ ID NO: 846688 - DNA, 392 bp, Homo sapiens
gagcttatttggaaatatggtctttgcagatgtaaccaagtgaaaatgaagtcatactggattaaggagaaggttcctaatacagcgattggtatcctcataagaayagggaaatttagacatggataggaagaatgtcatgtgacatcggaggcagaggttggagtgatacaccttcaagccaagtattgccaacaaccaccagaagctaggatgaggcaaagaaagatcctcccctagagccttcagagagaacacggtcctgccaatgtgttaattttttatttctagcctccagacctgtaggagaataaatttctgttcttttaagccactcagttggtggcactttgtaatggtgtctctaggagttaatacaactctcagccaat

SEQ ID NO: 846689 - DNA, 634 bp, Homo sapiens
aaatgccaatcacttccagaaacaacctcacagacatgcccagaaataatgctttaccagctatttggatatcccttaacccagtcaaactgatacctaacattaaccattacacatatattcatggaaaaaactatctttcaaacaaaaaaaattacaagagtggcattgctttgcatttttgtgatgctccttaatgtctggcttcatagaagacaactggtttcctatgtctgcttctatattcaatctgtttgtgatatcacatgtcaggtagcctctggaaaacttcactgtacatactttttttaatgagaaaatgacaaataacatcataacaaatcattttgacttggcagacacctaacagggtctcagagaccctcagggtcccccgattacactttgagaaccgctgaactagaatataagctcagtaagggcagagactatatatctcttatatcccagcacctagaccagtctggcacatagtaggcactcaataagtacttgttagttaaatgtatgaacctgaggctatagtrtgaaagatattgagtgccaggctagtaagtttggaattcacttagtagacactaggcaaccagtagaggtttctgagcaagtaaat

SEQ ID NO: 846690 - DNA, 501 bp, Homo sapiens
ttaatattttcagactgcagttgatggcaggtaactaaaacaacagaaaatgaaaccctggctaaggggggactactctattcttactcacactttgattytaagtcaggaagcagactaatccgcataaagcaattagcaaactgtccatgacaagcagagacagaagttcagaagagaaaacgcagcagtggtcagagtcaccagggaagtttctaaaaagcgtgtacttggatgagactttgaaggacagagaaggctggggaagtgagggggaagaacaagcatttccggcccacgaggggagcagcttgaatgtgatttctctgcacactggtcaggcttcatcacttactagctgcgtggcctttggcaaattacttaacctctgtcaaccttcttttccctaactgcagcaagatcatattggtacctgtctgtaaggctgtactaatgtaattcttatgatgttcttaccacagtgcttgggtcatataaagc

SEQ ID NO: 846691 - DNA, 583 bp, Homo sapiens
attcccagtcttggtaggcataagtaattaatcccagatgtggcttcagaatccttctcaacatactgttccagtaaactgctaacacttgattgaagttgacatgtaagacacacttatttaccattcctatttgaaaattaatgttttcctgtcctaaatgttaacatattttatatttatcacatcaacccaagtaattaatatttaaaagtatataaaaggctttaatattatccacaacccaatagaaatctttttttcatcacctctccatttaggtaatggtcttgaattatgcattttgggagttgaccttccaaatctagtggtgttaagtaaataactattatctaattacatttcctttactagattaaaatataaaaataaacatctagatttcttccttggtggtggtgtcaatgccacctcaaaaataaaaaggttgggggagtatctttaactgactcaagtttggttgattcaagcctgagataaaaaaaaatgrcatattaaattccaattctagtttagctattctcattttttaaaaaatattcagctcttctttattaagatt

SEQ ID NO: 846692 - DNA, 619 bp, Homo sapiens
aattggcgtgtctaaattgtcccagtgtgagtgagtgtgtgtacatgtgtaccctgcaatagaatggcatcctgtccagggttgattcctcccttgagtgctgagccgctggataggctccagccacctacaacccggaactggaataattgggtaaataattaccttatttgttttattaatctttcttaaatgtatgtataactcacatttatttcagtgtttaatattcgaagtgttttggagagcagagcaagatggcggaatagaagcctgtaccattgataacccccgacaggaacaacacattttaacaaatatctgcatactggaaagtttaacaactaactgcataccatcacaagaaccaaaaatcagagcaatcggagtacctggttttatattcatatcactgaaagaatcattgaagagagtaggagagacagtcttgaatcacagacaccaccccttccccataacctagcagcagccctgctacacagagagtatatgcacttgggggagggagagtgcagtggctagtggtctttctattgaactcagtgctgccrtgtcacagtggagagcaaagccatgctgggctcagccagcactcatg

SEQ ID NO: 846693 - DNA, 607 bp, Homo sapiens
ggatcaatccaggagaaacagagatatgtgacctttcagamagagaattcaaaatagctctttttagaaaactcaaagaaattcaagataacagaaaagaaattcagaattttatcagataaatttaacaaacaaattgaaatagttaaaaagaagcaaaacttctagagttgaaaaatgcaactggaatactaaagaatgcatcagagtctcttaatagcagaattgatcaagcagaaaaaataaatagtgaacatgtagaaaggctatttgaaaatacatggtcagagaagacaaaagaaataaggataaaaaagaatgaagcatggctataagatctagaaaatagccttaaaagggcaataactcttaaattattggctttaaagaggacgtagagaaaaagatggggatggaaagtttattcaaagggatgataccagaaaacttcctaagcctggagaaagatatcaacactcaagtactaaaagactgtagaacaccaagcagatttaacccaaagactacccccaaggtatttaatatatcagactcccaaaagtcaagggtaaagaaaggatcctaaaagcagcaagagaaaggaaac

SEQ ID NO: 846694 - DNA, 647 bp, Homo sapiens
aaaaactcatcaatttaagctgtwtttaatttgccactgagatcaagcttaagcaatatgacatatgtttgttaagacattaatctgacatggtcatttcaatctttaccaaaggtaccacaggaaatacacaatctaaacaagtcatccaatttatatcattatgtgtaaactctggaaagaaaacagccttattcttgaaatgttccagagacaaaaaaaggaaaaattctcttgcgtctgtttcctatgacactcgcatacaactaaaatagccttttccctttgttctgtcttcaggagcaataaagaacagctgcttctcagtgtctgtagagccattttttacagtgtcaagtgtctgctcattcccttttactcaggttaactcattagcctctcttccactgtacttctaaattgcttatatgatttttatctctccaaaataaatatttaatccttttttctgaccccatctcctgatctaaaatcgtttcactgtgttccaacaaatctcctctattttttactctttttcactttgctctaacctagtgtttccacaaaacactaccatccctataacctcctcaaatagtactttgctctaacctagtgtttccacaaaacactaccatccctat

SEQ ID NO: 846695 - DNA, 600 bp, Homo sapiens
taataagatggagaaatatttattcaccagcactccagaaaatttgaagaagatagaaactgcctcatcagggcagcctatccctattccaccctcatttctaagaggagcagttgaaaggctgaacaatacttctcaaagaaatgcctactgtggcagggtcaagagggatgaatgcaggtttggtgggggtgggaggaggtgttagaaacattttttgaggaaaacatatgagattatctttgtgaattggaggtaacaaaaaatttattggagaggtcacagtgaacaataaccataaacaaaaaattgataattagatttcaccaaaattaagaacttctgctcattattgtacaccactagcaaaattaataagactactaatctaacaaagcactgttatcaaggatttaacaaagaatacagtaaacaaccctcaaaaatgggcaaaaatttgaataaacactttataaaataagacatacaaatgaccagttatcatacaaatatattcagtgtcattaagtaattagagaratacatttttttacttttatcttaagttcaggggtacatgtgcaggtttattatacaggt

SEQ ID NO: 846696 - DNA, 630 bp, Homo sapiens
tgaattaattagtgtggagtaaagcccattcyttggtatttcaaaaattgaccaggaattaaaaggatgggttactaatgaggaaaagagagaaagaaagcaaaaaagagagagacagaggtcatgagagagacagacagagactgagagatagaggaaaaaaaaaggtattggttaattttttgttcctgactactacgtacagacatgtgggacctaatgtttcctttgcaagtaaaatttgggataaattaggtttgattgcagctaagagcatattaagaccttggaaaaacaactcaaattgttgcatggcagaatggatgttatctttaactatggcatcaccataagacagctttataaattacagggtacgatggattattttgatgagattatgggttctttatattgcttactcagacagggataataacagaatacaaccacatatgtttatagtttctgttggaaaagaccttcaagatgatctggatgaaatgaacaatgatcgcatctccacggtatgttttctttataatgaagttggtaccatctcttaatctgagcaaccatatttagacatcaaggtgagaacaattctatctagatgtaaccagtggtcta

SEQ ID NO: 846697 - DNA, 628 bp, Homo sapiens
ggtagtatggacattttaacaatattgattctttcaatccatgaacatggaatatctctccattttttggtgtcctcttcaatttctttgaccagtgttttatagttctcattttagagaactttcacttttttggttaagttaattcttaggtatttaattctatttgtggctatttttcctgggattttttttttttcatattgttgactgttggcataaagaaatgctactgatttttgtatgttaactttgtatcatgcaactttactgaatttattgatcagttctaatagttttttggtggaatctttatatttttccaaatataagatggtagcatctgcaaacaatgataatttggctcctttctttccaatttggataccctttatttttttctcttgtctaattgccctagctaggacttccaatactatgttgaataacagtggtgacagtaggcatccttgtgctccagatctaagaggaaaggctttcagtttttccacattcagtamaataatagctgtgagcctgtcatatatggtttttattatgttgtggtatgttccttctatacccagttttttgagggtttttattatgaagatatgttaaacttttt

SEQ ID NO: 846698 - DNA, 593 bp, Homo sapiens
gctcaccaatgggtgaccccagcagaggaggattttaataatcaagtggaaagcatgaccattctgtggacacctgtcagcctctttacccagccacccctcatcacccaatgggcccatgaacaaagtggccatggtggcagggatgaaggttgcacatgggctcagcaacatggacttccactcaccaaggctgacctggctatggtcactgctgagtgcccaatttgccagcagtagagaccaacactgagccctcgatatggcaccattcctcggggtgatcagacagctacctcgtggcaggttgattatactggacatcttccaacatggaaagggtagaggtttgtcctcaatggaataaacacttactccagatacgggtttgcctatcctgcatgcaatgcttctgccaagactaccatccatagactcatggaatgccttatctgccattatggtattccacacagcattgtttctgcccaggcactcactttacagcaaaagaagtgtggcagtcagctcatsctcatggaactcactggtcttatcatgttgcccatcatcctgaagcagctggattaata

SEQ ID NO: 846699 - DNA, 630 bp, Homo sapiens
acccaatagaacataagattaatatggaatgcctttaatgcagcttaaatgaacacttaatctgtttgtaaaattacctgcaatcttagagaattaaaaattaatataaatacaatatggtacctgtattagtcttttctcctgctgctaataaagacataccagagactgggcaatttataaaggaaagaggtttaatggcctcacagtttcacacggctgaagaggcctcacaatcatggcagaaggcaaaggagaaacaaaggcacatcttacatgaggcaggcaagacagcatgtgcaggggaaccgcccttttataaaaccatcagatctcatgagactctttcaatctcacaagaccagtgtgggaaaaaaacccacccccatgatagaaccacctcccttcaggttcctcttatgacacgtggggattatggcagctacagttcaagatgagattttggtgggggcacagccaaatcacatcagtacctaataagagttgaggatactttcaatctaargattaatacaaataatatttgagttgattttaataaattactatcccaagtaccattatgatagttaatgttaataaaacaaataaatgtatacatggaagcac

SEQ ID NO: 846700 - DNA, 625 bp, Homo sapiens
aacattattagattatttttgaaaacaacaaaaaaagatacataagatattagtatccttcatttctaacaaaagatgatccacaaagctttacraatagttaatttttttaaggcctgttaataacttgaactgttcaagtttagaaatgaattttcttatagaaaagatgataatttttgtagttgttgtttctcatagaagatactcaatttttaaacaagaatgcatttaaaacttaatgcctaattcacacttagaacaacagcaaaaaaaaatctgaaaaatcattcttctgatgttcatgttatctcctaatcatacaaaattacctctttccaagtacttctgggaagattaatatgacatccaaaacaacacacatgaaatgcatccaagaaacaagctacattcattcagtataaggggcattgccaaatttgacagggtgttggcacttaatacatgccattactaattttagtatgaaacaggtttcatctctagtgcttttatacttctgaataaatgtagaactgaatcattaaatgccgaaacatttttttctaataccatgggcatcttctgtcattgaactcagtcaatgacattgaacattgttatg

SEQ ID NO: 846701 - DNA, 625 bp, Homo sapiens
aacattattagattatttttgaaaacaacaaaaaaagatacataagatattagtatccttcatttctaacaaaagatgatccacaaagctttacaaatagttaatttttttaaggcctgttaataacttgaactgttcaagtttagaaatgaattttcttatagaaaagatgataatttttgtagttgttgtttctcatagaagatactcaatttttaaacaagaatgcatttaaaacttaatgcctaattcacacttagaacaacagcaaaaaaaaatctgaaaaatcattcttctgatgttcatgttatctcctaatcatacaaaattacctctttccaagtacttctgggaagattaatatgacatccaaaacaacacacatgaaatgcatccaagaaacaagctacattcattcagtataaggggcattgccaaatttgacagggtgttggcacttaatacatgccattactaattttagtatgaaacaggtttcatctctagtgcttttatacttctgaataaatgtagaactgaatcattmaatgccgaaacatttttttctaataccatgggcatcttctgtcattgaactcagtcaatgacattgaacattgttatg

SEQ ID NO: 846702 - DNA, 651 bp, Homo sapiens
attttccagtcttatctccccttattcagggctcagagtagttcrgttttccagccctatgatgctttaatctctggatttctcttttcccttcaatctttgtttaaaacctgttaaatcttgcctaagctcagctctttcttataattcatggctcagtgcagcaaataatagtcacatatttcttaatatttttacttttttcaacttttcccttagctaaatgttcaggggccacttggtctgctttccaagtaactacggatgactttccaaaatgctttgcctccaaacattccaaacatagcccaaatgtacatctttgcaacttgctgtgtatattacatagtctccaatttgttgttgttgctgttagagcaaaaattgcttatgttatagcacatgtttttttttaagtcagcactccatttcaatattatgtttcttctactagttttggtgagctgggctacggacgatagaactaaacatataatacttcaagacaatagcattctcatgtaactgtctgtgaaatttcaggtcaatgatcaagcttgaggcactctgggggtttctatttaagacggaaggaaggaaaagcagtgtgaaggagtgctaatgagtgatttttatattatagacccagaa

SEQ ID NO: 846703 - DNA, 651 bp, Homo sapiens
attttccagtcttatctccccttattcagggctcagagtagttcggttttccagccctatgatgctttaatctctggatttctcttttcccttcaatctttgtttaaaacctgttaaatcttgcctaagctcagctctttcttataattcatggctcagtgcagcaaataatagtcacatatttcttaatatttttacttttttcaacttttcccttagctaaatgttcaggggccacttggtctgctttccaagtaactacggatgactttccaaaatgctttgcctccaaacattccaaacatagcccaaatgtacatctttgcaacttgctgtgtatattacatagtctccaatttgttgttgttgctgttagagcaaaaattgcttatgttatagcacatgtttttttttaagtcagcactccatttcaatattatgtttcttctactagttttggtgagctgggctacggacgatagaactaaacatataatacttcaagacaatagcattctcatgtaactgtctgtgaaatttcaggtcaatgatcaagcttgaggcactctgggggtttctatttaagacrgaaggaaggaaaagcagtgtgaaggagtgctaatgagtgatttttatattatagacccagaa

SEQ ID NO: 846704 - DNA, 664 bp, Homo sapiens
taaatcaccataaaaattctatagtaaaatcatgacacttctcagaatttttacctgatttttgctagttttgactccattgcactataatataaatttaatttagctttaaatgtattacagacttatagtacaatgttaactgggtgctcttactttaagattctttatccctgaacccaattaataggttgtaaagattgagcatttaaagatattgttgaatgtcagaaaagcataaaccttggatattctacagctcagtattttaaaagtctgatgatatagtcacaggtgaatgtaactgtgatacagcaaattaaattaatgtatcaggtagaccttaagtacttacatgttccccttctcaagcctaatggtataaaccactctggggtccttcattacagcaaatctttcattctatacatactacattcctcatcaaactgttaactcaatctacgagcaactcggcagccactgagaagctgtatttatttactcattcatacttttcgtagtgtatcttttttgctgtttgyttgctgggtcaatagcaaatcagagttaaatcaatagtcactcctacttgcctttgtggtctggtctagccaaataggtacagtctgatttcaaatacgtgattacctctgtgtaaaga

SEQ ID NO: 846705 - DNA, 560 bp, Homo sapiens
tttcatccctcacccccctcactctctccccttctgagtctccaaaatccattataacattctgtatgcctttgcataaccacagcayaactcccacttatgagtgagaatatgcaatatttagtttacccttcctgagttacttcgcttaggaaaatggcctcccatcccatgcaagttgctacaaaagacattatttcattcctttttatggctaagtcatattccatggtgtgtgtatgtgggtgtgtgtgtatatatatatcacattttgtttatccattcattggttgatgggcactagggttgactccatatctttgcaattgtgaactgtgcatgtgagtgcagatatcttttctatataatgactttcttttcctttgggtagatacccagtagtggaattgctagattgaatagtagatcttctattggttgtttgacaaatcttcatactgcttttcatagaggtcgtattaatttacattcccaacaacagcgtatgacatttccaccaacagtgtgtatgcattcccttttcactgtacccatgccaa

SEQ ID NO: 846706 - DNA, 560 bp, Homo sapiens
tttcatccctcacccccctcactctctccccttctgagtctccaaaatccattataacattctgtatgcctttgcataaccacagcataactcccacttatragtgagaatatgcaatatttagtttacccttcctgagttacttcgcttaggaaaatggcctcccatcccatgcaagttgctacaaaagacattatttcattcctttttatggctaagtcatattccatggtgtgtgtatgtgggtgtgtgtgtatatatatatcacattttgtttatccattcattggttgatgggcactagggttgactccatatctttgcaattgtgaactgtgcatgtgagtgcagatatcttttctatataatgactttcttttcctttgggtagatacccagtagtggaattgctagattgaatagtagatcttctattggttgtttgacaaatcttcatactgcttttcatagaggtcgtattaatttacattcccaacaacagcgtatgacatttccaccaacagtgtgtatgcattcccttttcactgtacccatgccaa

SEQ ID NO: 846707 - DNA, 570 bp, Homo sapiens
ataaggtaggaaacttgtccaatggtcctgtgggaggaaggtactgaataagggaaccaaaggtgaaatttagtaaggaaggatgacagtccactagaataatgaattaatcaagagctatrtacaccttattcatgatattcactctcttctatgattaaaatagatgattgaaagactgtaagcagggaaatattttctttctaaaaactgaccctgtggtagatggagaaataatagattgggtctccaatatagtcccaagactatatttgaggagactggttataaaacagttaccaaatacctagtaagacatgctggtagctaaaattggaattgtctcaatcgatatttgagaaatagagcacatgtttgatatagatttgaggggtttagtctgcactattggtaatttatcagaagggtgaaggagcaggaagactcaagaggaaattcaagtacaaaattggatacaaatttttgagctttcagaaggattagaaatcaaatttaaaacatgttcagtctaagataccaaagagaagtgagggagttcagaaacaaaac

SEQ ID NO: 846708 - DNA, 570 bp, Homo sapiens
ataaggtaggaaacttgtccaatggtcctgtgggaggaaggtactgaataagggaaccaaaggtgaaatttagtaaggaaggatgacagtccactagaataatgaattaatcaagagctatatacaccttattcrtgatattcactctcttctatgattaaaatagatgattgaaagactgtaagcagggaaatattttctttctaaaaactgaccctgtggtagatggagaaataatagattgggtctccaatatagtcccaagactatatttgaggagactggttataaaacagttaccaaatacctagtaagacatgctggtagctaaaattggaattgtctcaatcgatatttgagaaatagagcacatgtttgatatagatttgaggggtttagtctgcactattggtaatttatcagaagggtgaaggagcaggaagactcaagaggaaattcaagtacaaaattggatacaaatttttgagctttcagaaggattagaaatcaaatttaaaacatgttcagtctaagataccaaagagaagtgagggagttcagaaacaaaac

SEQ ID NO: 846709 - DNA, 630 bp, Homo sapiens
atgctggtagctaaaattggaattgtctcaatcgatatttgagaaatagagcacatgtttgatatagatttgaggggtttagtctgcactattggtaatttatcagaagggtgaaggagcaggaagactcaagaggaaattcaagtacaaaattggatacaaatttttgagctttcagaaggattagaaatcaaatttaaaacatgttcagtctaagataccaaagagaagtgagggagttcagaaacaaaactatctgaaacagaagacaaacatagataaccaaatagtggtatatttatagtactcagcaattacaggcaacaaacatttggtgcatgcagaaaaatgaatgaatctttaaaatgttatgctaagcaaaagtagttagacacaaatcaccaaattatgattccacatatatgaatatctaggatagataaaatgaatctctagtaataaaaatcaaatgagtagtcacctagggtagaaaggcatgagggtagsggggtgaggaagacagttaaggggcaataggaagctttatgggatgtggaaattacctaaatctggattaaagtgatggttaaaattgtgtatatatgtatcaacattgaactgtacagtgaa

SEQ ID NO: 846710 - DNA, 574 bp, Homo sapiens
gtggctctagaggaactgaatattaaggatggagttcttatgttagttttggggtttctggggttggctgcttaatacgattaaaccccaaaatgttaaggactcaacttccaatagtatggagaacactgatagtccttggtgtgaactgtttagagagttatgcaaaataagcacacttgacactgctgattcaccacttgtgagaggcaagaagtttagtgactctatacataatagcttagactatatgtctgaatagtctgactcatgtggagctctggcattggctaattaatcatggtgttcctagaagtgaaattgataggaagtctactgcattcctacttaatttatgtcagcagaaaacttataggtcaaatggacaaaagactaatttgaattataaaaacagaaaatcatggtccgtcaatcaatttccagacttgagtcgttttacagatgcaaaaccccttgaatgaaggggagcctgagtccccttgcggaaggaacccactrcattactgataatttatgcagcgagtctttctcccatccttccccaaggagacct

SEQ ID NO: 846711 - DNA, 583 bp, Homo sapiens
agcctcacaggccccttatccattggatacacaggacaataagcaccaaccagccatcacctcaaaatggtaaacatacctcccaggaagccctcaagactttttcaagaaattaaaaatagcaagtcatatttgcataactttcctagacactgccccacaattggaaaacaagaaagaggcctgaagatcccagcagactggaggccttgcaagcttcccttcttctttggtacatccacaggcattgagaggaaggggatggttcgtgctgttgcacgggaggtggtattgatgtagggtggggtgctggccagtgcaggtgtgggcgccttctctgtgcctctgggtggcttgttatttccttttagtgcattgtgatattatccttctgtctttgtgtattctgaatatgagtatttggtaagatatgtgtagtctgaatagaaatttttaattttgatgaagtcaatttcccccaaattaaccaataaatgtaatgcaatcmaaatcaaaatcccatttggattttctgagacactcaacaaatgtaacctaagatttaggtgaagaagtaaatgct

SEQ ID NO: 846712 - DNA, 587 bp, Homo sapiens
acagcactctgccattcttcaaaataaatgtgaaatgaatatttaaataatataggcttaggggactaaaatcttacttgtaatattttagttcttttatttaaatagatctacaataaatatgacaaaacattcgcatttgtcaattctggttagtggggcacacaattgtttgtcatatatttgtttttattttcaactacaacaaaatagtcctgctttgaaagatcactccatttattatcttgcccagggtttccataggtctttattttgtaatataacactgcccccattctctcccccaccttcctaccccccaactgagcactgctctgaataggataaagatcagcatatgaatggtggccatgatcacagactgaagatatgaacacatgggtaatctcgtcagagagaagcatatgaaggtctgggatgatagatgatgtctctgaaagcccatctcttctccaaagaycacttcagtgttggcgccaccattcccattttgctgatgtggagagtacaagaacaacccttacagggcagtgtttatgttacaacgggcttggcgctaggccagg

SEQ ID NO: 846713 - DNA, 518 bp, Homo sapiens
gttctaaattaatatgaaaccagattgaaattaaaaaaaattttcttagatgattcagaaaatacttcggagcctacagtgcctctgggtcataattaagaacagtaattattattgtattcctgatgtcacagaattctgagttcaattctttcacatctcaatttggcaaactttttttctacgactggtaatcctggatttggttctcagttctcccctacgcccacatagagtgctttttccagaatgagctttgcttagttgccatcagctaccatccctgcactaagggatgctttttctgtgcatcactgggatactgttgaggacctttgttataacccacggagttttgttttttgttgttttttttttgagacggagtctcgctacgtygcccaggctggagtgcagtggcgcgatcttggctcattgcaagctccgcctcccgggttcacaccattctcctgcctcagcctccggagtagctgggactacaggtgcccaccaccacc

SEQ ID NO: 846714 - DNA, 627 bp, Homo sapiens
caagtccacacccaactcaggagcccagctggcttcccctagtggatcccgcaccagggctgtgggtggagctgcctgccactcccrcgcctcccgcctgcactcctcagctcttgggcagtccatgggaccgggcgacgtggagcagggggtggcgcccatcagggaggctcaggctgcgtgggagcccactgcgggggtgctcgggcatggcaggctgcaggtcctgaaccctgccccatagggtggcagctgaggccccacaagaattcgagcctggtgtggtcccgccagcagtgctgggggacccggcaccccctctgcagctgctggtccgggtgctaagccctccactgcccggggccagcggcaccggccagccactctgagtgaggggccgcagagcccaggcccacccggaactcgagcgccgaatgcagcccaggttcccgccggcacctcttcctccacacctcccagcaagcagagggagccggctctagcctcagccagcccagagagaggctcccacagtgcagcggcgggctgaagggctcctcaagcgtggccagagcggacgccgaggccgaggaggtgctgagagtgagcaagggctgccagcacgtt

SEQ ID NO: 846715 - DNA, 407 bp, Homo sapiens
tcaggagcccagctggcttcccctagtggatcccgcaccagggctgtgggtggagctgcctgccactcccacrcctcccgcctgcactcctcagctcttgggcagtccatgggaccgggcgacgtggagcagggggtggcgcccatcagggaggctcaggctgcgtgggagcccactgcgggggtgctcgggcatggcaggctgcaggtcctgaaccctgccccatagggtggcagctgaggccccacaagaattcgagcctggtgtggtcccgccagcagtgctgggggacccggcaccccctctgcagctgctggtccgggtgctaagccctccactgcccggggccagcggcaccggccagccactctgagtgaggggccgcagagcccaggcccacccggaac

SEQ ID NO: 846716 - DNA, 543 bp, Homo sapiens
ggtcaatgacccaaaatctcccagaaatactgggcctctgcttctgaaatgaaatttatttctataccagctgttcartaagttaaaaatttgtactatgagtttactacgaatgagagttacctatctacatttcattttatgttcaagcagtatcgaaatgggactagaagtagcccctaaaatgcatttggtaatggaaaaacatactgatccttaacttgtgttgtgacatatgaagctttaattatttaccagttcttaatgcctgattcataattaataccagaatgcacttctctccctagctgctccttgattgctgccatggctatgggattagcatatcaagatcaaattcatcttttcttaggaaacccatgaatatgtatccagctcattgaaggagaagtttagaatgcaatttgccaaagcattaagaaactaataggaaacaaaattgataatggtcaccttcttaatttgaattagtttcattaaatttaaattaaaaattaatacagttggaaagtttaaatgggt

SEQ ID NO: 846717 - DNA, 637 bp, Homo sapiens
tcaagatcccaagagctaagaagccctccaagttagaaacttcctttgaacagtcagttacttggatatggtggctgtcagaatcactaggccaatgaatgcactaaaaacaacaatttgcattcttaaagcccaaataacgccacccggggtcaaactgagatttttatgctgccattaaagcaaagtatcagcaattcctcagggaaagggaaaaccaagagttcaaaggacacattagcaagtttcccaattaaatgccaagcagtaatacaacttcgttttagcaccctcttacttagtcacttaatttttcttgaaaaagaaaagcaaccctcgagggtgtcaaacctaatgcctgtctaagtagacaaactaatgctttttcggggaggctaccgagccatatatctgattatatctatttctgaacaggaaaattgatcaattaagggaaaaagaggtttgcagagccaagcactggaaaaaaaaaaaaaaaaagctgcaggcaatgctcctgctgggagctaatgaaagttccatataagaagttagattccaaattggaggccatgagwgtagtgttcatgtcagtcaagccagagtgaaggaacatgttgagaaaagatggaacaag

SEQ ID NO: 846718 - DNA, 537 bp, Homo sapiens
tactctctagaagaattagatcatcattcatttgtataacaaagtcctcaccaaacactgataaaatgccaagcctagggaaaaaacagtgagttgggtagatatacatggtcctrcccttgaggatcttgcaggcttgtggaagagagagttcattaaaacattacaaaaatgtgtggtaactactctgataaaaaccagggtaccacaggaacatgtgataggagacctaacttggtccaaggaaatgaagccttgtggagcaaacagtacttaaatgggaaatggaaaataaggaggagatagtcaagggaaaacattatgggaaatgtctaggctggagacgtacatttaggatttaggattcttgtccatatataagtaacttaagtcatgggagccaagggagtggttaagaaggtgcagagaaaagcgtgtctgacattgataaggtgcttaaccctctctctcttctctgaactcccaggaaactctctggatggcgaaaacttctcaaagtccctaacatttatctga

SEQ ID NO: 846719 - DNA, 588 bp, Homo sapiens
tttctcagttgcaccagccacatttcaactacttagctgctacatgtggctaggctaccttacaggacagcacagacacaggtcttgtagtccaagctgacatcaggctctgaagcctgccagcaacgaggctcctgctcctccccagaggcggctcagccagtggtgaactcaggtggttagaaaatttctcctttatgttgagctgaaaaacgctaccctgtcctttccatcttcagatcccagctatgtttcccacagtctgtccccctacctaaggggtgatgagagaaatcccacagcccagccaaccccagggctccggcagcccagacactcccagctggctctcctgaagtctccttcctacaaatctgtctgcccaaagggcaccacatccatttaagaggagtcaggctctttgagaaactcgttctcactgctgtccccttgatcaggacagaggggagggtggaccagaggagcagttaataacagtttttccctgaggcaaagtggctctgctcacactgggcttataccatraaaagaagctgtaccccactgaccctgaatacagggaaaggg

SEQ ID NO: 846720 - DNA, 608 bp, Homo sapiens
gtaacattttgtggagagatctgagaatagatattaataaacaatgttttagagtattgtatagaaactcttaaatagcttttttcttataaatattatttttaaattattcaaatattaatgtttatttgaacattagattacagatttttccgtgttttatagtgaaaagatgtgcctaaattaataagaaaatactctctgaaatgttaaaatataaaatcttttgctagtgaccaaatgatattttcgtcttggctatcttgggtggatgtggtgtgcagctggcttaacacagtatcacgtgcaaaataggttattgcataggggttgattgaattaggatgctttaaaaatgttggatgtattgtctttagagctaatgaagcataaatatcatagtccaattctaggcacatagaatgagctcagttgttacctcttaagtgaattaattaatgaataattgagtaaattgtttaataaatgagtattggaggctgcttagtggcttcattctagacttcggactcggraatcacactatacatgactatccttcagttcccgagtccgtaaaatgggaattttctctattgagttaattt

SEQ ID NO: 846721 - DNA, 606 bp, Homo sapiens
gcaaaatatatttctttgacatactttagaatggccctgcaaagctgcctcttatgggggaaatttactttctatagagaatctccttcccttacaaggtcttttcaggagagtctagccccttttaaggtctgatatgaagacacttgtcatctactgtctctgaagcctgctacctggagtcttcatctgcataaccttagcttccacaattcccctgaattcctcaaatttctttctgctgacttcaactatttaagaaaaacctaatgatttcaaccagttgcctgtcagaaaatctttgaatccacatatgacctagaaatccctcacccactttgagatgtcctgtttttccagaccaaaccaatgtacaccttacatgtattgattgacatctgtttgtaattccctacactttttctttagagatgttaatgtagttaatccttcagaataaaatccttctggccctggaggcattccatctctttaaattgaattttcttccytacatgttgattttacagtttaatctccaagggcaattttatttcccctttttatgggtgtttgggggattcctcaggtctaattcttatgcca

SEQ ID NO: 846722 - DNA, 589 bp, Homo sapiens
gcaagagatggaagattgctttttctgatggggcaaatgatatttatagctatytgatgagagatattttatatctgtgaactttgtagaggattttaaagaacgttttgttaatagttaacgactctcagaaaatccaccagttttaaacgtgatgaagctggctgtaacatatgataagatctttatgtgcaggtggaaatatttcatcatggtcatttgctattttaactcacagggaacaaagcccactgggtgtactcattgaagcaaccaaatagaatcaatcaaaagacacacatagcatctgcaaacatcagagaatacaaacaaaggaagttcaagaaaatggatctcaagggctctgtttgcataggtctggcctctccaagatcgagccattctcagagcttttactggaacggctttgtgtaatgcactgcctaatggccggctgttcaaatgtgatacattcagttatgacacttaggctatgcgacctatgtgcagactgcaagacagagctgaagcaacagtcacactcccaacccaaacacacttaaaaattaatgctgtgaaggggagaact

SEQ ID NO: 846723 - DNA, 654 bp, Homo sapiens
ttatgtcttgacatacacactaaggaatattgtcatttatttaaaacttttgtaaaagaacattggctgggtagatgagatggargtttttaatattctcaatatggctgaagctacaaagtatccttaatataaactctgatgtactctagaaagcaaaatctcagaaatcagtaattttttaaaaatgtgcatttatagctgaaattaattcataaatcagtatctattttgatcatcaaaaatttatatttttgcacattttctctcaaatttatgttttctagtagatggatactattggcaagaacatattaaaaattcaataaaagcttaattcatcttacttagaattttaaacatcagtctaccctaactgtagtctttctctacaattaatatttacttttgatgactactagatgtaaatcatgaaaatttaagaaagtatcgcttttatgagtgacagaaaatacatatctgaatttaactgctattgtttcaaagtacatgtcatccctaattaagaatattcaatagtattacctactttagagttaagttatagttaaccccaaaagagcatatttagtttttcagtagctaattaacaacacatctcttatttatttttaaatgttttattttctgaaa

SEQ ID NO: 846724 - DNA, 654 bp, Homo sapiens
ttatgtcttgacatacacactaaggaatattgtcatttatttaaaacttttgtaaaagaacattggctgggtagatgagatggaggtttttaatattctcaatatggctgaagctacaaagyatccttaatataaactctgatgtactctagaaagcaaaatctcagaaatcagtaattttttaaaaatgtgcatttatagctgaaattaattcataaatcagtatctattttgatcatcaaaaatttatatttttgcacattttctctcaaatttatgttttctagtagatggatactattggcaagaacatattaaaaattcaataaaagcttaattcatcttacttagaattttaaacatcagtctaccctaactgtagtctttctctacaattaatatttacttttgatgactactagatgtaaatcatgaaaatttaagaaagtatcgcttttatgagtgacagaaaatacatatctgaatttaactgctattgtttcaaagtacatgtcatccctaattaagaatattcaatagtattacctactttagagttaagttatagttaaccccaaaagagcatatttagtttttcagtagctaattaacaacacatctcttatttatttttaaatgttttattttctgaaa

SEQ ID NO: 846725 - DNA, 595 bp, Homo sapiens
ataccatagactatgtggcttctatacaatagaaatgtgtttctcacagttctaagaatacgaagtcaaggggctgscagaagtcaaagtgttgccagggtgctgacagattcgtagtctgatgagtgtccacttccaggctcaaaatggctgtctttttcctgtttccttagatggtagaagggagaggcaagagattactctggaatctcttttataaagggagtaatcccattgacagtgggttctaccttcacaacccagtcatctttcaaaagcccccactccctaataacatcacattaggggtcaggatttcaacatgtgagttttagggagatgtactaatgtaatatatgtcagttagactgcaggtgctttgagttaagcaaataaacccaaatcaagatggctgacaactggtgcccaaggaaaagcactccaacacatagtaaaaagacaaataccttctagaagatttcaaggaacagtaaaccaagaagataagttgttatttgtgttaggccattctctcattgctataaagaaatacttgagactgggtttggctcaatgattcctcaagctatacagg

SEQ ID NO: 846726 - DNA, 619 bp, Homo sapiens
taatacaccaaacaaatgagaaacaaaccataagctgctatatactcatctgcatttctttctttcttaacaattagtgaaaccaggtgaaagaatagwttgaaattaagtacctgttgctgctttttcttgcgaattagcccattcgatattagacttcgggatattttggtggggctaagatgaaaagatccacctcgtgatggaattgaccttcagcaggggacagtgaggtgtctgcggttgttcctcttgtgaacaacgccttaaaggcgagaaacagcctactgtacagtgtgccagggaaagcatcacatcggtgggcgtcggtggcaacaccacttacacttcaccctgattttgtttcctccttgcacgtgctcctttgacagggcaggctcccaagcaggtgtgcagtcagggccacaagacacaggcaccccatcccatctcagagtctgacgtcccctcctcccctttgtctctaagcctcatgtaactgagcttatagccgaccatacagaactggcaaacttggtgagatacctttattttttatttcttaaacaagattttaaaatttcataagctctcacgtatcctaacgagaaggcagggc

SEQ ID NO: 846727 - DNA, 419 bp, Homo sapiens
ctcagagaaaccaaagtactgtaaatgtgtggaataaaaaggagataacaatcattaatgaatattgaattaatttatttgagtggtttgttgccaaaagcttgaggatgtcataagagttaggstaaacttaagaaaaagtattcattgaatttatggatgaaacaaaaggacgactgggacttgcttcttaatagtcttggagcaggtgggtgaatcagtggggatatggataaaacaggattggctttgagtggataagttttgaacttgggtgatggatatatagaggtttattaaaccattctttctgtttctatatatgtttgcaattttccagaacagaaaggttgtttgtttagtatgcggggtgacttcaccctctgctgttgtcaggttttttcaatacctgccagttc

SEQ ID NO: 846728 - DNA, 642 bp, Homo sapiens
tttctaaaaatttacttgtatgaatatatacagatagcaaagtggcacacaaaaaagatgctcaatatcattagtcattaaggaaatgcaaaataaaaccatgtgagataccaccactctcctattagaactgtcataaaaatgacaataccaagtattggctagaatggaagcaatgaaaacagatactcatacatcgatggtggtaatgaaaatggcacagtcactttggaaaatagtttggcagtttctacctaccatatgacccagcagtcctgtggtgctttcctgaaaggaaaatacatgttcatacaaaaatgtatacaaatttttattgtggttttatttgtaatcaccccaaactgggaacattccagtgtctttcacttggtgaatggataaacaaactggtctatccatataatggaatgcaacttagcaacaaagaggaaaatctatagatataatcaatatttgtatgttaagttaaagaagccagactataaaagctacattatatgtgattccatttaaatggcattttraaaaggcaaaaatacaggaatagaaaacagatctgtgattgccaacggctcaggtgtgagagggattgattacctagaggccctacagacctttctg

SEQ ID NO: 846729 - DNA, 618 bp, Homo sapiens
taacattctttttttttttttttctgacggagctttgcttttgttgcctagtggagtgcaatggcatgatcttggctcactgtaacctccrcctcccaggttcaagtgattctcctgcctcagcctcccacgtagctgggattataggcacccgccaccatgcctggctaattttttgtattttcagtagggacagggtatcaccatgttggccaggctggtcttgaactcctgacctcaggtgatcaggtgatctgcctcagcctcccaaagtgctgggattacaggcatgagccaccacacctggccatatatccattgttttaagctgctttgtatcccacaaaataaatgcatcatgatttgtatgaacatgtccctatcatctggcatttagattgttctcagtatttcactatctcatgccacactgtgattaacatacttatgcatacattttgaacattcctctatttattttcaagggatagattctaagagtggaattactgaatcttattagggtagaaagataattttaatttatgttgccaatttctttccccaaaatgctacaccaatatactctcccaccagaaacatcttaagaggtaataa

SEQ ID NO: 846730 - DNA, 565 bp, Homo sapiens
ttgctaggtgatttttttcattgtgtgaacatcacattgtactgacacaaacctagatgggatagcctactacacacctaagctatatgatatagcctgttgcttctaggctacaaacctgtatagcatgttagtgtactgaatgctgcaggcaattgtaataaaatggtatttgtgtatctaaacatatctaaacagagaaaaggtacggtaaagatataaaagatatctacagtaaaaatataaaatataatataaatatatatcataattatatattacaaataatatatattatgtattatataaattattacattgaaattataaattattttatatttatattaaatattaaacaatataatttaaataattattaaataattgcataaatatatattatttaattataaattatatatataatattatatataaattatatattatacttatgtatatctatattatatatatatttttttgagacggtgtctygctctgttacccaggctggagtgcagtggccccgtctcaggtcactgcaagcaacctctgcctc

SEQ ID NO: 846731 - DNA, 629 bp, Homo sapiens
ttttttttgagattgagatgggagtcttgctctgtcacccaggctagtagagtgcagtggtgtgatctcagtcactgcaacctccatctcctgggttcaagcaattctcctgcctcagcctcccragtagctgggattacaggtgcgtgccaccacacccggctaatttttgtatttttagtagagatggggtttcatacactggtcaggctggtctcgaactcctgacctccggtgatctacccacctaaacctcccgaagtgctgggattacaggcgtgagccacagcaccctgcctcatgactttttaaactacttgatataactgtctttggaaaatttccatttatttacaacttaggtaaaatatatagtcagacatacttggtcaggaatccctcagggtcatttattttaaagacattaaaattttgtgatttttactagtagttaaatacccaagttataaacaagagtaaagtgtcaaacagttaaactcctttgatgtaattaaataatatgcctgacaatagttcattttaaatgctcgcctattagtatttctctttaaacactggggaaataattgtctagaaaatatcaatgatgccatatcacaaggttatat

SEQ ID NO: 846732 - DNA, 629 bp, Homo sapiens
ttttttttgagattgagatgggagtcttgctctgtcacccaggctagtagagtgcagtggtgtgatctcagtcactgcaacctccatctcctgggttcaagcaattctcctgcctcagcctcccgagtagctgggattacaggtgcgtgccaccacacccggctaatttttgtatttttagtagagatggggtttcatacactggtcaggctggtctcgaactcctgacctccggtgatctacccacctaaacctcccgaagtgctgggattacaggcgtgagccacagcaccctgcctcatgactttttaaactacttgatataactgtctttggaaaatttccatttatttacaacttaggtaaaatatatagtcagacatacttggtcaggaatccctcagggtcatttattttaaagacattaaaattttgtgatttttactagtagttaaatacccaagttataaacaagagtaaagtgtcaaacagttaaactcctttgatrtaattaaataatatgcctgacaatagttcattttaaatgctcgcctattagtatttctctttaaacactggggaaataattgtctagaaaatatcaatgatgccatatcacaaggttatat

SEQ ID NO: 846733 - DNA, 651 bp, Homo sapiens
aaggtgccatttttccccatccaggctcacagcaccctggactctctacccctggcttagatgttctggaagggcccttccggcctgaatgttccacggtcctaggtgtctgggggccgtgtctgagccaacggcagacccaggcaaaggatggtttggcagccccagtcccagcttcgtggtcatagctggagtccccactcccgtactttgcagctgtgtgaccctgtgcaagtagaatagccagttgaagcctcagtttcctcatctgtaaatgggcataattatagtatctacttcaacgggctattgtggggattacagggaaaaaaatgtaaactttttagccaagtaccagctcacagccaccatgggctaaatgtgagttattacaggaaacattaaaaaacaagagttgggctggattatctttttcttctttgggtctgtgatgtgcaacttgtccaggaaaagaaagcactttggatgagcgagtgtttagcctgcaaagaaatactgagcacagagtggactgccagggggcaggcagaaagtctgtaaacatgtgcatatgtctgtctgagcccactttggtataagctgtcttacactcaaaygccaatgagcagagggattttttttttttttttt

SEQ ID NO: 846734 - DNA, 602 bp, Homo sapiens
gccctacagggcccaactgaacccagactgcagggtgcagcygccccaccccaccggttcttcccctcccctcctgtggtgtcaacagcagagcagaggggcagggccaacacagaggagccaggcagggatgacaccggtgccctgtccttccttcctcagacaacattcccaatgccgtctgggtctgggacattcagaagctgaggctgttcgcggtgctcgagcagctgtccccagtgcgcgcgtttcagtgggacccgcagcagccgcggctggccatctgcacgggaggcagcaggctctacctgtggtccccagcgggctgcatgtcggtgcaggtgcctggggaaggtaagcacatccccgaggccacggacgtggcagccttgctgtgtgcagtctggcatcacacgggctgaactgttgaagcccagctgctgtctccggcagcactccagggaaactgccctcagagtctttgcgtaaacctcaagacggacacacaggggacccgctgccctcagctttatgggctagaagcagcctctccctgacttgaggcagctctggggctccaccctggctctgcctatgtgggt

SEQ ID NO: 846735 - DNA, 540 bp, Homo sapiens
aggtagtacgtgtcctcgtctccatgccgccgcttcttcacaccggcaccaagggcggggacggcaggggggctctgcttgaaggctggaaggccaggcagggcaggcggggtgagcaggcaggaccagagggtgaggcctccttccgggaggagggagacctgccccacccttggggccaatcgattctccaggtgggtccggtggtgagcaacccacagggacgggcaaacctgcggtgccacccaggcctctgaggtgcccttggcccaggacaagcgacttatatgggggctgctctcaggctccgtcagggaggagtctgggcgtggggggccgttcagggactggccctgtccctgggacgcgggctcacattgtgtcctgccaatgtgtccccttctcctcccacacgcgtccagttccccyggccggccgctcaccacgcttgctggcggccccgttcttggcggagctctcgttcagggcctgctgctcccggtagtggtcctcatcagcttttcggtcgcggccaggaca

SEQ ID NO: 846736 - DNA, 600 bp, Homo sapiens
tttatggatggggacaagaaaggccaggagagcaagaaggggctgctggagagtgagggcgggaacgggggctgggagccaggcctgtggaagccatgtccctgactgcggcattttgaagaggtgggtttgcagcattgaatctgtttttaagaccagagctaggcttctctggcatttgcacagagcaagtggttaatgtgtgatgggctggttgcccactatgcattcaagcttccatagagagctctctgggttggtgtgaaggcctctcatggcctcagcagccctggtgactctgacaccctctcctgctggggccaccaagtctgagcagccgagctgtgtggcttggtcttggccactctgggggcccctctgggctcacagccccagtatccccagcttgggactcgaggagctaataggtctgtctggagctggcgtgggccctgctgcaggaggactggatgacacccttcctgakccagcccctgcagaggcctccagcttctttgcctcacagggcccggctgcccatctgaggacccaggccggctctcatgagttctaaaagtgaccccgctgaggccgctgcag

SEQ ID NO: 846737 - DNA, 621 bp, Homo sapiens
ccaaaaatctcattatcaatgtttgtcccaccccctggatccacagggcttcggaggaggagccctgggtgcaggcgacagcattttcctccccagttcgcgcccccccaccctycccccgccccagcatccacagagcccagcagggagggagcgaggaggtgtcactgctcctctgctgggcaccaggcacagctttcccctcccgctggtgcagctgaccagcccgggatgcctggtctgagcagaccagcccatcccacagggcaaggccaccccgtcctgcaggacaaggcagttgagacaaaaccatgaagtcccttgaacctgatgccacacacctggcagggggtgggggtggcagataccctagatgggggaagccagccagagagggggttgctcctgtccttccatgaggatcagctcagaccacatgcagtgcattccaagcatggtgaagaccccatcagcatcctcagaccatgggaggaagggaggcagagctcccacaagctgcctgccaggactccagggagacactctccagaaaccaccagcatcataaaccccagggcaggaggtcagtgtccttagaggggagagagtggacttaggcaa

SEQ ID NO: 846738 - DNA, 611 bp, Homo sapiens
caccctccactccaatgtcagcttccttagggcagccactgttgtcttgttcatggctatatctgcagagccctgtgcagtgtatggtacatagaaggtgctcagtaagtatttgttgagagctgtaactctaaccccactgcctcttcctaacagcccactgagggtctcctctctctcacctacctatccactcttgtcctagggacaggctgggaggccgtagggacaagatgtcacctaccctgatgatttgtgatatgtgtcctggacattggtgtatccattccggtccttgggagtggctgattaaaggcatcatcttcctgcttcctccttttcctcctctttctaggctgccaggatcttattagccctgtttacacagccgggatgtcgagcgattaatttttaatggcttggtttattgcatgtttgaatggtttattgagtaattctcacatttaagtgattaattctccagagttcagaacgactggttagttttacattaatgggggtttctgaatgccaagagacaatcaatcaakccttcctgccagggagagtaatgttaagatacctcaaggtacaatgaggttaagaagagg

SEQ ID NO: 846739 - DNA, 617 bp, Homo sapiens
tgtagccagacaaagcccaggtgggcctcaggaggacrtccacacagggagcaagggagggttttgggatggggttttgcctttagattcttctgcagagccctgcgacctgctgcgctttgagcaggagagaagtgggagctgcttttgcatctgcatgaatctgctgttattactgtagcaaattaccaaatgcagtggcccaacacagcacagattcattatcctgcagttctggaggtcagaagcacgggatgcgtcccactgggctacagtcaaggtgttgtcagggctgcctccttttgggggttctagggaaatatccatgtctttgccgtttccagcttgtggaggccacctgcattgcttggctcatggcctcttcttccatcttcagatctggcagcgttgctgcatctgcacatctttctctgactctggccatactcttccacatttaaaggacctttgtgattactgtgggctcacatggataatccaggataatctttgccttctcaaagtcagatgaccagtaatcttaattccatccgcagtcttcattccccttggtcttgtaatctgacatagtcacagtttccatggattagggcatc

SEQ ID NO: 846740 - DNA, 624 bp, Homo sapiens
cacatatatttaggttttactttgcatagtagttaagaatctcactgaagcctgtgctcaaaagatatttaatgacgttccatgctcaatgctaggagtttcaaaagcaatactgtaatgtaggtagatattaaatgtgtttacctaaagtacatacctaaaatagctacattaaggtaatttttaaaaataactgagagaatggcatgtgcataggctctgttctttctgcgtgggacaaaccatctaccaggagatgtgccaggggccaaataggcttccaggtcagctacgtttccccatgcgaccctaaagggcatttctagattccaggggttctgttcagaagtattctctgggggatgcattttatctgatctctttgcccttcaccctgctcatggccctgtgttcatgaccaaagcctcccctctatagccctcagtgtctgggatgtcccccacctgccttggcatgcaggcattacagccctcaggagatgtcacatgtctccttgagaaagygacactgatccttagccctctgcaggcacccacaacctcctggcagctggcgggtgatgctaggtgtgctctgggatccagacatgtgaaagtggccacc

SEQ ID NO: 846741 - DNA, 498 bp, Homo sapiens
atgagacccactgggctgcattcccagatggttaaggcattctaagtcacaggatgagatcaacacaagatacaggtcgtaaagaccttgctgataaaacaattgcagtaaagaaagtggctaaatctcaccaaaaccaagatggccacaagagtgacctctggtcatcctcactgctacactcccaccagcgccatgacaggttacagatgcgatgacaacatcaggaagttaccctatatggtctaaaaaggggagacatgaataatctaccccttgtttagcagatcatcaaaaaataaccataaaaatgggcaaccagcagccctcaaggctgctttatctatggagtagccattcttttattcctttactttcctaataaacttgctttcattttactgtatggactccccctgaattctttmttgcatgagatccaagaaccctcccttggggtctgggttgggacccctttcctataacaatgggaagaat

SEQ ID NO: 846742 - DNA, 606 bp, Homo sapiens
tctccagctgccccgtaggggaacatggtttggcggattgcgtcacctttagttggrgcataatgattgaattcttgcggtacaaatagacactgatggaagtttacctaagtttttaattctttcgccgactttgtgttcgtcttggctcagttttctcttttatcagtatcttaagtagaaaagaagcaaaaagaagcttccatagtggcagtgtaagattacttatatgtaagcaataatttgattcttccctagaagtcaaccaaagtgctataacatcccttctcatctttagcttagtgatagagccctatggtgttaccaagaatagtacagtttgtaaaaatgtgcattaattccttctctttgttttaagtgaaggttttcttttatcgttcttatttcaaaacatttaaatttgattcgtgtttcttcccttgccttctaattattttcttatagtttcttgttttcttcatttttccactttatggaatggaaactccactccactccactttttggagtcccgtgattttaacttcaaaaattaaaatattgttgaataaaccagagtatcttgaagagggcaatgaaattcaa

SEQ ID NO: 846743 - DNA, 594 bp, Homo sapiens
gaaacctaaccttcaaggtgatggtattaagaggtggggctctgaagccagaatgaccttttaggaacaacaacaacaaaagagttggaagtgattaggtcataagagaggtgattaagtcataagagaagtgattaggtcataaggggctccaccatcataagtgagattagttcccttataaaagagacctgtaggagttttcttgtcccttccactgtgtgaggtcacagcaaaaagacaccatctatgaggaacaggccctcaccagacaccaaatctgctggcaccttgatcttgtacttcacatcctccaggactgtgagcaataaatttctgttgtttatcagttacccaatctaagttattttattctagtggcccgaatggactaacacaatatcgaagggagtaggtaagtagttgactctccgggtctgaaattcaggagagaggtctgaagtggatgtataaatttgcaagttgtgagygtatagatggaacttcaaccatggactctaagagatccccaaggtagtgagtatacatttaaaaaaagtaaagagagagagggatctgaggacttagtatttg

SEQ ID NO: 846744 - DNA, 563 bp, Homo sapiens
tagaattttaacatttttaaagagaaagcgaactttgggagctgagttgagaggatcgcgtgagcccaggagtctgagrccagcctgggcaacatggcaagacattgcctctacaaaaaatagccgggcatggtggtgtgcacctggagtcccagctactcgggaggctgaggtgggaggatcagttgaacccaggagctcgaggctgcagtgagccgttattgcaccactgcactccagcctgggcaacacagtgagaccccgcctcaaaaataaataaataaataaataaacagaaagaaaaagagagaaaatgtatgggaaaaaattctcaggaaaaaatgggagaaagaatggagatggctgaagatgacaggagagttctaatgcagcagttctcaaacttttgggtcttaggaaccctttatgccccaaaaaattattaaggccaccaaaaagcttttgtttacgtgagttatatataacaatactgactgaattagaagccaaagctgagacatttttaatatatttactaatgcattctaaaataataacaaatt

SEQ ID NO: 846745 - DNA, 324 bp, Homo sapiens
aaacagtgagcttcctgagggcaggagctgtgttttgttacttttttggtcactagctcctggcatcggactgcacacagaaatggggctcaatggctgacggattgaattaatgatagtsagaatcccagcaatatagaaataaatgaaggagctggaatgttgggagtccccaaacataaaaagtctttatctccaaaagttacttaccagggttttggactcagaattcatttattaccaaaaaaatcctgtaaacactgatcaccttcctgcaataaattttggcctgtgcacaaaatttaaaggggcaccaaaaacctc

SEQ ID NO: 846746 - DNA, 566 bp, Homo sapiens
cagcctggaaaacagagcaagactccatctcaaaaacaaacaaaaaamcccatacatttcattaagatattatttaccttgattactgaggtttttggcacccctttaaattttgtgcacaggccaatgccctcctctctttccagcctgtcctggctacacctgcaacattactctgaccctccacaccctccagatcctaaaccatatattttgccccaaggtatctgctatggctgaattgtgcatcccaaaagatatgttgaagttctaacagcctgtacctaggaatgtgatcttctttggaaatagggcatttgcaagtataatcaaactaagataaagtcaatagggtgggtcctcgtgcaatatgactggaatccttatcagaagagggaaacaccatgtgaagacagagacaccgggagaagatggccatgacaatggaggcagaggctggagggatgcgtctgcaagccgaagaaggctgaggattcctggcagcactgggagccagaagaggcaagggcagattctcccccgaaggtttcagagggagcatggcc

SEQ ID NO: 846747 - DNA, 588 bp, Homo sapiens
ttccaacttacagttatcttaatcattggactgtgcccagagtctattcatagtgctgttgcttccagcatatatttcactatggatcgaactccaattatgctttctataattttctttaagtgctaacaagcaatgatactcaaatatgtatattgagattctcattttcaactgctttctgaacatatgtgccaagatatcttctgaaattgaagatgctttaaaaacatttatgacattccccttccaattattatttttgttattattgaggcagagtctcactctgtcatccaggctaaagtgcagcggtgcgatctcggctcactgcaacttccacctcctgggctcaagcgattctcctgcctcagtctcctgggtagctgggattacagtcatgcgccaccaaacctgactaatttttgtatttttagtagagacggggttttgccatgttgaccaggctggtcttaaactcctgacctgaagtgatccgcctgcctctcttgcaatattttattcccgtcttactttcctattttttmgtgatcattaaaaatccagaagcatatattaggtacagtg

SEQ ID NO: 846748 - DNA, 621 bp, Homo sapiens
ttttgagggcatcaatgaaagctttcagtgaagttggttgaactgcgccttgcaggaagaggaagaagaattctctaagtaaacagaaagttgcattgctatggtctgcrtgcttgtgtctccccaaaatatacaaaatatatatgttaaaatcctgcctccaaaggtgattgtattagaaagtgggacttttgggaggtatttaggtcataaaggcagattcctaatgaatgggattagcacatttataaaaaggtccctgagaaaccctttgtcccttccactatgtgagtacacagcaaaaaggtgtcatctgtgaagaagtgggctctcaccagacaccaaatttgccagcaccttgatcttgagcttcccagcctccagaactcttaaatataaatttgtgttgtttataaactatccaggttatggtattttgttatagcagctcagatgaactaagacatgcattcaaaaacaaagaaaactgcataaaccaatgcatgaactagaagcagtggcatgtgccttggggatctgcaagaagttctatatggctattgcacagcatagagactgtatgtagaaggaaggtacacagacaggaagagggtcccagag

SEQ ID NO: 846749 - DNA, 591 bp, Homo sapiens
gaaaaaaaaaaaactactttgaatttcatatggaacaacaacaaaaaaaagagctcgtacagccaagacaatcctaagcaaaaagaacaaagctggaggcatcacactacctgacttccaaccaaaagagcatggtactggtaccaaaacagatatatagaccaatggaatagaacagaggtctcagaaataacaccacacatctacaaccatctgatctttgacaaacctgacaaaaacaaacaatggggaaacaattccctatttaataaatggtgttgggaaaactggctagccgtattcagaaaactgaaactggaccccttccttacaccttatacgaaaattaattcaagatggattaaagatttaaacataagacctaaaaccataaaaaccctagaagaaaacctgggcaataccattcaggacataggcatgggcaaggacttcatgactaaaacaccaaaagcarttgcaacaaaagcaaaaattgacaaatacaatctaattaaagagcttctggacagcaaaagaaactatcatcagagtgaacaggcaagctacagaatgggagaaaatttttgcaat

SEQ ID NO: 846750 - DNA, 527 bp, Homo sapiens
taatatctatatatctgtatagatacataatatctatatatctgtatagatacataatatctatatatctgtatagatacataatatctatatatctgtatagatacataatatctatatatctgtatagatacataatatctatatatctgtatagatacataatatctatatatctgtatagatacataatatctatatatctgtatagatacataatatctatatatctgtatagatacataatatataatttataaattatatattatatttaattaaattataatttaattataatttaattaaatataatatataatttataaattatatattataaattatcacctgataatttataaagccatcagatctcatgagactttttcactattacaacaacagcatgggaaagacctgcccccacgattcaattacctcccactgggtccctcccataacacrtcagaattgtgggagttacaattcaaggtgacatttgggtggggatacagccaaaccat

SEQ ID NO: 846751 - DNA, 556 bp, Homo sapiens
tagatacataatatctatatatctgtatagatacataatatctatatatctgtatagatacataatatctatatatctgtatagatacataatatctatatatctgtatagatacataatatctatatatctgtatagatacataatatctatatatctgtatagatacataatatctatatatctgtatagatacataatatctatatatctgtatagatacataatatataatttataaattatatattatatttaattaaattataatttaattataatttaattaaatataatatataatttataaattatatattataaattatcacctgataatttataaagccatcagatctcatgagactttttcactattacaacaacagcatgggaaagacctgcccccacgattcaattacctcccactgggtccctcccataacacgtcagaattgtgggagttacaattcaaggtgacatttgggtggggatacarccaaaccatatcacatgttaattagcttgattcttataattatttcactatacatat

SEQ ID NO: 846752 - DNA, 615 bp, Homo sapiens; identical to SEQ ID NO: 815749

SEQ ID NO: 846753 - DNA, 525 bp, Homo sapiens; identical to SEQ ID NO: 815750

SEQ ID NO: 846754 - DNA, 360 bp, Homo sapiens
cagaaagagaccaggaagaagctgatcaacctattaatggtggtctctatctttcttagttctgaacttgtatgtataaattttagtaagttgttaygttacgattaaaaagtaatggtcatgtttactccttgctttgtgacaggcctgtgctgaaagcttcatgtcatctcatgtcatctttttggcagtcccatcacaaagttgacaaatgctaagtgacctcattctactaaaacacacacgtcttgtctgtctgcagaaggatactctcatgcaactttgaagttgacattttgaaactaaatgaaatttgcattttccgttcagttttccaaaatctgtcttcttagttctcct

SEQ ID NO: 846755 - DNA, 610 bp, Homo sapiens
ctgggtgaaacttgtcacacctgaacacagagatagcaatcctcattgctgggtcatctctcagtggcaggataatatacttgaaaggatgatcagttgtttcctggttttttccttggcccctactaggtaccctgattcaaacaaggctgttcattggttagtttctcagagaaggatattgtgtagaaagctcagggaaaaaaaagtgtgtggtatgttggcatcatggcactactggaactggaaggactgtggcactgggatctagtggtgggtgccccgctttctggatggcagggaaaggttctctgatgcttaaatgagtccttttttctgtacatttgggatatttcataattaaaaattaaaaagtaattatctataagcaggagaaaattttatcttataatatcaataaataactcttagaatactctcaagattaattttgagaggaaacttataatcattaacttttatattgagcaacaattctataaaaacacaacagcytaaatcaattcaaaccttaaagtaaaaatgtttgcaacatatatgacctattttgtaaaggggcagaatccacaacaaagaaccctagtaaatc

SEQ ID NO: 846756 - DNA, 505 bp, Homo sapiens
ttttaattgctgcttgaagagagttcattttcagccaaaacacaatagtactttgctcctttggctagaagtacaagtgattccaagaaacttaagtattctcagagctacctgctatgggtatttaggcctaagtcctgataaaaggtaatcacaagcttttaagaaaggtattttttaatttcttcttttcaaattggaaagaaagtgggcaaatggtttgtagtgttctaataaaatagattagataaaaggggcaagaaatcacaggctgaagtttttttattcaatacatatttattgaatatcaatgcataacaagaatggttccaggaggcataagaaacacaaagatgaataaaatatagttcttcccattaagaggctcatcattaggcagaacatacagattasatagatggatggatggatggactaacgacaggtgggtggatggatggatggatggatgggtgaaaggacaaatagatacagcataaagaga

SEQ ID NO: 846757 - DNA, 568 bp, Homo sapiens
tataaatattttctctctaggttttttctgcctatgcaactacaaaaactttcaagagattcatgaccaattatgaaattggcagtttctacttacagctttaatgaagtatgagcaccacaaaacaatctgatacacaaaatgccaaggataaaagtacagctttgtttggccttaacagatatctaacttgtttcctgttaagatatattcaagtataaaatctcataccaatttcataactgttcaacaaaatatatttatgttcagtatttcattgggctagataatggggcaaatattttttgaaacttatcaagtctatgaaaatactatttggcttaaaaaatggcacaggtttgggaggctgaggtggcaggatcacaagatcaggaatttgagaccagcctggccaatatagtgaaaccccgtctctactaaaaatacaaaacttagctgggtatggtggcgggtgcctgtagtcccagctacacgggaggctgaggcrggagaatcgcttgaacaatttctataggtatcagcgatgcacacatcatgaataataaaa

SEQ ID NO: 846758 - DNA, 619 bp, Homo sapiens
atagttaaaaaagatcaattgctatattaattatctgttagaacaactaacatttattatctcacacaawttctgaaagtcgggaaactgggagtggctttactgtgtgattttgactcatgtttcctcatgagagattcttaaattgtcaaccaaggctgcagctagtttaaggcttcactgggattggagagtctacttccaagttcactcgtgtggttgttggcaggcctcagttctttgctggctgatggccaggggcttcattttttttgccatgtgagcctctccgtagggctactccatagcagctccctgcctcaaccccagtggaagagatcctagagagggagagaacctaagatggaaactgcagatttttataaattcatctcagaagtgacatgccatcacttctgccctatgtcattggcccacagactaaccctggtacagtttaggaactgtctgcacaaggatataaatacccagtgtcagagattattggggtgatcttggaggctggctgccatagttatgacttagtgtcaattagaaaacaaatcctattatcagttttcttgtttgtgctttgctgtagttaatttgactcatgata

SEQ ID NO: 846759 - DNA, 621 bp, Homo sapiens
tggggcatggcccctgcccctctctggcaccccctgcaccctgctccagcacayattcagcaatctggaagttctctaaaccctgtcctttgggggttttatggaagcttcattatgtagatataattgattatatcactggccattggtgatcaactcaacccctctccctaatcacagaggttgggggtggggctgaaagtctcaaccctctaatcacttattagttcccctggtaaccagcccccatctgaggctatccaggagagcctggacatcagtcatccatgtgaaaagacacttctcactgtgggcgaaggattacctaggtgccgaggtaagaaactgaaggcacaactgtttcagtataaaaaagaaaatagagtaagagtagtcataatacaaattagatatagagatgatcatggacattatcaatcattataaacatcatgaatcattagcttttaatattactctttgttgcattactaatataacctaggaataaccggcgggcatagggtcaggtgctgaagggacattgtgagaagtgacctagaaggcaagaggtgagccctctgtcacgccggcatgagggctccttggtcaagcggtaat

SEQ ID NO: 846760 - DNA, 620 bp, Homo sapiens
actctgagacttgctattctttaagtgcaaaagtgattcagattgaactttctatagcttttctatctcatatgagggaatagaaatgatactaaattaaaagattttgaggtacccaattaaaatgctggatatccttctgattcttggaaaaccaaattggaatagagacagaagtaataacactaatcacagattattcgtttctcacatactgtcttagaaacctgctctaggcttttccttttgggaaatcatgcatcaggaggattaggtcaactatgctaagtagaaaacttcaaacaacagtggcttaaatacaagagaagtttatttcaccttcatatttaaaaagctccaaacatcttaactgtagtcaaagcagccagaagaaaaaaaataagaaaggacaaaaggcgactttaaggagccttctcagaagtcacacaaatatgtgtgtttacagctcaatggccaggacgccaggacttagaccagtggtcagactgagaggcgaaggataagagataygtgatctcagctggaggcattgctggctcaaataaaacgaaccttcccttatgaaggaaaaaatatactggaaggcaactagagtctct

SEQ ID NO: 846761 - DNA, 620 bp, Homo sapiens
actctgagacttgctattctttaagtgcaaaagtgattcagattgaactttctatagcttttctatctcatatgagggaatagaaatgatactaaattaaaagattttgaggtacccaattaaaatgctggatatccttctgattcttggaaaaccaaattggaatagagacagaagtaataacactaatcacagattattcgtttctcacatactgtcttagaaacctgctctaggcttttccttttgggaaatcatgcatcaggaggattaggtcaactatgctaagtagaaaacttcaaacaacagtggcttaaatacaagagaagtttatttcaccttcatatttaaaaagctccaaacatcttaactgtagtcaaagcagccagaagaaaaaaaataagaaaggacaaaaggcgactttaaggagccttctcagaagtcacacaaatatgtgtgtttacagctcaatggccaggacgccaggacttagaccagtggtcagactgagaggcgaaggataagagatacgtgatctcagctggaggcattgctggctcaaataaaaygaaccttcccttatgaaggaaaaaatatactggaaggcaactagagtctct

SEQ ID NO: 846762 - DNA, 640 bp, Homo sapiens
ccattaaacattaactccccgttccctccacacccctagcccctggcagacaccattctactttccttttctgagcttgaccgctctagatacctcatatcagtggaatcgtacgggattggtctttttgtgattggttcatttcatttagcgtaaggtcctcaaggttcatccatgttgtagcatgtgtctgaatctccttccttttaaggctaatattctattgtatgtatacaccacatttttttaatccattcatccaccactggacacctgggttgtttctgtcttttggcttttgtgaataatgctgccatgactatgttgcgtacaaatatctgttaaagatcctgctttcagttcttttccgcatacacccaggggtaaaattgttgaatcatatcatttcccatatttttaaaagacattcctgcacagcatttgcagttgtagttccttgctaggaatctaatgtgccttttcaactgcctatgtcttttgattacgatcgttactattgttagggctctggtgatgaagtcctcagggttcaaggggtctcagtcctactttcatgagccccgttgtcttttgtgcacaatttcacaraacacaaggcttttttgtttttttatttttt

SEQ ID NO: 846763 - DNA, 630 bp, Homo sapiens
ggggagcctttgcggctgtgacccatgattgagtctgggggaggggtagctggaggtggggtacagcctaaggccaatgaaacagtttttcacagcattaacttaatgggaaatggagggactcacaagcagatcttggacttatgactgccacactctgctctgacctgtggggctgacagattgctcctcagtagatgttggacttgggtaactttctccttcatgtcccttaaaacccacgacaattgtgtctattctggagtttccctggcaagagaaagtgagcgaaaaataagcatttacgtatatatatttgtgtgtgtgtgagagagagagacagactcccagggcgcaggacagagacaggttctgtcactcaggctggagtgcagtggtatgaatatggctcactgcagcctagagctcctgggctcaagggatcatcccaccttagcctactgagtagctgcaactacaggtgtgtgccaccatgcccagctaattttatatttttttgtagagatgcagtctcactatgttkcccaggctggtctcaaactcctgggctcaagagatccacctgccttggcctgtcagcttggggatttggttacaggcatgagccac

SEQ ID NO: 846764 - DNA, 615 bp, Homo sapiens
ctcagacctaaacataagcctacagatgctttcactccttctacacctcaccaccatataaatagggcttccatataaaaacagaggattatagctgaaagaactacaagcctcagatgctattttaaaagtcttttgggaaacccaaagcaattggggggtgggggacaaaaataaggccagtcacagaaattttagccactgacaccatagctagaggaaacagtaaacacagcatgttagccagataaatatcaaacctcatattaaagggccattgactccagttccttttgcccaattcatcatatctgttttcaacaacaacaacaaagtcatgctaaggggcaaaataaaacaaaacaaaaacctcaggctaaattatccaagcaagaatcaggactccattcagacatgacagataatttggagttatcagaccagaaatttaaaacaattttgaacaatatgttaagggatcgaatgaaaaaaagtgaacaagatgtaagagaagatgggaaatgtaagcagaaggacagaaattccaaaaagaatcaaaaggagatgctataaaataagaactttttaaamagaaactgacagagatgaagaatt

SEQ ID NO: 846765 - DNA, 513 bp, Homo sapiens
aagctgattttaaaatttatatggaaatgtcaatgttattgaagaaacaatttgaagtactcacactaacagatctcaagatttactaagagccratgtcacaataagacagtttgtgcttttggtacaagtataggaaaatttaatattggaatagactagtatattttcctgaattatggtaaagtctccactgcaattcagtgggtgtggaatggccttttccataaaaaggtgcttaatcaatagcatatctatttcagaaagaagggagtgggagccataatccctaccacctattatatgtacatacagatttgaagtaggaacttaaatgcaaaaagtaaggcaaagaaaaggtttctaaaagacaacacaaatgactatctcaatgatcagagagtagacacagttttcctacagtatgttaaaagcactattcacttaaaaaaataagtgatcaactgaactttcttaaaattcagaactgttccttacaagacagcattatga

SEQ ID NO: 846766 - DNA, 679 bp, Homo sapiens
tctgctataggtttaactggctgtggaaaattctgtgaatgaatcaagcagcagtttttcttcagattctttaaatttagggaatcctatttctagtttccgaaaggagaagtgaatcattctkcgtagtgttttagctgaatatgttaaatctgtgtattaaatttaacataatactgtatctacagttaaaaaaagaatagtatttagataacaattaaactgaattatctcatatttccctctttagatgacaatagcatttaagaacttacataaaatcctctttgcttcataatctgggacatatgtactctctcagctggcagtgtagtccttactaatgtttatgttaatagaaggatacataaaagttcctgaaagtaccataagtgtcttttagtgtttggtgtcattgacatattaacaaggagtctgaagatgagtaacacacccacatctgtcagtgccacagccggcacttgagcgacacaccagcacctcagacagagcatacagcttctttgctggtgcgcttgtgttctgggaaggagcaaatgaaatcattcacaaatcaggaattcctggcacaatatagaatcaggaaagctttttctagatgtgattgtaatgatggattgacttggatcccaaatgttatcaccaaaagatacatgct

SEQ ID NO: 846767 - DNA, 599 bp, Homo sapiens
caggaaggtacaaatgactgtcaacagttcagatttttcttcctggtgtaattrcattatagcagagttcaacgccttccctatagcaccttttcctgcataacctgaatttggtcttagaactcatctgtcattaccagtcaatggaggttttatgaattttttttagagccctgaaaaattagatgatataagtaagagcctacccctattacatataaggtctgaacttagcaaaaagcatagcccaaaggtggcaattttcatgtggaaatgttctttatgagaaagaaaaccagagatgacatttactatgctgaaaagctagccattgtgaggagtgtggcatttatatcattataaaggcacagctgcttaaaatacccacatgaaattcagaactcagagcacaagaattttgggcattgagagtcccagagatgctttaaggtgatcaggtgaccagtttgcctcaggaagaatctaatttaaatgttgtagaacaaccctatgaggagctctattctagaaagttctaccatcttaagcccattgttcaaaaggcactaatgtcttaagacaagcttgtccaacctgtg

SEQ ID NO: 846768 - DNA, 572 bp, Homo sapiens
gttgtttaaaagtatatagcacctcctcctctctctcgctcacgctctctccgtgtgacatgctggctgcccgtcgccttcgtcatgattaaaagcttcctgaagccctcaccagaaacagatgccagcaccaagtttcctgtacaggctgcagaactgtgagccaaaataatatctcttttctttataaattacccagtctcaagtattccttttaagcaacataaacacagcctaatacgctaatttatgcccagcacccaggtcttcgtttctaacaccattctccaataaaaggaaccagggctccttggaaaagtggccaactctaggattggggcaggaaaaatgcaagatgagcctggagcgtctcatggtgctagaagtaaggaagggctcaaagagcaaaagtaaggaagggacaccttcaaaggggcacaggagatagcctggaagagctcctggtggccaaagctggaacaatacaagcaggaaaatataggcacttccctacttaygatggtgccacttccgatttcaactttacgattgatttattgggggtattaaat

SEQ ID NO: 846769 - DNA, 584 bp, Homo sapiens
tgcattggaatgcctgcagacagacctgcacgtctcgaggcattggaatgcctgtagacagacccacatgtctcgaggcctcagaatccccacttcttgttacatcctccacttcccggcttgagctgcctacttggccttttaacgcatttgcgtaggtgacacctggcttccactctgtgagccctaatccgcatgtgccctcctaagtattattttatgcgtctgtgttcttcatccaccaccacatcttgaagttactgaaggtaggcactgtcagtaaaggcatcccactgccactccgcttcaccacggccgtaacaggaaccacaggtatcactatatctgccatttactgagctcctcacatgtggcaaggcctgttccaaacactttacgtgtgataattcattcgatcctaaaatacaaagaggtttagatgaggaaactgaggcacagagtagttagcttggccaaatttaacacagggaaagcccaggactccaaaccctttcaactttacaggytgcatgctcaatcaccacacccaaagccaaattcaccattgacagtggacagccact

SEQ ID NO: 846770 - DNA, 494 bp, Homo sapiens
gggtctccctatgttggccaggcgggtctcaaactcctggactcaagagaagttcctgcctgagcttcccagtcttgggattgcaggtgtgagccactgcacccggcaggatgctaagtttttataggaartacttgatgtgtatgtcaatctcataaaatttacaattaaaaaagtagtttcgagtgcccaagtttgttccaaatatactaaaaagtctgccaatcactgagtcaagtattcatttctaaattcaaacctaaatgaattaaaataagataatattaaaattccagctccttagttctctagccatatttccagtgttctgtagccacatgtggccagggggacagtactggacagcatagccacgagcctgtatgcctcggagaggtgtctatcacatttggtcttgttcaaggtttcgtttttgtgtaacctcagctagatcacctaactcccagaaggcagaactgtctcatcctgtctca

SEQ ID NO: 846771 - DNA, 583 bp, Homo sapiens
agtcttcatccctcaggctgcaagctcctcattcacctccctgatttcagaatttgtggggggtggtttatttcctgttctcaagagatacttggaaaaagcaaggcagattctcaggagatttacaaggccacagcatcgcgtgtgccttggaaccacaattggaggaaacccctaagttggaggcatctgaccctctcccagaggctcagaaggggaagggacttgtctactgtcatgcagtgcagctgggagtgctgagactctacccttgagctctgttcttggtgtacagaaagttaggggagaagggattgcaaatctggattaaatgatctagaagcggaaaatatgacacatgttaatagtcaaaaaggaaagtcagcaccgaactttggaagtgttcaatagaacaatgtgattgtctaggggtaagtataattcttggttctaaaatcatgcctaatagacatagcattccagaaaaaaggaaatttacattggttaatcacatttttttccagaagcaaattctatwtgtcaggcactgttctaaatactagggatacagtaatgaacaaca

SEQ ID NO: 846772 - DNA, 598 bp, Homo sapiens
ctgaagaacatcttggttgcttccaagttttggcaattatgaataaagctgctataaacatctgagtgcaggtttttgtgtggacatyggttttcaactcatttatattaataccaagaagcatgattactggatggtatggtaagagcatgtttagtgctgtaagaaactaccaagctcttccaaagtggctataccattttgtattcctaccagcaatggatgtgagttcatgttgttccacacctttgccagcatttggtgtcacatccagtttttaaaacatgaatttgacacctttaggtggggacttgccttgttttccttttttttttttttagacacagggtctcgctctatcacctaggctagggtacagtggtgcaatcatagctcactgcattttcaactcctggatttaaggaatcttcctgtcttagcctcctgagtagctgggactacaggcacacaccaccacacctggctatttttttttctttttaaatttttttgcagagacaggatctcactctgttgacaggaggctgcctcagcctcttaaggtgctgggattagagatgtgagccaccacacccag

SEQ ID NO: 846773 - DNA, 620 bp, Homo sapiens
actcaaagagactgaaacatagccctgaaactctaaaactcccagmagaaaacataggtgaaaagcttcatgacattggtcttggcaatgatggtttggatatgaaaccaaaagcacaaaggaacaagtgagactacatcaaactaaaagtttctgcacagcaaaagaaacaatcaacaacaacaaaaagcaacctacagaatgggagaaaatatttgcaagccatacatctgataaggggttaatatccacaatatatgagcaactcatacaactcaacagaaaaaaacgaaacttgattaaaaagcagagagaggagttgagtagacattgttcccaagaagacatacaaatgactaacgggtatatgaaaagatgttcaacatcactaaccatcagggaagtgataatcaaaaccactatgagatgtcacttcacgcctgttaggatggctattatcagaatgacaagagataacaaatgttggtgaggatgtggagcaaataaaacccttgtccacgatcgatgggaatgtaaattggtacaggcatcatggaaaacaatagggaagtttctcaaaaaaggaaaaatagaaccaccatgtgatcagcaatcccatt

SEQ ID NO: 846774 - DNA, 620 bp, Homo sapiens
actcaaagagactgaaacatagccctgaaactctaaaactcccagaagaaaacataggtgaaaagcttcatgacattggtcttggcaatgatggtttggatatgaaaccaaaagcacaaaggaacaagtgagactacatcaaactaaaagtttctgcacagcaaaagaaacaatcaacaacaacaaaaagcaacctacagaatgggagaaaatatttgcaagccatacatctgataaggggttaatatccacaatatatgagcaactcatacaactcaacagaaaaaaacgaaacttgattaaaaagcagagagaggagttgagtagacattgttcccaagaagacatacaaatgactaacgggtatatgaaaagatgttcaacatcactaaccatcagggaagtgataatcaaaaccactatgagatgtcacttcacgcctgttaggatggctattatcagaatgacaagagataacaaatgttggtgaggatgtggagcaaataaaacccttgtccacgatcgatgggaatgtaaattggtacaggcatcatggaaaacaatagrgaagtttctcaaaaaaggaaaaatagaaccaccatgtgatcagcaatcccatt

SEQ ID NO: 846775 - DNA, 504 bp, Homo sapiens
agatgttgtggtaattttgtggagaagacctccctccccaccaccaacccatgatgggcatgttgcatgagggagaaatagcctctcagtgtgttcagcctccgagattttggtggtgtttgttgctatagcctatcctagcttatgggttggcaaactatggcccatgggtcaaatctggtcattcacttgtttttgcaaatgaagttttattgggacacagccatacccattcacttatatattgtctacacctgctttcacacagcaatgacagcaatgaacagttgtgacagatgctgcatggtctagaaagtagaaaattgtactatttggccctacagagagaaggtttgctgatgcccacctatcctgactgatacactcgataaaagtctcttgaattattaaattgacaatraaaaggtagaagcccaaagctgatgctaaaataatgtgagataactttgcacgataatcaacgcagcttaattggcaagcatt

SEQ ID NO: 846776 - DNA, 420 bp, Homo sapiens
aatctaggataattgcatcatctcaagatctttcacttaatcttccaagtctttttgccctgtatgacaatgcattcacaggttacaggaattaggaagtgggcatctttgaggagccatcattcaacctaccaaagaacctaaaacctaataggaacataaataaataacttaatttccaatagtgacattttgaaaaacattgagcagggaaatagaacggaaggggaatgttggtggtgttgatggtggggagaaacaagggggtggctaattttgatagaaaggttgasaaactccctcagaatgatattcaagcagagatcctatcaataagaagtgtcaaatatctggatgaagaatgttccagggaagaactagccagggtaaaaggatcctgaagtggaaacaaacttcagg

SEQ ID NO: 846777 - DNA, 386 bp, Homo sapiens
ttcataactaagcattcggttggttgctacagtttctcaattgattgctagagttgccacaaagatattttgtgcatatkttgttgttaatttcttatttccacagggaactgagggcctgaaacttcctagtatgccgtctttctgacattacctccttagaaaaaaaaggacttatttttaaaaattgactcactcaattattgaggctgacaatgctaaatctgaagaataaagtggcactggatacttagggaagtgttgatgttttagtctcaagtctaaagctattatgtaagtaggatatttttccttgggagaactcaatatttcctcttaaagcctccaatgggtaaaatgagtttctgccatattatgagggtagc

SEQ ID NO: 846778 - DNA, 386 bp, Homo sapiens
ttcataactaagcattcggttggttgctacagtttctcaattgattgctagagttgccacaaagatattttgtgcatatgttgttgttaatttcttatttccacagggaactgagggcctgaaacttcctagtatgccgtctttctgacattacctccttagaaaaaaaaggacttatttttaaaaattgactcactcaattattgaggctgacaatgctaaatctgaagaataaagtggcactggatacttagggaagtgttgatgttttagtctcaagtctaaagctattatgtaagtaggatatttttccttgggagaactcaatatttcctcttaaagcctcyaatgggtaaaatgagtttctgccatattatgagggtagc

SEQ ID NO: 846779 - DNA, 533 bp, Homo sapiens
tctcccattctgtagtttgyctgtttactttgttgatagtttcttcttgtttttacttttacatgaatgtttatagcaacaatattcacaaaagtcaaaacattaaaacaacctaaatattcatcaactgattaacagaaaaacaaaatgtggcatatccatacaaaggaatattattcagccataaaaagaaatgaagtactgtcacatgctacaatttggatgaactttgataacattatgttaaggaagctatacacgaaaggccacatattatataattgcattacatgaaattcccagaatacataaatccttaaagacagaaagcagattagtggtttattaatatacattattattaactaaagtccatacttatttaggtttccttggttgttacctaataccctgtttaagataccacgttcaatttattcaccatttcccttattgtcgatactttattttgctatgcagaagctcttaagtttaattggatctcatttgtcaatttttgcttttgttgcaat

SEQ ID NO: 846780 - DNA, 576 bp, Homo sapiens
gcttcttgtatccagtaatgkgctactttccaatctgcctttactaactcagtactttccaaatgcaaagaaaaatcagcaatgagtgaaaaatcaatttcacatcagactagtgtttattccctaaatctgaaagcagctgatatatgctgtccatagactatgatactgaatatagaatttattcctaaaattcccttattacaaattctcaaatcttggcataaaaaaagttgcctgagagctggtgccctactccaagagattatgatccagtaagagtagagaagggcctaggaaataccacttctaaataagtgattttgctgcttcatttactataacatcattccatatgggtctgattccagttctgaaggctttaagcttaaatatcccaagttcaaccataaccagtatctgagttctagtgtaaaatctgattaactgtgacattcagaattcattactgtcaaaactaaggatcaaagcttagtctactgacatacatatgcacacacacacacatgcacacacaacatatgaataaatgaaaaaagaattatttgaaagaat

SEQ ID NO: 846781 - DNA, 572 bp, Homo sapiens
tcacaagaagccatatccatagggaaagagagagagtactacataaagagaacaccctgtgagacaaaagaatctgaataacagccttcagacctagaccttccctctgtcagagyctacccaaatgagaaggaaccagaaaaccaaccctggtaatatgacaaaacaaggctcttcaacaccccccaaaatatcacactagttcaccagcaatgaatccaaaccaagaagaaattcctgatttacctgaaaaagaattcaggaggttagttattaagctaatcagggagggaccaaagaaataattcaggaggacagttattaagctaattaggtagagacctttccaatgcaaggaaatccaaaaaattatacaagaagtgaagggagaaatagtcaaggaaatagatagcttaaagaaaaacaatcaaaaattcaagaaactttggccacacttttagcaatgcaaaatgctctagaaagtctcagcaatagaatttaacaagtagaagaaaaaatgcagcgctcaaagacaaggtcttcaaattaacccaattcaacaaagacaaggt

SEQ ID NO: 846782 - DNA, 573 bp, Homo sapiens
ttgcaaattggcatatccttctgggagtatttatccaaactgataagcctgcctgtcttctttggcaaggtgaacctcttcaaccagaacaaaaataaaacagcattggtggagaaaataaagggatcactagcaataaaatatagggggtagggtggatgggaaaggtatgttgaagcttattgagatataaagttccaaaactgtttttaattaaaagaaaaattattttattttttaaatttttgacctatatcattcctgtatgatgatcaatgctaaaccagtaaaatttttcattaaagtttcttttctgaatttggctagagtaaaatattaagtaattaccctaataatgaggtgttctatttaattgtatgttaagtttaactgagtgtcatcttttgaaggttgttcttttgattagatacatgagaaataaaatatttgaawtaactttatactttggtcatttactccattttcttaaaatttgaaaattgagaaaattttacaatgtacataatggaattcccatctcttgaagtattttaaatatctggtccaacacaa

SEQ ID NO: 846783 - DNA, 655 bp, Homo sapiens
atgaaagcatccgagggagaaaatgaatttcaggcatcctactgaagtctatttcatttttacagtctggtcacccccctgtggcaggggcagtgcctgggaggaacrggctgcctcctgactgacagctgacaagtgaggctcctcttggaagccttggctccggggcctaatcaagaaacaagagctgaagcagattcctagcttctccggcactgctcgaggtaccactgaagatgccgccaaggccacggcaggttttctgtctgggaggctgggcctgcctgagcaggcatttgtaatcaaggtcattcttaaaaccaaaggcagagctgagcatttggcagggagtgtgtgaaaggaaggagagaaggagagaaggagagaaagaaaggtaaataggaaaacgaggaaaaaaaaatggaagagaagagatccctatataattcccagatgctggtgtttccgggtggaggagcccagacaccctcaaagggatggcagctggccacaacaaggctgctcagagcagtgagttcatcaccctgggtttgagcaagcataaagcgagagttagaaagtcatgaaataataataatatttttaatatgacaacctgaatgtcacagcaaccaaaccaaattctttagctata

SEQ ID NO: 846784 - DNA, 637 bp, Homo sapiens
gggcacaatttacattgtagtatatgtgaagttgtgcagggtttcagcacttctgccattttgtgcatgtcaactcatttaaaccttgtgaaagctcagtgaaggaagatgttatttttacagatgaggaaatagacctgggtcttgacttcagctccccaatgtattagctatgctatctttgaatgttacttaaccttgctgagcttagaagtccctccttattccactatcccacatggatgtcagatggcagccactgcagtataaatggcttccatggaaacaaaaactaaagaaattgtctaaatctgttttgtgttgctataggagataccacaaactgagtaatacaggcctatgaaggccctttaaaggcctatgaagccttgaccttggactaccctgcctctagaactgtaagaagtaaatcttcttacaaggtcaaatatcttgtgagggccttcttgctgtgtcatcccatggcagaaagcagaagggcaagagagcacrcacttgtgagagaggaagggagaccaacttacccttttatcaggaaaccactgtcatgataactaacctactcctacattaatgggattaatccatttatgtgggcagagcccttatgacttaa

SEQ ID NO: 846785 - DNA, 604 bp, Homo sapiens
aataaatacacaatcctaactggccaacaaaatttacaggacrtttccaagtttgttttttatgactagaatttgtttgcaaaaatgggaatttttattaacctgcagaaaacataaaatatgtgttttttatactacactaccaaatattgctactattacctttaaaatttcacttaattctctcttggcttagacactttaaattacagcagaactatgctatgacatagttggcaaaattagaaattaacccaatctgggattccactgcttttttcacccaccattgctgtacatccatacttcacttcttgggactacttttggctttgtctgtctgttccatcctctccaagcttgctacatatgacctagtcttatatgaaacctctggcatttctcattccaagctcttatattaacactattaatagcgacaccaccttacacccctgggactctccctaatggtcaggtacttgagaattgggatagtcttggtccactccattggcaagagccacagccgggagaaagctagaggtgaggccctccaccgtagcagcttttgaactgactgggtttttgtgtctatattgag

SEQ ID NO: 846786 - DNA, 617 bp, Homo sapiens
tgtgtgtttgcagtagatggctagtgagagggggtagacagttctacaaatggtgaggatttgataatgatatgggaaaacttaggctagggtaagggtgaaagggagaggttatccaatgtagaaaacttagatcctaatagctttcatgcagtcttattatgtgtctatagacataaactaggctgaattttatcagtaatagtgactaagatcaatgtctccaaataataatgtaatcttccaaacctgtcccttttcttatatctagaataactgtaattgaaaaaaaattgaatcactatctggagagataaactagtactaaattctctactacctccttgaaggggattaagcacccctcatttagtttatatagtctgatatttttcaatttctttatcagcattgtgccctgaggaaaaaatttaaattttattgctataaataatgtaactaattaaaataatttacatttggagagtgacatcaccaagatggtagcacaggagtatccagggcttatctcctcacagaagcattaatttgaacaaacatccatgcttaaaaatacsttcacaagagttaaggaatccaggtgacaaattacagca

SEQ ID NO: 846787 - DNA, 650 bp, Homo sapiens
agcgttgtattcatgacataaagcaaatgtggagaatattgccatattaagccttccagtccatgaacatgagatgtctttccatttattgggtttttmatgtcttttaacagtggattataatttttgctaagtctcatacttttgttagatttatttctaagtattgctactgtaaaaaaaatggaatttcctgtttttggattgtgtatataaatacaattgcttctgtatattgacattgcatcatgcaacatcaaactttttcttttttgtggattccttaggattttctacattgaaggtcatgttgtttgcaaccagagatagtttgaactcttccttttcaatctggatgccttttctttctttctcctgccaaacggtcctggctagagccactagtacaatgcttattaggtggcaatagtggatatccttgtcttctgatcttagggagaagctttctctcatcactaattatgatgctagctgtgggttttttattgataagctttatctggttgaggatgttgccttctgtatagtttgtcttttacaaaaatccaaatcccttccatgataaaaacactcaacaaacatacattgcatctactgaagtagtcatgtggtttttatcctttattcta

SEQ ID NO: 846788 - DNA, 629 bp, Homo sapiens
attaatatggtacattacactgattttcaaatgtttttgttttaagacagagttttgctctgtcacccatgctggaaggaagtggcgcagtcatggcttgctgcagcctcaacctcctgagctcaagccatcctcctacctcagtttctatagtagctgggcccacaggcacacaccaccatgccctgctaaatgttgtgtttttagtagagtcagggttttgccatgttgtccaggccagtctcaaactcctgggcttaagcaatccacccaccttggcctcccaaagtgctgaaattaagcatgtgccactgcacctggccaactttctgttaaaccaaccttgcattcctggcataaattccatttggtcatgctgtagagccaaactggaggaaaaaaaaaattattaccaacatgttatgtttttacaagtcaaatatggaagtagaagtgtcaaaaaatacactgatacactccaaaaatccctacgtatttmaactaaaaacagacattaagagccataactgggattgctggcaagatggctgaataggaacagctctggtctgcagctcccagcgagatcgacacagaaggcgggtgatttctgcatttccagctgaggt

SEQ ID NO: 846789 - DNA, 468 bp, Homo sapiens
tcagctcactgcaacctctgcctcccgggttcaagtaaaataatagagaattaaaacaaatatraacattcataaatgccagaaaataaatgttttaaagagcatagaagacacctcatagaaaaaaggaatataacaaataaagcaacacatgtaattataaaatactgtgacaactgaggccaaatgtatgagtaataaaaattaatgtaaataaacctaacttacccactaaaagaaaaacaatttcaacttggcttacaaagccaaacccaatcacatactgtatgtttcctgaatacagagagatacagaaagggtaaataaaggtatgaacaaaggtatttcaggcaagtggaaattgtttaaaagtcctatcttatttctcaaaacacagaattcaaggcaaaggcattaaatataaaaggggcactttttaatactgaaagtcacaattcacaatgaaga

SEQ ID NO: 846790 - DNA, 603 bp, Homo sapiens
gttcttggaaatgtttcatttgcatcagggtcgtgccagacatggtaatgaaggccctgaacagagggagaaccatcagggactgctgtgtgaggaaagcgtggactttcatcctgaaaaatgaatgtatccataacaacatcctcaaacatagacagctctgattagtgctccacgagccctctctctaaaaacatctgaaaatgcatcactcttcctggggctcacatgaatggggtaaatccttacgaaggaggggccttggtgctcaggaggtgaagcgcacgccattctccaggtgtgcacgtgggtccgaggaatcaggagctcaggctgcacagccctgccgctgccaatcactgctcacagcccctgagccctgctcagaggcagcagcatttcctactaggggcaaggtgcagcagtcaccaggacaccctggctcttatttgcaactgctgcattacctaatagccacccatggcttcacgaggagggatgctcacagccccctgcagagcagccwccaggttccagccccacagggaagcgtctgccgtgacttccacccacacagcctctgcttccacacaatcaccctga

SEQ ID NO: 846791 - DNA, 524 bp, Homo sapiens
agcaacaaaacgagaccacatctcaagaagaaagagaaatgaaataaagctattcggattcatttttaggaaaaaaaagtcatgaaataaatgtcatgaaataacctaatatagaaatacagtaagtataggtaactctaaaacttgactagatttggcctgtctttgataataaaaggcatttgggcctttgatgtgccgcatacccagcactactgtgaacttgtgcatccttacatggagtctgttaacgtaagttaatatgagttaactatctcgctcacacttttataggagtgcctactgattctgagatatggtgaattgaagtcatcttcagcctgttaatagccttcataatttttaaaaggtctttcctcttcccctaaatctcaaacacattttatagtcttgaatggtttcagactttattcagtcatatttrtcacccatatctgcaatatctccagcttaatttatcagacttgacaagtacctaataattccaaaggtcaaaaagtgat

SEQ ID NO: 846792 - DNA, 646 bp, Homo sapiens
gcaataacaagcccatcaatttctgttacctcaaatgcaatagaaaataccacttttggccaggttcagtggctcacgcctgtaatcccagaactttgggagaccaaggcaggcggatcactgtaggtcaggagttcaagaccagcctggccaacatggcgaaaccccatctctacaaaaaatacaaaaattagccaggcatggtgacatatacctgtgatcccagctacttgggaggctgaggtggaagaatcgcttgaacctaggaggcggaggatgcagtgagccgagatcacaccactgtactccagtctggccatcaggacgagactatctcaattaaaaaaaaaaaaaaaaaagaaagaaagaaaataccacttttgctgaacctgattacaggcaaagccaaattcagtcacttgcataataatatgcccaacattcgttcacaatgttcctgcctgctcttaacgggctttgagtagagcaggctctcaaaagccatgaattatatgaattatcaaattaaacaacagtttccacttaaaataataacatttattttggraatatacaaaccagacaatgaactagatgttttacacatactattactcactttagcctcataatatttatggatagg

SEQ ID NO: 846793 - DNA, 646 bp, Homo sapiens
gcaataacaagcccatcaatttctgttacctcaaatgcaatagaaaataccacttttggccaggttcagtggctcacgcctgtaatcccagaactttgggagaccaaggcaggcggatcactgtaggtcaggagttcaagaccagcctggccaacatggcgaaaccccatctctacaaaaaatacaaaaattagccaggcatggtgacatatacctgtgatcccagctacttgggaggctgaggtggaagaatcgcttgaacctaggaggcggaggatgcagtgagccgagatcacaccactgtactccagtctggccatcaggacgagactatctcaattaaaaaaaaaaaaaaaaaagaaagaaagaaaataccacttttgctgaacctgattacaggcaaagccaaattcagtcacttgcataataatatgcccaacattcgttcacaatgttcctgcctgctcttaacgggctttgagtagagcaggctctcaaaagccatgaattatatgaattatcaaattaaacaacagtttccacttaaaataataacatttattttggaaatatacaaaccagacaatgaactagatgttttacmcatactattactcactttagcctcataatatttatggatagg

SEQ ID NO: 846794 - DNA, 489 bp, Homo sapiens
gtctgtgtataaaccagtggttctccaaatgtgctctgtggacctctcaggatcctgaagaccccttccagaaggcctaagagctcataactgttcttttttttaaaaaaaaaaaacaagttttaytcttgttgcccagactggagtgcaatggtgtgatcttggctcacagcaaccttcacctcccaggttcaagtgattctcctaccccagcctcccaagtagcagggattacaggcacctgccaccactcctggctaatttttgtatttttagtagagatgtggtttcaccatgttggccaggctggtcttgaactcctaacctcaggtgatccgcttgcctcggcctcccaaagtgctgggattacaggcctgagccactgtgcctggccaacactgttctgaatcatactaattaaacctgagaaagctgatgaaaaattttaaaaatttgtgaaagtaatacaaagtcattgcctgctttttt

SEQ ID NO: 846795 - DNA, 595 bp, Homo sapiens
ggagaaaggttaaattcctactaatacatgtggttgtactggtattttgttaatttcattcacaattaatagatcttaaaaatgaaaaactatagatatttaaggataacttatcctaagttaatatgaataagtttaataggtgtatgttcattagaacttctatctacacaatctctttgttgaaagtggcctaatgtggatggtcatatgtatcccagcttcattttctaacctgacgtgattatgccagtagttcaaaaagttattgcaaaggatagcttttggaattacatcttttcaccctgcagaatcaaaagcctacctcggaagagatcactatgattgctgatcagctcaatatggaaaaagaggtgattcgtgtttggttctgtaaccgccgccagaaagaaaaaagaatcaacccaccaagcagtggtgggaccagcagctcacctattaaagcaattttccccagcccaacttcactggtaagaataaaaaatagggagtgcaagctcaagggctaatttttgcaattttacaaatgacctgttaaatcagtttatttcawaatagtaatttaatgaataaa

SEQ ID NO: 846796 - DNA, 589 bp, Homo sapiens
accattgtatgaacatcatagagtatgtttcacaaacgaagatggtatagcctatgacatacctaaactatatgatatagcctgtttctcctaggctacaaatctgtacagttagtatactgaatactgtatgcaattgtaacacagtggtatttgtgtatctaaacatagaaaaggtacagtaaaaatagggtattataatcatggttctattgttgctgatggaaatgtctttatatggtacgtgactgtatgtctagcagtgaagttgctgggtccactttttgatggtccttcaaatagttaaacatagaattaccgccaaacttttttccatagcagctgaaccattttatatttccacaatcaatgtacaaggattccaatttctctgcatccctgccaacacttatttcttctttaaaaaaattacagccattttaatgggattaaataatgtactttaaaaagtrgcaactcttcattcattttccccaggaaataataataactgaaacctcctccttttttccaatgtttttgtgtattttcctctatcttatagtcaaaatatcttgtaataatgaga

SEQ ID NO: 846797 - DNA, 483 bp, Homo sapiens
acctctattttcagaggtttataacttcttggtaaaaattacctccaggctaaaatttggcatacatgatctcagacgtgtcaggtgtcagggaatatatacatatgtagtatccattttcttaaagaaaacctggtgaatttccaaatgaattatctcacttctcatagggtacaagttcagtaaatttattattaacttgattatttatagaatattattatggcaacacaactaagcacttgtaagacctagtgtttgctgttgctttctttccttttacattcgttggcacggtcacagtgatttttctcaaaaatcactaggagagacttgactggctcaagatcagttttacactcacctaagtaggtacatttagaggtattcrctttatgtatctggaatttacattgtacttttatcagcataggaaagaaaaaagaaatctagctggtgatgcagtagaggtcggggtggaga

SEQ ID NO: 846798 - DNA, 626 bp, Homo sapiens
cacaataaagactgtatcacaataaaaagagtctcacraaatttgttgttttccagtgcattgcaaaagttaagtttatactatattggagcctattaaccgtgtgatggcattatgtctaaaaagcaatgtacatactctgatttaaagactttattgctaaaaaatgctagcaatcatttgagccctcagtgagtcatcatctttttgctggtggagggtcctgccttgacgctgatggctgctggctgaccagggtggtggttactaaaggttgaggtggctgcagcaatttcttaaaataagacaaaagtgaagtttgctgcattgattgactcttcctttcatgaaagatttccttgtagcacgtgatagcattttatcactgtagaacttcttttacaagtcagtcatctcaaatcctgctcctgctttatcaactaagcttaagttatattctaaatcctttgttgttatttcagcggcgttcacaacatcttcactaggagtagattctacctcaagaagccactttctttgctcatccataagaagcaactccttgttcattcaagttttatcatgagatggagcaattcagtcacatcttcaggctccaattctaa

SEQ ID NO: 846799 - DNA, 633 bp, Homo sapiens
tttttctgccttttgtcgttttaattgagctttctgtatgatcccattttctctctcttctcagcatatctattatgtgtcttaaaaaaaaattagttggtcttctttcagataacactatactttttcacaggtagtgcacgtatcttataacaacaaagtattcttgattcctccctcccatcacttatatcattgctgtcattcattttacatccacataagcatatgtatataatatataaaagaatacatgatggaatatattgttgctattattatttcaaacaacccattatatgatagttcaattaagaataagaaaaataggcgaggagcagtggctcatgcctgtaatcccagcactttgggaggccgaggcaggcagatcacctgaagtcaggagttcaagaccagcctggccaacatggtgaaaccctgtctctacaaaaaatacaaaaattagccaggtgtggtggtgcgtgcctgtaattccagccacctgggaggctgaggcagragaatcgctggaacctgggaggcggaggctgcagtgagccgagatcgtaccactattctgagcctgggtgacagagcaagactacaactcaaaaaaaaaaaaggaaaagtttt

SEQ ID NO: 846800 - DNA, 645 bp, Homo sapiens
acaaggcatacttgcaaaatatagatatgctgccatgtgctgaggaccaggggagttcttacaactgccactggccaatcatcaagcacttagatgctgggagccctrctgcccacctggccaaacccctcacttaatcctcaaactgcagtattggtcaatattatcacctcattttatggatgaagcagccgaggcttagcgaatttgcacacacagcctgcctatggaggagttaggattctggttctgcttagcctcagcccaggacaggattttaatgaccaagtcctcctcaggggcttaaaaggggaggaaagtatgcttcctggatttgctgaatattctttcctccttgtgaacagtaacttactcatgccacatacacacatataaactttaatatccccaatttacagttagcatgacccataaaaccggtaggcaacatgaggtggcaaaaactcagtaatagcttacaaagagaatgcaatagattctagaatgttggtgttatccatacttgatgacatgatgtgatgggggtgagttggtgggtaggttcaccaagaagtattatttagaaaaactgtgccaaagaaatctatcatttcacccataactggtattaagtattgcaaaact

SEQ ID NO: 846801 - DNA, 487 bp, Homo sapiens
aatctagaacatttactacctggccctttatagaaaaayactgctgagccccagtctatttatataaagcccaatgttaccctgaatgtgaactccctcatttcatacaataactctcaaattatgaatctttgtcaacacacacagacatatacgcatccacttgagatgtttccatggaaacatggatttattctcacaatgccatgcccttctgtaagcatagtctttgctgtgtttgcatccctccccaacctgatagattggaagaaaatggtgccctctgatgtcagcctcccttaaaggggccccaaggtagcatgtcttgggcctcaagtatttcaggccataagtggaatggagtaatccctacaaccctgtactcagaagcctattaccttactttgacttggctttatctggtcagtctcattttgtttggctctttctctcttagaataatagtttaagtttcctttaagtacag

SEQ ID NO: 846802 - DNA, 604 bp, Homo sapiens
atttaaagtttcgagatttatcattaattttatccccttactcatgttccctgtcttggggttttctttttactagaacttcttccagttgtttctgytgagatcaaagcataagaggggccaggcacggtggctcatgcctgtaatcccagcacttcgggaggccgaggcgggcagatcacctgaggtcaggagttcgagaccaacatggccaacatgttgaaaccctgtctctactaaaaatacaaaaattagccaagcatggtggcgggcacctgtaatcccagctactcgagaggctgaggcaggagaatcacttgaacctgggaggtggaggttgcagtaagctgagatcttgccactgcactccagcctgcgcgataagagcaagactctgtctcaaaaaaaaaaaattataaaagcataatatggagcaggagacagaaacaccgcctcctgccttgctctgtaacattctttctgccgcccatcctattgaaaaactcaacatccccaaaggagccacattctccgagagaagcagtggactaaggaaaaacagaaatttagattctggcaaatcagtaactagaagaaattgctg

SEQ ID NO: 846803 - DNA, 602 bp, Homo sapiens
agcgccctgtggaagcagaccacttggctctaccaatcagcaggatgtgggtggggccagataagagaataaaagcaggctgccggagccagcagtggcaacaggctcgggtccccttycacatggtggaagctttgttcttttgctctttgcaataaatcttggtactgttctctctttgggtccacgctacctttatgagatgtaacactcaccacaaaggtctgcagcttcactcctgaagccagcgagaccacgcacccaccgggaggaacgaacaactccagatgcgccgccttaagagctgtaacactcgccgccaaggtctgcagcttcactcctgagccagcgagaccatgcacccaccagaaggaagaaactccgaacgcatctgaacatcagaaggaacaaactccggacacgctgcctttaagaactgtaacaccgcgagggtccgcggcttcattcttgaagtcagtgagaccaaggacccaccaattccggatacactgggatttagatgccaactttactttttttagggtctgctgggctgagcctttaaaatttccctttgcttttagaaattaatttatggacca

SEQ ID NO: 846804 - DNA, 630 bp, Homo sapiens
agttttcttttcatgaatctatcccatttcaggaagctaggtttttgttgttttggactcttctcagaattcctgtagcacttatataagccatttatttaatagttaattgttgacagtgtgacattttctatatttttgtcctatgttatttatttcaagttttctcatttttttcacatgattatatgcttcttcacaaactaactgtgaagtcctaaaatagtctttaagatcagagactatatataatatctttaaatattttttttgttttttttgagacggagttttgcttttgttgctcaggctggagtgcaatggcagggtcttggctcactgcaacctctgcctcctgggttcaaatgattctcctgcctcagctttccaagtagctggaattacaggcgcccaccaccatgcccagctaatttttgtgcttttttttttagtagagacagggtttcactatgttggccagcctggttgcgaactcctgacctcrggtgatccacccacctcggcctccaaagtgctgggattacaggcgtgagccaccgcacacggcctaaaatgtttttataatactgaagtaaaacctcaaaagacccataatttcttaattataat

SEQ ID NO: 846805 - DNA, 618 bp, Homo sapiens
gtccagaccatatgtgataatacaactctgacctacaaatgatgtcccggaagccaaaccacaatctctgcagccattcttccataaaggtcaggacttcgtcaacaaatcctccttattttggcgccctactcccatccctcacctttccaactccagaccaaacagagagagccaaataacctaacctgaaaccaatcacataagatgcttcacttctagttagcctatctccagcttccctatgttaacaaccaccaatcagagcttatctagtgtctctcccaaaatttgcccacacttccctacctgccttgaagtctgcaaagcacaagtgatggtggctgacttccttgatatagtaagctctgaattaatggcctctttttgttcttatttgggtagtcattatacagttcaaccaatgtttgagatttaaatattacatagtgctgatgactcccaatatcatatctctagcccwtaattctctcccagatggctgacttcctccacaaaattcacactcagaaatttaatgggttccttaaacttaacatgtcaaaaatacacccccacactccctaaatgctccatcactctgatttcttaggtcca

SEQ ID NO: 846806 - DNA, 634 bp, Homo sapiens
tcaacagggaaaaaattatatgaattatatcaatgtggaatgaatttgagataaattacttatctcacattactcagcttgtaatgcactttggggatatttactttttacttcctctatccaaagccaatattcaaataaccctgaaaactgcaatgttaaaattttaaaatcactttaatccatagaaccaaaattttgctgagcctagagctgcagtataaaagatcatattcattataatcatgggaacagaataaatttaatttgatcctcacaatattcttatgaggcagatattattccttttctacagagaaggatactggcatgtgtggatattaactacatcacacagttagtgtattgtaaacactcttgagagttaggactgtcttatgcttttctgaacctgcaggacatagttggagagcgactgacatatcataggtgtccagcacatgtctgtttcgttgaaataaagcagtggcgctgcaaattaaattgagtattccctgacattaaattcattatctttccactgtattgtataatactctactgagtcgaggactaagctcyctctccccacctaaatatagatgtccactatcttgtggatttctcttactta

SEQ ID NO: 846807 - DNA, 402 bp, Homo sapiens
atctatctattgctaaatacatacacacacacacaaacacacataccatcaagaaagtacttatgatgaactaaaatacaaaaccatggtaaaattttatattcaaacatgtttttgctatatctctgcataaatccaataaagatttgatttttctttatttgaaatattttcatatatatctcttctcaaagtagcaaaggaaatcattccaaagagggttaaaaaatatagagactggaaactgcattttaatacacatatttcttataatattcactagaaatattttgaactttcttatttttataagaacacaatttaattgtratttataaatagctgtcataaagatagtctatggtaagttcctcaatacggtcttaccatcttaaatcaatg

SEQ ID NO: 846808 - DNA, 653 bp, Homo sapiens
ccacccaggttcaagcgatcctcccactcagcctcccaagcagctggaattacaggctcctgccaccatgcctagctaatttttgtattttttagtagaaatggtgtttcaccatgttggtcaggctggtctcgaattcctgacctcaagtgatcctcctgccttgaactcccaaagtgctgaaattacagtcatgagccaccgcacccggccaacataaacataaatcattttaaagtgctatgtacttccattgacatagttagaatagcagaatactgaatttcttttgttatggagtacttaaagtatgctaataaacaacatctagtccaatgtattgtcaaaatatctactgtcttttgtttcaatgatgtaagattggacacagttaaatttaaaaatacttgatttttttactattattttaacttttaatgtgataagcaatagaaaaaaaataaacatagatgcctttgcctctgaaaattattataatacctgtcctgatatctcagaagaaaaataaacttmatcattataatcaccattgagaaaatgaacccacgtattttttacctattgaaattgagctctttagaagaaaacaagaacaagataaagaatacatgccttatatttgtaaaactgta

SEQ ID NO: 846809 - DNA, 480 bp, Homo sapiens
ttcttcactaatttactttatgtacactagttagtaagttgatagaaattttctatgctagaagtaaatgtcacatatattataccataattacatagcaagaraggttttgaaatcagtttagatactgtgctatccctatcttaaaaactgtctgttaaaataaccaatatagcttctcttttcctaactgtatcctgaaaaactcaggtccttattttattttaacattttagctctataaaaatatttttaattgactgattgcactgtaagtacaaaaatacacgtcagttttaatgccctgaacttgaatgtgagattaaatgtagttcacataatattagtttaattataaggggattaggttttgtcctatattagcatggctattttaatattttttaagtggttaaaaatcaatgttatggtttatattctgagaataaacattaaaagcaattagaaaataatttattt

SEQ ID NO: 846810 - DNA, 556 bp, Homo sapiens
tcaaaggaaaaaaaaagaaataaacagaaattgttcatgaaaaaagactcagtggtagatctactaaatacagacttaaaaaaaaaaaaacaactcctggggctgtgaaagaaaacagagactttaaaacaactctcttaaagatgctcagaggaatgaagtccctgaccatccagctaaaccattgggtacagcccatgaatctgtatgtaatcacacatctggccatttctacttccatgcagagtacacaaccagttgcactgcttgaagttctgcccactgggaagatttcccttcactgttgtccttcaagaatgtcctagaaagggactgtagtgctgcagctgttcacttttgggtgatgcctgcatatcatgcagatccatttgtgaaccaggccctatcttctcttcctgtgtcaactgatcatagggaactctccatgaggccataggtgcaggctgggggagagaargcagggtggcaggagtggagactatgggcatttgagccacttcctcatgtaacttacttgtgcctgcaagacctgctc

SEQ ID NO: 846811 - DNA, 639 bp, Homo sapiens
acttcttttgtgtccagtcttctgtattcagccacttgctagaacacagaaaacacagtcactgaatgtgtgctcttttccctagagagagaatttgttttaagtgccttttcatgtcctgagggrcaactcattcttgacagttatttgaaagacttaggccttgcctcacagcctagtacaacagacagaaaagtaacccacagttaaaacaaagaaggccatgctaagtgctatgatggagtttatgtgggaggccagggtaggaatacctgagcaagcatagggaagtcattgagtgcttaggaaaatatgatgcttgaagaagtagaagttagccagaagaaaaaaataaatagaaaagtatcttcgagacagaaggaacagcatgtgcaaagcccaagcacacacagattagaggaaacggaaaaactgtgattagagaggtagcttagagaagagactgcatgggagagtatctgaaaatgagactaaaaatatatgctactttgcaagtaccgttatatgccacgctagagatttcacattttattctgaaaggaaagggaaccattgaaggattttaagcaggggataaccaaaactatagtaataagaatgagacctggaagctcagtg

SEQ ID NO: 846812 - DNA, 639 bp, Homo sapiens
acttcttttgtgtccagtcttctgtattcagccacttgctagaacacagaaaacacagtcactgaatgtgtgctcttttccctagagagagaatttgttttaagtgccttttcatgtcctgaggggcaactcattcttgacagttatttgaaagacttaggccttgcctcacagcctagtacaacagacagaaaagtaacccacagttaaaacaaagaaggccatgctaagtgctatgatggagtttatgtgggaggccagggtaggaatacctgagcaagcatagggaagtcattgagtgcttaggaaaatatgatgcttgaagaagtagaagttagccagaagaaaaaaataaatagaaaagtatcttcgagacagaaggaacagcatgtgcaaagcccaagcacacacagattagaggaaacggaaaaactgtgattagagaggtagcttagagaagagactgcatgggagagtatctgaaaatgagactaaaaatatatgctactttgcaagtaccrttatatgccacgctagagatttcacattttattctgaaaggaaagggaaccattgaaggattttaagcaggggataaccaaaactatagtaataagaatgagacctggaagctcagtg

SEQ ID NO: 846813 - DNA, 540 bp, Homo sapiens
agacgcccagggcgaggcaaccccgtgcgctcagctccgagcaggccgctcttcaggacgccctacagccgaggggaccgtcacccgggagcgccgtgagctgtgggcaccacgcggtggtggagagtgacccccgccccggggcggccgtgctgcccgaacctgcctcagcccgcgaggggagacgggcctgggggcaggcgggagagggaggccccgggaggaggcgagcggggctgagaggacgcgcgggaggggctctggagaggccgcaggaggcgcgttccggagggacgacctttgctgggaggacgaggcctcaggtggacgctgtgggccggtgggcaggagcccgagttctgcaggagcggcctaaattggttactgagcgcggaagaagggacggaaggtgagcgctactgggccacgtggggccgagagaaaggccacygcctgttttctttaaaatcagtttcacacgtcgacgcccctagagaactggtctggtttggaaggaggctgaggatgcaggcggggaca

SEQ ID NO: 846814 - DNA, 450 bp, Homo sapiens
ttacatgttgtttcctgttaaccatgctttcccctttctccacccttcccttcttctattggatcaataccctttctttrtgctcccttttctggtctggagagtgtcggctgcattgtgattctgtaatggttccactacgcttcctctgctgcctttgcgtttctgacacgcacaaccttgttgctattttgtcatcatcgccgtctgacagaagaaagcaaagcggttgctcggtgcctgagccgcacgctgggccctgcccactgccggcttcttttccgtcccaacaatgacttaccatgtgcaagcacagtgcactgcggccctggaaaccccgactgctgagacgttctgtgtcttgacagacaaaggcagatggcaggagttgctgatatttattcaaacgtcatccatacaataaagaactctgcttttaaaattccattt

SEQ ID NO: 846815 - DNA, 450 bp, Homo sapiens
ttacatgttgtttcctgttaaccatgctttcccctttctccacccttcccttcttctattggatcaataccctttctttatgctcccttttctggtctggagagtgtcggctgcattgtgattctgtaatggttccactacgcttcctctgctgcctttgcgtttctgacacgcacaaccttgttgctattttgtcatcatcgccgtctgacagaagaaagcaaagcggttgctcggtgcctgagccgcacgctgggccctgcccactgccggcttcttttccgtcccaacaatgacttaccatgtgcaagcacagtgcactgcggccctggaaaccccgacygctgagacgttctgtgtcttgacagacaaaggcagatggcaggagttgctgatatttattcaaacgtcatccatacaataaagaactctgcttttaaaattccattt

SEQ ID NO: 846816 - DNA, 450 bp, Homo sapiens
ttacatgttgtttcctgttaaccatgctttcccctttctccacccttcccttcttctattggatcaataccctttctttatgctcccttttctggtctggagagtgtcggctgcattgtgattctgtaatggttccactacgcttcctctgctgcctttgcgtttctgacacgcacaaccttgttgctattttgtcatcatcgccgtctgacagaagaaagcaaagcggttgctcggtgcctgagccgcacgctgggccctgcccactgccggcttcttttccgtcccaacaatgacttaccatgtgcaagcacagtgcactgcggccctggaaaccccgactgctgagacgttctgtgtcttgacagacaaaggcagatggcaggagttgctgatatttattcaaacgtcayccatacaataaagaactctgcttttaaaattccattt

SEQ ID NO: 846817 - DNA, 431 bp, Homo sapiens
tgcatcttttccccctcaagttctgtatctgccacgtgtatattttatttggcatttaaatgcacagttcttataattgctgataaatagtctccrttgcacattttgctggcactgtggcctcactgtaaatgctctctgtatgttcttgggaagttgcataatggcagttactctagtttactgtgcaatatgctcagtgactaatggcctaatcatgacttgaaaaatatataaacagttcaacagaagcagttgattcactgagctctttcatccagacaagggtgagctaatgggaataaaaaagacggaggtgtgcagcagcgtctttgatgtattgaagttagagcattcccacaaatcccatgcattattgctcattgatggcggatcctttttcatatgcatgaggcaggagtgccaaatta

SEQ ID NO: 846818 - DNA, 616 bp, Homo sapiens
agtggactttggggacttgggggaaagagtgggaggggtaagggataaaagactacacatcaggtggagtgtgcactgcttgggtgacaggtgcaccaaaatctcagaaatcaccactaaakaacttatccacgtaaccaaacaccatgcttccccaaaacctatcaaaataataaataaataaaaatggcttaaatccaatgataaaaataaaaccttagaagcagccagaaaaaaaagacatgatatttacagaagaacaaagatagggtgggagcagatttctcattggaaacaatgcaagtgacaaaacagtggagcagcaactttaaagtactaaaagaaaaaaaaaacctgaagccagcagaaagagctttcaaaaacaaaggtgagatacagatattttcagacatacagcacctgaaagaatttaccaccagccaacccatactacaagaaatttaaacgaagagcttcaaggtagaaggaaaatgatactagatgggaatctggatccatgaagagcacagaaaatggtaaaaacatggatagttgtgtaagaatttttattagtagtatctctttaaaatatatttaacagtttaaacacaaataa

SEQ ID NO: 846819 - DNA, 513 bp, Homo sapiens
tagaatccagttccttacaggtagattgaacatgcacatttccttgttgartgttaatcacaggccaccctttgttgctagaggcaacctgtgtaccttctcatgtagtgccccccatctttaatatcaccaaagaaagacttccccttatgttcaccagctggacaaaattttctactaaaaaaagaaaggtatgtgattagattaggcccagccataggagccccttttttatataataatttaatataatcatgggagttatatctcatcatattagtaggtttcactcacactcacagggagaagattacaggaaggcagtatttatggaagtcattcctacaattttgcttattacaggagccgatattttatctgaaaaaattgagattaattatatcttccatgaacaattgttggtagtagtagaagagctaatgtttagactcacttgccacatcataaacagcgaaattactaattgttctgataaacatttgaccctcatgg

SEQ ID NO: 846820 - DNA, 524 bp, Homo sapiens
ttttaataccaagatgacaatacaattatttcattatcaacactcactgaatcttatgtactaggtaagcactggtgataaaagcatgacaccagacttaggtaccagttgtgtccttattttacatagcaaacatagccacaggataatatacaacctcttgaagatcaggctgttgtaaactgggttaatagatctgggtttcaacacatagagtcaattatgagaatattcactgctaaacatttgaatcaactgtgtacatattataacaaatttaaactttattctataaaaatagaatgaaacaacattgaaaactatgtgccaaggctcgagacaatgagtgcagtaacgtggtagtattatcagttcagttgtgaatcagtaagacctaaattaagatgatgatattagcaataaaaataaacratgtataaaagacatctctacttcttttgggctaatggtcaaatgcctccctttcctccatttttattgtaaaaacatattaaaatgtttta

SEQ ID NO: 846821 - DNA, 581 bp, Homo sapiens
ctttgattttgtttttttttacccacaattcttgaatatacagtgtagttgatatatttagtaatagsacaatttttacattggggtaagagctattatggaggaaaatccaattggaagatcttgtcatgcccctttagaccaatggagattttaaagtgacagcaattctctattcctgtggtacttgtagtgattggtgtccccttgaaaggactgaaagttgcaggggtggtgattccaaacatccctacttacctcaccagattggacaatgcaaaagctagaaagggcacagaaaataagatgaatgatagaatattgttggaaaattaaacaggatctgatgcaaatttcaccaattctaaaggttggatctctatgaagatagataaacagagctcctggtacctgagtccagctatgacatagaaaattaattattttgtgttctaattagtgaagctccacttgaatttgtcagaatgtctttttaaagatattttgaaagacctaaataaatagatatcaatttttcttaaattggcctacccattcaatgaaattccaatcaaaattgc

SEQ ID NO: 846822 - DNA, 581 bp, Homo sapiens
ctttgattttgtttttttttacccacaattcttgaatatacagtgtagttgatatatttagtaataggacaatttttacattggggtaagagctattatggaggaaaatccaattggaagatcttgtcatgcccctttagaccaatggagattttaaagtgacagcaattctctattcctgtggtacttgtagtgattggtgtccccttgaaaggactgaaagttgcaggggtggtgattccaaacatccctacttacctcaccagattggacaatgcaaaagctagaaagggcacagaaaataagatgaatgatagaatattgttggaaaattaaacaggatctgatgcaaatttcaccaattctaaaggttggatctctatgaagatagataaacagagctcctggtacctgagtccagctatgacatagaaaattaattattttgtgttctaattagtgaagctccacttgaatttgtcagaatgyctttttaaagatattttgaaagacctaaataaatagatatcaatttttcttaaattggcctacccattcaatgaaattccaatcaaaattgc

SEQ ID NO: 846823 - DNA, 603 bp, Homo sapiens
acattgagggcccatgaaggaaaatcagcagtcctgttgctactgttattcactggggtgacgaaaaataaatccattctccctctctcccacctctstcacacacatacacatgcatatgcatatatgtgttcacacacaagcaattgaaaaaccaatattttcctctgagccagggaagattctgcttgtttctcattgacaaggacattgtgttgactcacacacattcccacaaatactaaggttttgaagaactaaatttaaagataagaaaaacttagaaaggaattagtgcaaaatagactgttgtgtttgtgtgcaaatgtaaatgtaaaaataaatgagtatgaaaagagccagacatcttatataagtattattttaccaagcatattaaaattacagctagataattttaagacaagtataaatattactatacaacaaaatatttaaggagatataaaagactcaggatatatattagttaataaaatgagaggaatcccaatggcagaattccagaaaaaatagaggataaattaaatgccagtattcactggcccttttgtttcctctccatgatagcagtgcaaatgc

SEQ ID NO: 846824 - DNA, 539 bp, Homo sapiens
cttgatatgaactgtctcactgatgacaactgtgcagaagtcttgcagaacctatctggcctgtaacttgagtttggatcttggcatcctaactgtctgtaagccatcagaatctctaaaaccacctacacagcagagaagcctgtacagctcctgactcatagaagggttcaataataagtattcggtgttagaataaatgagctgtgggccaggtgcggtggctcacgcctgtaatcccagcactttgggaggctgaggcgggtggattgcctgagctcaggagttggagaccagcctgggccacgtggggaaaccccatctctactaaaatccaaaaaaaaaaaaaaaaaaaaaaaaaaaaaaaagattagctgggtgtggtggcgcatgcctgtaatcccagctactgaggaggctgaggcaggaraattgctggaacccagaaggcaaatgttgcagtgagctgagatagtgccactgcactccagcttgtgcaacaagagtgagactccatctccaaaaaaaaaaaaaaaaaa

SEQ ID NO: 846825 - DNA, 611 bp, Homo sapiens
ggtctactattagccttatggggatccgtttgtaggtgacatgccctgtctctctagctgcatttaacattctttctttcatttcaacctcagaaaatctaatgattatgtgtcttggggatgatcttctkgtgtagaatattgaaggagttctctgtatttcctgaatttgactgttggcctctctaacaaggttggggaagttttcatggattatatcctgtaatgtattttccaagttgtttgctttctccctctccctttcaggaatgccagtgattcatagatttgccctctttacctaatcccatacttctcagaagttttgttcattcttttttattcttttttctttatttttgtctgtcttatttcagagaaccagttttcaagttctgagattctttcctcaaattggtttattctgctgttaatacttgtaattacattgtgaaattcttatattgtgttattcagttctgtcagaaccattggtttcttttttatactggctatattgtccttcagctcctatattactttatcatgattcttgttttcctcagattgggttttgctatcctcctgaatcttgatgatctttgttccta

SEQ ID NO: 846826 - DNA, 599 bp, Homo sapiens
cctcttcagtgcctctttccttaaaatgatgttgaaaccaggtactgtgatctctcacatgatttttggttcttatgaaggtgctttttgtgtaagtagttgctcaatttggtgttgctgtggggaggatgattggtggaggcatctattcagccatcttgctccacccagtctcttctatgcttttaattggagaattgaacctatttacattcaatgttgttattggcaagtaaggactttctactgcccttttttgcttgttttctggttgttttgcagctcctctcttcccttctttctttcttcctttgtagctgtgttattttctctggcattaagttttaattgctttttatttttagtgaatctattacaggtttttgcattctggctatcatgaggcttaccaaaaaatatgtcatagatgtaacaagttattttaaagagaggacagcttttcttaaatcacaaagaaaataatagaaacaaagaaaaaaattctacartttaacttcatcccctctacgttttgattttaatcatctctacttatgtatttgtatactacctatcttttaacaggtttcttcagtgat

SEQ ID NO: 846827 - DNA, 604 bp, Homo sapiens
gctgaaaaaaactccggggatccagacacccaaacattccrttaaggttatttactctcatactgtgaattataagcctcctcctgtttcattccaggtctctgaaatggtacagattacaaatagctttcttttgcctgactccattatgtcagttaataacctagtcttccccactaagggcaaaaaagcatccttcctacactgtaaccctcctaaaatgctatgagtttgttaagtagtggcagacaactttacacatgggattctctttggcctggtgaaaagctcgacgaccttctttttgcaacactcacaggtataaacccagtgtaattaaatattaaaagaatgttagtaatagaaataccatagagcttatagctctgatcggatgaaacttctaatcctattctcatgaaaaaagctagcaattattcagaagcttacaatctgttcgtgggttcccaggtcttcagttctttcccttacagaaattctgctgtgtacaagtgtacatattgtataaaactttgtatatgccagccactttggtgtgtacttgatatatatgatcttatttaatcctcacatcaactgtaag

SEQ ID NO: 846828 - DNA, 606 bp, Homo sapiens
atgagtaaactaggatccattgacattatttttctagagttatggagataagaggcaaagctagaattcagmttcataattgcccaatttcaaagctcttgttatttccatgtggatttcaaaaatagtatttttgaagtatcaaattatatatttactaaagaaaatgtggaaaatgcaagtagaaggtagagaaatgaaaacaaattacccatgaatccaccactttcaatagttcagtgtatttcctcagtctcttattccaaatgtaattttgggggtcaaaaatatagcattgtatatataattttatatcctgcctttttcacttaacatttttcagtgctgatctatactcttcataaatgtaattttaatggttgcatattattgtcaagtgggtgttaccacatgaatatttacagttgttcagctcatctgtgaatttcttctcttcattcccaggactcaccatctctgcctcccatgaggcttacagagttcaatgttggaaatcattgtaatcttcaaaataagtcaccgtgttggattgaaagcttcaaaatttgaaagaattccatcaaatacttgctgtgtaaatgtttc

SEQ ID NO: 846829 - DNA, 628 bp, Homo sapiens
gttgataggtacagcaaaccaccatgtcacatgtataactatgtatcaaacctgcacattctgcacatgtatcctggaacttaaagtagaatttttacaaaataycctttctcatcactcctatttaacatactattagaacatagaggcagaacatagaaagttctggccaggaaaatcaagcaagagaaagaaataaaagacatgcaaatacaaatagaggaagccaaactatctctgtttggagatgacatgatcctatatctagaaaaccccatggtctcagcccaaaagcttctcaagctgataaacaacttcagcaaagtctcaggatacaaaatcaatgtacaaaagtcactagcattcttatacaccaacaacagtaaagccaagagccaaatcaggagcaaactctcattcacaattgccacaaaaagaataaaatacctaggaatacagcttatgagggaggtaaaatatctctacaaggagaactaccgaccactgctcaaagaaatcagagataacacaaacaaatggaaaatcatttcatgttcatggacaggaagaatcaataccattaaaatggccatgctgcccaaagcaatttacagactcaatgttattc

SEQ ID NO: 846830 - DNA, 568 bp, Homo sapiens
atttatcctccttttcatgattccatacccttgacattaacctttgatgtgtaagcctgatgaatgctttctgaaaaaacatgtaacattatttcaaagtgtgtctacattgcaaaagtgtcttcaaatatgttcagtgtttttcagtcacaatcttcagttgtgaaagcattttcgttgttgatcaaactatgtttcttatcccaaaatgttcctcagttgatgcttgctttttttaaaggcttgagaatttctcttttagttatgtcaagctgattgagttacaaccaaaatgaggtctttttggagtaagtgaaataaatgtttgtggcttcacttcaaatataaatagaccttaaaaaatccatcgtgccatttaggctaatgtgaaggtatgttcatgtatatagttaggtattcaaagatagtcactcaygtttacatatattttgagaaagtatacacttaaatttttatatatacctcacaaaatatctacctctttttaatatattaaatattacaatattaaacattaacaatcttctacaatattaacataaatgat

SEQ ID NO: 846831 - DNA, 660 bp, Homo sapiens
tcgtgaaataccaacgtatatattatatttgtaggtgttgtaaaataacgtcatatatattatatttgtaggtgtcgtaaaataccgacgtatatagtataggtgtcgtgaaataccgacgtacatattatattcctggtgtcgcaaaataacgacatatatattacatttgtaggtgtcgtaaaataccgacgtatatagtataggtgtcgtgaaataccaacgtatatcttatattcgtaggtgtcgtgaaattccgtcgtatatgttatattcgtcggtgtcgtaaaataccgaagtatatgttatattcgtcgctgtcgtaaaataaggacatatatgttacattcgtcggtgtcataaaataccgacgtatatgtcacattcgtcgttgtcgtgaaataccgacgtataccttatattagtcagtgtcgtgaaataccgacgtatatattaaatttgtaggtgtcataaaataacgtcatatatattatatttgtaggtgtcgtaaaataccgacgtatataatataggtgtcgtgaaataccgacrtatgtattatattcgtaggtgtcatgaaattccgtcgtatatgttatattcgtcggtgtcgtaaaataccgacgtatatgttatattcgtcggtgtcgtaaaataccg

SEQ ID NO: 846832 - DNA, 541 bp, Homo sapiens
ttatacatatgtaacaaaactgcacgttgtgcacatgtaccctagaacttaaagtatatatataaaaaaaagttctgagttaaaatactcatcaatttggaattgcattcctagctaattttttttcaarattgaggacaaaatgtaaattaattcataaaagtaatgtaaaataacttttaattatttatatctataagaaacataataacatttaaaataaaatgctgtttcttattttcttaaaaggctgaaatccattttcataaaacttgttcctagctgtgtcctctgtagccatacaaaataaatagaacatttccacttcatgatagcccttaagatacttgaaaacagctctcatagctcctctaagtatttttcccccagttgttgttaaagccgtttttttttaacacgtcattgtaataagtagaacatttctacttcctgctagcccttaagttatttggaaacagctctcatagcctctcgaagtattttttccccagttgttgttaaagccatttttttaacatgt

SEQ ID NO: 846833 - DNA, 567 bp, Homo sapiens
ggctaagcgcagagcacaaccctggcagggtcaagtccgatttcaagcccaacccgatgggattcagaaaagcccgcccagcgtccccaggcccarcagtccacgccacaccgtcggcgacggatttcgtttctattccccgcacgcgccccagcaacgcagaaggagatccagtttcgccacaacgttcccgttggcttgctggtttgaaagttgaagccccggggtagtaaatttggctacaaaatctcaaatctcgttaatcctagacaaaataaaaacataataggccacaaattaactagcttggggcggtttctgtgatggtcacctggcggtgcgcaaggagttatagaaccttgagggggggatcttttctatctctaattacctgtatgtgtaaagaactcaagaagacgtcagaacagggtctcctatcaactgctacctattgctgtctcgcaaacatccccctaaacccgctgcatcgacagcttcgggtgagggtggggtaagaggcacttactgtgaggccgagctcccgcacgaattagcctcacaacagga

SEQ ID NO: 846834 - DNA, 429 bp, Homo sapiens
ttctataattcttcttcacaaatcgctaacttstactttgaaagaaaacctaagcatatgtccaaagcaaagagtgagagatgtaaattgtcacagacaataagaaacaaagcagtagattatctgaaccattgtgtcctttcctccaaagtgatttcctgcatcataatattgcgcattcctggcatcatggtattgcctatgaaatacttatgttttatgtaaataatgacatgtcttcagaagcaacttagaactaaataatatgaaatgggtctgaagcttggcacttatgtatgtgggtgaagcaaaacaaagttgatgttccctccacttacccactctttctttcatcagaccgagcctggcttatagaaccaaggaaagtccagaagcttcaggaaaaaatttattttgcacttcaacatg

SEQ ID NO: 846835 - DNA, 591 bp, Homo sapiens
atgatttagaggagagttatgtttctatatccccctatagattattcactctattcttartagagtatgtagctaacagtagccaggatctttactagtttacacatttagctttgaaataatgcccattcttttcaatgcttcttatttagcaatatctttaacacatattatttttagtcttttttgtagtatttaagagccatttttaatccctttgtttatatatatatatatatatgcacacatgtgtgcacagatacctaataattcactttttctgctaaattatatgtgatctatacatatttaagctctttctaatcattttattttattaagccatatcattacctgcttaataatgaaaaattaatatccaaaactttaaagaaggaaagttttatgtgaaaaaattattttctttatttccaaaggaagtatttttcattgttttgcaagaagagcatatttccctaaagccctacatatttgttaaaccttacctacacgcagcatatcagaaattcatccactctctaaagtgtggttatacctgcttaatcgcacatattcaaacaattttaattt

SEQ ID NO: 846836 - DNA, 678 bp, Homo sapiens
tctagcatgcacctgtttacrgtagagtgatgactgcttcctttcctctgaactttgagctcactttgagggaggagaatggtacggtggacacttgagttctcacttaacattcaccactgggcatgagaagagaaacaggaccatttagaaatttgatagcaggagtccatcactgaaatttccatgaggactggctacatttttcagctttggttgaaatgtgaaagaagcatgaaaacaatactcttcaagattctgggggtgagtagttatggcctttagttttgagggctgtgcaatgcaaactgaggttcttgcagccaatgtttttttctcacataaaggcagtttgcttaaattttccagccccagtttttttcccctactaatttgaaaggagcaaataaactaaatgcctgacatatagtaggaaaagtccaattttttagaatattaactttagtatgtagaactttttttttctttttccttcccatctagtttatactaaccttttctggtcttgaaatttggagttagaagatgtgtcctcagaacttcatgcctacttgtcagattagatgagaacctgtacttgtgagattttgctgggtccatttatcattcccacttgctataaggtagtcccagcatcttttagactttataatagcc

SEQ ID NO: 846837 - DNA, 520 bp, Homo sapiens
agtcaatgttggagcaaagaaaactatcagggatgaagaaggacattgcatagtgataaaaagggtgatccacccagaatatttagcaattttaaattcaccatacaacaaagctttaaaatatgtgaagcaaatgcctacataactgaaaggagaagtagacaaattcccagtgataattgcgggacttcaacatatctcccctaaaagttaatagaatagctagacagaaagtcagcaaggatatagaactgaacatatcaaccaacaggatctaatcaacacttatggagcataccacccaacaataacacagatttttttccaaacacccagggaacatattagtaaaccacagccagggccattaaaaattattaaatcattgaaataattaccgagtgtgttattcaactacagtggaatccaagtaaaaatcagtsatgcacaaacacaagaaaatctccaaacaattggaaactaacacacttctaatagtccctgggtcaaatgactagac

SEQ ID NO: 846838 - DNA, 599 bp, Homo sapiens
tttgacttttatcacccaagattggttttgtaagttcttgagtttcttaaaaatggactcacaaagcatgtatttgtgtctgacttctttcacttagcatattttttgctttgtttctattattccattataagaataagacactcatctctttatgaacgcttagttttgatctttcagtgattataaataaagcttctatgaatattcttacagaagtctttatctgtatgtatattttcattttacttggaataaatacccaaggatgaaactggtaggccatatgccacacacgtaaatatgcaaaaaagcattccaaatatgttttgtcactttacaattttacgagacttattaatagatgccaacatccccaccaatatttgaaatcaccaaattttgaaatcttagtcactccagtagatgcaatgtaatagcccactctgtttttttatttacatttcattgatgattaataccatttagcaccttaactttttactgtggaaatttttaactcattttgtcttttattttacayattgtattgagtttgtctctttttaaatttgtttttaattgtcaaataaaaattg

SEQ ID NO: 846839 - DNA, 428 bp, Homo sapiens
aagaacaataattatgcaggatatcaaataaaattacatgaaaaaatttaagtgatcaaataatattcaggaaattgggttaaataagacctcttgaagcctttaatactctaccttagartgtgaatatccataaatgaggctctaatatgcaaccgtttccaaacatatcttatcacattattatttttcaatgaagcattttacaggagtaaagttgatctatatttattagaggtatctcggtaaccacagtaaggatgaagcagctcaaccatctaaggtgaggtggaatggatttcttaaggtgagaaagcagagccagaagctgaaggctggaactgcccagtgcaactgtccttgaagaagaggagcgttagaatggcccatcccacagcctcggcaaacatgtacaccagaagcatgga

SEQ ID NO: 846840 - DNA, 488 bp, Homo sapiens
gtgggtttaggcgcaggtggaaatgaagtattgcaaaaatatctgcagtttggtgagcaattaatcaggaaataatgagtgctatactggaataatcaccttaaaagtaaaaccttcaatgaaagcaaatctttcagaagttcaatatgggaattaaattactttaaaattgtagaatgttctaaacttttgcatttattgttttgaaaatatttttcaatggtaggcattttcaatcatttattttattacaaggggttaattctgggattattttttgctacttctcaagttaactatgaaaaccataattctttttttatcttttggttgggtttaattatgacaatgtcagtaatatggtttagttgtgtccccacccaaatctcatcttgaatttccacatgttatgggaagaacttggtgggaggtwattgaatcatgggggcaggtctttcccatgctattcctgtgcttgtgaataggtc

SEQ ID NO: 846841 - DNA, 579 bp, Homo sapiens
acactctaaagattcttccaccactgacttactatctgctttatttctcttcatatccttttatctactggatattaggatggttccccttacaccatgttgccattttcatcccgttttcactacataaaactcacctcagtgaattcatctcaagaaagttttgctgtgcttccccgttaatgctcttgaacacctgcctgctgtgcttccccattaatgctcttgaacacctgcctcctttctcctttaactcttctttggttatcttgagataatctctccaagtctttctgttataattgtgcgccctaaaactttgaaaataatagaagaattttactgagaaatgtgctccaaggaattgatgtttttacctcttagaggcgatccagacaccccaaatctaaaaatgaaactccccaaagttctatctactattttcttaaaactacatttctgttgcatgtaatattttaaattataataacagtgttttcttacttktgtgtaaatagtttatatttctagctcaaaatttaagctgtttttttttggtattagtcttggaatctaaac

SEQ ID NO: 846842 - DNA, 535 bp, Homo sapiens
actgaaatgaacctcatcttttttattgtcatattgctaccacaaatatttgtggaatattggcaagtgataacttgtkgctacgtagctgtcaaggtacattatggtactgtggcagtcgaactttgattggagaaacagctttcagctcaatttttattttattgccaggattccattaagattccttatcaacttctaggagacaatccacatccccaacactttctaaagcttcccattactgtagagctgggagatgcttcattttggttaaagttaaatttgggcctcattgtaacttaaatctgatacccctttgaaaaggggatgcattttaaattggttatttcacttatttgaagagtaggataagaaagcaacggtcattggtaccaaaaagggaagctgacctgccaactatgtgtctatacatgacccagacaaagccattcgtgtaaggatgtgtttcctgccctgatgaatcttctgggtgtctagggatatctttctctttttgattttctatgaattc

SEQ ID NO: 846843 - DNA, 508 bp, Homo sapiens
attacttcttatttatttatttttggacaatttaagttgatttttataarttcctgtttatattttagttctcatactgtattgtttattcacatggttttattatattattcaaaaattaaaaataaatttaaaaagtaagagagggtcatgcattaacaccgataagagaatgtcatcaaccacagactaagattaatctgattttgtatatttaaggttcagaagaggggttctggaagaggtagataggaaatcctagccctgataaagacctcaaagattgcctctaaggaatgtcttaatgggaaaggcagaagatcttaaaatttttcactaatgcactgtgcacagcccattcctctccttttccaactcaattcatctactcagagatgcagctgatttaagggtaatcatgactaggaatgtctttgagtgctttgaaagaaagttgatgaaaactcatcacgccctttttttggtctgatggcagtatcacacaaat

SEQ ID NO: 846844 - DNA, 535 bp, Homo sapiens
tgtttgtttttttgagatagagtctcagtctgtcacccaagctggagtgcaaagtcgcaatatcagcgattctcatgcctcagcctcccgagtagctgggattacaggcgtgtgccaccatgcccggctaatttttgtatttttaagagtgatggggtttcaccatgttggccaggctggtcttaaactcctggcctcaagtgatccatccgcctcagcctcccaacgtgctgggattacaggcgtgagccaccgcacccggccaattgatttcattgttttcttttcctttttttaaaccaaccagggacatttaatttaaaaaaatacaagcaagttatccaggacctaatctgctaagcagtgttctccccaagaggatgaagccctgctggctggctctgacattcaattcagactgaaaacacagtaactcctctggcccttgctgggaaatgtcctgcscaggccatgggcagcactccagtgcagctgacctcccacaaggcccccaaacacatgatcccaccaaagg

SEQ ID NO: 846845 - DNA, 588 bp, Homo sapiens
ccaggtgtggtggctcatgcctgtaataccagcactttgggaggccaacgtgcgtgggtgggtggatcacttgaggtcaggagttcgagaccagcctggccaatatgatgaaactctctctctctctctactaaaaatacaaaaaaaaaaaaaaaaattagctgggcatggtggctcatgcctgtaatcccagctacttgggaagctgaggcacgggaatcacttgaacctgggagacggaggttgcggtaagccaagattgcttcactgcactccagcctgggcgacggagcaagactccgtctcaaagaaaaaacaaacaaacaaaaaaacagtggagctgcaggagaaaaaacactgggatagctcctcatactcctgccctaaatgttaccaagtaacatcaacgaaaagatggaggttctcagctgctgggatggaagaaaagaacggtaaatggggatctacaaacagaaatagcgagtggactacttctcttcctgccctaaaatgcaatacagtcrtaatgttaacaagtgggtctgccctatagatgttgacagaaaatagagtggaaaaaagaaagac

SEQ ID NO: 846846 - DNA, 626 bp, Homo sapiens
gaggaggaactggaacgagctggtccctggcaggcctccttccccagcgaaggcaccgacagggccctggagggttcccatagtgggcggaaggaaagccrcctcccccaaggctcaggaatgcccagaatggttgtttcctcacggcctacaagcccatgtgacccaggctgagggtcccacgtttggggaagtgcctgggaaggggaaaggacaagggtagcccgtggctgcatctgggaccttccagactgaccaagcctggtcgctcctcctccccatcagcttctctggctgcagcattgagtttggccactgcctgggaaagctgagcacagccaccgctgccagccacagtcctgagctcttggcccttgcctcagctcctccccggaggttggccatcttgctcaggtctggctgggagcatcagcctttaggccaagccagcagcagccagggtagcctaaggcctccacctggtagggcagtggggaaggtatagagaacctagaggggaggcaggggggtcctatggttacaggcttaggtttggagccatacagactcatgtccgaatcctcactttgtcacttcccagctgtgtccatttttggaaagactca

SEQ ID NO: 846847 - DNA, 599 bp, Homo sapiens
tagatgcaaaaatcctcaacaaaatcttagctagccaaattcaacaacacattaaaaagatcattcatcatgaccaaatgggactcatcccagtgatgcaaagayggggcaatgcaaataaacatacacatgcaacatatgcaaacaaacaaacataatacatcacattcacagaatcaagaacaaaaaccatatgattattccaacagatgctgaaaaagcatttgataaaattcaatgtccctttatgataaaaacccttataaaaatgggtaatcaaggaacatacctcaaactaataaaggccatatatgacaaagccacagctaacataatactgaagggggaaaatttgaaggcctttcctgtaagaactgaaataagacaaggatggctattttcaccactattattcaacataatactgcaggtcttggtcagagcaattaggcaagagaaagaaataaaaggcatcaaaattggaaaagatggagtcaaattagtcttgttcacagaaggcataatcttgtacttagaaaaacctaaaaattcaaccaaaaaactgttaaaactgataaatgaattcaacaacattgcaa

SEQ ID NO: 846848 - DNA, 605 bp, Homo sapiens
gtgttcacagcagtacaaccagcaacgtgaagagacaagaaaacgctgccatcttaggaagtcaaaaaacccccacaaaacccaacaaagacctgagcgtttattcagcatggaaaatagaggactcaagggggacctgactgctgtttcttaatacctgaagaactcttgtggggaattttgtgggatcctagaggccacaatgggggcctgtggcctgaagccacagggatgctgatgaccacagaaggaagggcttttaaaaagtgttcttttctgattataaaagtaacataggtcatagtagaaatttaaaaactacagatgagctggatgtggtggctcacatctgtaatcccagtgctttgggaggctgaattgggaggattgcttgaggccaggagttcaaaaccaacctgggcaacatagcaagattctgtctctacaaaacataaaaaaaaaaaagttggatgtggtggcgtgtgcctgtagtcccagctactagggaggctgaagcgggaggatygcttgagcctgggaggttgaggctgcagtgggccataatcatgccactgcactccagcctaggcgacagagtgagaatc

SEQ ID NO: 846849 - DNA, 577 bp, Homo sapiens
gggcttagatgcctttttgaacttggctaatttttcctgagatggctatttgggtaaatggccctgaggaagcatcgattcttaagtggcagcactggtttccagggagaagagaacaaagtttgtaaaatgctgtgctggtgaggcccaaaggggagggacagtctgctaccaagtaggaagcccacctgactctggaaatgggccctcctgaggtgccctcctgttcattcccatctcccactaaaaacaacccacagagttcagtgagctacctgtcacagagctgcagcctcagccaagacattgttccagcaccaaatgacctgtggcttctttaggtgtgaatgtaaaggacctgcctttaaataccaaaaattagctgtgcttggtggtgggcacctgtaatcccagcttctcaggaggctgaggcaggagaattgcttgaacctgggaggtggaggttgcagtgagccgagattgcaaactatactgcagcctgggcagcagagtgagactccatctcaaawaataataataataattaagaattaaaagcccttgcccatgaagcatc

SEQ ID NO: 846850 - DNA, 634 bp, Homo sapiens
tgtctttactaaaaaatacaaaaattagccaggcatggtagtaatcccagctacttgggaggctgaggcaggagactggcgttaaccygggaggtggagcttgcagtgagccgagatcaccccattgcactccagcctgggcaacattgcaagactccgtctcaaaaaaaagaataatctgtcagcaggtcagcctggacaatgaagattgaatggcaagggcaggggcatctgttaactaggttattgctcataatcttactgtctttccttgttttttgttaaggtgactttcttgaaagcataatttccaaatgcatattttacatctggcattaaagtaaaatccattaaatgtgctttggtatctactgttgtattaatcctttctcatactgccataaagacatacctgaggctgggtaatttataaagaaaagaagtttaattggctcatagttccacaggctgtacaggaaacatggctagggaggcctcaggagaatcacaatcatggtggaaggcaaagaggaaggaggcacgtcttccatggctggagcaggaggaagagagtgaagggggaggggctacagactttaaaacaaccagatgtcccgagagctccatcaggaga

SEQ ID NO: 846851 - DNA, 634 bp, Homo sapiens
gatcctggggtcaagattcttcacttctcttcctggctggctacagagccctgaatatactgcttctaggagaccagggaagatgacaaggaggtttagtttttagattgtttctacttgctttggatttgaatwgaaatttttttccctcccttgttttgctgagaaatagtttggtttcaatggaagtagattttctagaaccttgaaccacgattgtaaattggtggctcatgggccagatgtagctggcaaatgtgttttttggcttctttaatgcttaaattattttcattagtagccaacatgtaaaagccagagtatttcacataaaaatccagattcagccaggtgcagtgactctcacctctgtgatcccagcactttgagaggctgaggcaggaggattgcttgagcccaggattttgagaccagtctgggcaacgtattgagaactcctctctacaaaaaattaaaaattagctaggtgtggtgacacatacctgtagtcccagctactcaggaggctgaggcaggaggatcacttgagcccaggaggttgaggttgcagtgagctgtgatcacaccactgtgctccagtctgggcgacagagtgagaccctgtctcaaaaca

SEQ ID NO: 846852 - DNA, 442 bp, Homo sapiens
attctcttgtatctcacagagtttcctcaagatccttatttcaaattccttcttagccatttgatatactcttaaaatttagggtctgttaatgggggattattgtgtttctttgrggatgtaatgtttccttgctttttatgtttcttgtggccctgaattgatttttgcacatctggtggaacaggtgcctcttccaatgttatggagctttcatagagaaatattttttccaatagttgtctcctagtgttcattatggagtagggcgatttgactttggttctaggtgggtgcggtaatacagtcttcatgtgacttctttggctgtaatcagcatttagaggtgtctctgagtgcctcagtggcctagatggtgagtgtttgtggagacagtggtatggcttttcttggggtgggagccatcagtcggattcgttcc

SEQ ID NO: 846853 - DNA, 554 bp, Homo sapiens
gtaagtaaatcaacagttaagtgtcacaaacctgtaatataagtgaggtctaggtcaaatccatccctttcgtatcaccttttgtttcctgaaacctgagagtttaaaaccattattagttggtgaaacataaatcaacataaaaataaagaacattatacagtatagatatcaacccttgccaatgggtcccaaaacacaaaatatttttctgaatcgtaagcatgttttgcccacttaccagccttcttatcagctttccaagttgtctttttagatgagccagacgaaaaactcttatcagaatgataagtcgtagaagtcgaaataaacgtgtccatctaaaaataaacttaaaagatcaatttttgcttcagaaacagacaattttatgaatataaattaagtttagagcagcagttgttaaccagggacaattttccctcctctcctcaatcacctacatgggggatatttggcagtgtcttgaggcatttttggttttcacaactggtgtgcytgtgtgtgcgcgcatgcatgcgctacttccatct

SEQ ID NO: 846854 - DNA, 526 bp, Homo sapiens
ttgtgcagatggaagaaaaataatattaatatgttactattaatcttatacaaaagccgtttctttgcaagtcttaaagtccagcttaaaccaaatttccatgataaattagattacattagatggggcacatggctacttagaaaccgatggacaggaaatgctttttggttttgttttttatttcagtctttctcattgaaagagtgatatatatatatatatcgctctgtcacctgggctgcagtgcaatagtgtgatctcagctcactccaatctccgcctcccaggttcaagcgattcttccacctaggcctcccgagcagctggcattgcaggcactcgccatcatgtctggctaatttttttatttttaatagagacggggtttcaccgtgttagccaggctggtcttgaactcctgacctcaggtgatccacctgccttggcctcccagagtgctgggaktacaggcgtgagctaccacacctggccaagtctcagatatatttaatacgtggtgttt

SEQ ID NO: 846855 - DNA, 529 bp, Homo sapiens
tgaaagagaacctttggcccaataggggttcaagctcttccccaggcccaaacagctttggtctggaggggrtaaaactgggagtcatgaaggtcaacctcgaaggtgaacttaaacagaactatggtgtgcctgctcaagtgagtaaatgtcatgtattagctgccttttgccatgtggctttgttttgcccgtaaagagggctggagatattttctcacccattgtctacgagtccatccacatgacgtgcttccattctgtaagttggaactgacggtgtgcaggttccaagcctaggcctcaagagacctcatgtattgctccctgtgctctgccattgccacaaggaccacatttctgcatcagtctgtctcaggaaaaagacagatgtgaggggcaaagccgagccatctcagctgagccttgcctcccatcagctgaccatcagccaatccacagatctgtgaccataaatgactataagccaatagctctagggtagttttgttatgcagcaattttgtgg

SEQ ID NO: 846856 - DNA, 529 bp, Homo sapiens
tgaaagagaacctttggcccaataggggttcaagctcttccccaggcccaaacagctttggtctggaggggataaaactgggagtcatgaaggtcaacctygaaggtgaacttaaacagaactatggtgtgcctgctcaagtgagtaaatgtcatgtattagctgccttttgccatgtggctttgttttgcccgtaaagagggctggagatattttctcacccattgtctacgagtccatccacatgacgtgcttccattctgtaagttggaactgacggtgtgcaggttccaagcctaggcctcaagagacctcatgtattgctccctgtgctctgccattgccacaaggaccacatttctgcatcagtctgtctcaggaaaaagacagatgtgaggggcaaagccgagccatctcagctgagccttgcctcccatcagctgaccatcagccaatccacagatctgtgaccataaatgactataagccaatagctctagggtagttttgttatgcagcaattttgtgg

SEQ ID NO: 846857 - DNA, 568 bp, Homo sapiens
ccatgccacttcctcctcaagcccacctcttccctccaaatacaagttatctcttcctcttctatagtttgcayagaactcttaagacatacataaaattaaatccagcaaatactgattccacctctgctatgctctggggcgctgctggggttaccatagtgaatgagtctgacacagtaaccctggaggggacaggggttggggcgctgtagatgtgtgcagccaggggacttattttggtccagggttcatggaatgcttctttgaaaaaaaaaaaaaacagaataggtcagtggggctcggccatgtgtagggcagatggtgatagacattccagactgagggaactgagtgtgcaaaagcacagaggggaagaaagctcagggacattccaggggcccaaagaacttcagtatgagtgtcacatggagaaccaagggtgagagactcaaggcactgagggctgtaggggtgtcagggccagataaaggaagtccttgcatgcgtcgcagctgagtttcattcccgggctaagaggaagtccttcaatgctagtaagcaaggg

SEQ ID NO: 846858 - DNA, 662 bp, Homo sapiens
cctgcttatgaaaacttggggcatcaatatcgtctcatcactcaggcgcccttagcgaatctggacagatcgaggggcgcagtcttggcttccggaccaggactttctttttttgagatctatttagctagtttagaaaaatacaccttatgcgaacatatacagctattttctcgccctccactccagtggtctgcaagcccctggtgctagtgtgaatattcctgagtcctgagcgggttcccgcccgtgcagagccaagaacactgagcggaggtcactgtaagttcagagccgtgcatcctggttagaattgggagaaaaaattctaagcccgcccggagctgctcagaaaagatgggtctcggtccagcgcccccttaaagtcctcagtgcgcgaaagtcttggattactgtgctttgcgcaaattggacgccacgcctgaagggcccgcggaatcaatcgcttgccttctgtggggtcctggcatcagcgtgaccaggacatgctattattattggaaaccgagwcttgaagtggacccccagcctccacccaagccctgcggccagggaataattctaagggctctcccctttggatgtctagggtcggggcggtctcggctccctggatcctctggtgtcccggcaccgagggg

SEQ ID NO: 846859 - DNA, 613 bp, Homo sapiens
gttactttttgtatatggtgtatggtaaggatccaactttgttcttttctggtgtggatatccaattttcccaataccgtttgttgaagagtcctttctttactgaatgaggatctttggtacttcttggcacctttggtgaaaatcacttgaaaatatatgcaagggtttatttgtgggccctcgggtctattttcatgaatctctatgtctagctttatgctttgtaggaggttttgaaatcaggtagtgagacctccgactttctttttaaaatttgttttggttatttcatgtcctttgagattccatatgaatgtgagaataaatttttcccatttctgttaaacaaaatttaggattttgataggaattgcattcactttgtagatcattttgggtagtactgtcattttaacaatattaagtcttccaatccataaatgtgggatgcctttccatttatttattgtctttaatttctttcagcaatttttttttgtagttgctgtacayaagtcttttacctccttggttacgtttatccccaaatattttattctttttgatgttttataaatggaattgttttaatttcctttttgaattgtac

SEQ ID NO: 846860 - DNA, 529 bp, Homo sapiens
tcccaaagtgctgggattacaggcataagccactgcaactggcctcccatcttttaatttacctgtaaaactttgtcttagtcagcttggactgctataacaaattaccagttctagaggctgggaagtcaagatcaagagatcaaagcaacagcaaatgtgctatctggtgagtgctcattcttctggtttataaatggcatcttctagctgtgttcccacatggtagaaaaggcaaacaagcttccatcaggcctcttttataaggatgctaatctcattcatgaaggcttcactctaattaatcggtcaccttccaaaaggccccacctcttaatactatcacactggggattaggtttcaatatgaatctgggggggtgacccaaacattcagaccatagctgccctcytccgggttcagactgccattttcttattgtatcctcacatggtggaaagagtgctagagagctctttagggtcccttttatatgggcattagtcccgttgatgagggttctaccct

SEQ ID NO: 846861 - DNA, 655 bp, Homo sapiens
aatttcatatataaattccatgttcccttgtctgaaatttttctcattctattctctctacctaaaattttctgtttctcattttgtttactaagttaytgtgcatttcttctttctgtaattctcatggccctccaatagcacattgaagtctgtgtagttgttgcttgtttgtgtatttgttgatttttttaaaagatgttagaatctaacatttatcctcttgtatttctttattatttacctgaatatcacaagtactttaagcataacaagaaatcagtatgtatttttaaatgaatgaatagtttggcatcacagaaagaacagaaaataagaggtcattcacctctataactcagctgagaagcttgtattcaagcaaatgaatacaggctctggggatgttatcgatgttgggattttttatttgtgattgtctccttcaaacagttcacttattaaccctcaggtgtcagttctgtgtatttcttaatttgttctttatagcccctccacacttttcaacattcatttaatcatgtgtatctagtaaactcctcatatattggcaaagttaaggaaatgaaaattcaatgacagacctttgcatcatttctatggttctaattacaaattattattatttactttt

SEQ ID NO: 846862 - DNA, 392 bp, Homo sapiens
atcagaactaaagggcactttcagtaagtattgtttttttaacctcttcatctctccaacccctggagcatttctctgatggcaactgaagggagtttgagatctgcagaaaacattgaatgtgragaaaatgtaagcccaatttagaaaaaatacaccattcctgtgcttggtttctccagaaggtcataaatgcagcccctgtgacacaaactggagatattatggagatagctgctatgggttcttcaggcacaacttaacatgggaagagagtaagcagtactgcactgacatgaatgctactctcctgaagattgacaaccggaacattgtggtaagaagattcttatgtcaaatattttggaggcaagggagagaaacctcaaatg

SEQ ID NO: 846863 - DNA, 580 bp, Homo sapiens
aataaagataaaataacaaataaaaataaaaatggaagatttcaccatgtgtcatttaacaaggtgagaagaaaatgggttgctctaggatatgcttcaatgtgaaagggcatatgtcatagattggagactgaaaagttaattccacatggaaaacagaaagatttgtttataataatacaactcaaaatgatttaaaatttttcatatgacacaccagaataagaacattgctaatacattggaaactcaccaatcattgaatgtggtgccatttgtccatttccaagaatctccttgtttcctgcttagtccaatccagtgcatatcagttcctgcgtacctcttcaaaaattcctttcacaaaacaaagggaatcagcgattacttaatatgttacagcacattgctgaacatgcttcccaccccaattattctatcttttaggattcacattctaatttgtcttccctgatgcttctataacaacaaacagcacagatgttgatgtttgggttagttttatcagaaagattttcawtttgcttttttgcatcttaagtatctccagataattggg

SEQ ID NO: 846864 - DNA, 576 bp, Homo sapiens
agtgtggaaggagtagaggaagtgaaacaagctgttgctctcctcctatctttctccaaattttacctcaggaccctgatggcaggaagaaaaggacactatgtgacttcagtgcctaacaacacagtcctggaagtttatgctgttgatactatagcaaacattgtaatcattttgtgagggattggattcttccctttatactgtagcataaacattgatatatcaatgtgtttagccatttagaaattataaagaaggggagtgtaactgacatttcattgaacatacctttcatatattacaaaattggtctattaatgctgaaataaatgttcacatttggccactctttatcaccatcactgtagtgaaacaggtattctttactcaatagattacgatacacataagtaaacaaataaaatctaaagaaaagatttcctacatttatattttatgccatrcatataaacatgtgaaattcaaaattcaaaacggaggaaaacaggatggttaatcatgatacatttctggttatactgtaattatttgggggaacttcacagtactggt

SEQ ID NO: 846865 - DNA, 459 bp, Homo sapiens
aaggcaaagaaaaacctcctgcagtgtgattgcttctcctatcagagtcccatctygaaaacctgaaagtcaaacctgataaatgatgtagacatatcaagaaaagccaagaggacagaatcaagctatactggaggaaaacgttgcttctctagaattttaaaataaatatttcagcatcagaccatgacagcagttaaggcaagagggaaaaaaaagatacaagaactgacaaagttgaaggagatagtttcatttcaggttccttcaaggggagacaagctgacagcaacaaaacacaagaaagctgcactttggagatatagatctgagaagtattcaaaaagtaacagattatagagtcaaaatcaaaacctctcatccaatcaatattttaagaaaaccttgttctaacccaggggactaatctatatctctctcccctagttactggatcct

SEQ ID NO: 846866 - DNA, 481 bp, Homo sapiens
gtggagaaagataattggacaaaaagagatattatctaatagtaatamacaggggagtggagtggggtggaggacttagctaggtctgtttattcagattttttcctgtgtctctgtatgatatcccttgtccccatggggcaggacacctgtcacatgaggatcttcaggggtgaaaggaggaaatcagagagtgacctttgtaagttttatagcttactttgtgggataggaattttagtttccatgacttgctttaggggagcaaggatggtgggagaaaggagggcaagagaaggtgagagacctgcaggcttctgcagcctccaatctccttcagtcaaaatacttagcatgccaaggcaccatactctggagtatggtgttctgagccccgtcaggttcaataaatatatgaactctattagtcatctggaaaatgcaaattaaaataaaaacaagctaccattttaaactattg

SEQ ID NO: 846867 - DNA, 629 bp, Homo sapiens
ccacaagagatgagtaagtggagaagaacatggtgttcacagagagagaaatatagtagatagaattaatacagtttcaaattatgtactttcctgctgttgggtggagtrttctgtaaatgtaacttagtcaagttacttgatagcattgttcagttattctatatctttactgactttctgcttattttttctatgaaatattaagaaatgagtataaaatctccaatgataattttggatttttctatttctcctttcttttatgtcaactttgtctcctgtattttgaagctctgtttttaggtgcatatgcacttaagattgttatgtctctttagagaaataaccctttatcattaagtgatgtctgtctttatccctattaacatttctcgctccaatttctgctttgtctagtattgacataatcattctgaatttcttttgatttcttttgcatggtatatatttcccttctttttacttttaatgaaggtatgtctttatatttaaaatgggttgctgataggttatagttcaatattccatttttattcaatctgttcttctctatcatttaattggtctgtctggaccaattatatttaatgtacttattaatatgg

SEQ ID NO: 846868 - DNA, 618 bp, Homo sapiens
tggtacctgtgacatagtgataagagctacgaaatgctgatgacatactagatgacaataaggccctggctgaagcatttcttatgcattgtgtttcacaataatcatataaaggaagtgttagttatactcctcattttacagatgaggaaaatgaagttcagagaggtaagtgacttgccattggtcacacagcttgtaagtagaagaccaagacttgagcccaggtgggacggctccaaagcccatgcccttacccattatgtgatatggcctcctggcactgggcaagggacaacagaatacatagtcaacccaattcctgctccccagggtcacgctcttgctgggaagataagacaaatacacacaaaatagagattaatactaagaagtattatgattatgaatagctgcattatgctacacagaaaacaaataaatacaagtacaggaaagagactgtgggtcattgcatgggatgtctgtgagccctcaaatactcattgctcattggggtccacctggcaggggagaggaattctgggaggatttgrtcatgaattttgaaagtgagaatctagaatggacaataaaagaaagaaaaagaaaaagaaa

SEQ ID NO: 846869 - DNA, 628 bp, Homo sapiens
ctttagtaaccatgagaggtgctggtaagcgggctggaggatggaatcaggaaacctagcctgagtcttggctgggtcaactagttgtgtgacctgagtttagctgctgtgtctctcagtggttcattttcctcctctgtagaatgggaataatacaacctgtagagatctctatgtaaaggggacctgtcagtggtgcagatgtgctgggctacagtgattacatgtcaagagcctcaggtcttcccccaggctcactctgacttggagatttgcttctggctcctgtaaaccacttctgggagtcacctctggcagtgtgccataggtctgcaacatctaaatgcaaggtgaatgtggaagtttgcatacctgccctctacccccactgtcagaggcatttgaaccagagggactccatcttgaacaggggctgggtaaaataaggccgagacctactgggctgcattcccaggaggttaggcattcttagtcacragatgagatagaaggtcagcagaagatacaggtcacaagaccttgctgataaaatgggttgcggtgaagaagctggccaaaactcaccaaaaccaagatggcgttgaaagtgacctctggttgtcctcac

SEQ ID NO: 846870 - DNA, 623 bp, Homo sapiens
tcaggcatatgggcatatggaatcagtgaaggaggcatttagatacaaaggttcattcctttgactccagagaaaaatccattattgaaagtggcagatatacaggttggctgacttctttatttcatatttaccatatgagttgctgggtcatatttttttcaactgaacataaatatgagatacacacacacacaagcgcattttaaaatgcccctgtccttatgattgtgagaaagataagtgaagctgttttaaggtagatacaactaaacaaaggatagaggaagaaaatattaaactgtgaaaaaaccttacaaatatagtgattaacagcagcaaaattgaagtcaatgtccaatactgaggttggtggactgattttcattttaaatgtttgcccaaactaggaagaactacaaagatactcatatatcctgcaatccaatacttttccccctagaattttagggtaagtaaatcattcaatagaaaatamagacctattcaaaaagatcctcatagaggcattatttataattttgataaaattatgaaaaaattcaatatccaataatagcctgttaaataaactgaggtataactatggaatgaaatatgca

SEQ ID NO: 846871 - DNA, 623 bp, Homo sapiens
tcaggcatatgggcatatggaatcagtgaaggaggcatttagatacaaaggttcattcctttgactccagagaaaaatccattattgaaagtggcagatatacaggttggctgacttctttatttcatatttaccatatgagttgctgggtcatatttttttcaactgaacataaatatgagatacacacacacacaagcgcattttaaaatgcccctgtccttatgattgtgagaaagataagtgaagctgttttaaggtagatacaactaaacaaaggatagaggaagaaaatattaaactgtgaaaaaaccttacaaatatagtgattaacagcagcaaaattgaagtcaatgtccaatactgaggttggtggactgattttcattttaaatgtttgcccaaactaggaagaactacaaagatactcatatatcctgcaatccaatacttttccccctagaattttagggtaagtaaatcattcaatagaaaataaagacctattcamaaagatcctcatagaggcattatttataattttgataaaattatgaaaaaattcaatatccaataatagcctgttaaataaactgaggtataactatggaatgaaatatgca

SEQ ID NO: 846872 - DNA, 502 bp, Homo sapiens
gcctcagccagatgaggaatactgtyttgtgtaaatatattcaaggaaaacacctccactacctcactgacttcataattggaatgtcacatggtttttttaatcaagatgcagtgaactgagattctgaaactccactgtagtttactttgcctgtaccattaatgccaatgtttttataaatcacttgtacatagtacatatgggaatagttgcatatgggaatttaaaccaacatgtggctgagcctttttttttttaatcttcgtaacatgtttaaaaaaaaacagtgattttaactgcatatttgaacctacaaactggtaaatcttattaacaaaaagaatgtacttaaggccctctttatttatagtgtcgagttatttttgaattttgcttaaaatctatttttcatatgaaaataaaagataacaatcaacttgggtctgtcctctgactttacacttcacaggtcattctatggaaaagccgtcaaattttt

SEQ ID NO: 846873 - DNA, 619 bp, Homo sapiens
gcaggagaatcgattgaacccgggaaggggaggttgaagtgagtcgagattgtgccattacacttcagcctaggcaacagagtgagactctgtcttcaaaaaacacaacamaacaaaacaaaaaaacaaaaggaagaaagaaatcagttgggtttcaaaggaatagtatttatgaaattaataagccattttttaagtgaagaagaaaataagaaaaggagaaagaaagtaagtggaaaaattaaaaggacatattttttcatccttagttctcttcaattgtttagaagtttgaaggatcaatatggagatgaaatccgtcatctctgagtacatttgaaaaggatgctgagttgcttaggatttgttaaaactagtacccatatatactcttgataggagagtgaggtgataaaatacactgagaaaaatttggctttatatatcaaaataaagtatatatcttagacccaacaattccacttttaggattttgccccataatatattcacacaagtatgtaataattttaatcataaggatatttattgcaacatttttataatagtaaacagttggaagcagtctaaccgcccagtgacagacaaaaccggttaa

SEQ ID NO: 846874 - DNA, 644 bp, Homo sapiens
agtagtttgagtatataaataccattggcttcaatagtgtttaatcttatgcaccctttcctgcagatttaaggctaagaaccttttgcatcagagatttaatttttttttaatttttaatttttttaaatgtatttattttctaatgaggtctcactctgtcacacaggctggagtgccatgacacaattatggctcactgcaatctctgccttctgggctcaagcaatcctcctgcctcaacttcctgagtaactgtcgctgcaggcacatatcactatgcctggctaatttttgaatttttttgtagagacggggttttgctatgttgcacaggctgggacatcagatattttttaaagcaatattgctattatttttgtctttgtgctttaatagctagttactgatttccttatttggtacatgcatacaaaaggacaagtctagaattgaaaggcataattgttatgtatggatttaaaaatacataaatatatatttaacacaaacatacatgcatatacatacacatatatacccttattaatgctaactattaggccctttctcagtgtatagaaacaaatataactraaaagttaatcttctacataatcctattgagtctggtacctattatg

SEQ ID NO: 846875 - DNA, 620 bp, Homo sapiens
cctgtaatcccagctactgaggaggctaaggcaggagarttgcttaaactcgggacatttcaatgagctgagatctagccactgcattccagcctgggcaacacagtgaaactccgtctcaaaacaaaacaaaacaaaaaaagtgcaggcaacacattataatcaatattaaaagtttttatgttgaaagatggataagaattaaaactttgatttttcaactgagaaatttagttgagatatttgaaattactggaaagcaaaaggaaattttaatgtactgcggagtagcctagggtagtatgtgtatgtatttctactaaatgcaaaagaaagtaccagataaaaatgcaataggcttctacttctagttcaggatgggaaaagatggggaagaccaaaaaagatctgcataatgcacaaatccatgtgatttctgaagggagtggacacgatcagtcttgataaactgataaccagttagtggatctgcaggtttcatctgtggtattttcttttagatgatttgtgtagtgactaaaaaacagtcaatacatttaaataaactgcacatggtgcacatgtactctaaaacttaaagtataataaaaaaataaata

SEQ ID NO: 846876 - DNA, 598 bp, Homo sapiens
acctgaaagtgaggaccttaccctggctgggggagcattaacaagccagtctttaaaagctgkcaatatttaagctaaggtacagagcatagaggttaagggtcaagactgtgatattgggctgggcacggtgactcatgcctgtaatcccagcactttgggaggccgaggtgggaggatcacttgaagtcaggagttcaagaccagccttgacaacatggtgaaaccttgtatttcctaaaaatacaaaaattggctgggcatggtggcatgcacctgtaattccagctactccagaggctgagatgcaagaatcgcttgaacccgggaggtggaggttgcagtgagccgagattgcaccactgcgacaaaggaagactgtatctcaaaaaaaaaacaaaaaaaaaaaaacaaaaaagactgtgatattagactgcactggatttaatcttgacttaaagtgtgaccttgggcaaaaggcttagtctcaaggagcctcagttttcccatctgtgaaacttggataataatagtacctacttcacagggctattgcatggatttgggaagatgctgcacataaggggcttagcatcac

SEQ ID NO: 846877 - DNA, 536 bp, Homo sapiens
aggtaattaatctctaacaatctgctatcaaattcatttcctttaggaatgaccaatttgcaaagaggaccaatttgcaaagagaaatragagtaaagacttagagaaacggcattggaaggaatctctttgggaacagaagtgtccagttgggtgttctgaacatctgtataggggatacctatttagttagcagtgactccaaaggcccaaaattgtatccatagctgattaatgagcactccaaaatacgtgaatgggtacacatgctggggtatagctcaataagatcatgaaaaatcagtgtcagtatggacacaacaaaactaatgattatttagtaagaaatgatgatttatggaaattgttcaaagaaacatagaatttcagagcaaaaaggaactagggtccaaaagcctttcctgtcaactctgtagcaacactatccagttgaaatttctgtgacgatggaaaggttctgcactgcactaattgatagccactagccatgtgtgactaatgagcatttgaagtgt

SEQ ID NO: 846878 - DNA, 613 bp, Homo sapiens
gttgaaatttctgtgacgatggaaaggttctgcactgcactaattgatagccactagccatgtgtgaytaatgagcatttgaagtgtggctaatgcaactgaggaacttttaattttatttaattttaattaaatttaaacttatagtaatgaagtgcacagcactactgcataccatggtagcagtccagcctttgtctaaatccttttgatgacagggaacatccttccttaccattaagcaccctccatttagaaagagtgcttcagagctcatcatttaaaaagttttgcttcaagttgaactataatctgccaactacagatccacccccctgtggtttactcctcacctcctctcctagaccacacagaataactgctcacagtctcttactgttttttagtatttgagaagcttcaaaatgctgtagtatcatagaatttcagccatggaaggggcatggtttagcttctttgttgaacctcccctcttagtgggtttttctctaggctgaaaaaattttgttttgttatttatttatttatttattttgagacagtcttgttctgtcacccaggatggagtgctgtggcacaaacatgactcact

SEQ ID NO: 846879 - DNA, 579 bp, Homo sapiens
aaattgaagggaacggtgactattcaacaggctggttgcagaaatttaagaaaagacrtagcattaaatctgtaaagacttgtgataaagcaactgctgatcacaaagtggacaaattcattgatgggtttgccaagattatcactgatgtaaatgatgccagaacaagtatatgatgtgaatgaaacatcactctgttgttgtaactgccccaaaaagacatagactatatctgatgagacagccccgacgtgaactaatgataccaaagatagaatgactgtgctggagtgtgctaatgcaacaggcacaccgaagtgtaaacttgctgtgtcgggcgaaaacttagatcctccctgttttcaaagagtgaatttcataccagttcattattgtattatgctaacaaaaaggcatatacttccaagaacatcttttctgtttggtttcacagacattttgtaccagtggctcatgttcactgcagggaagccagactagatgacaactgcaagcttttattattactggacaaccattctgttcatccttcagctgaaattctcatcaaaataatgt

SEQ ID NO: 846880 - DNA, 422 bp, Homo sapiens
aaggctctgtggaaaacatcaaaactggcctggcccatggatgtagggactaggcagtcctcaaacgaaggcaccacactgcaggagctgacaggcggcacaattctctgggaatcggggtagtgtgggggacagaacttctgcagctgcccataaaatcctgaaacgcaagcatggcattgagcacaagttcctttgggcacaagttccacagatcattccaacccagctagaacctcactcagcctggcttcctaagacaaatgcctttaactcttaaggccacctgtagaatcttycaagcaaacatttggaatgcactgttgggctgaagctcttctaccttagaggaatttccaagcttgttagtgtgtaatgtttttattatgtgctttagtatctgaagtgggaaggcttcttac

SEQ ID NO: 846881 - DNA, 614 bp, Homo sapiens
tgaagtgtctcacaacaccctcttcctccatattttctgccagtmcttaactcaaattgtcagcaaaataaagacgtaaggagctgtgctttaccataattaagaaagtattaatatgttctctcaagggcagaatttgaaccaataatccttgtcgatgacaagacaaataccagctcatccgttataaatttatcttagaaaactctcagatccccaggagtaacagcgattggcgtgacctgctttttggtgaaatcagaaaaggacttgcctaccctcatggcagcaattaactggagctgattaacagctgctccctttagataagtacatatgcttgagtttaccgtgattctgtgactccctacgtttctaacagttgttacctctctggtccttgtaggcattcagctttggaactttgataaagcagcttaagggtttaggaaggatgtttaagatcactgatgcaactattcatctttccttcccatcaggtgtttgaattgttgctgcatttctccagcctctgctttcttaaacactcttgtgatagggatctcactatcttcctatgcggctgatacttattttttattttattttatttt

SEQ ID NO: 846882 - DNA, 622 bp, Homo sapiens
gatttagtgcactgttggtaggaatgcaaaagggtttagttgctatgaaagatagtacggcagttcatcaaaaatttaaaaatagaacgatcatacgattcagcaactccacttctggaatatacacccttaaagaaatgaaagcagggtctagaagagatatttgcacactcatgttcatagcagcattattcccaatagcttaaatgtggaatcaacccaagtgtccgttcacagatgaacggatcagtaaaatgtggtatattcaaaccatggaataatattcaaccttcaaaaggaagaaaactctactttgggaggatgaggtggatcgcttgggttctggagttcaagaccagcctgggtgacacagcaagacctcatctctgctagaaataaaaaaaaaattagctgggcatggtggcacacacctgtagtcccagctactcgggaggtcaaggtgggaggatcacttgagctcaggagttagaggctgcagtaagcyatgattataccactgtactccagtctgggtgataaagcaagatcctgtctcaaaaaaaaaaaaaaaagaaagaaaagaaaaaggaagaaagtcttgagacatgctgtaacatggatg

SEQ ID NO: 846883 - DNA, 613 bp, Homo sapiens
caattcaaaagccttccatggctccccgctgaccctggctgaaagtcctagattctccatgagacacagtttcaataagccaygtaacttttctgtatttttgttttcttaattggaaaagcgggataaaaagagtagctccgtcatacactcgcaggattccattatgagcatggtggggtacacagtctagcccagggcctgcctgctcctctcttcctcttctcccgccatcactctgtcccagctcgtgcttctctgaacatgccaggcatggtcctgcctcagggcttttgccccagctgttccctccacctgaatggctgtttccccagaaatgagcctgactcacccctctccttcaagcctttgcctaaaaatcaccttctcaatgaggcccccagcccaccctagttaaaactgccccctcacacaccctaacccctcctatgttctatttgctccacctcatttatcactgattttatttatcacctattcatctattttatttattgtttttcatctgtcttccccccatctgattgtaagctctttgggggaagatctttctggtctattttgtttaatatcagcgccttccccctttccc

SEQ ID NO: 846884 - DNA, 563 bp, Homo sapiens
accatttggccaggctggtctcaaactcccgacctcaggtgatccgcccaccttgtcctcccaaagtgctgggattacaggcatgagccatcgcgcctggycacaattttaatttttaattcagcaaatacgaataaataaaaccacatcaaaaaataaaaataaaaaagatctgcagactctttagtaatttttttttttttttgagacagggtctcactctgttgcccaggctggagagtagcagcacaatcatagctcatagctcaccgcagccttgacggcccaggctcaagcgatcctcccacctcagccttcttagtagctgggactacaggtccatgccaccacaaccagctaatttctaaatttttttgtagagatggggtctccctatgttgcccaggctggtcttaaactctgggcctcaaacagtctcccacctcggcctcccaaagtgctaggattacaggtgtgagccactgcacttggcctccttagtaatttttaagaatttgaagatgaaaacatttgggactccatgctgaatgctgtatacacat

SEQ ID NO: 846885 - DNA, 569 bp, Homo sapiens
tggagtgcagtggtgcaatctcagctcactgcaatctccgcctcctgggttcaagcaactctcttgcctcagcctccctagtagctgggattacaggcatgcaccaccacrcccagctaatttttgtataggactatagttttaaggcaagtttataacctttggctcatttgagcctcacagcacttggtaggtagtgctattatccccattttatagatggcactgagaagtaaaaagtgactagccctggtcacacaattgatatggactgaaactgccgctttctggctatcacgggccttgacacagctagtttgtgacctttacagtctagctctgtctctgctacatgaatcccaaatttttgaatcaagttcccctctgggccataaggcctcatctcagacccccaaggaaggcagtccaaaggtagactcaagtctcgcagagtaaccaggcactaggaaagcatcatgggcagtagctccacgagaggggccagagcaccaggcactggccagagaccagctgcattcaccctgagcagtagggcctggtggccatga

SEQ ID NO: 846886 - DNA, 612 bp, Homo sapiens
gtcccctgtcaccagttcttttcagtattctactggaaatcctagctaatgtggtaagacccaaaaaagggggagaggggctggggacactggctcatgcctgtaatcacagtagtttgggcagattgcttcaacccaggaattcgagaccagcctgggcagcatagtgaaaccctgtctctacaaaagatacaaaaattatctgggcatggtggcacgcacctgtagtcccaccattgcacttcagcctgggtgaccctgtctcaacaaataaataaacaataagtaaataaatggtatccagattgagaaggaagaaataaaactgtcatatgcagatgacataattgtttatatagaaaatctgaaagaataaacaacaacaaaaaccccctggaactaataagcaattataggccaacagtaggatacaaggtatataaaaatcaattgctttcctatataccagcaatggacaagtggaatttgcaattaaaaacataacacsatttacattactatccccccaaatgaaataattaggtataaatctaacaaaatatgttagatctatatgaggaaagatctatatgaggaaaactagaaaactga

SEQ ID NO: 846887 - DNA, 612 bp, Homo sapiens
acagcatctccatcaccgatcttcaggggtgctaaaccctgcacccagtatttgcggaatgttccacattcttctaacatgtgttcctgggtcaagatgaccttggttgctggctgccagccactcactttcccggtgcttttgaactaaacagttcccaggattcctgttccctggcaggcacagaattgtttactttccaatatgaaatactgaggaacattatagggctaactgaagtagaaaaaaggttgttctatttagttgaaaactcctgttatcccctaaggaaatacctacagggctaagttatgaggaattccttaactggattaagctggtggtgttcgatgagagaaaacccacgaagataccactgttcagcagccccccgaccaaggatgcagctgggcaatggaaatgtgcttggatgcagggtgcccttaggtgggctgtgaaaggccgctgaaggacagayatgttactcacctcgtctagcacctgggaatctcttagtgcctggtcagtgatgtcaaattggaaagccagcatgcggggaaagctgaaggcccgggtccttacgaccagctgctcagcagaaacgacactagg

SEQ ID NO: 846888 - DNA, 703 bp, Homo sapiens
ttttaagtagaaacgggaggatccctcaccttcactacatgtcattccatctcccaaaattcagatgtaagacaactttaggagtttacrtttttcctattaagtaatgaagtaaactgttaagagttaaagtcatcttagaatttaggtttcatactggactttgctctcttcccttctcagtcccagccagtcgaatttggtcttctggggtcaacccaaacctaggtcagatggtgtaaacatgtgtcatcagttgaggctgctataacaaaataccacatgctgcgcttaaacaaaagaaatttactcccttgcagttctggaggatggaagttcaagatcaaggtgccagcaaggtcgggttctggtgagggctctctgcttggcttgtagtggcagctttctcactgtgtcttcacaatgggttgagtgagagagagctcgggcaccagcatgctagctctcaggtgtgtcgctcttcttataaggacactaatcccctcgtttaaaaaaaaatcattatttatttatttagtgagacagagtctcactctgtgtcccgctggagtgcagtggcatgatctcagctcaccgcaacctatgcctccttggctcaagcaattcttgtgcctcagcctcccaagtagctggaattacaggtgtgcaccaccacacctggctaatttttgttttctgtttt

SEQ ID NO: 846889 - DNA, 601 bp, Homo sapiens
tcttggaaatgtttcatttgcatcagggtcgtgccagacatggtaatgaaggccctgaacagagggagaaccatcagggactgctgtgtgaggaaagcgtggactttcatcctgaaaaatgaatgtatccataacaacatcctcaaacatagacagctctgattagtgctccacgagccctctctctaaaaacatctgaaaatgcatcactcttcctggggctcacatgaatggggtaaatccttacgaaggaggggccttggtgctcaggaggtgaagcgcacgccattctccaggtgtgcacgtgggtccgaggaatcaggagctcaggctgcacagccctgccgctgccaatcactgctcacagcccctgagccctgctcagaggcagcagcatttcctactaggggcaaggtgcagcagtcaccaggacaccctggctcttatttgcaactgctgcattacctaatagccacccatggcttcacgaggagggatgctcacagccccctgcagagcagccwccaggttccagccccacagggaagcgtctgccgtgacttccacccacacagcctctgcttccacacaatcaccctga

SEQ ID NO: 846890 - DNA, 490 bp, Homo sapiens
tggagcggcagcctcttgagtgggtggggtctcaggagcttgcagagggggacagtccatgctgaaaggccttctgctcagccttccctctgggagagggtggtctgcatttcttctgcatcttccatctccccgcagtgttttcacccctacttcccggcagattactagagctggaaacaacagcatggacttgagagccggactgatgattgaatcaccaccgtttggtagctggctgccttagctctctgagcctcaacttccctatctgttaggtggggacaaaatagtgcctcttgtataggtggttgtgaagcttcatcaagcccttggtaccagcatgcagcaggtactcaattgatgattggtgctaatatggttcttactgtcatcatcatcaccagtgctttggacacaaggccatgkatctaggtctttgtcctttggggaatataattttaagccaacttattaacagagtgtaatt

SEQ ID NO: 846891 - DNA, 519 bp, Homo sapiens
ggcaccttgatcttgaacttcccaccctccagaactgtgagaaataaatttttattgtttactagccacgcagcctctggtattcttttataggatctcaaatagaccaatgcaataactgtaatggtttgctatggctgcccaaacaaactgccacgaactgggcatctgaaacagcaggaatttattatctcacagtgcaggaggctagacattcaagatcaaggtgctggcaaaattgattccttctctaggctctgaggaagaccttgttccaggtctctctccttttctggcaatctggggttcctttgcttggagatgcctcaccctgatctctgctttgatgatcacatggtgctctccctgtgtgcatgtctctctgcaaaatctcttttataggaggacaccagttgatatggtttggatrttttgtcccctccaaatctcatgttaaaatgtgatcttcacactgtagaaggtggaaccaggtgggaggtgattggatcatgggggtgg

SEQ ID NO: 846892 - DNA, 587 bp, Homo sapiens
aactgggtgttgacaggtgggtgccctccccaggggctatcccggaacagacccrgcctcattccatctcatgatacctaccaatcaagaacacctgctttggacatacaacttgattgcactggagccattgtacatttggggttggattgttagtgcagttcatgttctcttgagtatattcagaattcactgagcaatctgcgcaggccccgtgctccctgcagcgcacacatctgccttttccaccctcacaacaggactgtgatgttgggactatcacctctgttttccagagcagattaagctgggattcagcctcggcttctgaatcctgatcccatgccaggcaacagcttagaggttctggaggacctaacactccagaatcccactgacccttgcttcctgcctgatgagcagagtggtgaagagcctgcaggctggagtctgacaggccagggtccaggccctcagggaagggcttggtttacctatgcctcagtttccccatctgtccaatggagctgcatgacaggatccccgacacggggtctttggagggtggaatgagatcctgaacatac

SEQ ID NO: 846893 - DNA, 590 bp, Homo sapiens
tcattccatctcatgatacctaccaatcaagaacacctgctttggacatacaacttgattgcactggagccattgtacatttggggttggattgttagtrcagttcatgttctcttgagtatattcagaattcactgagcaatctgcgcaggccccgtgctccctgcagcgcacacatctgccttttccaccctcacaacaggactgtgatgttgggactatcacctctgttttccagagcagattaagctgggattcagcctcggcttctgaatcctgatcccatgccaggcaacagcttagaggttctggaggacctaacactccagaatcccactgacccttgcttcctgcctgatgagcagagtggtgaagagcctgcaggctggagtctgacaggccagggtccaggccctcagggaagggcttggtttacctatgcctcagtttccccatctgtccaatggagctgcatgacaggatccccgacacggggtctttggagggtggaatgagatcctgaacatacagtgtttgccaccgagtgtggacttttagggtgtggggtgggtcacatactcacccgaagc

SEQ ID NO: 846894 - DNA, 617 bp, Homo sapiens
cagacaagggcatcccctccagaagcaggatgccattgagaccgggccatgatgaatggcccctccccaggccctcccccgtaggacccggtcccagcagcgcctctccctgcaggacagtctgcrtcccaatcccagctgccacgtcttgtccggctcctcaagctggaaggttcctcagcctctcctgactcctgggctgcccctgacacctggaaggcacaggccagctgtgtgcaggacgtcctcttccaggctgacttcggccccctcgtgaggagatgtgagctaagagtcctgccgggaattccacatgcacgcagcctccacttgccgcctccagcagtgggctttgaacgtgaggccgggggcctgcctggcgtctcctggggtcgttgtgtctcggggaagagctctacagcagttctcatgcccagtcctcctatgggctccaggtgctcactcagggtcttggcatccctggtggtcacgggctgtggctgggctgcacagcttagggctccagctgaaggacccggccatgggagggaggctgctctgctgacatccacgtccacgtcatgcccatgtccactgctctctgacacaggacggtc

SEQ ID NO: 846895 - DNA, 628 bp, Homo sapiens
tactgtaaaagcttgggtttatttttgtaggacttaatggctaagaattagaacatagcaagggggctcctctgttggagtaatgtaaattgtaattataaataaacatgcaaacctttaaaattttcttttctgatgctctaagaatcctgttgactcttctgcccaagtcacctctgcatcatgtccaggtctggagcacacacttaggctggtggaatttggggagacttgggccccatcaggtgatggaacgaggtggctgacccaattggtcgggtgaagtgcggccagcagacccgggttctccctgtgggccacccttctgggatgaatggctctgctctcagaaactggatacaaagttcttttaaaaacccagctcacagataacacctgtatcataagcagtggcccctttgccaccttcctgctgcctccaagctccccagctcaggagcgttcaggttctcaggcaccgtagagcatgttacacagccaygagcaagctgcaccctggacccacgcagaaaaacaaagacatggctggttctaggctcagagcatcccattttagtctaatgggtttccaggtgaccttaaaagtggccctcagagaggacgagga

SEQ ID NO: 846896 - DNA, 457 bp, Homo sapiens
ccaccgccccttgatcacaacagagatcactccaagactctcccactgctcaggtcccataagcacctccctgactgaggtgatgctcagaccacctgctttccaggaggcccaggcaaagcacagcagttatttttctagaaacagggcctcactctgtcaccgacgctggcgtacactgctaaaaccatagctcactgtaacactgaactcctgggcagaagtgatcctcctgcctcagcctcccaagtagctaggcccacaggcgcacaccaccaagcctggctaattttttattttttgttgttgttgagtaaggttttactatgttgtgcaggctggtctcaaactcccgggctcaagcgattctcccacttcagcctcctgtagtgctggsactgtaagcgtgagccactacgcctggagcagtacagcatttctgagggttctgaagttg

SEQ ID NO: 846897 - DNA, 531 bp, Homo sapiens
attctttttttctgagagagtcacaccaaggtctggttaacgaggcactcagagcatggacttctcttaaagctgatgaatattcgtgagctcctttagaaggaagagatcacacagtctcagggcacctgctctaccctcttccctctacagcgagaccctccccacccccgcacaagaaaggggcgctgagaagagtaagtccacaggcaagtgaagaccccatcacatgcacaacaggccacactcaggacagcgctagaggcaccatcacactggaaatagcataaaaagagatggaaacggtggcggaagatgctgcagcctctgcctctgccgtgagcgcagagcgcaccgtcaagcccaggtgatgcaacatgcttcagcaccaaccagacttcgccrtgagaagagtcgcccctggctcccatcacaggaacacggcagaatacaaacgcacgctatccaatgtcaatcataccaaaaaggacacagccatggaagccgcaggtctatttttataaacaccag

SEQ ID NO: 846898 - DNA, 531 bp, Homo sapiens
attctttttttctgagagagtcacaccaaggtctggttaacgaggcactcagagcatggacttctcttaaagctgatgaatattcgtgagctcctttagaaggaagagatcacacagtctcagggcacctgctctaccctcttccctctacagcgagaccctccccacccccgcacaagaaaggggcgctgagaagagtaagtccacaggcaagtgaagaccccatcacatgcacaacaggccacactcaggacagcgctagaggcaccatcacactggaaatagcataaaaagagatggaaacggtggcggaagatgctgcagcctctgcctctgccgtgagcgcagagcgcaccgtcaagcccaggtgatgcaacatgcttcagcaccaaccagacttcgccatgagaagagtcgcccctggctcccaycacaggaacacggcagaatacaaacgcacgctatccaatgtcaatcataccaaaaaggacacagccatggaagccgcaggtctatttttataaacaccag

SEQ ID NO: 846899 - DNA, 597 bp, Homo sapiens
cagagaagggttcagctccctggctcctagtgtcctgccttgtccacgcactgtccactcagacctctgaccccaaccccgaaacaattcccttgggagccacagaccttcttactgcagggccctcattctaaaacctaatgtcaaatttgatagacagaaaaaactgtttctggggtttcctgactattcggaaatggtccctccaagatccatgtaccccaacaccaccctacctggctacgctcctctcacaactttgagatcaagatgccacgtgtgccttcctcacatcggcgctttccagtgatgcccagtgggggacacaaagggcccagcaagacctcaggaaggacggacacaggcctacacaccaggccacagacaatggggctcggggggccaacctcagcaagacctcaggaaggacggacacaggcctacacaccaggccacagacaatggggctcggggggccaacctcagcaagacctcaggaaggacggacacaggyctacacaccaggccacagacaatggggctcggggggccaacctcagcaagacctcaggaaggacggacacaggtctacacacc

SEQ ID NO: 846900 - DNA, 604 bp, Homo sapiens
gcattcaccctttcactaaatgtgatgttagctatagatttttcatagacgctttttattagattgaggaagcttctttctatttctagtttgctaagagttttgtgttgtrtgtgtgctttttgtttttttttttttgaaatcagcaatggatgttagcttttggtcaaatgctttttctgtatcatctgagatgatcatatggtttttcttttttagcttgttagtgtgataaaatattgattgatctttgaatatgaaagcaaccttgcctttgtagaatgaactccatttggtcatgatatgttgcccttttcatatactgtttgatttgctagacttttgtgaaattttttgcatctgtgttcataagaatactgatctgcagtttcttttcttataatatctttggttttggtatcagggtaacgctggcctcataaaatgaattgggaaatactttccttcaatttttcagaaagagtttatatagagtcagtcttttttttttctctctctcttaattgttgatcaaattcatcagtgaaaccatctgggcctggaggtttttttgtgaaaaaaaatttaactgtaaattcaattt

SEQ ID NO: 846901 - DNA, 654 bp, Homo sapiens
ccagggcttttgaagtctttagtggcttaatgttaaaactttgcttcctcaagatgaaagttcaaacacaatttaggtcaaaggttaaagaagtctgccacttcagtgggcagataagggktttgaaggtttcagctgaggcctagtgactgggccaggcagggaagagggaggataaaggagacccggctccaccctcagttatctgcctcctgtttccttaagaactaatgttcattaaactcctctgttttgataaagaaacaaaaattcacaaccaaaaaagtaaatcctacctttgttctggcaaactaggtcagcattctctgttcctgctgtcagttttctgcagcttgggtttcacaatgagtcacaggtatgtatgaaactgcttgatttaacttttcgtttttccctatctgaggactccaggttctcttagtcagacaatgattgagttggcgggtgtttctcttggaagacgcctaagtgcagacagcagatctgaggtctacctttgcacaagcttgacttggaactgaagcatcccacacatacaagctgcgtgcagagatgccacggccacataaaagcagcttagcagcatggaaactttatttttttacaacccgtttcaatgggattggatccagt

SEQ ID NO: 846902 - DNA, 498 bp, Homo sapiens
aaggcagaatttaagagtgacaaattagaatatttagcagaaaaactatctaaacagcaaagcattccagttgctgcatagctacttttaactkcttatagtaaaataggagagaatacatacatatatatatacacacatatatatatacacatatatatacacacatatatatacatatatatacacacacatatatatatacacacatacacacacacacacacacacacacacacacacacacacatatatatatatatatatatttttttttttgagatggagtctcgctctgttgcccaggctggagtgcagtggtgctatcttggctcactgcaacctctgcctcccgggttcaagcaattctgtcagcctcctgagtagctgggattacaggcgtgcaccaccacgtctggctaatatttgtatttttagtagagacggggttttgccatgttgatcagcctggtctcaaactcctgacctcaagtaatc

SEQ ID NO: 846903 - DNA, 611 bp, Homo sapiens
ttctgaggatgttttaggataaagctttggagaaaacaagtgagattgtgtcagagactactggttgggcctcaatgtccagtcttcctcatcccattgcgatagatttttgctgtgcacttggctgctcagaataaaggcctcatttcccaggtgccctgtagctaacagtggacccatgactaacttttggccaatggaatttaagcagagcagaggtccagaattccataccccaaattcttggggccagatatggtttggaattcaggtttcttttgattttgaaggtgatatgatgcatatacggcttcttatggaataactccattgaagtctggagcagcacctcataattaactgcaacaaattataacagtattcaccctaagtgggataaatgaagaccataaggccacttgtagtggctcacacatgtaatcccagtgctttgggaggctgaggctgaagaatcacttgagrccaggcaacaagaccagcctcagcaacatagcgagattccatctctacaaaaaaaatttataattaaccagatatggtgtatgtgtctgtagtcctagctgctcaagaggctgaagaaggaggatcat

SEQ ID NO: 846904 - DNA, 619 bp, Homo sapiens
tgctccacggcgcccagtcctatcgaccacccaagggctggggagtgtaggcgcacgacgcgggactggcacgcagctccacccgcagccctggtgcaggatccactaagtgaagccagctgggctcctgagtctggtggggacgtggagaacctttatgtctagctcagggattgtaaatacaccaatcggcactctgtatctagctcaaggtttgtaaacacaccaatcagcaccctgtgtctagctcagggtttgtgaatgcaccaatcgacactctgtatctagctactctggtggggccttggagaacctttgtgtggacactctgtatctagctaatctggtggggacctggagaacctttgtgtctagctcagggattgtaaacacaccaatcagcgccctgtcaaaacagacaactcggctctaccaatcagcaggatgtgggtggggccagataagagaataaaagcaggctgccggcgccagcagcrgcaacctgctcgggtccccttccacactgtggtagctttgttcttttgctctttgcaataaatcttgctctgctcactttttgggtcgacactgcttttatgagccataacactcaccgcaa

SEQ ID NO: 846905 - DNA, 570 bp, Homo sapiens
tagataacacagccattcatcattccatctacttcttcctagcaaacaaatgcaaatcgtgtgtttttcatgacacatataccaaagaccatcacagagtacaaactttttatttccaaattcaaactcaactttccattccattttgacccaacaaagaggtcttaatctgaaagattttaatattttttctgattataaaaataatcaaacagtgttctaattcttttaatgtaaagccccttccaaactaagtttaagacttggaatcaaaatgaagcatttagttgttcttgattctttcttggaaaaagatttttaaaagccactttaaaaaatccttgcttaagaagacatgacaagtaaagatatatgaatttacatgaagagggttacggcgtctgaaagacttgaaaaactgtttttgaagttaaatacatctactgtgcaggcwctgctcctcttctcaatgacaagaaataggtttgacaaatcttaaaaggtaccagtgtaacaaagaaaagttttccaccttcaatatcacctacatgcctggaggatccttttgca

SEQ ID NO: 846906 - DNA, 551 bp, Homo sapiens
agatcttggctcactgtagcctctgcctcctgggttcaagtgattctcctgcctcagcctcctgagtagctaggagtacaggtgcgtgccaccacacctggctaatttttgtatttttaatagagacggggtttcaccatgttggtgaggctggtctcaaactcctgacatcgtaatctgcccgcctcggcctccccaagtgctgggattataggcatgagccactgcgcctggccctcttttatttttagttgatatgtaatacttgtatatacgtaggggatacagagtgatgtttttatacatgtataaaatgtggaatgttcaaatcagggtaattaggatagccatcaccccaaaattatttttttatgttgggaacattcgaaattctctcttttagccttttgaatctatccaataataattgttaactgtattcattctatagtgctatggaacaatagaacttactcctcctatatagctataattttgtatcccttygtacttttgttccggagttgaagaagttctttatatcttgtaca

SEQ ID NO: 846907 - DNA, 564 bp, Homo sapiens
cttctgattttgttcatttcaaaccttgttttttcctgctgctgaacactcctaaagctggctgccatgttcataactcatttgacttatgccttacatcttcatatcacaatattgtggggtggrtcatcacagaggaagacaggcatttccttgaaaccatttctgttcctagacagctagtaatacatggaagcgactgcaagccacgtgactgtatctcactcacacaaatgacatatctttaaattaacttccccttctccaggtcttaaaaatgcccacggccaccccattgccttctgacaagaagaaagatgtaacagagggaaagtagaaatgaaaagagacagggatgtcaactgattgtggttaagatatttttcttttgcaaactttacaaactcttatgactttgtcaatgcattactgtccaagtaaggggcctacaccttaagcttcatgagctccatggcaatccacctctgggggaacaggaagatactcctgccctactgttaggtcattgagggaaaaggaggtctggagcataggatttgtttg

SEQ ID NO: 846908 - DNA, 617 bp, Homo sapiens
catctctagtttctgccttgcttatttgtatggttttggggaagacaataaaggaaggaaattgagggttggttgctttcattttagattcaactaacatttattgaacatctagacgccatgccatgaactctcattattaacctgtaaagtgagtatttatattttaagatgactaaagtgaggctcacagacattaaaagccttgttcataacagaactgaaatgagttacagacatttttttacccaaagttgtagatttttatatccactgtatattgcaatgtgaaaatggtaacatcttgcatttatataaagctctgttatgtataaaacaacctttccttttgaaaatcttgccatttggaactcagatatagttcttttttttccttttttttttttaaaaagctaattattggttctcaaactaaagatgacaaaatctagtctgtgaaaatcagtcaaaaaccaaagaccmcttaagagacgtacccgggattcaaaccagttcatctggctgcaaaccattcccagcccaccacaccccagggtgagaacctttacctcttgtatccaacctcagccactttcctggtaaagtgtgtgcttggt

SEQ ID NO: 846909 - DNA, 450 bp, Homo sapiens
tacccatctttgccttttgttttacttttttttccagctttattgtggtatcatttacctataacaaaatttattctattttgtttacagcttgagtttttgtaatgaacagttgagtaaccatcaccataatcaagctatagaaccctagaagttttctcatgtccctaagatcaacctcttacctgaactctagccacagtatagttcattatagtgttgctttttctagaatatcatataagaggagcatacagtatgtagtctgttgtgttttatccctttcaatttgcctacttttttgaaattgattcatgttgagtaattccttattactaagcagtatttccaaatgtagatttgccacagtttgtttatctgttcaccagtygatggacatttgtgtatccaagttttggctattgtggataatactgttacaaatataag

SEQ ID NO: 846910 - DNA, 450 bp, Homo sapiens
tacccatctttgccttttgttttacttttttttccagctttattgtggtatcatttacctataacaaaatttattctattttgtttacagcttgagtttttgtaatgaacagttgagtaaccatcaccataatcaagctatagaaccctagaagttttctcatgtccctaagatcaacctcttacctgaactctagccacagtatagttcattatagtgttgctttttctagaatatcatataagaggagcatacagtatgtagtctgttgtgttttatccctttcaatttgcctacttttttgaaattgattcatgttgagtaattccttattactaagcagtatttccaaatgtagatttgccacagtttgtttatctgttcaccagttgatggacatttrtgtatccaagttttggctattgtggataatactgttacaaatataag

SEQ ID NO: 846911 - DNA, 611 bp, Homo sapiens
gctgagttaatggtgttgtgtgctgccccgatgtcttttcaggaatgaaagayttgctccccagctgctgagagtgctgccccaagatggtgctcagtggtcagccctctttgagagttgctttagctgaaggaaactgactcactcaaggtcactttctttttttcagggacagcttcggtcaggtccagtgaccgtcaattaaggggtataatgaacctgccccttgtcccaactggaaacaacaattctggatggttgctgtgggctgactgaggctaagggtgggcttgcattgggttctgcttctccttctgtgtaatcctgtgtcatgcctcctcttacactggtgttgctcccaattcctgtgcaagactgggcctaggctagcaggtttgctatgtgtgatcaaaccccactgccaagggaagaaaatccagcctgtgtaaaaaagttgaagtagttgagatcttttttcccttctttcctgtaaatgtaaagtttggactgtgaggagctgggggagttaagccatggggaaccaagatgagaggttgtgaagagcatgtttttggttagaatgaggttaaggttggtggaattagagacag

SEQ ID NO: 846912 - DNA, 609 bp, Homo sapiens
ttgggctttaggtggtgaattataaaagacaactagtttgttccaatattttcatttacagctgccatacagataaagtgtgttatgttactcttgaaacaccctaaaataatcttctcttttctagaaccagcagaaccaaacttctaaaataccttggggaacatgacggtatgagtgaaaatcaggggttgttgtataaaagctgagttattctattcagaggtttatcatttattcagatatttttacagtgtttttctgcattaaggcacaaataaaagggataaaaagacaaatattttaaatgtctagtagtaatgctaaaaacagcaggaaaaaaaccccacaattagataactaaagttaaaaaaaatagctgaaacttccgatcccagcagggcacctcaggtgataatgacattgccctctgaatggcacaaagggagctgggctgaatgagactggcagaatgttaataaacctctgtgggttcaggctttctatttactacagtgactcacctttggttctgcasaggggcagaaatcctccaacttgaagggcagggctagccttaggcaaaattgtgtggtaggtgaagttggt

SEQ ID NO: 846913 - DNA, 618 bp, Homo sapiens
ctctgaataaacaatattcttctgggaacttaggccattgccatcatttcagttatcatctacctgtagatttgtcttcagtgtcttgaattgtacttactttcgctgttaatatttttactgacatttttccctcttaagtttattggggaataatagactgcatctatttaaagtgtataattcaacaagtttatatgtatatgctcaagaaagcaacaccaaaattctaatacaggatatttccatcatcctcaaaatattctatttgccctttaaattcttccccgcattaatccttgctcaatacagctgatctgcttcttgttgatataaatttattttcattttacataaatagaattttacagattgtgttcttttgtagacactggcttccttcaccagcatacttgttttaagattcatccgtgttattgggtgtatcagtacttcattcctttttatcgctgaatagaattccattatatggatayacgaaattgtgtttatacattcatttatttatagagatttgggttgtttccaattttggggtatagtaaataaagatactatgtacacttatgtatagattttatgtggacatatgttttc

SEQ ID NO: 846914 - DNA, 635 bp, Homo sapiens
taagaattcttctgaacaaaatatattaaaatgttttcccaatacactgtcatccaaggttgcatgctttgagatactctatttacattatgaatgcagaccagaaatatatatatatattatggtcattacactaatgatcattatactaatatatattataaatatatataatcatatatatctaaggttttgtggagtcttgagggtttcatatatatacttaaggttatacggttatatctggagtctttagggttatatgtacatacatatttaaggttatatttatagattaatcctaaaaacatgtatgtatatataacatttatgtatatatacacacatatgtatttaaggttatatttatatgtttaaagttatatataaaaatataactttaaatacatgtgtgtatatttagggttatatttggtatatatacataatttatatatgatataaaatcctaaagacttcacaaaaaactgttagaactaataattggtaacgttgtatacaaactgaatttataaaaatcagtagtgtttctatgtgccaatwgtgaactatatgacaaagaaatcaagaatgtgtctatttactataactacaaagagatacttaagaacaaa

SEQ ID NO: 846915 - DNA, 585 bp, Homo sapiens
gctatgttggtcaggctagtcttgaactcctgtgctcaagtgatccacccatctcagcctcccagtgtgttggaattacaggcatgagccactgtgtccggcccaaaaatacttattatatggcccttgataaaggaagaagttggctgaccctctcctaaatatttccgtaaacattggtggaaagagtttattttttcatttttatttattggacttggcccaaggctcctctcccttttcccttttcctcttgttctcttccatccctcttgatggctacctctacctaggctccaggtagggccctgggactgacagaaagagtacagtcattgtcttcaaattgcttaaatctctagagtcttcctggatagatctgaactttttcttttatatcagcccttggccaacatgtctggacaccatagttagagtttatttccagggaagtatgtgaggcagggaaaaraaatgctaactggaggggtttggggtgtgggtgagcatcttaactgagttactacaggcttatcagctttcctaaaccccgtttcctcaatcattgacaggatggttggaaag

SEQ ID NO: 846916 - DNA, 628 bp, Homo sapiens
tatgtagaaaaaaactgggaatacctataaatattgtaagttttcaaactgtcagtcctggttcttccacttttaggaatctatcttatgaaataactttttaaaatgcatgaatccatatgtataaggattctaggacaccattattcatatcagtgaaaaaataaaaaccatagagaaaagccaagtaaagtacagtatatcaatcctatggaataccacacagctgttaaacactcacatgtaacgatctggggaagtgtcaatgtcaaattcacattgtaggacaacacctattatgtgattctatgcttgcaaaaaaaaaatgaacaatccatgagcaacaacaaaaaccttatgtgtaccttatttatgtatttgagtatgtacacagaaaaggcttcaaaatgaactattaacaatgatttcttccagagggtgagtatgatagggaagagaaaaagacattccatttactttatatacttcaggatggaattttatgagatgatcatttaactattaaaatcaaggaaaaaagtgatcttttaaatgacttttaccttcactcagttgctccagggatccwctagaaagaagacttgagaaagattctacaactgtgtat

SEQ ID NO: 846917 - DNA, 578 bp, Homo sapiens
aactcttccccatcaacatcaaaaggtgggaatgaacatttaatgttcaacttccgcaatgtccacattcaatgtgggatctccactcccactatctgctatctgttctgagttttgtgaaacttaattttctccagccaacctttttttctcccctgctaggtatctttaaaatcaaggaacatccgggtttggcaggttgggttgtctgcacggtttgtcctccactgtggagaccccaagctgtcagaggtagtttaggggtccactgttactcagaaggaaaacctatagttaatgttataaatgtgattttaatgtgagaagggaacctaaatttctcttagacactcattctgccataatgccctttaagtttttctcctggggagacttactctgttagcaaatagaacgtatcagtaatgggggcatggttggatatgggggaggaagagaytttcaacaagtttgcaaataatagaggggtgtgtaaggtagtgagagtttcatttagggaggaggaagaagaggcttatggtgtcttcccttgtttcttatctgccattgatgaccca

SEQ ID NO: 846918 - DNA, 533 bp, Homo sapiens
gtttggttttgtttggtttggtttggtttggtttttttgagacggagttttgttcttgttgcccaggctggagtgcaatggcgtgatctyggctcactgcaacctctgcatcccgggttcaagtgattctcctgcctcagcctcccaagtagctgggattacaggcaggcaccaccacgcccggctaattttgtttttttagtagagatgaggtttaaccatgttggtcaggctggtctgaaactcctgacctcaggtgatccgcctgccttggcctcccaaagtgctgctattacaggcatgggccactgtgcctggcccacatttgtagctgagatcactcctgtcacctgctcccgagcctgctccagactcggctgtgcaggaagaccttccccgccgggtctctctttgctgctcttgccgtgctattgggataagctctgttgccctgagtgagtctgacttaccgcagccagcttataacaggacactcctctccggagagaatctgagtttttgagttggttcct

SEQ ID NO: 846919 - DNA, 533 bp, Homo sapiens
gtttggttttgtttggtttggtttggtttggtttttttgagacggagttttgttcttgttgcccaggctggagtgcaatggcgtgatctcggctcactgcaacctctgcatcccgggttcaagtgattctcctgcctcagcctcccaagtagctgggattacaggcaggcaccaccacgcccggctaattttgtttttttagtagagatgaggtttaaccatgttggtcaggctggtctgaaactcctgacctcaggtgatccgcctgccttggcctcccaaagtgctgctattacaggcatgggccactgtgcctggcccacatttgtagctgagatcactcctgtcacctgctcccgagcctgctccagactcggctgtgcaggaagaccttccccsccgggtctctctttgctgctcttgccgtgctattgggataagctctgttgccctgagtgagtctgacttaccgcagccagcttataacaggacactcctctccggagagaatctgagtttttgagttggttcct

SEQ ID NO: 846920 - DNA, 619 bp, Homo sapiens
gttcatggcaaaaatggaaaggctatatgctgaaaggttgcagtgcttcttgtgaaaagtgggaagtttataattctaaaatgggcatgcgttacttgaayggagtttcataaaatctcacaggtcacagagtcgtgtagccactgttgatttttagataataggctctttgttttcatgcagtttcctaatattaggattatgatcaattttatttcataattagtaacttttgtcttttctgtcactagcaaatggtcagctgagacttctggccgcagcaatgccatgccacatattaagacatatatgaggccttctccagacttcagtaaaattgcttggttccttgtcacaaggtaaatagtccttacattcctgatgggagaaatctttttaatgtgttcataattcttgctctgaatgttgaatgggtttctaaaaagtgattagtgagttgtcattagttttcagtatgtttgtgttacatgagccttatttaaaggcatcccatgactaatccctttgtaaagtatatgatcatcacctacttttgcttataagtctagatgtttatcagatttgcataaagttaacatttacttctgttatttaatac

SEQ ID NO: 846921 - DNA, 556 bp, Homo sapiens
atgttaatgtgaaccccaagagtgagttgatagctggtgaagagggagaaggtagaggtgagggcctttaggttggccggctgggcttgcctygcagtcagtaaagccccctcatgcagagccattcatctcctgttgggaacgctgaccttttggttcagatgcctgatataaactcactgatatgggaggggaggatctgaatgggtaggaaggaaacagggaaagttactaggacagacagattctaaggcttctctgaaaggaaggaaggagttgtgatgtgctaccggggaggtccaagggagaagggcctgggcagtgtgcaccactggtgagggtgtgaaaaatgggctggtgactggccaccaaatggcttggggagaagtggctggagagagggtcacctgtgtggtgggagggatcggacaagtgtttttagatgttatgagaatgtctaagtttgacacaagacactcctaagtttgcaaagaaaggatatacagtcaccttccttcaatatcagaaacaacatgctggggattaaaaataaata

SEQ ID NO: 846922 - DNA, 540 bp, Homo sapiens
aggagcagacgtaatggctttaatgagctacttaactactttctagagacaaccaagagacacttgaagagcccagtctgagacctggttccacctttccatcccttctgtgtccctgcctccagcccccacccccaggacacatctggcagtgaagggactccaattcctgttctagggagtggcccccacttgtgctcaaagtataattaagtggcttaaaagtaagtgcaagggtccggagaaggacttgactgcatgagggaacttttagaggttatagaaatgtttctaccataattgtggcattggtaacatttaacaaaactccttgaattatataccaaattggtaatttttattgtatgtaaattatagttcaataaagctgatttttaaaatactcratgtaaatcctgatatgtgcattcattgtatgtaaattctacatcagaaaggaaaaaactaaacagttgttgaattccagttaatgatatacatgctgaagtatttaggggcaagcatatagatatctgcagt

SEQ ID NO: 846923 - DNA, 366 bp, Homo sapiens
gagactaaacacccaccatttcttagacccttaatttgcgctgggtgctaagcttcctctgggtatggggtggacactccaaataggggccccaattccagtaattaaatgtrttgagccaggcactgcactaagtgctagtgtaagtgcatcatctcattggatcctcacaacaacactccatgcaagatgaggaaactgagacaggaaatttgctcctcactgcacagccagcagaaagagaggcagatccgcttggctccagggaccacgcttcttctagatgtctgtgtcaccctcaaagcctcagattgtattgtgaactaattaactagttgagcagaacgttccccaaacacatggtgt

SEQ ID NO: 846924 - DNA, 626 bp, Homo sapiens
tggaagagatgcctagtgtgaaagagattccaagaataaataccataaacagcaccgagcccaaatcccacagcaaacatccttattaaaggcaaggaacgtggggcgagttccttttctcagaagattttacgagaacgcaactgttgcgaagaaggaacagacattcgaggttctgagtccaatgggaactcatttaactttttattttgcagcagatttcaaagtctgcacccagcccctcccaggacacaggtctccttgcagctgcctttaacctaagcgtatcctctctccactttaaaccaaacgccgctgcatggagccctgggagcctgagccatgagaatcctgtaaagagggtgagtcttgctattagttaactagagcgaagttaggggacgcctttctggttctcctctcgttttaagaagtctccaggaagtaagccaagagctaggagagaccaggtttccccagccccgtcctgggtaaacacccggcgggctttaggacccagcggtgggctctccggaaggggaaggggccggrcctcgaggcacaagccgctgccgccagggtttgaactgcgcgcatgcgcggcggccgccgaaggggcgggatcc

SEQ ID NO: 846925 - DNA, 319 bp, Homo sapiens
gaggtggacagggaactaggtaagggagggcttccttttaaataattagaccttgtcctgtgtacatttaatgggattktaatcaggccataatgccaaatttctttacttcggaaggatctttatggtgatggtttcagaaagaaattaaagcagagtaacagtggttagcaataatgatcagctagtggttcccaaacttacgtatcatatgcatcttggaagtttttaaaaactcagattttgggatcctgacttagatctactgaatcagaatttacagattcaaattcccagtgaggcctaggaatttgaaatg

SEQ ID NO: 846926 - DNA, 483 bp, Homo sapiens
gtcccctccatgcactcactttcttgctccagcagctgcttttttttttttttttttttctttgggccctctacaggcttttcctaatcctggagtttccaccgcaactctcttgttttgtccaccttattcttcactcagggttaagctcaaatgacatcctcgggggaagtcttttttgctcttctagactgagtacgctgttcatgttttttccccgcatagcaccctgtttttattttatgtcaccgctttccacattttgttgtaatggtatagttgaaaaggcagtgtgggattgttaagggcataggttatggaacccaattggctgcatttgattgcagggtccgctatgacttggggcaagttacttgagtttccatatctgtaaaayagaggcaatgataaacctcatagtagttgtgaagattaaatgagctgatatatcagaaatacattctaagtgctcaataaatgttc

SEQ ID NO: 846927 - DNA, 551 bp, Homo sapiens
acctgcctgttttttcagtcccacctcagccttccaaagtgctaggattacagatgtgagccactgtgcccagccctttgcccgttttttaacggggtggttttttgtttgttgaattaattttcttatagattatgaatattagacctttatcgaatgcaaagtttgtgactattttctctcattctgtagggttgtctgtttactctgttgtttcttttgttgtacagaagctctgtagtttaattaggtctcacttttcaatttttgttgtcaactttgtcaaccatcaggtggtcgtaggtgtgtggctttatttctgagttctctgtcctgttccattggtctatgtgtctgtttttgtaccagtaccattctgttttggttactgtagtgtgtctgtggtttctgcatccatggattgaaccaattgtggattgaaaatatttgraaaaaaaaatgcatctgtaccaaatatgtgtggacttttttccttgccattattccttgaataatatgacaatcatttacatagtattaggtattataag

SEQ ID NO: 846928 - DNA, 514 bp, Homo sapiens
taaagttaactgattgtaggcattaatcacaactataaaataccttcacagcaacatctagattagtgtttgattgaacaactgggtgctatttaggctarccaaattagtgcataaaactgttatttttcctgttttaaaagcaattataggaaagtagacagaattttaaaaatacctataattctatcacttaagacaatttgctgtgttttaatttgtgccttccagggtttttttttttcccctagcaatttatttataacagcaggaaaaatggaaataaacaaaatgtttagcaatggagaaatagttatgggaattatggtatatgcacatgaggtgaaattatgcagcctttaaaacttataattatgaaaactggatcaacctgaaaaaatgcttcaagtgaaaaaagtacagtacaaaatcctatctctaatagttatgattatagctatgtaaaaacagcatatcgtgggaccatgcaatagaaggaaacattaaaaatagc

SEQ ID NO: 846929 - DNA, 539 bp, Homo sapiens
gacctaattaaactaaaagagctttcgtatggcaaaaggaacagtcggcagaataaacaracaacccacagaatgagagaaaatcttcagaatctatacatctgacaaaggactaatattcagaatctacaatgaactcaaacaaagcagtaagaaaaaaagtctcatcaaaaagtgggctaaggacatgaatagacagttctcaaaacaagatctacaaatggccaacaaacttatgaaaaaatgctcaacatcacaaataaccagggaaatgcaaatcaaaaccacaatgtgataccaccttactcctgtaagaatggccataatcaaaacatcaaaaaacagtaatgttggcatggatgtggtgaacaggaaacacttctacactgctggtgggaatgtagactagtacagccactgtggaaaatggtgtggagattccttaaagaactaaacgtagaactaccatttgatccagcaatcccactactgggtatctactcagaggaaaagaagtcattatgcgaaaaagatacttg

SEQ ID NO: 846930 - DNA, 512 bp, Homo sapiens
attttgacttgcaatcgtctggaatcattgcttggtagactgggcaattctcctgcawcttttaggactaatgagcttggaaacaagagggacactgcccttgctttggcatatgggatggtaaacagcagcaggatggacatgctgatggtctagcttctacagggcatgtagctattaactgatagaatcaacagcctaaccttgcacaacagcctaaccttgcaagggagagcccccaccacccggccttgcttatctctgctgacccaaggaagcatcttgggtcccctgtttcctcaagatttcctctgactgtccagcctctcagatcactgatcttgcctgtcctagttttctatcttggtaccttcttgtgcacctccaaataaccaatctgtccccatgtctctctgatttcaaatcctaactatctctcaagtctattcacttctgattatgttcagcatcatcaccctctttgtagccagcatcatcactccccacgactc

SEQ ID NO: 846931 - DNA, 643 bp, Homo sapiens
cagaatcaatcttgcagagatgtcaaaaaagaaaagaaaaagacagaatatgtaaaatttccattaacagraatctaactaattatacagtaaaataaaactccctttctcatcttctcttcattttctagtctctattcttagaacgaaacacacacacacacacacacacacacacacacacacacacacacgcaaaacaaaaaaacaaaggataacaaaacttctcgtcagggatgtagacgatgttgttgatgctgtttgaattctggggatgtgctgatgggtggctgtcttagggggatagtgactgacagaaagttgccaacagacagaggcaaagaatacacattcctttcctttaaaggattcaagcaagaactttgccgcaataagagtggagcacagggcgggaggtccggcagcaagctgatgtttgaagacgtggtctccttagccccacatttcccataccagggaatgaacggcagaggataccaccacatgaggctgaccatttgctcagtgtccttccagactgtatctgggtcctcctgggttcgggggggaagcaggctttggggaggtgtctttttacctgtgcggcacttctttacagtttcaagagagggaagtagaaatt

SEQ ID NO: 846932 - DNA, 640 bp, Homo sapiens
tttcatatcccagtggtgcctggaacgccagygagacagaaccatttactcccctggaaagggggctaaagctagggagccaagtggtcttgctcagtggttaccacccccatggaggccagcaagctaagatccatggcttgaaattcttgctgccagcacagcagtctgaagttgacctcggaagctcgagcttggtggggggaggggcatccaccattactgaggcttgagtaggcggttttccactcacagtgtaaacaaagctgcctggaagttcggactgcgcagagcaaactgcagcgccacaaagctgctgtagccagactgcctctctagattcctcctctctgggcagggtatctctgaaggaaaagcagcagccccagtcagaggcttatagataaaactcccatctccctgggacagagcacctgggagaaggggcagctgtgagcacagcttcagcagacttaaatgttcctgcctgctggctctgaagagagcagtggatctcccagcacagtgctccagctctgctaagggacggactgcatcctcaagtgggtccctgacccctgtgcctcctgaccggaagacacttcccagcaggggtcaacagacacctcatacaggagag

SEQ ID NO: 846933 - DNA, 625 bp, Homo sapiens
caatttgatgagaggcccaagctagtgaaaccttcatctctgagataaattgagctgtttctgtgggaacagctgtcgctascatgggaaaattcccctaacccacaggctttcatcactgacttcactcagaaaacctgtgtttaaggtgtgtgtgttgaaatatatgggaacaattgctaattgagtctcgagtgcacccgtctgacttagctgaaactgtggctcttcctgcctcctttcccctctatagagtttttgcccatcatctagtttttgaacagttcttcaaaagagaacaggtagccacaaaaactctatggtgttatttcatgttgtctttgaaaataaatacatatattgtgtttgtacaccctgcaatccgtgggtcctgcatccccagaagggcacccctcaggaggggcatttcaactcttccctgtgcacaaatgaaacgaaaatctctgaatcaaagggaaggggagactatgcaattttctaatgtatatttcttccaacacatggatttgattcatgacaatggccaactttttgactattctggtgagatccctcctcctctgcgcaagtgagccttggcgggtaggcacgctagcatgggatg

SEQ ID NO: 846934 - DNA, 611 bp, Homo sapiens
ggcttgctctgatagatctctgagcttttcataggtccatccatcccctcatctacaccatccccatgcaccatccccacacgccattcacamacacgtacacatgagttatatcttgcagcacgcaaggttttagctcctttcccggatttgatttttaatctgctgttcttgggaatgcagctccccagaattgttccacggagggatcctttgtcctgattaacagtgggttctgaagtgcctcccctagaggcagagtgagaccatgtggggtgtgttacctctgggaccactcaagaaacctgtgctttaagaggcccaccctggcttgctctttgagatggggtctcaatctgttgcccaagctaagtgtagtggtgtgatcatggctcaccgcagtcttgacctcctgggctccattctcctgcctcagcttcctgagcagctgggacccacaggcatgcaccattatgctgggctaatttttgattttttgtagagatgaggtctcactatgttgcccaggccagtctcaaacttttggactcaagcaatcctcctgcctcagcctcccaaagtgctgggattataggctttagccaccacgc

SEQ ID NO: 846935 - DNA, 588 bp, Homo sapiens
aaaaaaattagccaggtgtggtgctgggcgcctataatcccagctaccggagaggctgaggcaaagaactgcttgaaccygggaggcagatgttgcagtgagcagagattgtgccactgcactccagcctgggtgacagagcgagactccatctcaaaaaaaaaaaatgtattatttagaaatattgaagaaaatggcatatgaataagccagaacaggtaaaagggattgtctctggaaagggggaaacaataatggttgggggttgctttataactatttggctttttaaataatgtgtaagaatgaattttagactaattgttttaaagtttataaccaagcctgggcaacatagagagacccccatctctacaaaataaaaataaaaaaattagccaggcacagtggcacacacctgtggtcccagctactcaagaggctgaagtgggaggattatttaagcctgggaggttgaggctgcagtgagcaatgattgaacaactgcattccagcctgggtgacatagcaagaccctgtctttaaaaaaaaaaaaaaaaaaaaaaaaaaaaaaaaaagccaggcggg

SEQ ID NO: 846936 - DNA, 588 bp, Homo sapiens
aaaaaaattagccaggtgtggtgctgggcgcctataatcccagctaccggagaggctgaggcaaagaactgcttgaacctgggaggcagatgttgcagtgagcagagattgtgccactgcactccagcctgggtgacagagcgagactccatctcaaaaaaaaaaaatgtattatttagaaatattgaagaaaatggcatatgaataagccagaacaggtaaaagggattgtctctggaaagggggaaacaataatggttgggggttgctttataactatttggctttttaaataatgtgtaagaatgaattttagactaattgttttaaagtttataaccaagcctgggcaacatagagagacccccatctctacaaaataaaaataaaaaaattagccaggcacagtggcacacacctgtggtcccagctactcaagaggctgaagtgggaggattrtttaagcctgggaggttgaggctgcagtgagcaatgattgaacaactgcattccagcctgggtgacatagcaagaccctgtctttaaaaaaaaaaaaaaaaaaaaaaaaaaaaaaaaaagccaggcggg

SEQ ID NO: 846937 - DNA, 587 bp, Homo sapiens
ggctgtctaatattccatcaagtaaatgtctcccgattgacttagccatacctctgtaatttacatgatgcaactgtgaataaagtagtatttgccaatgaggcttttttgatattctggattacagaatttctttaggataaattcccagatgtagacgcaaagggtcaaagaaaacagtaagtctgcagatgcacgaagccaagtattttccaagccacccgctgtggggctgcccatccttggagggattaattctttcttaatcctcaagaaaggattaatgcatttgttaggcagaagatgttttaatgttttaaaatgctctccagcccaaatctgagtcatcttgtaataataagaactcaaggccgggcacggtggctcacgcctgtaagcccagcactttgggaggctgaggagggtggatcacctgaggtcaggagctcgagaccagcctggccaacatggagaaaccccatttctactaaaaatacaaaaattagctgggtgtggtggcaggcacctgtaatcycagctactcaggaggctgagacaggagaattgcttgaacccgggaggcggag

SEQ ID NO: 846938 - DNA, 619 bp, Homo sapiens
tcagtgattcacatttgacataaaacagactagatgtttgttggaagcaatactttatataattgtgcaacctatttacacaaaatctttacaaacagaacccacattatttaaaccccaagatcccctcaagatccagagtcacctacctgcagatccaatttctgtgaccggccagtttataggcaaagtgaaagaaacatgctaactggataaaataaccatatgtccctactggaagccccattacttgaatcatttcaaccttgctggacaaaacaccaggagaatttgctataggaaacaaacctccacaaatggggcagggaagaaattacctaatagttagtctcccctctgctctaatttctatggttctgtgttaagaaaagccatcctgccacactgttgtgagagcttatgccccaacgagagggcatttcttatttaaaaaaaaaaaaagtccagaattgaacatttaagttgccatcatcaaaaggtgtgaaaactttgggagcgttttyccagggaacaacgcttttcaagatacaatggaaaagggccattttcctcattcaaaaacttaaatgctgagcaaagcaagtgtttctggtttgac

SEQ ID NO: 846939 - DNA, 608 bp, Homo sapiens
accaatgaatggtggctacagatggttactctaacacaatgaggcgctctgttggagagcatgaatgtgagacacagagagagaggagtagaaagcagkaggaacagagacgcaatagcagagagaagcaaagatgaaatagattaaaagagcagctgggagatagggaagtcatgtcatgaaaatggtagagtcatgtgagtagaaaggacagatggatatccactctgaggaacggtgagacaatgggtgaccataggtactgggttgcttgtgacactggagctggcacaattttggaggagaatgtagtattacctagttcacaggctcttgagtcagagaatcatgggtgtccctgggattcaaatcccagcttcatcactcacctgtcctgtgacttcatttcttaaccactgcatgccccagtttcttcatctgtgaaaactgtaattacgacacatggttggtgtaagaaaggaaaatgcatataagtgctgagcataattcctgacatattaaatgttagctgttattattgcaattgttattttatgtctcccaaagttttgcaaatcctattctagtcctttatcttcataaaatat

SEQ ID NO: 846940 - DNA, 634 bp, Homo sapiens
cacatatgtccttgtgtacacaacagtatcctgtggtcctgcctgcttggctccagtgttagagctgcaaaacaaatcattttacttcatgattaaagtttatttgcaaggataataaaaacaaggctattttctaattcaatgcaaaatgtaatgaatatatgttccttctgaactataactttgaaacatgaatgttagagtggtattaacacagcactgcaaaaatttttttgtcttccattttgtttttaacttccactgtcttggtttacttcctaagcattgttacaaaacttgatcactcagtaattcttttgtagaatatgaggattatttttgaatatttgtataatatgttctagtgtctctttctctgatgtctcattcatatttccaaaccataactttcttcataaacctcaaaccaaaagtagaccttaattagctatcatgacaatatctgatttaatgaagcctttagatctacctaaagaatgtcacactaatgtcaccatcatgcttttttaaattgtagactttttaagggaaaatcacgtttgatartttcctatccagatgtcacacaatgacacattcactaactcaatacttttgtgtaaagctgtttatg

SEQ ID NO: 846941 - DNA, 501 bp, Homo sapiens
tgctcaattcctttactggaggcttagagaagagaaagcaccgccatacattgtttccagctgyctctctttcttgcaattaacaaatactgagacatctaggtttccacctgtgatgatattttgagatttatattcaatttgcccatagaataattataaatcatttctattaattttgggtttacttaacgagaaacacaacaaaaatcacatccatctcttacccatcagtgtttttgacagctttggggctgacattaatatgttcatcaagaccttgttcactgctaaaacaaaattagaggaaatcggcaaatttcatactggcatttcttttttgttttgacaggtgcaagtcattcaatagaatcctagtgtaagaactcataagtttactgagtttccaatttatatatattagttaccatttttttaatcctcacaacaactcaatgacatcaatattaataccaccgcccccacccccacagcctttat

SEQ ID NO: 846942 - DNA, 620 bp, Homo sapiens
ggaataagccaggttaaaaaaagggaaccgaaagagaagtatgctggaatatttgcataattatcactccacctaaacgccaatgctaatctgcaaaatttcactttaggcctgttgtgattaatttgatttyggggacaactggctgttgccctacctgcttcaagctggtaaaacctgaaaagcttcaggtcccaaacgttcatttggcaaaggagagggatgtagttcttacctgatatttcaaacaagaatcaggtaaggctttgtcacagattggtctgtggaccagttgattggcaccatccaggagctgtaagaaatgcagaatcttgccctttgcccctgctacccctgccaattttagcttaattagaatctgctttatgaaaagatcctcaaaaagcattgaggtaacacatatttgacatcatgtatttcatttgcattttagatgtggctatgtcagggtaatgatctcactatctgttccaaccaacttgctaaaaatcgcatgtttcctaattctgtctttactgtttcattacttttggtgtttgttctgggctttactgagaaagtaaaacaggccatcactgtttaagttactgcatcccata

SEQ ID NO: 846943 - DNA, 595 bp, Homo sapiens
gaataattggctcacataattacaaagtgaagtcccatgataggccacctgcaaaatggggaagagagaagccagtagtgactcaatcagagtcgaaagcctcaaaaccagtgaagctgacagtgcagccttcagtctgtggcagaaggcctgagagcccccaggaagccactggtgcaagttccagagtccaaaggatgaagaccctggagtctggtgtccaagggcagaaggagcagaagcaagcatccaagacaagaagaggaaggaagccaggaaaactcagcaagcaaagttatcccaccttcttcctcctgcttttgttctaatcacaccggcagctgattggatggtgcccacccacattgagggtgggtcttcctctcctagtccactgactcaaatatcagtctcctctggcaacaccctcacagatacagccacaaacaatactttaccagctatctgggcatccttcaatccaatcaagttgacacctaatattaaytgtcacatgggatatctttacttcttgaccctttcagtggacagagctaggaaatgtgagtgtgtatacacatgcatacagacacag

SEQ ID NO: 846944 - DNA, 488 bp, Homo sapiens
ctgattttacttttctacttgtgcacctgcayttatgatgtttcatctccaattcgtttagcaaaattctgcctatgttagtcttataccatctcatcttcccttcacctattgaatcctagtatctcagaagtccaactcagaatatctccattctctgactacctaagtcaaaaatgatacctgactttgtattcctgtagcagaatatttataccactcgcattgtacttttagtgttttatctcacagaataggcatttgtatcagttgcaggttagtttccccaggaaacagactcctgagatgaagattgcatggaggaagtttactggaaaggaatctcaggatcagcatctgtggaggaatgaaggaagaaggcttgggcagaggagaaactgacctgtgatgtaatcacaactatggcctcacctgttcctgtggagagccttgaggctgggttggcctggtaaagttgtcccaaactg

SEQ ID NO: 846945 - DNA, 641 bp, Homo sapiens
ggtaaagaggaaatactacaagaggaagcatctgagatttagaattctagttcttgttctgtcatttctaggtgtatgattttagatgtcaggtatgaaccttaatttcttcacctgaacaatgcaaataataacacctgcctagtctatatcaaagcgttataaatatcaaaggaaatgagtgtgaaagtgctttgaaaaagtacgtgtagtggctcgtgcctgtaatcccagcactttggagggccgaggtgggcggatcacgaggtcaggagatcgagaccatcctggctaacacggtgaaaccccgtctctactaaaaatacaaaaaattagccgggcgtggtggcgggcgcctgtagtcccagctacccgggaggctgaggcaggagaatggcgagaactcgggaggcagagcttgcagtgagccaagatcgcgccactgcactccagcctgggagacagccagactccgtctcaaaaaaaaaataaaaaataaaaaataaataaataaataaataaaaagcacattaagagagaaaaaatgtaaatcttattggaagcctttttaaaaaaaggaamaatgacatgatgataattacaagaacatgaaatttttattaaataaaatcaatgtttaa

SEQ ID NO: 846946 - DNA, 505 bp, Homo sapiens
gatatgatttccttttcaaacctagcattctgcttwtgcctactgccctattgagtatatgttttattcgtaagtacatgaggctaaaagttgtgtatgggagtaagggcgggacatgtaagagtccattgtattctgtgggttgagtgttggtaaagaatttgtatttcttataccagaactagacaactagaagtgtaactcacatttcagtgtcacatagtttagtatgctgttgacagttctgctacatttctgacaattgcaatctccactttataatatgttgccaaatttataatacgatgccaaattttatcagggtagaattaaagtttcaggatatttctctctccaccctgccccaggtagcagaaaatttcttcatttcctttgccaggttttccaggtgaggtaatccctaaccaaggaaaagaatatagtgtctagctctattcagaagccatggggaagacagtttgtggggctttattcttctccccac

SEQ ID NO: 846947 - DNA, 597 bp, Homo sapiens
tgtcatcatatcatcatcatcatcattatcatcaccatcagcagcagcagcagcarcaacagcatcagtagtcagcccctctgtacacttgactgagtagaagttggttgttaacaattacaggcctctgcatgggtcacaaaacatgatctccaccctcaaaaactttaaaaggttcttagtcttttgtttgtttgtttgtttgttttttgagacagagtttcactctgtcgcccaggctggagtgcagtggcgcgatctcggctcactgaaacctctgcctcctggctcacccaggctggagtacagttgcgtgatctcggcttactgaaacctccgcctcctgggttcaagcgattctcctgcctcagcctcccgagtagctgggactacaggcgcccaccaccacgcccggctaattttttgtatttttagtagagacgggtttcaccttgttagccaggacggtctcgatctcctgacctcgtgatctgcctgcctcggcctcccaaagtgctgggattacaggcgtgagccaccgcgcccggcctttaaagtttagaataattttagtcaagtggcattcacattttctag

SEQ ID NO: 846948 - DNA, 620 bp, Homo sapiens
acttgaacaatagatagtaaaccatgctgttaagttacagtcaataaaagcagtgaaatactggggcaaagaagagacaagcaggtcagtgacacacctgtttacattgaaaaaaatatttgacaaaactgacatttcaaattagggaggaaacagtctaacaaataactgttggttatttatttagggaacagttaagtccctataccatagtatgtatcaaaataaattccagctagaataaagatctcaatattttataactatatagaaggagaaaatacaggagaatatcttcataacaacatgagtgatgaaagtcctttgcaaaagcagaactctaaagccagaagtcagggcagatttgactacaacaaaacttgaggaatatttctgtacagcaaatgattaaagtgtcagaacttccaggacaggtaaaatgtatttatttatgttgttgcttattaataacaacactgtctaaaaaaggattttggaatacttccagcagtttatatagaataaaataaaagattacatgtacacacacatttatgaatggaggtgaagcctatatatatatatatatatatatatwtatataaacacacacacatata

SEQ ID NO: 846949 - DNA, 641 bp, Homo sapiens
tgttagagtacattaattatattctrggtttttacccaagtacacgagattctttaacatgcggattctttctccaccttcaacctcattcagaatgttctaacactgaaaaaaatgttgtcaaaggataaacatacaagaatgctatggaggaagaataggattcagaggttcctgagagaaggcaaagggctggtttgttgctcttttacctactagaaaagataattaaggccaggtgggatgcatacagtaaaagagggcacctgaacaaacaagcattgaatttggagaatgcctacgagtctgtgctgggctacgttcccaagacagactcagaagttacctgccctgccaggtacctcctaatctaccctctccaaagggaagattttcttcatggctgtaggaagcgcctcttgaaagctccaaatcttattttttttctacatgatgaattggcacagtactaagtttgactcattatattaaacaagaaatttttgatggtggaatggatccagagttccttgaaactgtccaaatggtcccgcataaaggaaacacttcacagtcgtttcagtgtacctacaactaaaaaattggtgtcagtctctagattcaagctgatggttcctgtg

SEQ ID NO: 846950 - DNA, 592 bp, Homo sapiens
aagaaatttttgatggtggaatggatccagagttcyttgaaactgtccaaatggtcccgcataaaggaaacacttcacagtcgtttcagtgtacctacaactaaaaaattggtgtcagtctctagattcaagctgatggttcctgtgggagaatgcaaattcaaggtgaattagaagatgtaatgtgagatgccatctgtgaaataagaaatggaacactttatttaaattcttggtttcttgtagccttctaatcagaaatgtaaaagaaaggcttggcatagcattctggaataatactgtgactccttttgcctttccatgtgatcttattctttttgtgtttatggaacgtagataagatgctgagtgctgcattctgcattttttgcctcaggcatttaacagaatgccagctttccatgtgcatggacctgcactcactcagtacctactacttggcaagccgaagtcacccactgtgtaccctttcccctaatgaagcttccattatcccactttaacacctgtattctcaatttactgtccctatcaaaagctctcaagaaatgacctgaaacctttacataaa

SEQ ID NO: 846951 - DNA, 477 bp, Homo sapiens
gtgatgcaggggctccccagccagcatctcctcccacagcaggctgccyacttccccagcggacgtggagcaacagactggaatgagccccctttcctttccctgaaatactcagtgcagtgactaacataaggttcagaaatattatttgtttgtttataatttatatacaattgcttcctagaaagacttgcaggaggcagggccatgctgctggctgtggatggggtctctcttcacgtctgctcctgacaaacacagagcagtgatgtcagacggcagctgccatgagtgagaccaacgacaggacagcgacagaacagccagaaagcaaagctttgttccagcatccccaggaagtcttcgtgtggcttttccctctctccactggaaacctcactttagggtgaatccttccatgtaggagccacgaagtcattttacatgtctaattaagagtagtcattcttccaagaa

SEQ ID NO: 846952 - DNA, 622 bp, Homo sapiens
acgtaagatgcaccttcagggttaaagcatctagtccagtctgaataaaacatcaaaagcacctacaatcccaagctccttcaagaactttgcaggcagtcttcrggtgagtttggtaagactattaatcggagtaatgaaataaagtattatcacatctatttatttttctcattttcttttaacttctcttttgtgtatgttctaaaatacacataattttcagttcatagggcattttccccttgtaagtaaatatgaatatatttcagagtgagctcaaagttttacgttagatttaggtaggcattttttttttttttttttaagatggagtttcactctgtcacccaggctggagtgcggtggctcgatcttggctcactgcaacctccgcctcctgggttcaagcgattctcctgcctcagcctcctgagtagctgggattacgggcacccaccaccacacccggcttatttttgaatttttagtagagctagggtttcaccatgttggccaggctggtctagagcccctgacctcaggtgatccacccacctcggcttcccaaagtgctgggattacaggcgtgagccgacaaggtaggcaaaagttaaaaaca

SEQ ID NO: 846953 - DNA, 622 bp, Homo sapiens
acgtaagatgcaccttcagggttaaagcatctagtccagtctgaataaaacatcaaaagcacctacaatcccaagctccttcaagaactttgcaggcagtcttcgggtgagtttggtaagactattaatcggagtaatgaaataaagtattatcacatctatttatttttctcattttcttttaacttctcttttgtgtatgttctaaaatacacataattttcagttcatagggcattttccccttgtaagtaaatatgaatatatttcagagtgagctcaaagttttacgttagatttaggtaggcattttttttttttttttttaagatggagtttcactctgtcacccaggctggagtgcggtggctcgatcttggctcactgcaacctccgcctcctgggttcaagcgattctcctgcctcagcctcctgagtagctgggattacgggcacccaccaccacacccggcttatttttgaatttttagtagagctagggtttcaccatgttggccaggctggtctagagccyctgacctcaggtgatccacccacctcggcttcccaaagtgctgggattacaggcgtgagccgacaaggtaggcaaaagttaaaaaca

SEQ ID NO: 846954 - DNA, 642 bp, Homo sapiens
agctttctgctttacccagaatacctgcaattatgcagtaggtcattttagaagctctaagtctttaagtaatgataggcatacttgcgtaatacatagcacattgcctttattttaggattttaatcttctagtatatacaaaaggggaaacccaaattacatgaatttctaaaagggtttgatccaacataagtctgtttagctgtgtccattatagatactttaactagccttctcaattctgttcagtttccagagaatttactctagtttctaaggacatatgagaccatattagaatacttctattcatgccatcatggaaattggctttacttttacataccaaaaaaagtacttggcatataaattggttcatgttgaaaggttatttacaggttgcaaatgagtattaatcacatatctttataaacacttattttagtattaatcaactaaaaatgatttccatttgccacacagaatcagattcagtgccatttcactgccactcaggaggagastacaaaagctatagagacaataacatatactgttttctgaatttagaggtttgttttgtttagttagttagtattttgttttgagcactgattttatgtcagggtccatgctagtg

SEQ ID NO: 846955 - DNA, 624 bp, Homo sapiens
acattacttgatttcagaactatcataaagctactgtaatcaagacagtgcaatactggcttaaaaaatagaccaaataaatctatagaacagaatgaatcgtgaatccagaaattgactcacacagrtaagggcaattagatttcaacaaaattttcaaggtaattcggtggagaaaggacagtcttctcaaaaaaatgatgctgaaacaactggatattcatatccacacacacacaaaatgaactgagatccatacttgacactatatacattgtaagactaaaataggtgaaaatgggtaatgaagctaaatgtaaactcaaagatttttttttaaacttctagaagaaaatataagtgagacagttgcagtggctcatgcctgtaattccagcagttcgggaggccaaggcaggaggactgcttgaggccaggagtttgagactacagtgagctatgctcacacgactgcactccagtctgggtgacagagaaagatcctgtctcaaaaaggaaaaagaaaatacaaatgaaacttttgtgaccttcggtttggcaaagatttcttaaataagacaccgaaagaatgactggattagatataacccataaaagaataaa

SEQ ID NO: 846956 - DNA, 591 bp, Homo sapiens
tccacatcctctccagcacctgttgtttcctgactttttaatgatcaccattctatttggtgtgagatggtatctcactgtggttttgatttgcatttctctgatggccagggatgatgagcattttttcatgtgtcttttggctgcataaatgtcttcttttgacaagtgtctgttcatatcctttgcccactttttgatggggttgtttgttttttttcttgtaaatttgtttaagttctttgtagattctggatattagccctttgtcagatgagtagattgcaaacattttctcctattctgtaggttgcccattcactctgatggcagcttcttttgcagtgcagaagctctttagtttaattagatcccatttgtctattttggtgtttgttgctattgcttttggtgttttagacatgaagtccttgcccatgcctatgtcctgaatggtattgcctaggctttcttcyaggtttttatggttttaggtctaacatttaagtctttaatccatcttgaattaatttttgtataaggtgtaaggaagggatccagtttcaactttctacatatggctagccagtt

SEQ ID NO: 846957 - DNA, 630 bp, Homo sapiens
taaatcatttatgtagctttgcatatagttggtggtaatttgtaactcttatttgctttgaactttctcctccttctgctgagtaaatattaacacaatttttgtagagctagtgaactcacaggtcagttttgacaatagtcaggctgtctttttaagaaaagtgaattgtttaaattgctacagctccatttcttatttctagaactattaccaataaaggtaaatgttaatataataattgcttttgatagtcattaaatccaactatactttctaggaataaaatcccaggctttattacattacttttcttagctattgaagatactcagctttaagcatttgcctttagctgttttatgctgtatttggaagcgtggcattatatttaagaacatgaaattattgtatatttcaagattgtgaaggtataattttgttttttgattagaaaagtcaaatatcctgatattggctgatactgttgcctgtttaggtttyggtatattttaaaaattaattcctgtatgttctctgtgaattaaaataaagtgaacaaataatgtaattgcatctgtttctttgaaacaaagtcaaaaatcaagcattctaaaagattaggcttat

SEQ ID NO: 846958 - DNA, 492 bp, Homo sapiens
gggaaagacatctttgagggcgatttgtaaaattctatctaccacactcctgcaatctggtaaaggtctggtttagattatttcttgatttatcttctaactgtagaatccctatcatggtgaacactagcgcaaaaaaggaaaacataaaatatagcacttataaggtacaaaaaaaaaaaagaaaacaaaaagaaacacacacacacacaaaacaaatcaaaattaccggctcagcagcctcatagtttaggcctaatagccacaataattaaatatcacataccctactttagggtttgggaggtgacagaagggaggaaaaattgtaaaaatcgcatgtggtgccatgacaataactgtaataggtctttccattttgttgaccatcaggaattcgagaacacaacataaccaatgyctgtttatgttggtttgttctcttagttacaggtaataaaattcctggtgcaaactgatttaagcatgtaa

SEQ ID NO: 846959 - DNA, 526 bp, Homo sapiens
tgccagtcaagatcttccttctaaggtgaaggataagttgctacatttggcccctcctacaaccaagaaagaggcacaatgccaagtaggcctatttggattttggaggcaacacattcctcatttgggtgttttactccagcccatttattgagtgacccaaatggctgctggttttgagtggggcccagaacaggagaaggctctgcaacaggtccaggctagctctcttgtgcagctagcttgtgcaagctgctctgcacttgggccatatgacccagcagatccaacggacatatgtccacatggtttagaaccccactcctggtaccagtttactgcattcatctgttctcacactgctaataaagacacaccttggactgggtaatttataaaagaaagagatttaattgactcacagttctacatagctggggaggcctcacaatatggtggaaggcaaaggaggagcaaagtcacwtcttacatggcagtaggcaagaaagcttgtgcaggggaactc

SEQ ID NO: 846960 - DNA, 583 bp, Homo sapiens
aattagcaataaaaaccaacactaatttctgtttaaaacttttggggagggaaaacaaagcatttaagaaaatcatgttgcttaatacaaaaaagcaacaatgaatttcaatgatatgtaaataagtaactatttcaaatcaccaaattaccctttttaaataaggaaatatgtttttatttcagttctttggtacttcagagtcaaagctagagctcctaccgttcaaaatttttagtgatttatttaaaggtcaagatatagacattattctaaccactgaaacatatttttattcctttctgaatgttgtaatccaattacatagcagtacattttattaaatatattcagttcagttctgaagaaaaactggttttattatttatagcaattatgttttcaaatgtcctccttcagaagtaaacctggcagtttccattgagtttacctttttaacaaataattcagaatttaattaytaaatttcataaggaacataaaactgaaaaatgtgaaaatttaaggttttgcttctgatgaaacatttagaatgaatcatcagttaggtttccattcagct

SEQ ID NO: 846961 - DNA, 641 bp, Homo sapiens
ggtctcaaattcctgacctcgtgatctgcccgccttggcctcccaaagtgctgggattacaggcatgagccaccgtgcccagcccaaatctaaatcttattaatcgaaatcttgaataaatccaaatgtgggtgctgtggcttccaagatcctaaacgatctagtactgctttttttttgaaggcctcttctgtcttctctcttaccctttatcgccttatgggctgctccagccacattggacctctacgtatcctcagaaataccaagctttccttttaggacttttgcatttgtttgtccttgtgtattttgttagcctcctgccttcccccttcctgattctttgtatagctgaccactaactggcaggcctctacccagtaccacctcctggatcacacttgcctagaccactgaatctaagtagccgctccttctcccttgcccacagtcacattatccagccttgggtaatgtgcattggatcttggatttcattgcccttatcaccatttggacttacccktctcattcttaccctctcctcactataatataaactccagaagagagtacacttcacttgttcaacactgctccactacctgaaacatagtaggtgctccataaatatgagg

SEQ ID NO: 846962 - DNA, 603 bp, Homo sapiens
cagcacatccaaaagcttatccaccacgatcaagttgacttgatccctgggatgcaaggctggttcaacatatgcaaatcaataaatgtaatccatcacataaacagaaccaatgacaaaaatcacatggtcatcccaatagatgcaggcctttgataaagttcaacatcccttcatgttaaaaactctcaataaattaggtattgatgaaaaaatctcaaaataataagagctatttatgacaaacccacagccaattcatactgaatgggcaaaagctggaagcattccctttaaaaaccgacacaagataaggatgccccctctcaccattcctattcaacatagtattggaagttctggccagggcaatcaggcaagagaaagaaataaagggtattcagataggaagagaggaggtcaaattgtctctgtttgcagatggcatgattctacatttagaaaaccccattgtctcagcccccaaactccttaagttgataagcaacttcyaaaaagtctcaggatacaaaatcaatgtgcaaaaatcacaagcattcctatacaccaataatagacaagcagagagccaaatcatgaatg

SEQ ID NO: 846963 - DNA, 603 bp, Homo sapiens
cagcacatccaaaagcttatccaccacgatcaagttgacttgatccctgggatgcaaggctggttcaacatatgcaaatcaataaatgtaatccatcacataaacagaaccaatgacaaaaatcacatggtcatcccaatagatgcaggcctttgataaagttcaacatcccttcatgttaaaaactctcaataaattaggtattgatgaaaaaatctcaaaataataagagctatttatgacaaacccacagccaattcatactgaatgggcaaaagctggaagcattccctttaaaaaccgacacaagataaggatgccccctctcaccattcctattcaacatagtattggaagttctggccagggcaatcaggcaagagaaagaaataaagggtattcagataggaagagaggaggtcaaattgtctctgtttgcagatggcatgattctacatttagaaaaccccattgtctcagcccccaaactccttaagttgataagcaacttccraaaagtctcaggatacaaaatcaatgtgcaaaaatcacaagcattcctatacaccaataatagacaagcagagagccaaatcatgaatg

SEQ ID NO: 846964 - DNA, 529 bp, Homo sapiens
cctggcctcccttgccatcctggacacctaycctggcctcccttgccatcctggacacctaccctggcctcccttaccctcttctgctcagggttctccactgggtggcaaatcccaccccggaagagaccctggaggcctttcccctggcttcaggccatcataaaacttactaaattttgctaaagaaaatcaccttctaaataaaattatttggcaatttaaaaatcagaattgcaagataccttagaaactgcctagttgagtctctttaagatgaggaaactcatgcttgcaggtatagacagctctggtgccagtatgtttcatacaagtgatgtgattacagtcagcccattcgcttcctagggtccaacctccttttctataatatgggcaaaataatagtttccaccctccttgtttggagggcatttaccagttcctaagtctgtaggggcgcagcagtgaaaaattgcacaccagtcaagccctcctgacctcacagtctagcatggaagaaagactt

SEQ ID NO: 846965 - DNA, 529 bp, Homo sapiens
cctggcctcccttgccatcctggacacctaccctggccwcccttgccatcctggacacctaccctggcctcccttaccctcttctgctcagggttctccactgggtggcaaatcccaccccggaagagaccctggaggcctttcccctggcttcaggccatcataaaacttactaaattttgctaaagaaaatcaccttctaaataaaattatttggcaatttaaaaatcagaattgcaagataccttagaaactgcctagttgagtctctttaagatgaggaaactcatgcttgcaggtatagacagctctggtgccagtatgtttcatacaagtgatgtgattacagtcagcccattcgcttcctagggtccaacctccttttctataatatgggcaaaataatagtttccaccctccttgtttggagggcatttaccagttcctaagtctgtaggggcgcagcagtgaaaaattgcacaccagtcaagccctcctgacctcacagtctagcatggaagaaagactt

SEQ ID NO: 846966 - DNA, 637 bp, Homo sapiens
tatgtagctctatgcagatgctgatggctagaaggctaaacaataaatagatattattgagaaaataatgtatttttacataacaagcctcatatttttcagtaggtaaggtcatttaggttagacaaaagaaagttttggcttctcttgccagtatctactttctcataatttctaagcgtgaacctatatattttttgatgtgatgttctgaaaataaatctaaggattaatgtcataaaatgcttctttgtaattatagcttagaagcacatatttaaaagatttaggctgggcacggtggctcatccctgtaatcccagcactttgggaggctaaggcgggtggatcacctgaggtcaggagtttgagacccgcctggtcaaaatggtgaaaccccatctctgctaaaaaaacaaaaattagtcgggtgtggtggcgcatgcctatagtcccacctacgcaggaggctgaggcaggagaatcgcttgaacctgggaggccgaggtygtagtgaggcgaaatcatgccactgcactctagcctgagcaacagagagagactctgtctcaaaaataaataaataaataaataaataaataaatagatctaaatgttgcactattcaaaatctaaa

SEQ ID NO: 846967 - DNA, 581 bp, Homo sapiens
ccacaaagaggtagggcaaatttctacaatgccaggccccttggcagcattttcaggaactgcagctcatgactagtgaaacgatataatcaagacttgcaagatgtgaaaggcacagttcagcttggtgactcggggtaaatgttttattgctcacccggagaacagtgccaccagtcttctgtcccagggtgtgctttccacttactggataacaggagtttggattcttaattggctaaagaggatcgttttgcttggctgattatttgtgctttgaatggaagtgagaagatcttcagattttagagcgtgtgttagagtgtgtgttcaattctaagaaaagcacttcatttgtctggttaaattagctgcgccagttacatatgtcttaaaattgaactaaaacagaccaacattggcaagatcttggagttcattgaagagaaactaaactaaatattttcaaattgtaatggtgggtaaaactaaagatctgaattgggctacaggggtttataaacttaggattctatgggaaggggtaaagaaattaatycttcagccaaagttctttcaag

SEQ ID NO: 846968 - DNA, 658 bp, Homo sapiens
tccagagagccaggagcaaggggaattggtgatgctagaaatttagagctggaaagagcagaaaaaagagcatcctaaatagcgatgcttggtcttctccagcagtcatggagsagtcagggttcactgtgagaagagagacaccatttccacaaattgtctaatgagaatctggagaatgaccctcttattctctgtggatttgaattttctctgtaggcttcaatgagttaaagaaaatactcttcaaactacatactaagaagttcagtctttcttatggcaaataaagaaaacctagtaactttttaaaactctactttattattatgacttgagatgtttgtttctaaaattacaacccagtggactggctgtacatttttctatgtcatttgtatacaatctaaaaggtctaaataacttgattgtgaatactgtgtttgctgtaaaaaaaaaaaaaagagagagagaaaaaaaggcacacttagatgagtggcctacgggtaaactatgaaagcagagattctactacacagataataatttttcattaaaaacttgtcaaggtttagttgataaatgtgattatcaataaattttacatcctgttatttaatcagcttatatatgtatctacagtcattgcataaacatg

SEQ ID NO: 846969 - DNA, 612 bp, Homo sapiens
cttcttccaagcattctctataagcagagctcccaaagcctggaaaatctttgaggatggggagggaggactcatttctacagaaacagatggttgtgcagygatctaagtgagagggcagcccaggacagcagatggtcctgggaagggctcaggcctccctccctcacctgatgcccccacgcgtggtcagcccataaagacctctttaccatggtgaaacctacacatgcttatgaggttaaatgcctttcctcttcactgagactgctacatttgagtctattttcaacccaaatccacttataaaaagcatcaggggagtggggtcagtcacaaactgtaaattacgtctctatgtgctcttctctgtagacctccctggttgcgcctgcccggagggaaggattattctgagttgtctgtaacctggtagggcgatgtctaaagaaatcagaatccagctctgaaggctgtgtcttagcttcctggagccacgtaacaaattaccatacacagaatggcttaaacaacagaaatgtatcgtctcccagttctggaggctacgagttaaagatcaaggtgtggacagggccagctctcactgcaggc

SEQ ID NO: 846970 - DNA, 431 bp, Homo sapiens
taggaaaaaaccaattttctcctactgtactctcaacacagagagtatagcgaccagatgtgtggatttttctcacactgaccaattctctgatgctagccggatagcctatattcaattcacttctgacactaactagagctcgtgcagatctctcatggattaagagctcagtctcacaagactgtgccctacttcatataccaattgcaagcagtaggttcccaggtcaccacaacttctgaccggtttggccacaagtgggaggttaccacaacccccttctcaggttcagtaatgtgctggagcgctcatagaactcagggaaacacttatatttatcagtttattataaaggatgttttaagggatacaggtgaayagccaaagaagtactctgggtaagatatgtaggaagcagcatggacctt

SEQ ID NO: 846971 - DNA, 640 bp, Homo sapiens
ccatgtctctgcatgcttgcatggagaacatgcattgtccaaggaccctcaaatccctgcatgccctgcgcatgccctaaccctgaggaggtgctgaacccttgctgatgtgcagaaggggttaatcagaccatgtggacacaggtagcccaaggaacaacccccatgccaacagcactccatcccgacctcataccatgtgcacagcacctgatgctggtggggtcaggagtgtggcctgtgccacactcagaacgcgggatgaacatagaggaaacactagaatggcaaaggctggttgtcacctgggggcctcagaagccacggcaccagaggagagctcaggagtcagcctgctccaaagctcttcctgcctgtagcatgcaccctgtgcctccgggccaccaaaaacagcaatcacgtcagctgagacgcaacacactgcatgccgaacacacaggagagctcacacgcacaaatgttctcggcttcccagacaccaatgaaggagcttattatgaatatgaaggataattaacrtatctattattttattagacatcacaattcaaatacaataaagtatataaatataaatatataataaatgaaatatataaaataccatcttagcttatga

SEQ ID NO: 846972 - DNA, 472 bp, Homo sapiens
gccgagggtgtcattttagtaggagtgtgggtgattgayacagttaggatgctgccctaacaagggcaaaaatcgcagcaaatgggagggttatttctgtctcatatgcagtctgagtgtgtgcactgctgctggggcacctcatggggtcagactcccagcctccttggatttttttttccctctcaggcttcatgtgtgacttctatcctcccggtggttctagctcacgagagcaagagcacgcagccaccagtgagaggagatgaaggagggtgtgcacattctcttcaagggcacaccctgggcgtcacacacgtcccttctgctcatatctctgtaaaccaaacataaaattctaagcccccaactgactaaatgagcccctttttggccaagggcatccccaagaaactgaaaaactagttcaggtcatgacaagaagtgggggggttgacacgcctcattgtaa

SEQ ID NO: 846973 - DNA, 592 bp, Homo sapiens
ttaacctgtgacctaaaatttataggaagaaccaaaagaataaaaacacaaccatttttataccccatgttcatcgaggagcagcctagcgacgtcgatgtgmccacactggattgcgtccatcaaggcggtgacgccacagttgtctctgtagtctggttcatattggcacctagagccaaaaccccaagtaagagctgagaaaattcaatacctcaaacccaggggacagttgacacctgatcacctgcaggtgaactgcgtgtgtgcaaatgacctgtgagcatggagctctctctattctcccccatctcagtgtccgaactgagcactaagccttcaggagcgtgatggtcttccctagcagacctgctgctcctctaaccttctccatcccatttgacagcacttggtctcttcagcttcctgcaccagagacctggaagccaccccttgccactgcctttcctgcatccttcataatcaattgattacccccatccttcaattccacagccaaaatatttaagacatctgtgtctgagctgggcacagtggctcacgactgtaatcccagcactttgggaggccg

SEQ ID NO: 846974 - DNA, 573 bp, Homo sapiens
aggacacaaaaaccatctcatcgtttttaacagctacagaatattccactgtatggaattcctaccattaatttagccaaccccctatctggacatgtgattgctacattctgttgttatcttacaaacagccattaattgaaaatccataggtgcaagaacatctgtaggataaaatcctacatataaagttcaggggtcattttttctatatacattttccaacaactatttgatgatgggctataatctataatctgcttttgctagttcatgacttttattagattaaaaaatcagccgggcgctgtggctcatgcctgtaattccaacactttgggaggccaaggtgggcagatcacttgaggccaggagttcgagaccagcctggccaacatagcaaaacaccatctctaccaaaaatacaaaaattagccaggtgtggtggcaggcgcctgaaatcccagctactcaggaggctgaggtaggagaatcgtttgaacctgggagggrgaggttgcagtgagcaaactcgagccgctgcactccagcctgggcaacacagtgagattc

SEQ ID NO: 846975 - DNA, 629 bp, Homo sapiens
agagataggatggccagcacagggtcccctgacctcggcactattggcattttggggctggataattcttatttgtggggggctgccctgtgcattgtaggatgttcrgtggcatccctggcctccacccatgagataccaatagcagtccccaccaagctgtgagaatcaaaaatgtctccagacattgctgatggcccccagcccttccttgagaacgactggcctcatgaaagccaccactaagtctcctagtgaaaactcgatagttaggtgtcctgggctcaagacccctgtctcctgaaaagctccacctggcaacactctcaagcctctcagagattcattttcctcaagttaaaaggttggaagctcccttctgccagcatatagagcccttgtcagaaccatctgcattgttgggacaacgcttcgaacggcaaacgcagtaatggtgtggttctttaagaaactgggagaaagacagccagtgagacagatacaggggacacaggggtgttgctcagccacgtggatggggctcggtgtggaatgggctctgattcccccaataatcgaggcctgcaaattccctgcaaatatgctgtgcacatctgtcaggatttatt

SEQ ID NO: 846976 - DNA, 549 bp, Homo sapiens
cctgtctcctgaaaagctccacctggcaacactctcaagcctctcagagattcattttcctcaagttaaaaggttggaagctcccttctgccagcatatagagcccttgtcagaaccatctgcattgttgggacaacgcttcgaacggcaaacgcagtaatggtgtggttctttaagaaactgggagaaagacagccagtgagacagatacaggggacacaggggtgttgctcagccacgtggatggggctcggtgtggaatgggctctgattcccccaataatcgaggcctgcaaattccctgcaaatatgctgtgcacatctgtcaggatttatttccaaggcagaatggggctcaaacctcctcttggggaggcaggaaatcagcttgaaaaaggacccaagagcagatgacagccttgccaaatgtctggatggagccatccgggcaggcgcgaggctgccgccacrgtcaaaagaccagcatccagaatcccccggggaccgcaccacctacgcagcctctccgaggaccaatgtccacgtcat

SEQ ID NO: 846977 - DNA, 632 bp, Homo sapiens
tcttgaaatcaaaaacatgcatgcataatatgaccatgtactatgcatggatttatacaaatgttagtaaaagtaccaacttggattgtgaagccagattcatgatcgtggctgcctctgggaaagggggagatgggacaaagcagactgatttcatctgcagtcgtttcttataaggaaagacaaggcaaacatgatgaaatattataaatggcctattctggtcagtgggtatacgagtgtctgttattttttggtatttttgaacttcctaaaattaagagcagtgctttgagcattggagtgcaccaaacgcgtgatggttataatcagttgtggccgtgggattaagtgctctctgaattcagaagggtgccccaggcttggggtccctgccccgcagtgtcggggcaccatgtagcatggggtggctgagtgcgatgtggggtgttccaggtggtccgggccattgtggaaaatgggacagcatcctccaggrgcctcagagggccctgccttcccaacagtctccatgctgctccaaggagtggggtggcctttaggcctccacctgttcctactaaggaggtgaccgttatataaatctcccctaagctccacctctacagaga

SEQ ID NO: 846978 - DNA, 632 bp, Homo sapiens
tcttgaaatcaaaaacatgcatgcataatatgaccatgtactatgcatggatttatacaaatgttagtaaaagtaccaacttggattgtgaagccagattcatgatcgtggctgcctctgggaaagggggagatgggacaaagcagactgatttcatctgcagtcgtttcttataaggaaagacaaggcaaacatgatgaaatattataaatggcctattctggtcagtgggtatacgagtgtctgttattttttggtatttttgaacttcctaaaattaagagcagtgctttgagcattggagtgcaccaaacgcgtgatggttataatcagttgtggccgtgggattaagtgctctctgaattcagaagggtgccccaggcttggggtccctgccccgcagtgtcggggcaccatgtagcatggggtggctgagtgcgatgtggggtgttccaggtggtccgggccattgtggaaaatgggacagcatcctccaggggcctcagagggccctgccttcccracagtctccatgctgctccaaggagtggggtggcctttaggcctccacctgttcctactaaggaggtgaccgttatataaatctcccctaagctccacctctacagaga

SEQ ID NO: 846979 - DNA, 568 bp, Homo sapiens
tatacatatatatatatatacatatatatatgaagagatttattatgaggaaktggcttacacaattatggaggctgagaaaccccaccatctgtcaccggcaagctggagactcagggaagctggtggcataattcagtcctaagtccaaaggcctgagaaccagaggagctgagggggtaaaacccaatccgagagcagaagaccaatgtctcagctgaagcaggcaggcaggagataaaagtggagaattcctttttccttctccctcagtggactggttgatgccactcacattggagaggatcatctgctttactgggtccatagattgaaatgctaacctcatccagaaacactgtcatggacacacccaatctgggcatcccagggtgcagccaagtcgacactttaaatgaaccatcacggtcctctggtgctcagcacagcccctggagcacagcacatgctaaaggtgacaagagctaatgggcggaactttgcacagaagccaggtgcatcggcttttgctgatgaatgtggccaagctttcctcccaggggtagta

SEQ ID NO: 846980 - DNA, 603 bp, Homo sapiens
acaagattcttaaaagaagggggaggtgagttgaggtgggagttagggaagaggggaggtagaaatggcatcattaaggatctttattccaatggaataaaatagcatcaggtcacagaaggcagttacttccaggagccacaagttgtgtttgtgagtaagttggacacagacagaggtgtacagtgaccgagtgaggaggatgtgcctcacgaagtgcgggcagggaggagagtggagaccctgagctgaggaagtgagccatgagacacagcacgtgggagccaggtggctggttcaaatctgagcctcagttgcttcacctgaaaattgggcttaattgtaatctcgacttcagagcatggtggtgaggcttagctgtgctgctctgtgtaacacgttcaacggagagcccagcacacagcaaggcaggcgttagcatggtcagtatggtcagttatggttatggtgactcaagggaccaatggcacctaaggttaacttctccaacctccgcgacaggaaccaagagacgtgaaggaatttcagtgcctccacatggttctccamaaaggatccaggggtggagttgagcttccttcc

SEQ ID NO: 846981 - DNA, 612 bp, Homo sapiens
tatttatggggtacatgtgatattttgatacatgcatacaatgygtaataatcaaatcagggtatttaggatatccatcacctcacacattttatttctttatgttggaatatttcaaatctcttccaattattttgaaatatacaatatattgtttttaactatcattcactctactttgctatgaagcactagaactcactccttcgatctaactgtatgtttttacccattaatcaacctctttttattcccccttgattctttgcagcctctggtaaccttcattctactctctacctccatgagatcaacttttttagctgccacatatgagtgagaatatgcaatgtttgtcttttgtgccgggtttatttcacttaacatgatttccagttccattcatgttgctgccaacgacagaatttcattcttttttatagttgaacagtattctattatgcatatataccaaattttctttatctattcatccattgatggagacttaaattgagtccatatattggctattgtgaaaagtgctgcaataaacatggggttgcaggtatcactttgatatattgactttttttttcctttggataacta

SEQ ID NO: 846982 - DNA, 593 bp, Homo sapiens
ttgaaatgtatggtactcaattattagttatattccycgtgctgtgcattaggtccaaaaaaatcgaacgtattccttttatctaactcaggctttgtaccctttgactattgtctccccattcctcctatgtcctccagcctctctgttaaccaccattctactctctgcttctatgagctcagttgttttaggctccccatattaagtgagaacatgtctatttgtctttctggcttatttctcgtatcataatattctccaataccgtccatgttgtcgcaaatgatataatttcttcttttttcattgtgtatatgtaccacattttctttctttgtctgttgatgggtatttaggttgattgtttaatttggctattgtgaatagtgctgcagtgaacacggaagttcagacatttctttgacacaattaattatttcaaaccttcagctaaataatctagaagtgggattgctggatcatatggtggatctattttcagttcattgagaaagctccataccattttccataatggttgtattaattcacattcccaccaacagtataaaagtgttctcttttctcca

SEQ ID NO: 846983 - DNA, 414 bp, Homo sapiens
tgttgggttaatctgtcagcagcagcagcagatgtactatgacatacattttctgatagttgtattttttcacttttgtttgtattatttccttctttgacctttaacaaaagtaatatgaayaataattattattttattcaataaaaagaagtttttccctgattttttcacttgattcaggttaactatcaccgttttaatgataaaaatattttgtgcttactttaattttatcattatacataattattataattataagatactcatcattttatcattgaaatttttgtcaagtctgctcatttctgtttgagtgaatagaagaattttccaaaatttcaaaaaggactcttctccattttgtgcttttattcccatccactctttgctatctgatataaatattta

SEQ ID NO: 846984 - DNA, 485 bp, Homo sapiens
aatattaaatcttaagacacatatggaaaacagtatggtagaacttagtaaactacaagaatataaatcagagctagatgaaagggcaatgcaggcagtagaaaaattagaagaaatmcatttacaggtgagttgtttcaatcaggtaagtttacttgtaatgtgctttcatttatttcacttcaaattatatttatatagtgtttcctctgcctctcttgtagcaatctgctttgtagagttctagaaaaaaatggtatctcttttttcttttaaatatttaaatatccattattattgtaacaaaatcaatctttcagagtaatgattctcattatggagtcatttgatgattaagaccagttggcataggaagaaattgtgatttagaaattatgtgataattatgaattggtcttaagctacagtgttcattgatcactttttcaaattacgaatggattctattactttttatatgacca

SEQ ID NO: 846985 - DNA, 578 bp, Homo sapiens
ctctgaccccgcctcctttctaaatacatcgacctgtgttcttcagccctgtccctttctattcctctgaccccgcctcctttctaaatgcagcgacctgtgttcttcagccctgtccctttctattcctctgaccccgcctcctttctaaatgcagcgacctgtgtccttcagccctatccctttctatgcctctgaccccgcctcctttctaaatgcagcgacctgtgttcttcagccctgtccctttctattcctctgaccccgcctcctttctaaatgcagcgacctgtgttcttcagccctatccctttctattcctctgaccccgcctcctttctaaatgcagcgacctgtgttcttcagcactatccctttctattcctctgaccccgcctcctttctaaatgcagcgacctgtgttcttcagccctgtccctttctattcctctgaccccgcctcctttctaaatgcagcgacctgtgttcttcaggcctrtccctttctattcctctgaccccgcctcctttctcaatgcagcgacctctgttcctcagcactatccctttctattcct

SEQ ID NO: 846986 - DNA, 578 bp, Homo sapiens
ctctgaccccgcctcctttctaaatacatcgacctgtgttcttcagccctgtccctttctattcctctgaccccgcctcctttctaaatgcagcgacctgtgttcttcagccctgtccctttctattcctctgaccccgcctcctttctaaatgcagcgacctgtgtccttcagccctatccctttctatgcctctgaccccgcctcctttctaaatgcagcgacctgtgttcttcagccctgtccctttctattcctctgaccccgcctcctttctaaatgcagcgacctgtgttcttcagccctatccctttctattcctctgaccccgcctcctttctaaatgcagcgacctgtgttcttcagcactatccctttctattcctctgaccccgcctcctttctaaatgcagcgacctgtgttcttcagccctgtccctttctattcctctgaccccgcctcctttctaaatgcagcgacctgtgttcttcaggcctatccctttctattcctctgaccccgcctcctttctmaatgcagcgacctctgttcctcagcactatccctttctattcct

SEQ ID NO: 846987 - DNA, 604 bp, Homo sapiens
cataatgattcggactttattataaaaggaaaaagcatgaataattatattctagttttgtataaagtggtgcaagttttttattgttctttaatcttatggtacttagaatatggttgacagaattacatcacatttttaggaagtaaaagatgtgtgctttaccagtgatttactgtcgtttatataatattaaaatattgtgcacaatattaaatagagcttaaatgtataaacccattaattttctcttaaatactctgaattgttatctacgaaatcagtagttaaaatttaataactaaaatttaaaatgaaaggccttccttcagtttataagatttacaggctcagctctcataaatataaatagatgaatcttcaatatcatcaatatatagtaaatgaaaagcaacacaggcaagataaaaaaagctgaaatggtttgcagaggaaattctacctaaagtttaaagataagtggtgtttcctggmttataaaatttagaaacgcattgctaaatcttttcataaaactggtttataacacgtaacaaatccccttgtaatgaatgtacttcacatttcagaaaaatcacatttt

SEQ ID NO: 846988 - DNA, 610 bp, Homo sapiens
cctcatcttccaattaaaaacaattttaaaattkctaaaatatgtttatatttattttgatgcatattaacattttcctctaagaaaaactatttgtaattcagttaaaaaaagaacaaaaggagagagatggggaaaagaggagcaataaggacaaaagttaatatgaaatactaatgttattttttgttttcttccatcttttattaagttcaggtgtacatatgcagaatgtgcaggtttattacataggtaaatgtgtgacacagtggtttgctgaacagatcaacatattacttaagtattaagcctggaatgttaattttataatatacaaataagccagtatttcctacattttagctgaggaatttgttaaaacatgcagacctcaggcatctctctcagggatctgggttaagcaagtacagtgctgatgctgactgtatttcagacaaaacactaacagtgactctgaagcaggagacccctgaactactccatgacaaccactgacctgaagcttctcctctggatggaaagataattattcttttgattgtatggtaaagtacagagtattcagtgtgaagcatttttttcttctgac

SEQ ID NO: 846989 - DNA, 684 bp, Homo sapiens
tgatcagacttgagcaggtcctgaaggcacaagtaagttacatgaggaagtggcacaaatgyccatggtctccaccctgccaccctgacttctcttccccagcctgcaccaatggcctcatggggagttccctatcatcagttgacagaggaagagaagactagggcctggttcacagatgattctgcatgatatgcaggcaccccctaaatgtggacagctatagcactacagcccctttctaggacatccctgacagacagcagtgaagggaaatctcagtgggcagaactttgagcagtgcacctggttgtgcactttgcatggaaggaaaaatggccagacgtgcaattatatactgattcatgggctgtagccaacggtttggctggatggtcagggacttggaagaagcatgattggaaaattgatgacaaagaaatttggggaagaggtatgtggagggacctctctgaatggtcaaaacctgtgaagatatttgtatcctatgtgagtgctcaatgacaggtgacctcagtggaggaggagtttaataatcaagtggataggatgacccttctgtggacagacaccactcagcttctttccccagccacccctgtcatcacccaatggatacccatgaacaaagtggccttagtggcagggatggaggttacgcat

SEQ ID NO: 846990 - DNA, 684 bp, Homo sapiens
tgatcagacttgagcaggtcctgaaggcacaagtaagttacatgaggaagtggcacaaatgtccatggtctccaccctgccaccctgacttctcttccccagcctgcaccaatggcctcatggggagttccctatcatcagttgacagaggaagagaagactagggcctggttcacagatgattctgcatgatatgcaggcaccccctaaatgtggacagctatagcactacagcccctttctaggacatccctgacagacagcagtgaagggaaatctcagtgggcagaactttgagcagtgcacctggttgtgcactttgcatggaaggaaaaatggccagacgtgcaattatatactgattcatgggctgtagccaacggtttggctggatggtcagggacttggaagaagcatgattggaaaattgatgacaaagaaatttggggaagaggtatgtggagggacctctctgaatggtcaaaacctgtgaagatatttgtatcctatgtgagtgctcaatgacaggtgacctcagtggaggaggagtttaataatcaagtggataggatgacccttctgtggacagacaccactcagcttctttccccagccacccctgtcatcacccaatggatrcccatgaacaaagtggccttagtggcagggatggaggttacgcat

SEQ ID NO: 846991 - DNA, 629 bp, Homo sapiens
tcattattttacaaaggaagaaattgagactcagaaaggttgtccctcacccaaggtcatatattaatagctgggttagaatttggacctgkgttaatctggttcaaggcacatatatttcctactattttctctacatccacttactaaatttaagtcaatatttatttgttccaaatatccaccatacatgtgtatccaaattaaaaattatcatgttttcttttttcaaagtcagagacactttgaatacaaagatgagacaatgaaacccttgtcttagaagaactcaagactcctctccaataacctaatggggctacatgagaggttccttagtactttatatattttttattattccaaatgattgttaatttattacttagaaagttgccgatactctcttctacaaaactattttgtttttaggtatggttaataaactgacaaatacatgattagaggccacacttctttttttgtccccgcctctgaaaggtgtattcccaagtaactctttccatgaagcttcctatagaccaatcttggccctaaatcgcgaatagaaagtcacaaacacaaagaccacagatctaccaagagtgtagttgggaatttattttttg

SEQ ID NO: 846992 - DNA, 629 bp, Homo sapiens
tcattattttacaaaggaagaaattgagactcagaaaggttgtccctcacccaaggtcatatattaatagctgggttagaatttggacctgtgttaatctggttcaaggcacatatatttcctacyattttctctacatccacttactaaatttaagtcaatatttatttgttccaaatatccaccatacatgtgtatccaaattaaaaattatcatgttttcttttttcaaagtcagagacactttgaatacaaagatgagacaatgaaacccttgtcttagaagaactcaagactcctctccaataacctaatggggctacatgagaggttccttagtactttatatattttttattattccaaatgattgttaatttattacttagaaagttgccgatactctcttctacaaaactattttgtttttaggtatggttaataaactgacaaatacatgattagaggccacacttctttttttgtccccgcctctgaaaggtgtattcccaagtaactctttccatgaagcttcctatagaccaatcttggccctaaatcgcgaatagaaagtcacaaacacaaagaccacagatctaccaagagtgtagttgggaatttattttttg

SEQ ID NO: 846993 - DNA, 567 bp, Homo sapiens
gctgagcaccaatctgggttgtgaggaaataggggagaggtatgctgggccacatcccagcctaacacgtgtgagattccttttaggaactaacctcattagctacaagggtcatgcagaggcagcaaagcctggtgcgatgagctcagccttcactcattcatgaacaccatcactcttttattcaaatctgtatatggcttttttgctttttttttttttgagacagagtctcactctgtcgccaggctggagagcagtggcgtgatctcggttcactacaacctccacctcctgggttcaacaattctcctgcctcagcctcctgagtagctgggattacaggcatgtgccaccatgccaggcaaatttttgtatttttagtagagacgggttttcaccatgttggccaggatggtctcgatctctggacctcatgatccacccaccttggcctcccaaagtgctgggattataggcatgagccaccgygcccagccagcttttttgttttaaaagttaaatccattctaattacccaagcaatgcatgaattcattatccttt

SEQ ID NO: 846994 - DNA, 441 bp, Homo sapiens
tcctccataaaagtgaggagttgagatcactctagtcataataggcaaactcataaactagaaattgcaagctatgtcttaatcagatactgtggaaagacactgtatgccaggcaggggaagagggagtcacaaaattaagtagagggcacaaagaatccctatttcccaaggacaggaaatccctgctatcaaacgttgccagtcctcagtccttgacatccaggaggggctcaatgacggggagcaagggaactggtctctgggctgctaactgtgccattccccagcgcacagcactgctccagctgccaccattttacacacactgtgatgtgaataggggccatgaggtggcccggagattccctagaataatcctgcgattgaaatccatacctractgagtgacaggagcagtggctcagtgaaggaaggcac

SEQ ID NO: 846995 - DNA, 466 bp, Homo sapiens
tgtaatcccagctactagcgggagctgaggcaggaggattgcttgaacctgggagkcggagggtgcagtgagccgagattaagccactgccctccagcatgggcaacagagcgagactctgtctcaaaaaaaaagaaaaaaagaaaagaaaagaaaaagaaaaagaaaatgggctgggtgtggtggctcacgcctgtaatcccagcactttgggaggctgaggcgggaggatcacctgaggtcaggagttagaaaccagcctgaccaacatggcgaaatcccgtttctactaaaaatacaaaattagctgggcgtggtgccatatgcctgtaatctcagcaacttgggatgctgaggcacgagaatcacttgaacccaggaggtggaggttgcagtgagccaagatcacaccattgcaacaagagcaaaacttgtttgcaatggtgtttgggcaacaagagcaaaa

SEQ ID NO: 846996 - DNA, 629 bp, Homo sapiens
aagaggaactgatctaaactgaaagayagagtattaatattagaaggtgaggagcaggatgcggtgtatttaagatgaaaataattaatgcaatgaagatttactagatgaaatgagagggtggggctagaaaatggaccacgcaagttatctcacttaagcctgtcaataatccagagatcgatattattaatcccatttaatgggcgatactacaaactcagaaaacttaagtaactttgcagagatgtcagtgttgtggcacaggtttacttgttacatgtaacacgtaaggacaggcaaagagatttcctccaacttgcaattattgtttttaactcaatgaataactttagagccagaatatttttaaagagagaaaagcttctctatggctggacaattttaagacctctctctggagaggtccttgttaacatgtttacatcttcctggctgctagctcccatgacatccatacgtacctctcctgaactgctctctctaccctgccccacaccactcatgaagcagggccaagggcatcttcttgtgccccatataacaaaatattgtaattgcctgtttatgtcactgtttttccttttttttttttttttttttttttt

SEQ ID NO: 846997 - DNA, 629 bp, Homo sapiens
aagaggaactgatctaaactgaaagacagagtattaatattagaaggtgaggagcaggatgcggtgtatttaagatgaaaataattaatgcaatgaagatttactagatgaaatgagagggtggggctagaaaatggaccacgcaagttatctcacttaagcctgtcaataatccagagatcgatattattaatcccatttaatgggcgatactacaaactcagaaaacttaagtaactttgcagagatgtcagtgttgtggcacaggtttacttgttacatgtaacacgtaaggacaggcaaagagatttcctccaacttgcaattattgtttttaactcaatgaataactttagagccagaatatttttaaagagagaaaagcttctctatggctggacaattttaagacctctctctggagaggtccttgttaacatgtttacatcttcctggctgctagctcccatgacatccatacgtacctctcctgaactgctctctctaccctgccccacaccactcakgaagcagggccaagggcatcttcttgtgccccatataacaaaatattgtaattgcctgtttatgtcactgtttttccttttttttttttttttttttttttt

SEQ ID NO: 846998 - DNA, 534 bp, Homo sapiens
cattgaaatttttaaaaatacttattttcaagttcactggcttaaccattctatgattttttttttttttgtctcaggccatcgtttgttagtaaaatacattagcttctatctactggtaatgccattaataaaccgtggacgtcatacatttagtttctcagcttagcccagacaagcatagcctgtggcatttttgaaataactgctggtgccattccaacccgatcttcaggcatcctcctatacactcattatctcaaaatatatttgcaagtgtagcttgactgaactacttgtgcctgcctgcttgcttgctctctctctctctctttctctctctttcattgttactgtctttggggctttctttctgctgtgccctgaagtcttgaatgttctactttcttccaatccaagacttcagtctttttaaaggttatctcaaggtccatatatgacaagaaactaattcttacaggmctttgcaatgtaccaaataaattattatttatattgtctgttttgtcatgt

SEQ ID NO: 846999 - DNA, 501 bp, Homo sapiens
ataaatctgctatagatacttgtacgcagatattcatatgcatatgtgttcaaataagttaggtaaatacttataaccacaactgctagattgcatgctaattctctgctkagttttctaagaaactgccaactgtttcccaaaatggctataccatattgcattcccactagcaataaatgagtctctatttctctgtatcccagccaggaattattatcggtttctttttttaatattagctattctattggtgtgaactagtatcagattgttgttttaatttacaattccttaatgacaaatgatattgagcatatttttatatgcttatttgccatctgtatatcttgtttagtgaggtgtttgtttagttatcatccatttattaatttttttatttttgaattttaagagttctttgtctattttagataaaagtcctttaacagataactattttacaaatgctttctgccaatctggagcttgattttttat

SEQ ID NO: 847000 - DNA, 613 bp, Homo sapiens
tctcttcacctagaaagggacagcaggtggtggcaaattgacttctggtcagaagtagatttgtctacttctgtttgcttttactattattgttaaattttttagactagaaaatgccacagaaaacaaagcatggccccttaagccaacaggtgttgaaaaccataagctaagctccctttgaatacaaagaggagcacagagcagggtttcacgcatcagtgagaatggcaaactattgcttcagtggtgtgaggattgccctactgcagtgagtacattttaaatatatggctttaagtaatcattattcctaaaatatggaggttgaggatttgggtatttagatataaatatactttgtaaaataatttgaaaccaaattcatcagcaataatgttgacacatggggcaagcttttatttctttgcctcattctttttcttttttttggcaaataaagaccataaatattcaaggcatacaacatgatgatttgatatatatgtttgtrtatatatatatatatatatatatatatatatatatatatagcttaattattatctcaactaaattaattaacatatccatcaccacccatgctgtgcct

SEQ ID NO: 847001 - DNA, 632 bp, Homo sapiens
agcttttgtcctgtgccaagacaataatgttttctcactgggacggtgactttgttgcagccctttagcaaatcgataagcatgagtttcctcactcctgaagatcatatccatcctgggacagctcaaagaaatgccaaccaaacacaaataaatggcaaccttcagatttctactaagcctgtgccagttaaatggagatggaagtagagtatttatttcctggtgtttctgtgaagattcaaggaaagaattcatgacatatatttgtacagtgcctggcacaagctaataaatggagtcatgactaattgttgttattggtacctgaatgttccttagttttctcaccatctggggttattccccataactcagtaccgtaattccttatggaacaggagcccaatggcctccttcaaataccaccgacgacccttagccagtgtgtaccacttgccaggatttcctcttgacccccttctctgccatctaattttctatgcatctaaaattgctcctgttggacttgctgctgttcttcatgcagctacaaygctcagtaatctaatttgattgaaaacatggggccacagcctctcctttcatttacttttaaatcaatctgtagt

SEQ ID NO: 847002 - DNA, 642 bp, Homo sapiens
tctcttcttctatgtaagattagccttttagaattaaaaataatctaacatttcatacattttaacttttgtcttatttaaaacttacagtgccatatatttatttgtaagcctcagtatacatcatttccckttttttaaaaaaaaaaaaagcttactcttcactcctcaatttttaagtgtttcatctttctagctactttttcttgagaatttttaacatgaaaaataacactgatagggttctaaggagttaacaaatatttttacatagttataacccttgaggctcaaagcagagcagcacaacaattttactgaggctcggagaaattaagtgttttcctaattttacagagcttatatttgtgaaactcacacccttaacacaattctaactttcaaactcttggcaaacaaggcattgttcagggcataagttctgagccttccaaatgttgtataatttgaagggtttttttttttgaggtactgacattctggttgatataaaatgaatattcaagaaataagctacggagaaggtaagtgttttacattcattgaagagcttccaattttgtgtctgtatttgatttctcattacaactatacaaggataacagtgcatgtgttagtatc

SEQ ID NO: 847003 - DNA, 635 bp, Homo sapiens
aaaaacaaaaaaaaccaaagtacacaggcaacaaagagcacaatgaatctcacatttcaatacttaacattgaatgtaatttgaaggccttaatgctccacttaaaagatacagaaccacagaacggagaactcaccaaccaactatctgctgccttctggagacttacctaacacataaagactcacataaacttaaagtaaaggggtggaaaaaggtatttcatgcaaatggatgaccaaagtgagcaagggtagctattcatatatcagacaaaacaaactttaaagcaatggcagttaaaagagacaaagaggggcattacatagtggtaaaaggctttgtccaacaggaagatatcacaatcctaaacatatatgaacctaacactggagctcccaaatttataaaacaattattaatacacctaagaaatgagacagacaccaacacaataatagtgggggacttcaatattccactgacagcactagataggtcatcaagacagaaagtcaacaaagaaacaatggatttaawctataccttggaaaaaatggacttaacagatatttatagaacatttcatccaacaactgcaaaatacacattccattcaacagcacatggaactt

SEQ ID NO: 847004 - DNA, 558 bp, Homo sapiens
ggaaaaaggtatttcatgcaaatggatgaccaaagtgagcaagggtagctattcatatatcagacaaaacaaactttaaagcaatggcagttaaaagagacaaagaggggcattacatagtggtaaaaggctttgtccaacaggaagatatcacaatcctaaacatatatgaacctaacactggagctcccaaatttataaaacaattattaatacacctaagaaatgagacagacaccaacacaataatagtgggggacttcaatattccactgacagcactagataggtcatcaagacagaaagtcaacaaagaaacaatggatttaaactataccttggaaaaaatggacttaacagatatttatagaacatttcatccaacaactgcaaaatacacattccattcaacagcacatggaactttctccaagataggccatatgataggccayaaaatgaacctcaataaatttttaaaaattgaaattatatcaagcactctctcagaccacagtggaataaaactggaaatcaactccaaaaggaaccttcaaa

SEQ ID NO: 847005 - DNA, 687 bp, Homo sapiens
tacaccagagatcatgatctttatcctctcagttcataaaagcttatccgttgctcagttactctcataccattattagcgtggttgtagagcacatatatgtatataattaagtgcccctctgtggccattaaagggctgcctgcgtttccgcagggagcacacgtggaagttgattcacaagcttataagagtgtgtcagtacctttcacctttatgacatgctgcatggaaatatgtggcatctgccacttatgatccaaagcaacagtggggaaagtatggcccatggccaaatctggcccaccacctgttttgtaaataaagttttattggaacacagccacacccatgtatgtacatattgtctatggctattttagtcctgccacagcagaactgaataattgcaatggagattgtaaatggcccacaaagcctgcaatatttactatctggctttttaaagaaaagtttttgctgggtgtgatggctcatgcctataatcccagcactttgggaggccaaggtggtgggatctcttgggtgcaaggccagcctggacaacatagtgagacctcatctctactaaaaaataaaaataattagccaggcatggtggtgccrgcctgtggtctcagctgctcaggaggctgagatgggaggatcccttgagccagagaggtt

SEQ ID NO: 847006 - DNA, 259 bp, Homo sapiens
tttgagtgcaccaagctctttctcacctgaagtctttcatacatgcctcttccttcatcaagacactctgccctgcattcttcatctgatacctatttaacatttaagtctcagcccaaatgtcactttcttgtagaactccttggtatcctgtaacagttagctattgctgtgtaacaaactatgccaaaactcagtggctcaaaacatgcattattggagttcttgcrtttaagcctgtttcacacatgtgcctgtg

SEQ ID NO: 847007 - DNA, 541 bp, Homo sapiens
ctttaatttaattgggtcccacttgtctatttttgtttttgttgcagttgcttttggggaattagccaaaaattctttgccaaggctgatatcaagaagagtatttcctaggttgcyttctaggatttttatggtttgaggtcttacatttaaatctttaatccattttgagttaattttttatacggtgaaagggtccaacttcaatcttctgcatatggctagccagttatcccagcaccatttattgaatagggagtcctttccctgttgcttgtttttgttagccttcacatggcttttctttgtgtctgtgtcctcatcgccccttcttataaggacagcagtcatattggattacagctcaccctagtgatctcattttaacctaattgtctatttaaagacactgtctccaaatacagtcacattctgaggtactaggagattgtgacttcaacatacaaattttgaggggaacacaatttagcccataaccctgcccctacagggaatgagtaagatccatgaataacaaagt

SEQ ID NO: 847008 - DNA, 620 bp, Homo sapiens
caagtgggtgactctaacaggtcactgcattttggagttgctaatggatcccattgatttgctaatctgtgcccctttccaattatagctgatgttttaaaatctagwtggattgggttctgttacaatccagcttcttaaaattattttcttcattcatatttgattctatttaatactgttacacacgattaaataacatgattatttctggaaaaaaaaatttgagaaattactaaattaatagttaaactgtgtcctgcaaaacaatgtaaattaagacactggctaatgtaacaggttggggaaagtatccttctacttgagtcctctctcctctgaaggctatgtgtgccatgctaccatgattttgacgcttgttttcctcacctttattcctaggccttacctcctttcctagttattcacgactctattgttactccaaagccaactgtcaaatcctatacccgtatctcacagagcttttctctctcttggttttataataattatatacatgtaagcaaaatatgaataccatttgttataccactcaactcaattagcctttcttcttgttgtgtcctagtcatcctttcaatccagatcaaatcaca

SEQ ID NO: 847009 - DNA, 630 bp, Homo sapiens
atatgaatgttccatgtccacactaatgagactgaagggaatgtaaccagcacagcacacactggtggaggatgacggaggagctggcacacactcctggacaaacrtagatgactgtggtcccattcagaaaaagaagggaagaggaacatggtacaggggactctgatccttagcctgtatcagatcctagaccacaatagttgggttaagcacagtagactcacagctaaaagcatatcttcttttgagaattgtctactcatgtccttagcccactttgaaagaaattatagatgatgcgaacaaatggaaacacatcccatggactcttgggccaggctgccaggatctgtcattttccatgtggctttggccagattacctgactgccctgttcctgtttcctgatctgcaacatagaagtacccactttacagggctcttaagagctgacgagttaatgcctggaaggtgcttacgaaagcacctagcacacgtgtagccaaagtgttcactaaataacctgatttcatgcaagctcccaccaccctgctttcttggctcactctgctgagagtagaagcaatctggcttccacaagcatctgcccaacagaatttctcattt

SEQ ID NO: 847010 - DNA, 653 bp, Homo sapiens
cattttaatgtccccagttcatgcttgagagcacacatgttagacttctcactttaatggtgtttgtctcaagtgctaagaatctgattataaacttattgcaagtaatactttccctttatmtaacagaatatcatctcagagcttccttggcacaccacattaggatccaccaggctctcctgcaattacttatgtctgcttctcctaagagactatgagtgccttctatgtgaggggtattcctcacacctacctcggttctgtgaattcttcaaataagcacaacacacaagagaattacttaaaaagtgtatgaatgtggcttacagctatgtgttaagaattttctttggcagctgtctttatcaatatcagtacgtttggataagttctcatgccactagagcttgtcatataaactgatttcatgtcatgctaaaatttctttttaaaaattctggaaaagtatgttcatccctactactgtttgtgcaaacatccagaagattgttgctcaaagatgactttctcatctttcttgagacttttaaactttagttctgaagttctataattgcagttgtacaaacatttgatttataataatatgtggcatagtgggaaaaattatagaagcaaaacaattttat

SEQ ID NO: 847011 - DNA, 608 bp, Homo sapiens
tatttcttctttggtgtcctgcatacacagttttaaaatgcttgcagacgttttacctggctctttgcattaaattatctcatcagtcgtaattsatcttcacttctccgaagttttcatggcacatggcaaactgggatgtacccttcctcctcctctgtgttctatcagttatttaatctcatctccaagcaacatgttctcgtaatggctagattttggtctagaacaatagccttactgctattattcttttactcaacagtccagattgttacgtacccatgatctggagctctggacttcttggttttgtgaaccgcaggactcttgcaagtctactgtgttagtccgttttcacactgtattataaataaatacctgagactgggtaatttataaagaaaagaggtttaattgactcagaatttcacactgttggagaagcctcaggaaacttacaattgcggaggaaggtgagagaggagcaaaggcacgtcttacatggtagcaggtgagagagagagacagcaaatgagtaaagggagaagagctgcttataagaccatcagatctcatgagaactcactcagtatcatgaaaatagc

SEQ ID NO: 847012 - DNA, 589 bp, Homo sapiens
aggggcaatgagtttagtgactctatacataatacctttgaccatatatggagaaccaaggaatataatgaagctggttggttgctcctaagttcaatggacaaagtgattaaagaaaattatgaattcagtgattctgtctcctggcttcagaagcagatactgagcttcaactctgttaagactgccctgagtgagagtcttatctcttgcagagaaagagctgaaattgtggaaaaacagacataaactcttatcatgtgagtggctgacctgcaacaaaaggtgcatgcacagccttgccaggtgtctactgataaaatgagggcattgattggaaaagaatgggacgctgcaacttggaatgggaatgtatgggaggaccatgatgaagctggggacactgagtttgtaaactctgatgaaccctttttgccagaagaaacagcttccctatcrtcagtagtggcaacattcccccctcacccgactcatgctgccatcagcttctccacctttgtctgaggagataaaccctgcgctgcctgaggcaacagtgatggcctcccctgaggcagctgtcaggcaa

SEQ ID NO: 847013 - DNA, 589 bp, Homo sapiens
aggggcaatgagtttagtgactctatacataatacctttgaccatatatggagaaccaaggaatataatgaagctggttggttgctcctaagttcaatggacaaagtgattaaagaaaattatgaattcagtgattctgtctcctggcttcagaagcagatactgagcttcaactctgttaagactgccctgagtgagagtcttatctcttgcagagaaagagctgaaattgtggaaaaacagacataaactcttatcatgtgagtggctgacctgcaacaaaaggtgcatgcacagccttgccaggtgtctactgataaaatgagggcattgattggaaaagaatgggacgctgcaacttggaatgggaatgtatgggaggaccatgatgaagctggggacactgagtttgtaaactctgatgaaccctttttgccagaagaaacagcttccctatcgtcagtagtggcaacattccyccctcacccgactcatgctgccatcagcttctccacctttgtctgaggagataaaccctgcgctgcctgaggcaacagtgatggcctcccctgaggcagctgtcaggcaa

SEQ ID NO: 847014 - DNA, 564 bp, Homo sapiens
acatcataatctgatccagaaacrgttcattgttgttgcatagaataagagaaaataatactttgaaactacatttttttaattctcacttagttcatgagtcacccacttatcaagctttttcaccattccaattttcttcaaatgtcaaacgaccctagaatgttcgaccttgagttctttggcaacttctcatgtagttgtaagacgatcagcttcgatgactgctctcagttggtcattgtcaacttccaatggtcagccactgcactcctcatcttcaaggctctcgtctctttagcaaaacgtcttgaaccaccactgcactgtatgttcattagcagctcctgagccaaatgcattgttggtgttgtgagttgcctctgctcttttgtgacccatttggaacccaaataagaaaatcgctcaaatttgctttttatctaacattattctcataggctaaaataaatataaaataaacagcaagtaataagtcattcgcaaaaaacataaagcaagaaatgcacactaacatgatgtatagcataaccacatttattt

SEQ ID NO: 847015 - DNA, 603 bp, Homo sapiens
ttcatgtatgtgttctgactgctccattaaccagccatttccccatctcttttcctctctttgaacttctctattccctgagacacaataatattgaaatgaggccagataataaccctacaaaggcctgtaagcattcaagtcacacgtctctcactttaagtcaaaaactagaaatgattaagcttagtgaggaaggcatattgaaagccaggatggtctgatagctaggcctcttgtgcaaaacaataagccaagttgtgaatgcaaaggaaaagttcttgaaggaaattaaaagtgctgctccagtgaacacatgaatgacgagaaagcaaaacagtattattgctgatatggagaaagtttgagtggtctggatagaagatcaaactagctacaacattttcttaagcctaatctggagcaaggccatacctcttttcagttctgttaaggctgagagaggtgaggaagctacagaagaaaggtctgaagctagcagttggttcatgaggtttaaggaaagaagtcatctccataacataaaagtgcatggtgaagcagcatatgctgatggagaagytgcaagttatccagaagatc

SEQ ID NO: 847016 - DNA, 617 bp, Homo sapiens
ttgtgaatgacttaagcatactaatagcaaaggaactgtcatgggtacctcattatcctktatgtatgtatgtatgtatgtatgtatgtatgtatgtatatatatgtttatgtttacttattttttgagacagcatctcactctgtcgcccaatctggagtgcagtggtgcgatctcagttcattgcaacccatgcctcccaggtacaagtgattcttctgcctcagtctctggagtagctgggatttcaggcgtgtgccactatacctggctaattttttgtatttttagtagagacagggtttcaccatgttggtcaggctggtcttgaactcctgattttgaatgatctgcccactttggtctcccagagtgctgggattataggtgtgactcattaccctttaaagtcaatcatggtgggtttttaaaaataaattttattgtgtatatttgaagtttacaacatgatattgggttcatatacatagtaaaatagttacaatagtgaagcagattaatatatctatcatcacatagttactttttttgttacaagagcagctaaaatcttatttaacaaaaatttctaatgcaatatgattttattaacttta

SEQ ID NO: 847017 - DNA, 651 bp, Homo sapiens
atcccaatgctagtcataatcgtgggtcctaagaacccctgaaaagctggatttactaacattttcatatgtggtagatgggaatggggttatatggaagatgacaccctggattctgcaattggcaagtatttaaagtgtatgggagaaatggtaatagacttatatgtttgatttaggtacatggaaaaaaattagataacaatgcagaacattggaaatgactgtagaggtagacagaatttctctagcttctgttttcttgacacatttttcaaatatgagaaaacagcaagtggatgaacttctgtctgaagtactctgacagaagccttcttctagagggcatagacaataccagagcttttgttattttcacaggagtggagccagagaaattgggtctctagaggttaggattctaatgtgaagagatgtgtggataaatgacctcaacacatgtatgaaaatgcaagttttatttatttgcctaggtatgatgagaccaaaagaccaggagacaactgccaaaggttattataactccagatccaaagggaaagggacacrtgacactatgggggagacacatggaaaagcaccaaggttggtcaggaggaagatggactgtgctgaaaatgcaggcaagag

SEQ ID NO: 847018 - DNA, 599 bp, Homo sapiens
gtatcaaacatatacaaataactcctgaaactcaacagtmaacaaataagcaactcaattaaaaaatagacaaaagatctggacacctcaccaaagaagatacactgatgacaaacatataaaaagatactcaatattatatatcattaggggattgcaaattaaaacaacaatgagataccactaaacacctattataatggctaaaactcaaaaccctgtgtgttagtttgctagggctgccataacaaattatggatggctcaaaaacaagaaatttattttctcatacttctgaagactagatgtccaagataaggtgtcagcagggttagtttcttttgcggcttctctctttggcttatagatgtttaccttctccttgtgtcttctcacagtattccttctgtgtctgtattctgatcttctctccttataaggacaccatattgaattacagtccactctaattacctcattttattctaattacctttttaaagaccccacctccaaaaacagtcagattctgaggtactggttgttagaacttcaacacatgaatcttaggggagcacaattcggtcaacagcacctag

SEQ ID NO: 847019 - DNA, 583 bp, Homo sapiens
atacaagcctctatagaatttcactttctttaggtgatcaaggctaggatcacagaatcctaaccacatagatatattttcaaagcaaatccagctaaagattaattttactcatttgtaattttatttgtttgtttacaataatgctatagtgatttttaaatggattagacagaacattactcatattaggaggagcagaacaatgattctgggaaatgttaatcagggttccccaaacaaaggctatctgatcagattagctgggactagctagactgtatgctacagttcccatttggtgattcaaaatattgattgacattttaaagtatccagaagggcttcagtaaaaaaagtatcgaactttgcttgccgttaacaaactcacttaatagtgtaaggaaagtctatttttcttggcacaggattaatgctacattacaaggaaaactacraagtttttctttgacaccagtttgggaagcactgcattagctaatttagactatgcttaatgctgttaaaaaatgtaactcaaaatgaacgctaagtctaaatcgaacacatcggtttagtttca

SEQ ID NO: 847020 - DNA, 646 bp, Homo sapiens
ccgataggtaatttctcaattctcaccctcctcccaccttccaccctcaagtaggcactggtattttttgttcccttctttgtgtcctcaaatagacattttaaaaattcatacaaaaacattaggttatggctgggtgcggtggctcatgcctgtaatctcagcagtttgggaggccgaggcgggcggatcacctttgtttgggaattcaagaccagcctgaccaatatggagaaaccccatctctactaaaaatacaaaattagccaggcatggtggcacatgcctgtaatcccagctactcaggaggctgaggcaggagaatctcttgaacccaggaggcagaggttgcggtgagccaagattgtgccgttggactccagcctgggcaactagtgaaactctgtctcaaaaaaaaaaaaaaaaaaaattaggtttttgtgatggttgatagtttcctaaaaatatcaccctggaaatgtttgattttcatggagttttatcaagcactcatcaatcaaccaacaaaccaatcagttaatcagtatatacatatttttgagtgcctattatatgtccaggatttyattaatgaatgaatgaataaatttacttacttgacaaatatttattaatttccttcttt

SEQ ID NO: 847021 - DNA, 437 bp, Homo sapiens
agttaacccgtggattgaaagatgaatcgctggcttatatctatcattgccaaaatcattatttttgtccaattggcttcgaagcaacccctgttaaagytaataaagcattcaggtaagcattgacgtgttttagaaagtgcattttaagaaatattaaaaaatagatgggtgcggtagctcacgcctgtaatcctagcactttgggaggccgaggtgggcggatcacgaggtcagaagatcgagaccatcctggctaacacggtgaaaccccgtctctactaaaaatccaaaaaaaaaaaaaaaaaaaaaattagccgggcgtggtggcaggcgcctgtagtcccagctactcgggaggctgagggaggagaatggcgtgaacccgggaggcagaacttgcaaaaaaaaaattaaaaaaattaaaaaatattcaa

SEQ ID NO: 847022 - DNA, 437 bp, Homo sapiens
agttaacccgtggattgaaagatgaatcgctggcttatatctatcattgccaaaatcattatttttgtccaattggcttcgaagcaacccctgttaaagctaataaagcattcaggtaagcattgacrtgttttagaaagtgcattttaagaaatattaaaaaatagatgggtgcggtagctcacgcctgtaatcctagcactttgggaggccgaggtgggcggatcacgaggtcagaagatcgagaccatcctggctaacacggtgaaaccccgtctctactaaaaatccaaaaaaaaaaaaaaaaaaaaaattagccgggcgtggtggcaggcgcctgtagtcccagctactcgggaggctgagggaggagaatggcgtgaacccgggaggcagaacttgcaaaaaaaaaattaaaaaaattaaaaaatattcaa

SEQ ID NO: 847023 - DNA, 609 bp, Homo sapiens
aattaggggtgggagttgtattcattatttagttcccatacagcatatctactgtttacaccccacattttctttttttctttctttctttytttttttttttttttttttttttttagagacagagtcttgctttgtcacccccaggctggagtacaatagcacaatctcggatcactgcagtgtctgcctcctgggctcaagcgattctcgtgccttagcctcccaagtagctgggactacaggtgcgtgccaccacgcccagctaatttttgtatttttagtagagacatggtttcaccatgttgggcagtctggtctcgaactcttggcctcaagtgatctgcccaccttggcctccccaagtactgggtttacaggcatgagccaccgagcccgcattttctctgagacgtcttcaaaggcagtttactaatcctgctgaagagacaactgtcatttacacagcattttaaagttttacaaaatactgtcatgaattaggttaaaccatatgaaattgctgatatttgaccagttgtgatttctcaagcaacagtttcatgtagtttaacctgtaaatcatttcaattaattcttggaacagac

SEQ ID NO: 847024 - DNA, 333 bp, Homo sapiens
ctattattcagcacttttagttcttgacaattatcatgcagaaatatctactcatgtgtataatgatacrtacacaagggtgtccaatcaatactattcatgaggtcaaatggagacaatctaaaaatacttaatagaggaagttacaaattaatgtggtaaatctatacagtgtagttctatgcagcattaaaaagaaccatggatcaaggcaaaattttcaagacatatttttaagttcaaaaagcaagttacatggcaatatgataacatgtttataaaataaattgtgagtgcatgcaaatgtgcatacaaaatagacaaagtcagaaa

SEQ ID NO: 847025 - DNA, 518 bp, Homo sapiens
acagctttattgagatatacttcacatacctaacaattcacccatttaaagtgttacagtgtaatggtttttggtatatcacatcattmattttcaaaattgtggcaaaatacatataacataaaatgtgccattttgatcactttaagtgtacaattcagtggcattagctacattgattatgtcatgcaaccatcatatccatgtattttcaggttttttaccatcccaaacagacactctgtggctattaagcagtaactcccccattccccactctcaccagacgctggtgacctataatctactttctatgatcttacgtattctaggtgccccatataaatggaatcatataatgtttgtccttgctgtctactttatttcatgtagcataatgttttcaaggttcagtcatattgtagaatgtatcagaatgttattcctttttttggctgagtattccattgtgtgcatataccacattttgtctattcctttatctgttgatggacaac

SEQ ID NO: 847026 - DNA, 533 bp, Homo sapiens
catatctccatttatagttaactatttactttctaattytcaaattgaagctgcggtgctattcctttccgttggaaatccttccactatgaaattggtagtggaagagcttggtcatggagtcatctagtcttgcatgtggactctggagccactacttgttgctttctcttcgattggctccttggtctctttgagccttcgtttgtccacctgggatagaaatagagattaaacatgattatttaataatagacacaaaacatagtgattcttccttccctatcttccatggccttctctcaaatgtctcttgatttttttggataaatgtcttctctctctccatcagcttcttcattgcttcattggtaaataaacatatttatatttcctatttctgaaaaacaattaaaaatttaaagtggggtcttcttgtttatgtttctctttaagccattcctccattgcccccttcccactggctgccatatttcttgaaatcatattttcacggtgccactctccacatt

SEQ ID NO: 847027 - DNA, 533 bp, Homo sapiens
catatctccatttatagttaactatttactttctaattttcaaattgaagctgcgrtgctattcctttccgttggaaatccttccactatgaaattggtagtggaagagcttggtcatggagtcatctagtcttgcatgtggactctggagccactacttgttgctttctcttcgattggctccttggtctctttgagccttcgtttgtccacctgggatagaaatagagattaaacatgattatttaataatagacacaaaacatagtgattcttccttccctatcttccatggccttctctcaaatgtctcttgatttttttggataaatgtcttctctctctccatcagcttcttcattgcttcattggtaaataaacatatttatatttcctatttctgaaaaacaattaaaaatttaaagtggggtcttcttgtttatgtttctctttaagccattcctccattgcccccttcccactggctgccatatttcttgaaatcatattttcacggtgccactctccacatt

SEQ ID NO: 847028 - DNA, 575 bp, Homo sapiens
aggatggtgatttcctctgcaaaaggttgaaggaaggaggaagagaaggaagaaggaagctttaaatatactttaaagcttatttttaatgagattgttcaaagtaattatttargctgggcacagtggctcatgcctgtaatcccagcactttgggaggccaaggcgggtgtatcacctgaggtcaggagctcaagaccagcctggccaacatggtgaaaccccatctctattaaaaatacaaaaaaattagccgggcgcggtagcaggcgcctgtaatcccagctactcaggagactgaggcaggagaattgtttgaacctgaacatgggaggcagaggttgcagtgagcaaagattgctccactgcactgcagcctgggcaacacgagcgaaactctgtctcaaaagataaaaaataataataacaataataattttgtaaaaactaaataattatagagaagtaggaaggaggtgcttcacgtaaaattcataccaaggagaggagttagtccttgaaagattacagaggaggggggacataccagtcaggtgaaacactcactgaattta

SEQ ID NO: 847029 - DNA, 577 bp, Homo sapiens
actcacctgagataggttggcaacttacacagctaaaacccatcttaagaagtcatttaatcatgccctggcgcaaaaaagagaagctgctataatatttggycagaccaactctgaataagctgccaaaaagaaaatcaaatggctctggagattgacatattctttaatttaaaactttccttgtttcaaaatcactataaaatcaagtggctttcgtcattctgaaaatgccaccccttccttgacgtattgtagttggctttccattacaccgtagatctacgtctagattttcttctcctccttttagctcctttgccacacagtccaaagtacattggtctccttgcctcctctgttccttgcagaacatttgactcacttgccctttcatctgaccaatctgctcccatacccaagctttggcttcagcctgatccaaacctccaagtaccacccgcttccctgacagtgttccctcctcacattgacaggactcctctgaagcccgttcctcccaggaaacccacctgggtggagaactcagatggttccccctggaaaacagatatat

SEQ ID NO: 847030 - DNA, 599 bp, Homo sapiens
tcaataggtattttggataccagcgcttctcctggaagccctttgtgaaatctttggaggtccaagtgataaagtttggaagccacatgccatctttggctgtgcaaatgcaaggctctgcactgacaccagaactaaggaaacaataatgatattattagctctgcgctaaagcctcagaggaaggaggcatcctgtaaagagcaactgatgagtaaaagcaagagagagggagagagcgccagatgtgtgagctgatctaaattgtcttctttcatgcctggaataaaagttgatcttatattttaaattttgcttttaacggataatgtctacagcacaaattataggaaggcaaaaacatgaaggattatagggatacaatatgttaaatgtaattttcaaaggcctttgtgaggaattacagtaaatttctctgaagacaaagtgactttgaagtcaagggtgctgtgtggccgtctgttctgtaatgccaggggcagagctatyattatgctgtcagcaagaatgccttaggagcactcttttctatatgtgtcttctacctattcatagaaaattctgcctccaaaatactc

SEQ ID NO: 847031 - DNA, 528 bp, Homo sapiens
gaatttaagcccaattagtcgctcaggatccaccttgaaggattggctgttttggagttgacaacagaaaggataaccaacttttcacatttattggcctttagtgttttcttcttttttgaattggccactggtatttgctgctcatttttagtgggttacttacatttatttcatattgagttttagaaattttaaagagtttatggtctggtaattactcctttgtggggcctaatgtgtgaaaataccctctgccaatttatgctttgcctttgagctgtctatgttgtcttttgttgtgaagaagttttaaattttaatatttatttgtctttatatttgggtatttttaagaacccattttccatgttaaggtaacagaagtattctctgacatctataaatataaaatgtttactttccatatttctgcctttggtccacctggaattcatttgtgaacattggctggagtaggactccaagttawttacctcctattaagttaatacatcctattgagat

SEQ ID NO: 847032 - DNA, 342 bp, Homo sapiens
ccatctaggctcgctgcaacctccacctcccggtttcaagcaattctcctgcctcagcctcccgagtggcttggattacaggcacgcaccaccacacctggctaattttgttttttctttttttgagatagagtttggcgcttgttgcccaggctggagtgcaatggcatgatcttggctcacaccaacctctgcctcccggattcaagcgattctcttgcctcagcctcccgagtagctgggattacaggcatgagccaccacgcctggctaattttgtatttttagtaragacggggtttctccatattggtcaggctaatctcgaactcccgacctcag

SEQ ID NO: 847033 - DNA, 601 bp, Homo sapiens
accctctgagctccaactttgcttccactccctctgcatcccgcarggcccctcatcctccctggcatccccagcccccatgggcctgcctctgctcttgcctgcctctgcactggcctttcccaacttcctcacctactgaagttccaccccattccaaatgcctctgtcagtcttcctgttggaatcactccctcctctggattccaaggacagcatctctgcacttctgggaagtgttttctctgtcctctcctgaatccttgcaggctgcttgcctgtgtacaaccctcacctcctgctccattgtgctgagacgaccacgtcagcccagtgtgcacagccaggctatgttcacacccacctcctccacttcctagtcccctttgcaaggaagtgactgaaactgcatgccacagttgctgcatctgcaaggtgggcgaatgattgtgccgcctttgtagactgctatgagaatgaaaggaaaagacgtgattcgttatgaatctcccttttcatgaatctataatccctttgggggcaggaatgatggaatattcatcttggtgcctccatctgcacccccaacctagcacagcac

SEQ ID NO: 847034 - DNA, 573 bp, Homo sapiens
agccacctgctgagaacagggtctaaaagagaccagaggtgggatacatgcaattaacccttaacctcttcccggctcaccatgatggagcagctgatttgcctggctctcctcctctctatattttcatctctatatgcccttaaaatgtagctgccccaaattcacctccttttttggggaaagtaggtatgtatggatcttcatattctgatcgtcttgaaatgagttaggagaagcagtatttttcttttctggttaacagtcaaggagatctctggtttatgagagtaaacttggttacattttcagctataaatgactggctctcttaggaaatacaaatggacagtacttggaggctggaggagtatggaaaatctgacgaggaaggtgtggacctggccagtggaaagcattttggtgggtctaatgattttgggaaaatctctgcaaggctggaacattttgccacacgtaagtggttatttccttagcctcttctacattcactgaragctctgtgtagctgattggagagtgagagaactgaaaaacagtcccagtatgagt

SEQ ID NO: 847035 - DNA, 554 bp, Homo sapiens
ggaaatgatgataaaaagtacttcacagaagaaaagatgatgccattcagatatttaaaatcacttcgtcctaaatttggacacaaccagtgcaaacagaaatataataaagttacatatgtgtcaaatcagtcaacacgctgtcacattaatcttaggtggttgggtagaattaacctgagacatgtctgttgagaatcaacaacaccatacaaaataataaagatggcgcttcagtttactgtctcctgaactagaagagtatctgatgtagttatctggagacataatttatgagatttaaactgtatataacacattgaaggtgaatgcgttgtttgtgatttggggagactgtagataactcattgttcattacgagactgatgggagtattccaaactctaacagtctacctacaaggcagctattattgcyccatttcacagaaacacatctaaagcttagagaggttaggtgacttgatcaagttcatgtggtaagagattgggcttggatccaaaacttctctttccgctatctgttatttaaaa

SEQ ID NO: 847036 - DNA, 558 bp, Homo sapiens
aaaccacaatggcacacgtttacctacataacaaacctgcacatcctgcacatatatcccagaacttaaaataaaattaaatttaaaaacatattgttagagtggtataagaggataggttagatttaggaagctgtttgttatgtgttagcaatacgctaaaggcaagtaaacacattttaagatttttataggagtaaataggaaactaccaatttagactttaaggaaaagcactgactgtttaaggactctgggtaattcatcaatgtagactcatatgtcttacaatattttatggaaattgcaagaatatctaaaaatgttgcagctttattaaaaagtttaacatccttattaaggaagctgagaattattgatgtttaggtgatcattctgtaagttcgatgaaaaaacattgattgctttaaaagtttcatttgtgttttctcttatttttttccctcttcgtatatactagtagagtatatgaatgactaccttttggagtctggacttttggtctragaacttgctcagagacaggaaaatttagca

SEQ ID NO: 847037 - DNA, 615 bp, Homo sapiens
agtgttcactgttttatttgaacttaccagaaagcctctgagagagagcctctctagggacactagtaaagctctaggttgattttcctatcaatttaaaaattgtagtgtgaattgttaatttgagaaatgtgcacttttaagaaatgttcctttgttaagaggtaaaaatcagaataccagagctggaaggtactaaggacataatctcattcagggcagtccttttgcatgtgagaaaagtgtcccagatgaggtgaggtggcgtttgcaatgtcagccagtgagctaagatggagatgtggatggaagtgccacatccgctgtccaggtgtagttattttcactgcatctcatcgccagctcagctggcaatggacttgaatgaggacactgttttatttcttttttttcttcctcccccagtgttcactcatttcagtgaaactgtctatatgaatggtactttgtttacattttgctttattattawagttcggatttaggaatctgtataaaataaggctagccttaaatttaaagacaacttacctgctttaaccagcaaaccagaatatgttcatgctattccacatttaagaatataaagaagaa

SEQ ID NO: 847038 - DNA, 536 bp, Homo sapiens
aactgaggaaagtaccaaacttgactgctgtcaatcagaacatatttctgttcctgtcttccactcacagatttaatgtcttttccatcttagcacctgtcatgcactgtggtcataagttttgcagtttgaggtgtgacaaccaaaactagcatgaatttctttctctttctttacaatttccaagatagaagattttttttttttttttttactgtagtatcaagggaaccagcccccaatatttcaatgtaggttattttctattttccctaagtgtcggccggtctgagaaataaataagaaattttacagctgggtctccgggggtgacatcacatgttgacaggttctgtgatgcccccaagctgcaaaaccaacacgtctttattaggggtttcaaaaggggagggagtgtacgaatagggcgtgggtcacagagatcgcatgcttcaraaggcaataaaatatcacaaggcaaatgggggcagagcaagatcacaaggccagggtgaaattagaattgctgatgaggt

SEQ ID NO: 847039 - DNA, 591 bp, Homo sapiens
aatctctttaaatgtattggttccccctccctctccctttcaccttgcaacttatttgttaaaaataaaaatgatttgtccagtaaagggtcccacagtctgtttttgttttgtttcgtttttgctgattgggtcccaccgatttgtttatcatgttcatctgtcctttctattttttattatgagaacaatcagattcaggtttgattttgtttatttgcttgcttgcttgttttggcaagattatttcacaggcggtgttgcctgcttccattcagaggcacataatatgtagttgtcttgcattttgtgctgctagccatcactgatgatcattgcctggattcattatttcactaagggttccaaaacaataatgcttgaattctcaaactctttattcatttatgagatagaatacatctataaagagaggcttcccttcatcaattatttgttgccctgagctatgcatgactgtatcttacgtgactkctcaagtagcctctggtgccagaagtcctgctccatttaatttatcatatacaatccctagcctaacagtacaaatacattatcatagggatcagt

SEQ ID NO: 847040 - DNA, 591 bp, Homo sapiens
aatctctttaaatgtattggttccccctccctctccctttcaccttgcaacttatttgttaaaaataaaaatgatttgtccagtaaagggtcccacagtctgtttttgttttgtttcgtttttgctgattgggtcccaccgatttgtttatcatgttcatctgtcctttctattttttattatgagaacaatcagattcaggtttgattttgtttatttgcttgcttgcttgttttggcaagattatttcacaggcggtgttgcctgcttccattcagaggcacataatatgtagttgtcttgcattttgtgctgctagccatcactgatgatcattgcctggattcattatttcactaagggttccaaaacaataatgcttgaattctcaaactctttattcatttatgagatagaatacatctataaagagaggcttcccttcatcaattatttgttgccctgagctatgcatgactgtatcttacgtgacttcycaagtagcctctggtgccagaagtcctgctccatttaatttatcatatacaatccctagcctaacagtacaaatacattatcatagggatcagt

SEQ ID NO: 847041 - DNA, 503 bp, Homo sapiens
aaaaaggatatatgaatggcaaaaagcacgcaaaagtatgtctgagcattattcatttagccattagggaaatgcaaatcaaaactacagtgagacactacttcatccctactaggatggctataattwaaaaaacagataataagtgttggcaaggatgtgaagaagctgaagcccttatacactcctggtgggaatgtagaatggtgtagctgctttggaagacggtttgacaatccccccaaaattaaacttagttattatatggccaagcaattctactcctaggtatatatccaaaagaaataaaaacagctgggtgcagtggctcacatctctaatcctagcactttgggaggccgaggtggttggatcacatgagatcaggagttcaagaccggcctggccaacatggtgaaatggtgtctctactgaaaagacaaaaattagttgggcatggtgatgcacacctgtaatcccaggtacttgggaggctgaggcag

SEQ ID NO: 847042 - DNA, 625 bp, Homo sapiens
ctttttattatttgatccatggcatattggaaccataacataccttaaagttatgattttagaaattttaaatctgattattttcacagaatgcttttaaattatttttaagccccctgrctactatcttagttgactgatctgcgaattaggaaaagagattttggtaacatcagtggctcatctgaaagcagctattattcaaacagttattactcaccagctgagagtctgaggaaggaaaaatcttgagttttgtactactttctttgatctcattcatcagatcagtaagagtataagtctgtgccaagttctaaaagaaaacaaaattaaagtcttcagattcagttaaaatatgcctctgattttatggaatacactctcaaatttcatctagcatagcaaaagtgtctatttcaaaaaatattaagatttagttgagtacattttacatttagtaaaggtcactattaccgatagagccatggtaaaatacacagaagacctttcagaagccctgtgtgaaaataaggtacatgtatacatatggtgatggcccaagatagcgtaaacaaaaggaaaacagagaaatttctagaggaacatttagcagtcatttgac

SEQ ID NO: 847043 - DNA, 578 bp, Homo sapiens
caaggcaattactacttccagagatacaaaaatattataaaagaaagaaaatgtaatcatggtatgctatagaagacaatattatctatgtacatttatatattcgatatgaatttaaaaaaattatacaattaagtgatgataggagtagaagtcccagtgtaagatcaggttggggaaggagaatagggggagaagtatgaaaagcaaaatcctcatcttccatagcagagagttagataatatttataattaaaaagaaaaaatgaggggattgtaagcagaggaggcaatatgctaatatatttggagattagatgcccaggttttaaaaaatgctttatttattttttaataaacagatacagagtctcgctttgttgcccaggctggtctcgaatgcctggcctcaatcctcttgcctcagcctcccaaagtgctgggattataggcgtgagccaccrcgtctgatcaaatgcccagatactaagaattagaatctaatccaagctctgtcacttagttaatctgtgactgggtaaattacttaatatttctgctccagagtttcatcattt

SEQ ID NO: 847044 - DNA, 541 bp, Homo sapiens
taggatttgcaaatgtgttaagaaatatataggtatgcataaacaacaacaaaacaacaacaaaacagaaattgccccacaggaaaaaattattcatccattaaggaagttgaataaatatttcccctctatcttctaaatatttttaatgcttttcatagtatctttataataaatataaaaagaaaatattagacacctatgaaacttgttaatactaccactttttttgttgttttgagacagagtctcgttctgtcgcccaggctggaatgcagtagcacgatcttggctcactgtaatctccacctcccaggttcaagtgattcttgtgcctcaccacgcccagctaatttttgtatttttagtagagagggaatttcaccatgttggccaggctcatctcaaattcctggcctcaagtgatctgcccacctctgcctcccaaagtsctaagattacaggtgtgagccaccacacttagctttatacagctcaccaaaataaataaataatacataaaaatccataacgaatcctc

SEQ ID NO: 847045 - DNA, 470 bp, Homo sapiens
tactcaaatgttcaatttaccccataacgcaccttcctgcctgcttaaacaaatgtrtttagggataaatgtttttaatattattctagctctcacatggtcactgacagaaacaagaacttattcatgaaaaaggttaaagaaacaggtaaacaaagtcactggaaaaataggcctttaaaacaaaatataaagcacaggctaatgaaatggataaatttagagggcacctgccctataccttatcaatataaaactccatctagacataaagtacgcgcaagaagcggttagtaggcagaaacaagccagactctctcctctcctcataatattaaatccactcaagatatacagtgaatgacaaaagaccacgacgccgatcacccgaagaaaccccaggtaaaagcacgccacaactgtcctgaacaggtagcctcacagtcttgagctgagtcacacttcccgta

SEQ ID NO: 847046 - DNA, 526 bp, Homo sapiens
aactggggctgggggcggggaggggagtcgcctcagaaaagcgcatcttgattctgrccgctgcggtctcccgtgaggaccccggcactcggaactgagctgggatccaggcccaggggagtcacaggccccgtcctcacagctcccccaaaaaccggccccaggtgagaagacggaagatcgcttactagtgggagctctgccaaaagttccctgccatggaacacagcttgccctgataaaaaagcaccagccggcggagcggcccgcggagcgaccatagacccagcccgtccggtaaccgcgctcctcgatcaaatcagctcggctcgactccgctccgcggcggcgacggcgaaaggaagaggatggccccctagtctccttcacgccggccgacaacactcaactgtgcaaacccgttcctatcgacaaaagttccggcccgcggtagcggagggagccggaggggaggtgctgacccttggaggtgctgagattgaagagaactagtgttcacgagagc

SEQ ID NO: 847047 - DNA, 520 bp, Homo sapiens
tagtacgggcttctgatgaacggagactcccaaaggagcctcagaggtgggaggagccgggcagggccccagttgtcygtggccaccagagtagagaggaaacctcacgttcgcaacacaaacccctcacatacacctctcccttggcccacacgggcagtagagccaggttcttctacccagcacctgcatgcccagtcaaacgcacagggattcccacaggatctgaggagtccattccagccagagtaatctggaccagtaggtggccaagattcaccaaaagttttagaaaaacagaaaaggaaaaggaaagcaccaactccacctccagagaaatttacatctgaagaaacagaattcttacaatggggaagcagagggagaaacactttacaataaatgtaattagtattgtcaaacacatttgaaacagtagcatatccagatagatgagagcgagagagagagagagagagagagagagataaacagagcctctataaaaagtcgtactcag

SEQ ID NO: 847048 - DNA, 615 bp, Homo sapiens
accagaagaacaagaacaaaccaaaccccaaattagaagaaaagaaataataaagattagggcagaactaaataaaatagactaaaaaaaatgcaaagrttcaacaaagtgaaaatctgatttttttgaaaagaaacagaattgatataccagctagactaaccaagaaaaaaagagagatgatccaaatgaacaaaatcagaaacaaaaaaaggagacattacaactgacaccacagaaatacaaaagatcatcagagattattatgaataactatgcacaagctggaaaacctagaggaaaggataaattcctggacacatacgacctaccaagactaaattaagaagaaacagaaaacatgaacagaccaataatgagtaacaggcttgtatcagtaataaaaaatctcccaacaaagaaaatcccaggaatggatggctttactgctgaattttatgagacatataaagaagaactaacactaattttccctcaaactattccaaaaagttgaagaagagggaattctctccaactcattctataaggccagcattaccctgataccaagaccagacaaggacacacacacacacacacggacacacacac

SEQ ID NO: 847049 - DNA, 615 bp, Homo sapiens
accagaagaacaagaacaaaccaaaccccaaattagaagaaaagaaataataaagattagggcagaactaaataaaatagactaaaaaaaatgcaaaggttcaacaaagtgaaaatctgatttttttgaaaagaaacagaattgatataccagctagactaaccaagaaaaaaagagagatgatccaaatgaacaaaatcagaaacaaaaaaaggagacattacaactgacaccacagaaatacaaaagatcatcagagattattatgaataactatgcacaagctggaaaacctagaggaaaggataaattcctggacacatacgacctaccaagactaaattaagaagaaacagaaaacatgaacagaccaataatgagtaacaggcttgtatcagtaataaaaaatctcccaacaaagaaaatcccaggaatggatggctttactgctgaattttatgagacatataaagaagaactaacactaattttccctcaaactattcsaaaaagttgaagaagagggaattctctccaactcattctataaggccagcattaccctgataccaagaccagacaaggacacacacacacacacacggacacacacac

SEQ ID NO: 847050 - DNA, 307 bp, Homo sapiens
attataacggatggtggtgttttggaaggccacgttggctggtgctgtgtctgcgtctgaagcagacttgctcaaaggggtcatatgtgatgaaaatacaacctcaggcagcatttcccaaacttgtctgaccactgcatgttatttaaattgttctgtttttgtcaggatgycaatagagcatccttatgtgatactgtttaagttgaagcagacagaaaaaaaatgatctcagagttgaattaattgctgtaagagatgatcaaaatttgattcatatgcttaatataaagtaaacattgaatat

SEQ ID NO: 847051 - DNA, 602 bp, Homo sapiens
gtatttcatgtgtggcccaagacaattcttccagtgtggcccagggaagccaaaagtttggacacccatgccctagagagagtcagctgtccaatccccctaggaaagaccatgctgctctaagggtagcccaagctagccacatggagaggtgcatattcaaagagacccactgtgctagctatcccaatcaaatcatcagacatgtcagtgcaaatgccatctagggtaatccaggtctagaaaacacaacatggagacaaattaaagagttcagccagcagccagaaccaaggccccagtaacacagctccgggaggtgccccagccatctcttattgttcaggtcatcctcgcggaggtggagccattgtgaatcggagaccagctatcttgcatgccctgccccaattcctaacctacaaaactgtgcatataatacaatggggctattgttctatgccactaacttttggggtggtttgttacactgcaagagataaacatgatactggacaaattcaagttgaagttcatctagtgaaaccatcctgtgaacagaagttactgtttkatagctacagagtctccatttggaaaat

SEQ ID NO: 847052 - DNA, 617 bp, Homo sapiens
agccaggcctcttatgattctgcaattccacatgaactccgctgcacagggaggggtctcatctccctgactctacccctatcasgatccatactggggcctggtacatagcagattctctgaaattgttcattgaacagaagtgagagaagagctggacttcagcccagcctattcctggggtcccagttgccgcagtggccttgaagtgtttgcacagcttctgcagacaactgggacacctgctccttcacatgggggcatggacctactcatcaagtcagcccatctgtgaccaacgcaatgggtcatgaagcaggaagttacaccgtgcaagatggcagtacacgggtcatctcacccaagctgagccaatcagccccttctctgaggattctgaattgaagggatggggaaaaaagatggtgaaagagagacagacacaaagagagcctgggacaaagtgacacacacacataacacacacacacacacaatccacacagcctttgtccctggttcgagtcccttcctcccttccagaggctgacaaagcttacctagcagtgatgggagttgaagattcctattatccctgcctccaaccccattggttc

SEQ ID NO: 847053 - DNA, 570 bp, Homo sapiens
ttttatggagtattttctagaaatattaacatctaacactggaaagataatataattgaataattaggaataaaggctctggggttaggctgcttgcgtctattartttcctgtggctcctgtaacaaattatcacaaacttagtggctcaaaacaacacaacacacaattattctctcacggctctggaggtgagaagtttcaaatcatgatgttgtcagggctgcattccttctattggcttcatggcagaatcaatctgtcttgccttttcggcttctagagaccatctgcattcattccttgactcaggtacccttgcttctatcactcaacttcttgcttctgacatcacttctcatattactgactctgactttcttgtttctcttataaggacccttgtgattacattggatccccctaaataatccaagatactcttcccatctcaggatccataatttagtcacatcagcaaagttactcttgccataaaagataacatattcatagattctggggactcagtcataggtatctttgggagcccattattctgtctaccaa

SEQ ID NO: 847054 - DNA, 577 bp, Homo sapiens
tgcccttataataggtaaagaaagaaaataatatgcccatgcattcaaaaccgcaatgcagaattttgaccttgattccaatctgtttagaaactggattgaaaaaatctcaaaattattttcttttaggaaaaacatgtccatgtataggtgatcctttacatggccaagcagtccttgcaaatgggacttatgagctaggttatcagatacactttatttgtaatgaggggtaagtaagttcctccttagaggaaataaggaaaatgttagtaattttattttcgttttgcttctcttcttaagctttcatataaactttatttaattttgctttctatgtgacaagttatacttctagccaaacaactcttggatgttttatggagacagcaaagacgtagagtaaatagaaattgatattgaaggaaagcataactacttgctatttctgacaataagtctgttgaaagcattaagartgtagtaatcatgagaattcatccttcacaactgagtgtcccctatttaaatctgcaaactcttagagttaaagtagggctcacagaaatgagaa

SEQ ID NO: 847055 - DNA, 572 bp, Homo sapiens
aaatctttattaaacacctgtgaactctgtcctcagggaaayaatggtgaacaagaccaacaggatccctgccctcatgggacttacattctaatcagggagagaggccagaagaccaatagataaaaaatatctcccacccgtattccaacctattaccaagttctacatttctagctctgcaggagcctcctcccaggtctccctgggtcccatctgcccttctgccaccagtctccacccagtcaccagagagagagcttcttaaaatggaaactggatcagatcatgtcacccctgcttagaaccctgtcaatggctgggttcccacttcgtgtacaatccagactccttaggagggcctgtgatgccctgctgctcctcatggccttcctgcctccgcagacctattcatgcccctgctctcagcccctgagaccagcagctcactttcctgtcagtttcccacacatccccagctctctcaccttcagtgtttttccacttgcttttccctcacggggaccacttcaccccagtccagccccaccccacctccttctcttggctga

SEQ ID NO: 847056 - DNA, 621 bp, Homo sapiens
aactcccgacctcaggtgctctgttcacctcggcctccaaagtgctgggattacaggcatgagccaccgtgcccggccagtgtggatattttgacctcctcycatgaatgatgaatgttcttagtagcatctagaatggtgaatcttttccagaaggttttcaatttactttgcccagatccatcagaggaatcaacgtctatggcagctacagccttttgaaatgtatttcttaaataataagacttgaaaatcaaaattactccttgatccatgggctgtagaatggatgttctgttagcaggcatgaaaacaacattactctcctcacacctttccatcagaactattgggagaccaggtacattgtcaataagctgtaatagtttgaaatggatctttttttttttttttttttttttttctgagcaggaggtctcaacagggggttaaaatactcagtaaacaatgctgtaaacagatgtgctatcaccaggctttgtcattccatttatagagcacaggtggagtagatttagcacaattcttaaaggtcctaggatttttggaatggtaaatgagcattgatttcagcttaaagtcaccagctgcattagcctc

SEQ ID NO: 847057 - DNA, 665 bp, Homo sapiens
agcaagttctaaagacttgaaagctaacaccagtgtcttttctttctttctttcttttttgagacaaggtctcactctgttgctcaggctggagtgcagtggtgtgatcacggctcactgtagcctcaacttcctgggctcaaacaatcctcccgcctcagcctcccaagtagctgagtgaaaacacaccaccaaccctggctgattttttatgcttttctagagacggggttttgccatgttgcccaggctggcctcccatagtgctgggattgcaggtgtgagccaccacgcccttcttgccagtgttttctcaaattccttacatctgttttggcttcagagtcccttcagaccttctgccagggagtgtaaagtgccccctaaccctcctttgcactggccatgggtcctgctgtactttcagaatgctgcccaagcatagtgcctgcgcctcagggacctgcaggatgtgcatgtgtgagtgtgtacggcctgtgtgccagtgtgtttggtgtgtgtgtgtgatgtgtgagaggatgtgtggtgtgaagggtgtgatggtgtgagtgtgagagtgtgwgtgagtgtgtacatgaggctaacaatgactgcacacttcctctgtatctgacacatccctagggttttcgcacacatgactt

SEQ ID NO: 847058 - DNA, 665 bp, Homo sapiens
agcaagttctaaagacttgaaagctaacaccagtgtcttttctttctttctttcttttttgagacaaggtctcactctgttgctcaggctggagtgcagtggtgtgatcacggctcactgtagcctcaacttcctgggctcaaacaatcctcccgcctcagcctcccaagtagctgagtgaaaacacaccaccaaccctggctgattttttatgcttttctagagacggggttttgccatgttgcccaggctggcctcccatagtgctgggattgcaggtgtgagccaccacgcccttcttgccagtgttttctcaaattccttacatctgttttggcttcagagtcccttcagaccttctgccagggagtgtaaagtgccccctaaccctcctttgcactggccatgggtcctgctgtactttcagaatgctgcccaagcatagtgcctgcgcctcagggacctgcaggatgtgcatgtgtgagtgtgtacggcctgtgtgccagtgtgtttggtgtgtgtgtgtgatgtgtgagaggatgtgtggtgtgaagggtgtgatggtgtgagtgtgagagtgtgtgtgagtgtgtacatraggctaacaatgactgcacacttcctctgtatctgacacatccctagggttttcgcacacatgactt

SEQ ID NO: 847059 - DNA, 626 bp, Homo sapiens
cagatacatgcctatcataataygtgatgattaatcacaatgtcctttctgtgcttctttttcatttcttttcctttaatttcttggctcaatgacatttttctaatccctttttcaagttttactggtatgaaagttctgaatatcacttctatttttttcagttattactcttaaatgtttaacacatatatttgaaatagctaaagttaatgctttttgcaccttcttaaaatccaaatcttcttcattcccatttttcattattgtctataaattaggcgtactttgtttttaaccactcaaattggttattattaatattgattttatagttaatacaaatttagatttatctatatacttgtcagttcttcactcaacattgcctcttgactattattccttccttcttggttcaacttctttcttaatgaagaacatactttataattctagtaggtcctgcaagtggcactttgtttctgtttgccaaaaacatcatttggaattcattcttgaaggatagtttatatagttttaggcatctatgctaatggcttttttctactctagcactttgaagtattaggctggtgcaaaagtaatttcagttttgctatcac

SEQ ID NO: 847060 - DNA, 581 bp, Homo sapiens
tgactgctgatgcatcaaggacaaaaaaaaatcatagactataactgagtgctttattttttttattagtagccctatcaataagaatattttaaatacaccctttcttgtatatatatacacatatgaacatatatgtatatctacaaaatgtgtatttttaaattacttggctttctaagcaataaaatacattgttttctttatcagttagactggagtgcagtggcacagtcatagctcactgtaactgctaattcctgagctcaagcaatattcccgcctcaggctcctaagtagctggaactacaggcatgtgccaccatgcctggttaatttttaaatttttttctagagacagtgtctcactatgttgcccaagctagtctcaaactcctggccccaagccatcctcctgcctcagcctcacaaagctctgggaatacmagcatgagtcaccatgcccagccccttgttttgacaaaaaataaaaagtacatcaaaagaaaaaggcagcattttaaaaccgagcaatcacgtataatggaaattacatttttactttagagtgactaagtgcc

SEQ ID NO: 847061 - DNA, 515 bp, Homo sapiens
tataatttgaacgtcctaacagggtgtaaaaggctctggaagctatggggtgttccaatgcctccagcttcatattgtgtcccttttctctttactctttgccttctgatattcaggaattgcttcaaaaatgagcctatatctctctggcatttcaggcactttcacacatgctgttccatctgtctggaaggcattctattctctatgtggctacttccaactgactgttgctcagaatctagcttaaatatcagttcattcatgtatacattcactcattcatttattcctccatttacgtatgccatctgtatttattgaacccgtgataaattcacgcactgtgctaaaccttgagtatgtgaacaaaagaaatgcagctctcacttccttggagcttaaaacaacagaaaatacaaacaatgaataattacayaaattcacatgtaacacatgtatgataatgggtttgaagggacacaatggaatgctatgagagaaaaaaataaaga

SEQ ID NO: 847062 - DNA, 579 bp, Homo sapiens; identical to SEQ ID NO: 829447

SEQ ID NO: 847063 - DNA, 579 bp, Homo sapiens; identical to SEQ ID NO: 829448

SEQ ID NO: 847064 - DNA, 613 bp, Homo sapiens
catttctggtacccattgctgtactaacgagagaacactctgcacagggcccagactaacaaaagtagagctttccctcccatggtctagctcagatgtaagcagccatggcccaaagggcaactgtgactgcttagctcccaacatcctcctagggtcactgggatgcaccaggcctgggtgttgcccagcccaaggaggaggaaaaaggaccagggagggcacagctacaccccaaagggaagacccctggaaccagcacacatcattttcagctgcacctcatggcctggactgagctcacatgacctcaacacacgtgagaacgcataggaaatgcaggcttcgtatgggcagccacagccatccgcccagctggcatggaagatgccaggactgaaagaagggaagacaggaccagcagtcttccccaagtgacccagggtgagctctgtcacctgagccccagcgaggaaaacagcagcactgctagtgttgccacgcagagtaaaaggagaccatccmcgcgaacaagcagcacggtgcctgccgcactgcaagcgctcacaaatgaccgctgtcttcaccaccagcacatttgctagtaacatca

SEQ ID NO: 847065 - DNA, 611 bp, Homo sapiens
tattgtggcactattcacaatagcaaagacttggaaccaccccaaatgtccmacaacgatagactggattaagaaaatgtggcacatatacactatggaatactatgcagccataaaaaaggatgaattcttgtcctttgtaggaacatggatgaagctggaaaccatcattctcagcaaactatcacaaggacagaaaaccaaacactgcatgttctaactcataggtgggaattgaacaatgagaacacttggacacaggatggggaacatcacacactggggcctgttgtggggtgggggacgggggagagatagcattaggagatatacctaatgtaaaatgatgagttaatgggtgcagcacaccaacatggcacatgtatacatatctaataaacctgcacattatgcacatgtaccctaaaacctaaagtataataataaaataagaaaaaaaaaaactagggtctccctttgtattagtctgttctcacactactaatacagacatactggagactgggtaatttatttaaaagaagaagtttaatgaactcacagttcctcatggcttgagaagcctcataatcatggcaaaaggtgaagga

SEQ ID NO: 847066 - DNA, 611 bp, Homo sapiens
tattgtggcactattcacaatagcaaagacttggaaccaccccaaatgtccaacaacgatagactggattaagaaaatgtggcacatrtacactatggaatactatgcagccataaaaaaggatgaattcttgtcctttgtaggaacatggatgaagctggaaaccatcattctcagcaaactatcacaaggacagaaaaccaaacactgcatgttctaactcataggtgggaattgaacaatgagaacacttggacacaggatggggaacatcacacactggggcctgttgtggggtgggggacgggggagagatagcattaggagatatacctaatgtaaaatgatgagttaatgggtgcagcacaccaacatggcacatgtatacatatctaataaacctgcacattatgcacatgtaccctaaaacctaaagtataataataaaataagaaaaaaaaaaactagggtctccctttgtattagtctgttctcacactactaatacagacatactggagactgggtaatttatttaaaagaagaagtttaatgaactcacagttcctcatggcttgagaagcctcataatcatggcaaaaggtgaagga

SEQ ID NO: 847067 - DNA, 463 bp, Homo sapiens
atctgaggaatattgagcacccacacagagggaccaacaaagaaaaggaacctggtggggttccagaaggaggagacataaggtggacatggtattcatgagaaggaaggggcatcaggagcacacttgggtgaggatctacaggagtaacaccaagaaaatgctttagaagcagggtctcactatgttgcccaggttggtctcaaactcgtggcctcaagcgatctgccagcctctgcctcctgaactgctgggattacaagtatgagccaccacaaccagccccgtgtttcatgagctgttactccattccaggagcctatcacttgggccccctctgattcttgaccaaggtgtccacctccttcatgaaccggagacacagctcctcttcccatggcaaagcaatgcactgcacagtcaccagaastccgacggatcctcttaccgcctgccagtagag

SEQ ID NO: 847068 - DNA, 589 bp, Homo sapiens
ccatgccctttatgctgggatccacaatgtccccctctctgaggaaccagtcgcagatgggtaagtcacagcccttagccagtggcctgcccccacagccacccaacttccacgccgtagacaagaaggaggccaaacccaaagatgtacttctgccccacccccggaacaggtgcatcctaaagacaggcccagtgtgtggtttgcggcataaggtcacactattaggcagaggcaccccagcccaggcccccagtttccctcctgggactcaggttggctccagcccactcccctaccttgtttccaccatgccccacccctgagtcccagcagataacgtatagcttctctagaagagtggcccctccatcagtaaacatccccccgtgtacaagtctttgatggcgtattctgcctgggggatggagaaggggataacctggggaggcagaggcmgagtcagtgtctggagcttccccgaccctgcctggttctctgtctctgcatcccccaagatttcaagaaggatgccacatcatctcgtgcatctccgtccacctcagcgcctcagcatggcatgggaggc

SEQ ID NO: 847069 - DNA, 451 bp, Homo sapiens
agccgaagagtgtcagccgggaggatcccgcacacggcgcttagttctggaactgcatacccaggggaggatgcgggagcccgaagcccgggtatgtgtccccgaagcccgggtgtgggtccccatggttttcgtgttgggggtgggcgcggaacgctaagcctgggcctattgggagccatagtcttcttgatggctggtgcttattgggcttttttcagtcgaatttcgaaatgcagttgaatttcttactttggaaacgataatagaaatggctgatctaagattttcatgatgatattttgccttttttggtgcatatgcagtttctgtggtgtagtggttatcatgttcgcctcacacgagaaaagtccctgattcgagactgsgtgggaacgtcgtggtttgtttttttttttgtttgtttgtttgtttttttggtccctaaatt

SEQ ID NO: 847070 - DNA, 614 bp, Homo sapiens
gagggcacctgcagcgccgggatctgagtgcgaaactccgagcggaagctggtctggcaggtcctctggagcttggggccaggcgggggcgacttgggggagccatccttgggctccyagacggagtaggttcagttctgagcccggataccccggcgaggttggacgggatagccgtgacagggagtccccgggcggggacaaggtccgcctctcacctgggtcctcagcaactgacacccggagtgggtgtctggaaggtctgctcatcaaatgaatgactgcatttaatcagatcttcaactactgtggtagtgaaggggcaccgatcatggaggcccaccgagggcccgaggtcgggaaaatcaccttcccgaggagcaggcgtggtgcagacccacaggggtttgtggcgggagtagagggtctgtttggggcgagataagagactgaacggcagagtagggagtgctggctaaggcagtgctgcagagcgaaactctagacctgcgctgtctaatagaactttatatgatggtgggaatgttctacctttgtgctgtccaatagagtaaccgttagccacatgtggtcattgaactcttgaaatgtgg

SEQ ID NO: 847071 - DNA, 512 bp, Homo sapiens
aaaccagcgatttggagggtcgagggctggtgctttgaaagacaggcggaggggagagagggatttccccgtccccgctgcactcggtccttcccctgggttactcctttyctccgcctgcgcggcccctaacctgctcgaacccgttgtgcagaagaggccgccgggtccctttaaggccccgccgcgcctgcgccttgggttatcctgacacgcccatcgggatcctgaggagccagtgggctgcaggcgcaggcgcaggcgaggggctgggtggcggttgagacagcggcggtactgggaggcgtaggtgagggtcgcgaggctgcccgagcttctgagcgagcgcggtgcttttgggaacgcgggacgggcgatctgcggcgccaggagctgggccgaggcgcggcggcgcggctgccggctgccctgtgaatgggaagttacgcgaagtccacccagcgtttctgaggtgagggcgccgcgccaggctgggcgggcggtgaatccgg

SEQ ID NO: 847072 - DNA, 493 bp, Homo sapiens
ccgtccccgctgcactcggtccttcccctgggttactcctttcctccgcctgcgcggcccctaacctgctcgaacccgttgtgcagaagaggccgccsggtccctttaaggccccgccgcgcctgcgccttgggttatcctgacacgcccatcgggatcctgaggagccagtgggctgcaggcgcaggcgcaggcgaggggctgggtggcggttgagacagcggcggtactgggaggcgtaggtgagggtcgcgaggctgcccgagcttctgagcgagcgcggtgcttttgggaacgcgggacgggcgatctgcggcgccaggagctgggccgaggcgcggcggcgcggctgccggctgccctgtgaatgggaagttacgcgaagtccacccagcgtttctgaggtgagggcgccgcgccaggctgggcgggcggtgaatccgggacccgcgggcgcacagctgggtcgaggcgcggccgtggcaagttttgt

SEQ ID NO: 847073 - DNA, 463 bp, Homo sapiens; identical to SEQ ID NO: 847067

SEQ ID NO: 847074 - DNA, 589 bp, Homo sapiens; identical to SEQ ID NO: 847068

SEQ ID NO: 847075 - DNA, 626 bp, Homo sapiens
aagatgggggagggaggaagtgcagggccggaggggccggttgaggtgcatacgcctcaccctgctctgcacacacagctcyttgctgcacccacatggcctacaagccacgaaagaaacattcatttaccccattgtgctggactaaatgtgaagtagctaagggaggctaaacttctcccacttctcaagggctgaggagtgagtaggacagtcccagacaagaaaactccacgatagatgcagtgggcccacaccagtccctacatttgagcctttctcacagcggaaaagtgccctttaatccccagcatcagagctcacatccagtgatttatacacctacctgcagccttttaggtcttgggcaacaacagcatgttgatattaattcagtggaattttgatcatctgagttcttagcagagagcaatgagagaaataggaatcacattccaaagagagttctgctcccccaggtgtggcccagcccaggctgcagaggcagtttccagctccccactgcctccaagaagagggcaaatcgtgcattcattgttatcatttagtccacacatcctctgactgccacagctggatggtctcctagaggcagggaggagtag

SEQ ID NO: 847076 - DNA, 642 bp, Homo sapiens
cttgtccaggtcactttgcatctgctgctgggccaggtccttctagtggagcaccttgtcccgcagctgctcctccagctgggcctgcagcagggcctgcttctccagggctgccttggcccggctctytgccagccacaggcccgtgctcagtcccaggcccgcctcctggacagctcgtgatgtccgggccagctcccctcccagctgcagcaggtcctttgggagagagcacaggatggggatgggatggggctcgctcccaactacaaattaaaactacgctgaggccaggcgtggtggctcacacctataatcccagcattttgggaggccgaggcgggcagatcacctgaggtcaggcatttgagaccagcctgggcaacatggtgaaaccccgtctctactaaaaatacaaaaaattagccaggcgtggtggcgcactcctgtagtcccagctacttgggtggctgaggtgggaggatcacttgagcctgggagttcaagcctaagtgagttgtgattgtgccactgcactccagcctgggcaacagagagagactgtctcaaaaaaaaaagaaagaaaaagtattttaagtccataatacaggttaaatcctttcctttcctgaatgaactgta

SEQ ID NO: 847077 - DNA, 619 bp, Homo sapiens
gtgttccgcacgggggctccaccagggcagggatggtggtgagggtcgctcgtgggtcccctcgsggggagcagggtctggtactcaccagggcgcacgactaggacttgtggaatgaattcatcgtcgcctttagcttttagtcctttgaagagccctgagagtggaaatcaagagattttttccacggggaagttctttttacaaagcgttgatttctcggcacccggcagggagggcaactggcagggtctctggcgcaccttctgcgcggtggagccacgggggctcagctgggcggtggtgcggccgtggggtggtaggtcaagagctgggaaaggaaaaagcaaaagctgggaaagaagccggggagcggtggaccagacatccagacctcctgaaaggctcatgaaggggcacaggcaggatcttctggaagtgagaattgttttgtttgtttgtttgtttattgtagtagaatggggaaatggagagagaacctgaaagagccccaaactcgaggacctattgctccccaagaataacatcttccagaagaactagacagaaaactaggcgtctgggaactctgaaatccttggaggagtagcatcatcat

SEQ ID NO: 847078 - DNA, 581 bp, Homo sapiens
cagaaaaactaagactctattacccacagggaatatttgagcacttgagttctagagccaaattgcttatgttcataagttagtccttctgcttctggctcagacaagttacytaacatctctgctgatcagtttctgatctaaaaaataaaaacaacaataataatggtgatctttaaaagttgctgtgaggctaaatcaattagtgtctgcaaaacacttaaaacagttcccgaaaacagcaagccctcattattatttgggggtgctggtagtagttgtgattaataacttttataccaatgacaaatatttcttgtttgttcattttagcaggctaaactggaaaagctatacacacactctgatctattcatctttaaatccctagtattcagcatggtgtctgggacatagtaattactcaacaaatgtttgttgaataaagtttataaataatatgattacttaaaatgcaagctctttgttcttttggcttaggattggcttggcgatgcgggctcttttttggttccatatgaactttaaagtagttttttccaattctgtgaagaaaggca

SEQ ID NO: 847079 - DNA, 670 bp, Homo sapiens
ttgacctcagtcaaagtcttctcattccctgaagttattgctaatttcttccttgttcctcagagctgactacagcttgaatcccctcagtcatagtgcctctgctctctctgactagagagcaaaccttgtttgccctgatgagtgacaaatggaggtggaaaggtttcaacctacaccaagtagttctgagatgccacagtctttcctgacaggaggctaatgaaggcagtaggctaaagtctcatactatgcagtgcttggctagcctcctaggagcactataacttttcccaggaagagtcttccattttctcaaggaaccagttgtggcaagacactgaccccagttgggaactattttctctttcccatctttctttaaaccttgcttttgcaatttttctcttctgtgcttcttcctcatacttcacacaaaagctcagtatactttttggacacagcaagataggcctcttagatattgccctctggaatgccaaatccaggcctatggttcttaagatgtcctttcgaggtccttctttattggccatgctgaatcatctctattcccaagttttacttgataataaatgttcagatagatattgcatgctcactgctttcaaattagacctgcarctcatcctacttgacctcaaaagcc

SEQ ID NO: 847080 - DNA, 554 bp, Homo sapiens
cttgctgcttttaggatcctctctttgtccttgaccttygggaatctgattattaaatatcttgaggtagtcttatttcggttaaatctgcttggtgttctataaccttcttgtacttgaatattgatatcttcctctaggtttgagaagttctctgttattaaccatctgaataaactttctacgcctctctctctctacctccactttaagtttaataactcttagatttgccctactgaggctattttctaggtcttgtaggcatgcttccttctttttttatttttttttcttttgtcccttgtgactgtattttcaaggagcctgtcttcaagctcactaattctttattctgcttgatcaattctgctgttaagatatgctgatgaattcttcaggatatgaattccatttgtcagctccaaaatatctgcttgattcattttaattatttccatctttctgttaaatttatttgataggattttgaaaggcttctctgcgttatcttaaatttcactcaaaacacctattttgaattctctatttgt

SEQ ID NO: 847081 - DNA, 627 bp, Homo sapiens
tgtttatattcttatttttagtagtggtttcaaaattcttatataggcaaagaatgggctggctgtcagggttggcagcgtggatggagagtgggaacccgaggggagggcttgaatctgctrttacttagccttttaaagaaaactgaggaaatatgatttttctcttcaaggaatggtgttagaggtcagtggctgctagaatttatgagattacgcccgttgcccctacaaaaacattgctttgtgctaccattgcacactgcgaattctgcgaagtttaacaaggccactgaaatctttattttccaaggttgtgtgtggggcggtaatctatcccttctctctgagtttcctgaaatacagatgcagaagaaagtttcagaaagaaacagtttctctcaaatgtatacatgggaaatccaaacaaatttgtccgttgaggttaggaacaaactcaacatacctttcctccagttaaccaacctgctttccaaaaaagccaatttaggttaaggttacttttgagaaatttgtactttttgtttcagaatctgtaataatttcatgtttgctgattgctgatatttggtcaacaatactatagagccagttcttactttttgt

SEQ ID NO: 847082 - DNA, 568 bp, Homo sapiens
gagatggggtttcaccatgttggccaggctggtctcaaccacctgacctcaagcctcctaaagttctggggtaacaggtgtgagccacggtgctggttcaaatagttttaattctactgtgacatctatatataggtctaaatccaatcgtgaaaagagctgaggtgaccagaaccttcaatacttactgaaatagttcctaaaccatatacgagtccctaaaaaataaatttggatgcgtatttattgaaaaggaaagaggttcacaatccatcactgaggaaaaagcttttaaatggacccacttgaaagttgtcatcgtttggcgggtcgaaaatgttcaaatatttgcaatttcctattttaacttaaatattatgcaagacaatatgaatattatgatctgattttgttgttttttaatatatactctgaaaatttagcagcagttatccttgggatgggattatgggtcacttttaattcgtttcctctttyggcttacctatattttttacttcttcaggaataaatccctgggtttaccctcaagctccagtctgaagct

SEQ ID NO: 847083 - DNA, 624 bp, Homo sapiens
ttttgatggtagtcacatgactgtatacatttgtcaagactcagaattgtacacatgaatttggcagatccattttatgaaaattatatctcaataaaattgattaaaatataattgataaaaagatatatgtatatatatacttgatatgtatatgtatttacgtgtgtctatatatttgattttcaatattacgtgtgtctatatatttgattttcaataaagataaaattagctctgtagcctgtttcgtgtgtaccagtgggcatactaactgctaataattaagctacacaataaatatgagtggaattaataaaggaaaatgccataaattataattaaaaaccaatataaataaaatataacaaaattttcaattagaagtacatatgtatggaagaacatggaagcttgtatgagtgtatttgttaattgattgatttttcagtatacctgagccaactactttgagaattgttgttgatgccttaaggccatgctatgtactggaagctcatgtttgcraaatgtgtgattaaaaaatcagttaattcaaatttctattttacatgaaattgactagggataagcaacagcaagagagggtcaatcaacagtggt

SEQ ID NO: 847084 - DNA, 474 bp, Homo sapiens
ttcgttctcctttctgccaccttgtgaagaaggtgccttgcttccccttctccttccatcataattctaagtttccttgaggcctgcaaagccatgctgaatgtaagtcaattaaacctcttatttttttaataaattacccagtctcaagcagttctttatagcagtgtgtaaatggactgatacatctatagaatctataacaatcttaaagtaaacagaagaaaataatagactttcgatagcagttcaacacataatgaatcccagttgattctgatgtgaagtgctataactcaggtctttacgtgatatctgtaactacttacactctgatctcttttttctttctttgaaagcacttgcactagtgacatttgaatcacttcatcrttcttttttaaagaattgtagaatcatataactgttggctttctgtctttcagtttcctatatatgccaaggtcttttcta

SEQ ID NO: 847085 - DNA, 615 bp, Homo sapiens
tcttgtgatacttattcactatctgagaacagcacaggaaagatttgcccccatgattcaattacctcccacaactcgtgggaattcaagatgagatttgggtggggacacagccaaaccatttcatctgcctcctccctacctttcccattctgtagtatccattattgtattctctacaagcatacttcagagatattgcaggttttgttccagaccactgcaataaagtgcgtcactcaaactttttggttttccagtaaatgtgaaagttatatttatactatactgtagtctattaagtgtgcaataacatttctaagaagtgtactttattgctataaaatggtaataataatctaagctctcagcgagttgtaatattttggctgatggagggtcttgccttgatattggtggctaatgactgattggtgtagcagttgatgaaggttggggtggctgtggcaatttcttaaaataagacaacratgaagtttgtcacattgacggactctttctttcataaaagatttctccatagaatgcaatggtgtttgatagcattttacctacagtagaacattttttcaaaattagagtcaatcctctcaa

SEQ ID NO: 847086 - DNA, 630 bp, Homo sapiens
gtcgggaacttctggcacctrtgcagtttgataacatgcttcatttgttgcatgtcttattagcatattaaatattaagtgtccacctttgcatgtgagtgttgagtattataatgaaactatggtggaagttcagttgttcttctggtcttgtacacagctgggagataggattaaacccccttgagtaagatttatggtgggagctgcttattagtttccttaaggtcctggaatcaatggtaggcatcttgagtaagatttccagtgcaaggtcttgatggtctctttggggtcgctgctggccatgcctgccaccaacttgcaatagaggtccttggtgggctacaggggtcaagtcccatccctgctctgtcttcacgacaataggataaagtgatcctatagttgaagactgcaggacagactgggcataggacgcagtaagagatgtagctaactctctgggtaggaagctatgctgatgagaactaaagtgaggccaagttaacagggaggaccattggccctgtttgagctgagatgacaggccattaattcctagctgtagactggatagatgacaaggacaagggacaattaccactcccaccaaataagccagtgaaa

SEQ ID NO: 847087 - DNA, 529 bp, Homo sapiens
aggtgtgcagtaatatctcattgtggttttaatttgcgtttccctggtgatcagtgacgcagagctccttttcatgtacttggccatttctatgtctttgtagaaatgtctgttcaattattttgcccatttcttaatttgcttaatttttttttctgttaagttttatgagctccttatatatagatggtccctgaagtataataggattatatctggataaacccatcataaataaaaaatcataagtcaaaatgaatttaatacctttataaatccagcataaagtcacaaaaatcatcagttgaactatcataaattagagatcatctgtattttggatattaaccctttatcagatatatggtttgcaaatatttttttttcatttcataggtcgtcttttcatttggttgattgtttcttttccygtgaagatgctttttcgtttgattcagcagactacattaagacattgtgatgtgaagtagagccctaaaatgaagcagtagctgttaaggggatatgt

SEQ ID NO: 847088 - DNA, 598 bp, Homo sapiens
ctcagtgatttagacatggaaaaacagtagagaaagtagagagacaaaaaagagtaagatgtgaatcaagaagtgaagggatttttcagttacattcccagcccatggagattgggtggtgatgggcaatattgtcaaaggaaaagtgatatgagacaaaactgacataagaattaggcctaaacattcaaaatgaccagatgggactccagtatgggaacagcaattattgtttttagctccccatcatctaaactaattcctgaggcaattgttaaattgatagtgtctagttaccaattttttttttttcacagagtctcactttgtcacccaggctgaagtgcagtgctgtgaacttggctcactgcaacctctgcccccaaggttcaagcagttctccttcctcagcctacagagtagctgggattacaggcgtgcaccaccacatctggctaatttttgtatttttagtagagatggggttttgtcatgttgcccaggctggtctcgaactcctggcctcaagtgatctgcctgcctcggcctcccaaagtgtagggggaktacaggcatgagccaccgtgcccatccccaa

SEQ ID NO: 847089 - DNA, 575 bp, Homo sapiens
agggcctggaacatgggttcactactctgactggtgccctatcctgctgtggctgagctggtatccaagatgcaagacaattcatccacactatttcytctcctctactcacacagaaaaaaaagtgtcttttttggagctaagagctgtgcaatggggttaggggaatggtgatgccagtgctcctttgcccaaactgttgtctcagaatgctgcctgcatcccactccactgtctctgggtctagtatagtattaggactcacttaagagttggagtatttatggcctagactgtctttcaagtttacttggaaacagagatcgctgtagccctcagtggtaaggtttgtgggaactcaagtttggactgctgggattggtgatccccctctggctagagctggtttaaatgttccctctgttgtggcgcatcagctgagtttggacaggttttcctttctgctctaacaagacagcactgagttcactgcctcacaattgatgtgtactccctcactcagtgtccagagaggctctctgcaccatgaggctgctgccaggggtgtgggaggg

SEQ ID NO: 847090 - DNA, 372 bp, Homo sapiens
cagtttccaaactaatttcttgccaattcctacttgcacacgatatatcrtttttatctttgctctatacttactatttagctatctatttatgatatactaaatgcctagaagtttcccctatatttttcattcctcaaatatagatccctgcaaatctcaagcttaattgaatatgtacatagaatagtcaagttaggcaatcatgttgacataggaacatgcccaggagttgagagtgaaaaccactcttcatcttctgtgcactatatgctttgattccactgaatagtgatctacttgtaagtgctgattttgaggaatcatcattatttctagattttattgcttatcacttggcattggccatac

SEQ ID NO: 847091 - DNA, 392 bp, Homo sapiens
atatatatatgtggcacagaccgggtcttgctatgttgcctaggctggtcttaaactcctggcctcaagcaaccctcccacctcaggctcctaaagcactagattacaggcatgagccaccgtgcctggccctgatctttctatttaacactgccatctgcctccaccccagcccctgcccacaactcccaagtccccttatcatgtgtgaatttaattttttgttttatgatcattgcaaattcatatgcagatgtaaaaaatagagcatttccatatgaagttgactcagtttctctcaaagatagtatcttgtgtaactatagtacartatcatctgtattactttttttcttagtatcactttctaatacaggctgagtagcccttat

SEQ ID NO: 847092 - DNA, 669 bp, Homo sapiens
gaatcgggtcacacatgggcttgaaggatgaatgtgaagttttattgagtggtggaggtggctctcatcaggatggatggggagctggtaggaggggatggartgggaagatgatcttcccctggagttgggctgtccagtggcctaactcctctccaactacccccagtccaactcttcttggtgttcagacgttcctcttctctctttctctgccacatcatttgctgtctttctgcttgtctcatctctttgtctgctggtctgctctggagcctggggttcagggtttatatgggtacaggatagggagcatggtagtccaaaaagcaactttttgggtgcaaaaacaggaatgcctatccttgtttagggctgtgggtctttaggcttgagagtggggcctttgccagggaaccacccttttctacccagtgtttccctgtctactgtctgtatcagttctacatggctggggaggcctcacaatcatggtggaaggcgaaggaggaacaaagccatgtcttacatggcagcaggcaagagactatgtgcaggggaactgcgctttgtaaaaccatcagatctttgagacttattcactatcaggagaacagcatgggaaaacccaccaccatgattcaattacctcccacagggtccctccca

SEQ ID NO: 847093 - DNA, 583 bp, Homo sapiens
agtagagatggggtttcaccatgttggccaggttggtttcaaacttctgacctcaggtgatccacccccctcggcctcctaaagtgctgrgattacaggcgtgagccaccacacccagcctggtacctactttttattaacttcttattatggtaaaattgtaaccattcataaaatagtaactagtattatgaaccaccatgctcagcttcaacagttatctccatttttcctatcttgttttatctactcttaattatttattgatctgtttatctatttttattttgccatatttcttttgctggagtatttaaagtcaaatcttatacataatgtcatttcttctataaattcttcaattagatgtctctaactgataaggtcatcttgttttttgttttttgttttttaacataaccaccctgttaatatcacatctaacaagattaatacattctttactgtcatctaatatagtaaagtttccccacttgtctcaaatacgtcattttacagttgatttgttcaagttaggattaaatgaagtttacagaatacatttggttcttatcgctcttga

SEQ ID NO: 847094 - DNA, 492 bp, Homo sapiens
ttaaaataaaacacagaaaagtataaaaagttatacctggaagggatttgggaagaaattattcctctgattaatcattgtacaggtaagctgaatgattattacacacacatgctcattttttcaaacatctgaggctgttttgaggatattgtttgagaggatcacgattcagttagttcagtactgacttccccaagagctctcatggagttactgcaggttgaacatccataatctgaaatccaaactgctctaaaatctgaaattttttgattgccgacatgattccttaagtggaaaattccacacctgacttgcgtttgcagtcaaaacgcaggtgtacaacacagttcattcaacatcctcaagggaaaaagaccctccctgctcccttcagctgcggtagcagcacacattcataacagaacaagaaatcataycagattctaaaatcaaagctagattaataagacaaaagttgttgttaat

SEQ ID NO: 847095 - DNA, 645 bp, Homo sapiens
aaatacaaaattataatcacaattttgaaaacacacaaaccactgagcaattacgatatggtcccctggrgcatatagctaccctcttctgtaaaaaacacgttacagaaaacatgtttactgacgtaaagtgagccctggggcaaagtaaacttttaaagggatcaacatatgaaatgtgttttagctgctcaaatatcatgattactatccttaaaataatcacactaagtgaccatttcttaaaacagaaactgtgaaaaactgaaactaaattgctgaaaataacaaaactcatttggatgaaaaagaataaaacattgctgactctggggttgtgatctgacaagttggaaaacattaccaggacttcctgcttccatttctgacgtggtttctaggcttgttaggtctttatgaaacagtcgtcttacagttctgcagcctcttgtgtcttgccacctataaccatcttcattttcttgaaaggagtcttttctttgtcggtttataacaggaattctaggtccaggtttgaattctctccagttgtctgaattaccagtatgttcatcagacagccatctcttactctgatctttgtggctgtcattcatccaagcgggttgactgtagattgggttt

SEQ ID NO: 847096 - DNA, 413 bp, Homo sapiens
gcacctgtagtcccagctacatgggagaggctgaggcaggagaawtgcttgaacctgggaggcagaggtagcagtgagccaagattgtgccactgcactccagcctgggcaacagagcgagactccgtctcaaaaaaaaaaaaaaaaaaaagcattgttccggcccttgtctgcgtacccctagacttctaattatgtaagaaaaataaccactatttggttttctgttatttttgattcctaagctatatgattctatgggatttagcctgaacaagaggagctcatacgatagaagagcaaaacggcaacacccactctcttttcctcccccggtgcttggtgccagtaggaatatgttctttagtatactttggaataccaggatcctaaagttcttctggactgagtag

SEQ ID NO: 847097 - DNA, 710 bp, Homo sapiens
atgttctgagccgatgattgaagtttaatagaggagtttctatgtagcctacaatgaagtcaggagtcctgctgtggccgaaggaatcctcctccacactcttgaacattgcagtcaaataaggccagggcatggcccgggagccctcacagctgaaggagcagcctctggattgaaaaaaaatgctttcaaaaggggggggggaaagatgtttctttattaagcagctgcagctacatttattttgtaatggaaataaatgagtgtgcccagcacctttgaaagagaaatttgaggtgagactatttaagaatggagtgaatcgtcaaggtaagtgtgtccactgtgcggagaaagattcctggcaccttctgaggtgagcattgtgaattcctcagactcggggtcacaaggtgccgctcccccatccgacccctggggtttaaaagctagggtgcattgatttttaaatttatttttagtgaaaagttatagcaagtgtcacagagtcaaatgcccctggaccaggcaggtcggtgagcagagctggttacacaaggtgaggcccttccggtgggggggagggggkgggcatctctgctaagccccagctcatcgttggcatcaggatgccaattatttttaagagaactgagaaacccagatttttatgtggaaactcagttttcgagtgacgaattcagagctgt

SEQ ID NO: 847098 - DNA, 604 bp, Homo sapiens
cttagctaggaaatgggaatgtcagctgctttctttaccccccggcttgaatgtgaatacacatcrttcactatcagcttcatcagcatgaccacctctgcagcactagacaaagtccttactccctcaccgcctgtatcccattactgaacagtggtagagctggcattcaaaccctggttggtctaactccacagcccatgcgctaaacacctatgccacataaacttgcatcttctgcacatgcccctcccctgcccgccataaaaaagacaaaggtagataacaatgaaacatctccactgggagcttactgttctaggtcctacgtagacattactttgttttgcctcacagcactgtggggtaggtaccgtgtttgtccccattgtttggatgtgaagactgaggcttggaggagtcaagtcacttatgtaggaacctgcaactggcagttttgagatttgaccctaggatgatccaacttccaagtctggtgcttggcccatttcactccagccaggccatcagccagtctgctccagtgcttctcttgacggggagctcaccacctccaggggatccccttttcttgttggccagc

SEQ ID NO: 847099 - DNA, 399 bp, Homo sapiens
tctccaagtattttatggtttgtgacactaccatgacttttaaatttaattttccaattgtctgttgctattgcctataaaaaaatcaatctttgtgtattgaatttgtgtattgcaaattwgctaaatttacttattagttctaatagatttttttagatttttttggattttcttttgcatattgatgtcatccacaaataaagacagctttatttctttccttccaatctgtattctttttattttttttcttcctcactattctggttaggtccctccagtacaatgttgaatagaagaaattagtgaatattttttgccatgttcccaatcatagagttcagttttttattgttaagcattgtgttagctaaagtaggtttttatagatgccca

SEQ ID NO: 847100 - DNA, 580 bp, Homo sapiens
gctgggggaacaactgaccagactttgcctgggtttggcctctgggggtgtggggctacccytgctctccctgtcacgccatctgttgcaggataccctccctgtcaccagggaccacctagctgatggagctggaatcaccagaaaacatgctgtcatcatctatgcacttcggtggggcccgtggcagcagaatctgacagggagtggtgggcggtagatccaatgatttgctgtcacggttgtggctctccaggagccaaagatgggagactcaggcccatttgccatctgctctcctgctggatttcatctttgtgtttttgggcatgtcactcccccggcccccgtgcctgggcctcctgggccctgccaggagggtctcttggggccctgccaagggactaggccactcagagggtcctggggagatctggcttgaggtcctggagccctcacgagagctagttggcccagcagagtccttggccttcacccagcctacccctcccttgagacctagtgctgaccaatcaccattgttttctttctctctcctgtcccccacccagcagaaagc

SEQ ID NO: 847101 - DNA, 557 bp, Homo sapiens
tgtgggacttttgataaatacattctttgacctgtgttcttgcctgtaaagtggggatattatggggtggaggggggagracctatggtgacgattaaatgagagaaggcattaatgtccacatcctagcgcctaatgggaagttctccctggggagcaagtgtggatgcccgctgggaccagacaggggctgggtgattataaggcaagagtggaggatggaggctgtggagagccaagtatgtcagctctagctgcctgtcaccatgtaggactaggtatcatggggttatccagtttaataagagaaggtggagatctcgccttttttcagtgcaattcttttatttttatacattgccgatttgtttgaatcgaagtccgccatctgattttgccagtttgcaacttctcgtaagcactcatcaaaaggtgttttatttcaggtcctcagtccttcatccgcaatcctgaaattcaaaaaaactcaaaaagtttttataactgatgaggcagcagaacttgacctgaagggagaaaaggctagtgacagtcct

SEQ ID NO: 847102 - DNA, 656 bp, Homo sapiens
tagttcagccatgtggggaaagcagtttggaggtttctcaaaaaacttaaaatagagctaccattcaacccagcaatcccattactgggtatataccccaargaaaataggtcattatgccaaaaagacacatacgctcatatgttcatcattgtgtcattgatcatagcgaagacgacatggaatcagcctaggtgtccatcagtggattggatttctttttttaaagaggtacatatacaccatggaataatatgcagccattaaaaggtaggaaatcacattctttggagcagtatggatggagctggagaccataatcctgagttaacacagaacaagaaagccaaatattgcgtattctcacttataagtgggagctaaacattgaacacacatcaacataaacatgagaacaatagacactgcagattccaagaggggtcagtgagggaggggagcatgatttgaaaaactaccactgggtgctgtgcttactacctgagtgcaatatacccatgtaacaaatctgcatatgtacccctgtatttaaaataaaagttgaaattttaaaattaaaaaaataaaagcagttaaaacaatacccaattttcaaatgggcaaagcatctgaacagacatctcaccaaagaagat

SEQ ID NO: 847103 - DNA, 656 bp, Homo sapiens
tagttcagccatgtggggaaagcagtttggaggtttctcaaaaaacttaaaatagagctaccattcaacccagcaatcccattactgggtatataccccaaggaaaataggtcattatgccaaaaagacacatacgctcatatgttcatcattgtgtcattgatcatagcgaagacgacatggaatcagcctaggtgtccatcagtggattggatttctttttttaaagaggtacatatacaccatggaataatatgcagccattaaaaggtaggaaatcacattctttggagcagtatggatggagctggagaccataatcctgagttaacacagaacaagaaagccaaatattgcgtattctcacttataagtgggagctaaacattgaacacacatcaacataaacatgagaacaatagacactgcagattccaagaggggtcagtgagggaggggagcatgatttgaaaaactaccactgggtgctgtgcttactacctgagtgcaatatacccatgtaacaaatctgcatatgtacccctgtatttaaaataaaagttgaaattttaaaattaaaaaaataaaagcarttaaaacaatacccaattttcaaatgggcaaagcatctgaacagacatctcaccaaagaagat

SEQ ID NO: 847104 - DNA, 595 bp, Homo sapiens
catcctcagatttaatgtacccaagtctcgagtttcatagccttaaaaagtgaatgtttgttttgttttcttgrtgtattgtcttggacattggacaatttttcttaaatgagaaaaaatatggcaaagaattttataaaatgtttatcctcctcatcatctaatttgtttcctgccgctgaaagccaccttccccacgggcttgagaatgacacctgtccactgtgtcagcagttggtttgcttccctgcttattgttttctctatgaaatcttaaaacctaactaaggctttgctgcccactgcaggtggagaggagaataaatcaattcccttctgcctgatttcagtggctttatctcaaatgttttgtaagttattctgttgctaattaaacaatctcatttatagatattttcttcctatgaactcaatactaggttaataggtataaatataagttttgatcaattattaaatccataacaaagaaaaataacaaggacttaatgtatatcaataattatgttagcttgaaattagacattcacacaaatgtttgtctgtcaaattcagttcttatatttttggctat

SEQ ID NO: 847105 - DNA, 531 bp, Homo sapiens
ggccagagcatgagcctgaattgggaagaaaattagaaattccactcaaaaagtcagaagtttggctttcttgggcaagtcaaactgrtaatctactgtgatcaagaaccaaagagaggccaggaacagtgcctcacacctgtaatctcagcactttgggaatctgagacaggaggattgcttgaagctaggggttcaaaccagtctgggcaacatagcaagatcctgtctctacaaaaagcaaggaaaaacaaattagccaggtgtggtggcatgagcctggagtcctagctactggggaggctgaggcgagacgattgcttgagcccaggagttcaaggctgcagtgagctatgattgtgccactgaactccaacctgggcaacagagagggaccttgtctccaaaaaaaacgtaacaaaagaactaaagagagtattaatgataaaaatgaaagatggaaataataaaaatattcaataaagagattagataaattgtgtactcataatattgaactgtaaacaatgt

SEQ ID NO: 847106 - DNA, 651 bp, Homo sapiens
cgaggattaaataagatagtgtacatgaaggagcctaattatatgcctctttttggtaggccctcaagtaacattagttccyttcccccaagattagaccgtatactctcagcaaacattttaaatgccagggttcaggctttattgatttcaattttattttctcatttcagccgatcgcattaacagactccaggcagctcttgccagcacccagcagttccagcaaatgtttgatgagttgaggacctggttggatgataaacaaagccagcaagcaaaaaactgcccaatttctgcaaaattggagcggctacagtctcagctacaggagaatgaagagtttcagaaaagtcttaatcaacacagtggctcctatgaggtgattgtggctgaaggggaatctctacttctttctgtacctcctggagaagagaaaaggactctacaaaaccagttggttgagctcaaaaaccattgggaagagcttagtaaaaaaactgcagacagacaatccaggctcaaggattgtatgcagaaagctcagaaatatcagtggcatgtggaagaccttgtgccatggatagaagattgtaaagctaagatgtctgagttgcgagtcactctggatccagtgcagctagagtccag

SEQ ID NO: 847107 - DNA, 512 bp, Homo sapiens
gattaatctttccttactccagcagcagaccagatttataaagtatgactctgttttcagattcaaattatttttaataaggtaaaaacaaagatgaagataaatatttttaaaaacagcattagctgtaagttttcagctctttttttaatggaatcatacttttagcacagaatctgcacaagagaagaggatatgaatctgggagacggaaactctgctttaacccagctaactccatgggagctagaatagacagatgagttaggcctgtgaagaaccccccagtcttacttgggactgtacagtcttgctgatagatccatggatctgcagtctgtggggaaaattatttcttccttaaatgaatgtggaatactaaaatacattattcctaggaaaggctttccctcagttgcttctgaatgattagtaggtcctcactggcwgaccagattctatcacatgggagtggaagagagttcctttccactcaaaccaggcagagatct

SEQ ID NO: 847108 - DNA, 628 bp, Homo sapiens
tttggttattgagtaaaagagggccctgtaatgtggacttgacatcttccctccataccttggctttctgccttctttgccttttcawtccttcaccttcaccaccaccattttattgtaccaaaagcagctttaaacttgggatgtttttcctgcctctatctgatttttcttcagcagaaacatctttaatgctacaaaatggaattatagcagttgttttttctgggaaccatgttgttggagaaatagtcattttaactgaactgctttgtaatgttgcctaagaaaatatggtataatcaaattatagtaaaaaaatgaagtgcactcataattacttttataaccttcctttttcagtgttccctggggctttccctccctggtaatcttagccagccatagaccattctttctagaatcagtttcctaatcctagtgtggtctgtagtctcatattgaccaaaattggtcttactcaaacttatcattttcttttatatttatttttgtcctcttccattttctgtcatcctctggccttaattgactcacctggctcatggaagaaaaaggaagggaaataaatccaggctagtgaaatatagctggttctatccctctg

SEQ ID NO: 847109 - DNA, 571 bp, Homo sapiens
aaaactggatatctacatgcagaagaataaaactagatccctaatctcaccgtatacaaaaatcaactcaaaatagattaaagacaaacgtaagatctgaaactataaaattactagatggaaacagggggaatgcttcaggaaatgggtctaggcaaagattttatggctaagactttaaaagcaaggcaacaaaaccaaaaatagacacatcggaccatattaaaccaaaaaagcttctgtacagcaaacaaaacaatcattaaagggaagagaaaagctggagaatggaagaaaatatttgcaaactattcatctgacaaggaactaatatccagaatatacatggaactcatacaacccaatagtgaaaaaccaaataatctcattaaaagtgggcaaagaatctgaacagacatttcccaaaagaagacataaaaatggccaacagatatgtgaaaaaatgctcaacatcactaatcatcagggaaatgcaaatcaaarccacaatgagatactatcttatcctagttaaaatggctaatgtcaaaaagacaaaagttaacaaatg

SEQ ID NO: 847110 - DNA, 634 bp, Homo sapiens
tcagtctttcatgcaagatttactttatctaggtttttagtgtgtgtgtgtggaataaagagtttaatagacaagaggccagccacgacacatggaagacaaagttgttactcaactcaatctccacaaaaattcaaaggctagggtttctcaaggatggtaggccagggagtccctttatgtgtggggccacaggacaggtccaagattggggcaggcaggagggtcagggaggcagctgctccagttggagacactggttgtcagaaatgcaaaaacctgaaaagacatctcaaaaggccaatcttagattctacaatagtgatgttatctgcaggagtaattgtagaagttacatgtcttgtgacctcaggaataatggctggtaatcatttatctctacaccttagcagaattggctccactcatcctcctaacctgatgccctttcattagttttatcaatgcagctgaattttgtcaaaggcctattatcatttaaactataaactaaatgtttcccaaagttagcttggcctaagcctagaaatgagcaaagacagcyagccagtgaggctagaagcaagatagggtcagccatgtaggatttatctcactgccattattttgcaaa

SEQ ID NO: 847111 - DNA, 525 bp, Homo sapiens
gttgatgatttctgcccaccttgagctattctgggcttcagaccaatcagataaatgacagctccctcctacagactaagggtggaaggcgtgggcagtggggtaatagctgtatacttggggcatacacttcccagggactagaaggacagaccctttgggccagattttgtctgttggtttcttgaattttctgtcttgtgataaatgatctgattttatctgatcctgagaaggtgagatatttcttatctaagcagtttctataaaaccccaaatataatagtgggtgtcccagcggaggaacagagagatgataagggagaaacttatcgtccctgtatactttaatacttaactatttagtatccaatatttatacatttatgttgtattatgtatacaacattaatatatgtatatatgcatatatacacaaagtcacaatgccacgagtgcaagtgactgtaccccaraattccacacttctgcactttacgaagggatttgccaaagccttccttg

SEQ ID NO: 847112 - DNA, 572 bp, Homo sapiens
tactccttgaggtaatatattaaatagacactcagtctaccacgttcacggtcttcagtttgcttsgaaattatgtttccacatgcttttgtacaagctgttgttaactcccttaaatacctttttctaatcccaccttgtaggaaagttcaattccttcttcaaagcacaagcaacaacttcaaaagcgaagcctcccttgacttcttctcccacttcaaagtggcattaatgactgaccacttatcactctgaactaccacaaaactgcatatctttatacctatctattgattgatcagtcattgcatatagtcattccatggtgagagcaatataaagtctgtaagtcttacagggcccttgaattactcatttaaaagtaatttattcgtttcactttgtacttattatatatatgtttactaggtgaccactgacagaaaattattttcctaaatttgcacaagataggtaaaaggggagcatatgtgccccctttgatgtacctcgtaagatctctgctaggctgggaaattattgtgcgcaccctttgtatcttcttgaatgcc

SEQ ID NO: 847113 - DNA, 591 bp, Homo sapiens
atgccatgaaaatacaatattgttcagttttccacatatyttggttaatttttaggtattagctaactattaaagaattagcatataaacatgttctagaatgttgatgtatgtaataattaaaattatacatatttctaccattctccagtggggatttataaaatattttacatgataatatttggcattatgtctcaataacaaaatgttgaattcattgctaaagtcaaagctttccagaattacatctgagaaataagacactgttaacttgttaaaatagtattaagcattaagcctctcataaagttaatttaaaaatgtttgctttgtgtatgaaggaaaattcattttaaaagttctacctcctttatagttagtaacataataagagacagtgttaggtaaatagcaaattcctttagaatataaataattcttgagttattgagacttaatatttttataacatgaattctgtagaaattgctttgtagagaacagaaacttagtataataaactaaacttgaaatgcctgaaaataggtcaaagcaaacttcagtagtattaatatgtctgacaacata

SEQ ID NO: 847114 - DNA, 540 bp, Homo sapiens
aggaagaatgagaaggtggctgaatggtaggagctaggaatgttggtaatattttctcctgaagcgkacccagacttctctgggaaacttgaatttaagaaagcttataagggagactgtgcagtggaaggggtctggtcaaggagaaacagagcactggtgcctgtatactgccctcccccaataaaatatttgtctcctctaccccacaagccagaccacagccattcacatttaaagcttgtggtttgtccatccttgggagggtgccacgtggaataggattatattaagtgcatagtgatggctttgtggctcaggcagggaaatgtccctggctaattgcacattagatactagtcctgtaaatgttattaggctgtgcaagctagctgctactattaactttatgttgaccttctttgtaccaaacacaagctctcaaaagagttctttgcagagtgccatttaagggctcgtgcagcctttagaagttgatttggggatgcctgggaatgcagtctcctggaattgcattta

SEQ ID NO: 847115 - DNA, 523 bp, Homo sapiens
tacctatcctgccaaatttgagtttcaggaacctaatccaaatgttaattcgaatttccaaatcaccaccgattgcccatccctaatcaaaaaattytaaatgctccaaaacctaaaacatttgagcaccaacatgatgccacaggtggaaaattccacacctgacctcatgtgatgggttggagtcaaaactttgtttcatacacaaaattattaaaaatataggggccaggcatggtggttcacacatgtatgtaatcccagcactttgggaggctgaggcaggagaatcacttgagtccaggagtttgagaccactctgggcaacacagaaagaccctgtctctttaaaaaataataattattattattttatatatatataaagtaagattacctttatactatgtgtataatgtgtgtataaaaaataaattttgtgtttagatttaggtcccatccctaagatatctcattgtttgtatgcaaatattctaaaatctgaaaaaatccaaaatctaaa

SEQ ID NO: 847116 - DNA, 572 bp, Homo sapiens
gaagcttaacagacatgacccaaagaaaagaatggttcacacaatatcaagagtactttgtggcagaggtgggaccagactccatcccctggtcctcactgcacagccttataacrtcatagcttctcaaaagtatcctaagattgcaatggagaccagaccaagcagtcagccccatcagagcttggaggatgctatcagggaagtgtatgtttgtttcttcttaatcacagtcctattgtaagcctcaaggatttaggacccacaaaaggaaattctcaatttccactgctttttgtactcaacttttaaagtcaaagatggaaaaggtaagaaaataaacaagagactttttttaaaaaacaatattctgtatgacaccacttatatgaggtacctagagtagtgaaattgatagacagaaagtaagatggtggttgccagggattgggaggaaaggagaatggggagttagtctttagtgggcacgaggtttcagtttgagaagatgaaaaaagttttgggatggatggtggtgatggttgcataacaatatgattgtacttaatgcc

SEQ ID NO: 847117 - DNA, 487 bp, Homo sapiens
acagggaagggcccccgtctggtggacasgtgacccacgtgaccttacctatcgttggagatggctcacactccttaccttgaccccttgtcttgtatccaataagtaacaacgcagactggcattcagggccactactggtctctgtgtctaggtggtagtgttcccctgggcccagctgtcttttcttctatctctttgtcttgtgtctttatttctatgatctctcatctccacacacagggagaaaaatccacagaccctgtggggctggtccctacattattagtcataattttggttgctatgttaactttttcctagagttacgtctatgtggatatgttacatggatttttatacccatataactttctatattgctataaaattgttctcacccataaaatactgataatactgatatgtgacagatttcttgctgcctaagttttcactataatttaaggttactacaagtttaaaa

SEQ ID NO: 847118 - DNA, 487 bp, Homo sapiens
acagggaagggcccccgtctggtggacacgtgacccacgtgaccttacctatcgttggagatggctcacactccttaccttgaccccttgtcttgtatccaataagtaacaacgcagactggcattcagggccactactggtctctgtgtctaggtggtagtgttcccctgggcccagctgtcttttcttctatctctttgtcttgtgtctttatttctatgatctctcatctccacacacagggagaaaaatccacagaccctgtggggctggtccctacattattagtcataattttggttgctatgttaactttttcctagagttacgtctatgtggatatgttacatggatttttatacccatataactttcyatattgctataaaattgttctcacccataaaatactgataatactgatatgtgacagatttcttgctgcctaagttttcactataatttaaggttactacaagtttaaaa

SEQ ID NO: 847119 - DNA, 651 bp, Homo sapiens
cttgataacagtggtagctgggacaacttggcaatgtaaataaatacatggcatctagattggaaaggaagaagtacagttatctttatgtacggatgacatgatcttgcatttagaaaatcataagaaatttactaaaaagtattaggactcatgaacaaatttaggaatgtaatactatataagattggtatagaaaaataactgtatttctttaccaagaaatcttgaatccaaaaatggaattacaaaaataaatcttgttacaatagaattaaaactggggtaaatttaacataagaagcttaaacttgaacactaaaaactacaatacatggttagtgttggaaacacccaggtaccatccctgagccttctctccttggctctgaggactttaccttcacggggtgaggaaaggtgttgcattcttgacttttacattatattaagtgggttcggggtgaggtatctgcaagccaaatgagtattacaatctctacttttatgtataagagactgcggcccacaaagagagggaatgacaatccatatcmtggaaggtgaattgtcagacactgatttcccctatgtaaaccctgccaatcatcttgtatttaaaggatccccagataccttaccaataggtgt

SEQ ID NO: 847120 - DNA, 651 bp, Homo sapiens
cttgataacagtggtagctgggacaacttggcaatgtaaataaatacatggcatctagattggaaaggaagaagtacagttatctttatgtacggatgacatgatcttgcatttagaaaatcataagaaatttactaaaaagtattaggactcatgaacaaatttaggaatgtaatactatataagattggtatagaaaaataactgtatttctttaccaagaaatcttgaatccaaaaatggaattacaaaaataaatcttgttacaatagaattaaaactggggtaaatttaacataagaagcttaaacttgaacactaaaaactacaatacatggttagtgttggaaacacccaggtaccatccctgagccttctctccttggctctgaggactttaccttcacggggtgaggaaaggtgttgcattcttgacttttacattatattaagtgggttcggggtgaggtatctgcaagccaaatgagtattacaatctctacttttatgtataagagactgcggcccacaaagagagggaatgacaatccatatcatggaaggygaattgtcagacactgatttcccctatgtaaaccctgccaatcatcttgtatttaaaggatccccagataccttaccaataggtgt

SEQ ID NO: 847121 - DNA, 443 bp, Homo sapiens
acaaatattcagaacacagcaggagtgttctggaatcttatgtgagggacaaattttcagaacactgcaggagagttatgaaatcctatgtgagggacaaactttgaaaccaaagcaggagtgttctggagtcctatgtgagtgtgaaacattcagacaacagcaggggtgttctggaatcctatgtgaggaacaaacattcaggccacagtaggagtgttctggaatcctatgtcagggacaaagattcagaccctcataacaatgttctggactcctatgtgagggacaaacattcagaccccagcagcagttttctggaatcctctgtgagggaaaaacattsataccctcatagtggtgttctggaatcctctgtgagggaataaaactcagaatccaggagcattgttctgggatcctatgggagggacaaatattca

SEQ ID NO: 847122 - DNA, 287 bp, Homo sapiens
ccataacttacttttctttgtgttttgtatccccatctcagtaaatgctataatcctgtactcagttgctcaagcccataagtttggagttatttaatttcctccctttatcaccattccccatttcctccatagtcaggctatcaggaggtgctctttgttcttttttcaagatgtctcmaggaatcagtgaactgttctcttcatctctacttcccataacttaagccagaccgctaccatcatctttccacctgcgctgttaaaatcatctgtaataggctttc

SEQ ID NO: 847123 - DNA, 578 bp, Homo sapiens
acttaaaactgtcaaattattttcacaacattcacacatagcctgttaggttatttagtatgctaaaaaacaaaaaacaggcatttaataggttaatattacataatataaatgtattttaaatatcagaaatgtgatctatacagtgtaatatcacatttctaaattacatttctagttagatgtagaaaatactaatttttattatatactgacaaattatagttgcatatatttatggaatataaagtaatgttaagattttttaatacaatgattaaatcaagctaattaacctgtccattacctagaatatttaacatttttgtaataagaacatttgaaatttattctcttaacgttactgaaatgtacagtactcaaatattagctatattcaccattctgtggaattaatctcaaaaaaagtcaaactcattcctcctatctgagcctttgtaccctttgactgacatatttcaagtgtatttgacatccactgaagaacttatgagttaatcacacagaacattctaggatccaytagaaaatctaaataaatatatggcctttggtct

SEQ ID NO: 847124 - DNA, 578 bp, Homo sapiens
agcagaagtcactcatattagccataattttgggatctttggtcactattatagtttstacaaggtccatgtatttttctgtgttcagacatgttatagagtgatcttgtttttgttatgagctattatagtcacagtgacctcttctgatattgacattatgtaacattggttactttcaacaggagaacaccaaggcctagctgtgagtgccaggccagttttttatttttattttttatcatactttaatttctgggatacatgtgaagaacgcgcagctttgttacataggtatacacgtgccacggtggtttgctgcacccatcaattcatcatctacattaggtatttctcctaatgctatccctcccctagccccccaccccattacaggccctggtgtgtgatgttcccctccctgtgtccatgtgttctcgttgttcaactcccacttatgaatgagaacatgcagtgtttggttttctgttcctgtgttagttttctgagaacgatggtttccagcttcatccatgtctctgcaaaggacatgaactcatccttttttatgtctgcat

SEQ ID NO: 847125 - DNA, 501 bp, Homo sapiens
cctttctagtcctctggggtctggaggactggcctcgagtctaaatctttgcttctgcaaaggggtgaggggaagcaaagcttttgcaagcaaggtaaggggaagcaaagcttttgaaatcaggagcaaagatttagatgcagatcaatctcaggccccactgcagacctcctgaatcagagcttgtatttaatacagtccatggaagatgtgtgtgcacgttaatgtctgaggggccaagctctatagctcatgcctctccagctctcctctctcacactactgtgagcactcagtgcaggttgattattgtaatttttatctacgtgtcacatgctcattcattaagaagtcaaataaagtacttaayatgtgtccctttgcgccgcttgaatcccacttccaccgcaacatttgaacacttccctttgctgctgtaacaaattaccacgaatgtagtgacctaatagaacaaaaatttattctcttaacacttctgga

SEQ ID NO: 847126 - DNA, 544 bp, Homo sapiens
tttactatttgccttgttttgctctctgtggccaatttgtcactagattctgaagctctcagtcatgtctcttttgctattctcatgggtcctgaaaatggaacccagtgtttttttccctttgtttctttgaccacaccgggttttgttttggattatttaactgggatatgtggtagaacgtttccactggaaagatgagaaaagataaactacaccaagacttctctgttttcaattttgctgtgacttatttcatctttgctcaatatcatttcttgctcttggtgagaagtggagctcataataaatatagtcttgtgggaaaatgatataacattatgaagcccaaaccaggggacacagtcatcgtgcaagtcactgtatgaaaagcattcttagctttggttttcattccctttaggcagtttctggaggagataggctattctattctaaaattatgtgcctaatactgtcattttatttcttgagaagatttttgtgtatattwgtataatatgtaaaaatccaatataataac

SEQ ID NO: 847127 - DNA, 563 bp, Homo sapiens
ctatgtgtgttgtgtgtgtgcgtgtgcgtgcatgcatgcatgcatctgcatgtggaacagggcgggctggcaaatatgactgtgaataggtgaggacagttaatgacacaccaggtgtccttgtctgcatgtctctactgctttttaatttgacacattcaactgacttcatcaaggaattttcctaatactttagatgatcatgaaaaccaggatcatcatggtgaggtcttggcaattcatatctttttagagctaagaaagcgctaaatacattatatgttcttcaaatgagtcacttggaagagcattaatgtgaccacagtctggtacccagagttgacaagtgaggagggaacacaaaggggtagtgacctctcaggttgagtccaagatgcttccgagagctagatcaacaccaacacaccatttctcccgacgtaaaagagagatttggtcagagagcactctgaaattttacccatcatacactgagcagtcmgctaaagagtctgattatacctatagtaaaaacattgaaaggagggccacagattttatct

SEQ ID NO: 847128 - DNA, 563 bp, Homo sapiens
aatgagaccaaatattattcaagggatccttaactgtgattgctaaaatttggcagaagtttttattttacaagtaaaataggatttataagatgaacamaaaagcctaaatatgaattgcatttttaaatatagagcttgaataaatctaacattgctgtctaaaaaccagaccaaacccctgaatgatcttttgtatgcataaagtgtatactcaagaatacgtaaaagacctcatatttagcaatttgctatggaaccaggtagagctgacactgactgatgagctacatggggggtcactatccaaggaatagtaggatctcagaagggagggtccaaaggatggaaggtggctggcagagggaagagagaatttgcaggactgggctccaggagagaagttcttgctgtggaggggtggccaaagagtgtacgtggagatccagggtaactcagagaagtcacagaagccccctgagttcttagcacactgagaatctaaaataggtccaatatttccctcacgggtcacttcttccactgggtcacttcctctgctg

SEQ ID NO: 847129 - DNA, 598 bp, Homo sapiens
ctgtgatcaagttcagcctgaaagatggaggtttagaggaaaatagaaatygattgcagtaacaagcatgacgaatagtgtgccaggagaaacaaacctagactgaaggtgtgagcgctcgagtttacaaagtcaagttttgcattggtttggctggtggggaaactctagaatgccatgcagcagaaatgaaaaagtaacatctcagaatctctgatcattttggatgtctatcaataaacctagcatggcagattagcagagaataagtcaagaagaattatgaccagagaagattaattgaagtcaaggttcctatgactaaatttgtttatatctgggtgctgagttagaagcccaactagttcgtctgcctcacttttgtgttgctaatttctttaaaaaaacaacaacaacaaaagatcatcattgcagatgggaggcaggactagattgcagctctgactcagatggacagagcagtgtgcagaggcttgcatcatgaattttagctccagaatgacaagaataaaccagaaatcctgagaggatccacagaccctctgaaagaagcggactgctcctgcaggacctggaa

SEQ ID NO: 847130 - DNA, 432 bp, Homo sapiens
cccttaagattttcgttaatgtctaggtcaaaaaaaatacttattttcttatcatcacgaaatgcagatgcatagccccatctcatgcctcgcttctcctagttgggatrgcctctgagaacatttccaacactcttctttgcagaaggtattctgcacctacagctggaagcaggagacgaaccggccaaaggtgtcttggctgtgctctgccttctttccttagctttcctaactctgcctttccggtgattttcatgttttccctttcattttacattcagaaaatctctggggaatgcagcttttgttctgttgcttcacgtaattcccagggcagggaatgaaaattatttgctttcacaacttctggctgagtgcctttcacagcctggctgtgttctggggtgatttataaactgcagagcctgg

SEQ ID NO: 847131 - DNA, 432 bp, Homo sapiens
cccttaagattttcgttaatgtctaggtcaaaaaaaatacttattttcttatcatcacgaaatgcagatgcatagccccatctcatgcctcgcttctcctagttgggatagcctctgagaacatttccaacactcttctttgcagaaggtattctgcacctacagctggaagcaggagacgaaccggccaaaggtgtcttggctgtgctctgccttctttccttagctttcctaactctgcctttccggtgattttcatgttttccctttcattttacattcagaaaatctctggggaatgcagcttttgttctgttgcttcacgtaattcccagggcagggaatgaaaattatttgctttcacaacttctggctgagtgcctttcacagccyggctgtgttctggggtgatttataaactgcagagcctgg

SEQ ID NO: 847132 - DNA, 544 bp, Homo sapiens
actcctcatgtcttacatgatattaattttttcttaagggcaatctttaaagatgtaaaaagaaaaataattttttttaattttttggtcagccaccaatcccctccagtctatagactatagtctttaaagtataaagtagtcctcaggtttccatggtagcaaactgtatttccagaacccatcattcattcatcctttccacaaatatcgggtgcagcatatgctatgttctgggcactacagctctggggacacggtcacatgctggacaaaatccctatactcatgagcacacattctaatggcagaaatacacaaattttaataaacaaatatatggtatatttgcacatcgtgacaaaaacatggctaggcaaggagataaaaacatgtttgagctgtccacaggatagggagggatakggagaagggaagatttctaaggaatgtcacattgagcaaaatctggatgaaatgaagaaggaccaagactccagattctctaatagaattcatcacccatcactctgtacctcatgtt

SEQ ID NO: 847133 - DNA, 564 bp, Homo sapiens
atggggactaaatcatctttatctttgtagctcctttaatgttttgtatgtgggggaatgatatgtttgatggagagatgaatggatagataaatggactgatagcctaaaacttaagtacttccaggagtcaaaactattattttctttgctacttcctgagtcaatatacatcttctctcaggagaacaccaaggttacatagactcctcgtagagcactcaacacaataaatcaggttagggccactgggaaataaaggattagagtaaaaggaaatctttgattaaaaatgtagttcattattcaatactctttgctagacagcaaacataaaggccataaaccttgccttagctcaataattcagagcttccaaacataggataatacaaattgactcttttgaaatcatacccaacaaatgactcmttggtcataagtacacacaatgtcacatttgtgtgaaacgctgtcagagtgacagcagtaagcaaaatgaaaatgaatttagtaatcctatcctatcctctgattttttaaagaagcccacgtgttccccct

SEQ ID NO: 847134 - DNA, 539 bp, Homo sapiens
gagacccggggtgtggacagtcagcyagcaggtgtaagaagagggcaaggcaagcagataattacacagaaggttgccataggctgggtttggaagcagcttacaacacttccagccacactccactggtcagaactcagtcagatggtcccagatgcaagaagatctgggaaatatagttcctacctagacagccacttctcagcaacaactccgcaatataatagtttggtgcataagtaattgcagcaatttgccaataatggcaaaacccgcaattacttttgcactagcctaataaagaaagagcatgaactttggaggacagctaacatccctaccatgaatattccattcacacaaaggttttaatacttgataaaagcttaagtcttctcaaagatgtgttcgcagaaatcatgattttaagctaaaagaatggtttagatggaatttcaggcatctgagaattgtgttgggtttcactcatctttatggccctagggcataagtcagtgcaggtagttcctagaaatcag

SEQ ID NO: 847135 - DNA, 407 bp, Homo sapiens
tctagacagacatttcacccttcacaaaaattaactcaaaatggatcacagccttaaatgtwaaacactaaactacaaaacccctagaagataacataggagaaaatctggatgatctggatttggtgatgattttttacatgcggcagcaaaggcacaatccacaaaagaaagaattgataagttggactttattaaaattaaatctttccgctctgtgaaagagaaagtcaagtgaatgagaacatatgccacagactggaataagatatttgcaaaacactatctgataaagaactgttatccaaaatatacaaagaactcttaaaattcaacagtaagaacacaaacaacctgattgaaaaatgggccaaagagctttacaaacacctcaccaaagaagatgc

SEQ ID NO: 847136 - DNA, 621 bp, Homo sapiens
acatataactatatattttattaatgatcatatataatagtatgcatagtttattatatagtatatataagtacttaatatatactgttatatataatggttaatataatatacttaatatataatattcatatacatatttaatgtgcattgtagttaatatattaatatataatatatattaatatcagtgggaaatggtgactgtttaaggtatttcacccctggagttgccaaatatataaactgtatatatactattatatataatagctaatatagtatgtatattattatatataatagtttatatatgttagttgatgattaatgattaattatattagctaatatatattatatattatagttatatatatgtgtatatatatatatactaatatcagtgggaaatggtgactgttttaggaatttcacccctagggttgccaaataagtaaatttacttgtttctcatataatgtacttattaaaataaacttttagtccattatggaatgtaagttacaggcctgccgcaggcaaaakagaaaaaaaactcttcaaagagaccgaacacttttttttttttttgagaccctgttttcgggaaccagcatt

SEQ ID NO: 847137 - DNA, 508 bp, Homo sapiens
ttttcatgtgccttggtatcattttcttcctgattttcgtgcctggaattycctaggcttcttaagcctgaatttatagttttcttcaaatttgcaaaagttttggccattacttctgcaaatattttttctgttcctactcattcttcttcaggggctccagttacatatatattaggctgcttgaagttgttccatagctcactgatcgctttgctcgttttggggcgtcatttttctctctgtttcactttggatagtttcaattgctgtctttaagtttattagcatttttctgcaatgtttaatctgttgttaatcctgtgcagtgtatttttattgcagacattatctttttcatctctagttgttttatttggttcttgttttaatgttttctgtgtctctcttcagcatgctcatgcttttgcccaccttcttgagcatatggaaaacaattataataactggcttaatgtccttttctactaattatattatctgtgtc

SEQ ID NO: 847138 - DNA, 561 bp, Homo sapiens
gtttatggccattgctggtgtccctggggccagagcaatgagtggcaatatgaaatagaaccccaattagtccagaatgtggttctgattcactgtcctcaccaccrtgttgggatagaagtaaagagtaggtatagatcgcctaaagaaaaaagggggtgtctttatgttcagggaaaaggtgtaagaagagcaagagctgagaggctgccttcaacactgctgctgcttcagctcattttttatcttttcatccctccctcagagttttcaaagctggagctcaaattcaggtctaagctaatagagagagggaaggcaggaggttaaaccaaactgttaactgtgtctcttcaaaactgacatttaatacagggtgtaaatcactaggggggcctgttattccttcaggaatgcaattacatagggtcaaataaaacatgaaagaaaccaacaagttttaaaatgtagtatgttctcaaaagtaggcaagaaggaatgtgaagcagtccaaatatgctaacactccctgctgtcctataggagaggattacaaggaga

SEQ ID NO: 847139 - DNA, 538 bp, Homo sapiens
atattaacatttgaggaacacaggtctcttgccttattcactagcccacaatatatacmcatatttgacagatatggaaatgaggcccaaaaccagatgagaactccacctggaagcatcaggttataattggaaatccaagtctcttccacccaatgcccttcccctacccccatcttttggtccagagggcccatacatttcagtctcaggccttaagcaaagccaggatcatcattcttattccatccctcttcagttctgtgcacagcagggagctctggaaggccttgctggagccatctgagacctgacacagcatctgtaaaggaagtgctctccaaatcctgtttgaaatgtgtttatttatttctaatccataaacattttggagtgctcaccacatgcaaagtcttgggctggatgaatcagagaaaacaaagtggaatataacaacctcaggacacaccccagggtcacagtctggttggggaaacagacactatcaatatacaatttgcggtggctttagtggaga

SEQ ID NO: 847140 - DNA, 522 bp, Homo sapiens
agaaaacaatcattcttggccaagtgtggtggctcatgtctgtgatcccaacactttgggaggctgaggtgagaggatcacttgagcccaggaatttgagaccagcctgggcgacatggcaagaccctgtctctacaaaacataatttgaaaaattagccagatggggtagtgcatccctgtggtactacctactcaggaggctgatgtggaaggatcacttgagcccaggagttcaagaatgccgggagccatgagagtaccactgcactccagcctgggtgacaaagcaaaaccctgcctcaaaaaaagaaaacaatcattcttaatcctgaagctaacctgagtataattctcttgtaatgcatttctcaaagcattttgaaacattaygaaatgttaggatcattttgtaaatattaaatataactaaaggaattctatatttaaaatatgatttatctttctagtgacttggagtccagaaactgatagcttactatatctaaatgcaacttcacaa

SEQ ID NO: 847141 - DNA, 607 bp, Homo sapiens
tctgtttcctcagacaaattaaaacatgtacagaaccagttttccctccacagtgcaagcaagttccaatctcttttcttttgtcaactttttgatgttacagagaaaatattgcaacaaaaatatgaaatgaaatgtaatttgctttattgcaaattaaatttgtctagctatgattagtgtaagtgtgcatgttttacgttggtgtcattgaagagcacatattttgtgttttactcttttcatttaatatggtatgataaacacaagtccagatattgatgtaatttacactattgtcatttttaatagtctagaatgattgtttccaatcttttgctattataaccaatgtttatatcaatctatttaaaaaaactaccattttcctcttcagattatttctgtgaggtgtattttccaaaatgtcaaagagcataagcaattttatagctcttatttcagcttacttgtattctccaaaaaacaaattgaatcatttacagaaacatcagcaattgatggatgtaattacatgagctgcttagaataacctttgwgttgcaatgtaaactttaagttggatgaatttgcattgtaactgcta

SEQ ID NO: 847142 - DNA, 429 bp, Homo sapiens
tccttccttccttcatccctcccttccttcctcccttccttccttgtctggccacaattgggtatactttttccagaactaatctyataggtcctccctccctccctcgattcttccttccttccttccttccttcctttcttcctttccttccttccttctttcccttccttccttccttccttccttcatccctcccttccttccttcctccctcccttccttccttgtctggccacaattgggtatactatttccagaagtaatctcataggtccttcctctctccctccctccctcaattccttccttccttccttccttccttccttccttccttccttccctctacttcctcttcgtcctccctccctccactttctttatgcttcttaacatataacatataattatacaggctcaagacac

SEQ ID NO: 847143 - DNA, 429 bp, Homo sapiens
tccttccttccttcatccctcccttccttcctcccttccttccttgtctggccacaattgggtatactttttccagaactaatcttataggtcctccctccctccctcgattcttccttccttccttccttccttcctttcttcctttccttccttccttctttcccttccttccttccttccttccttcatccctcccttccttccttcctccctcccttccttccttgtctggccacaattgggtatactatttccagaagtaatctcataggtccttcctctctccctccctccctcaattccttccttccttccttccttccttccttccttccttccttccctctacttcctcttcktcctccctccctccactttctttatgcttcttaacatataacatataattatacaggctcaagacac

SEQ ID NO: 847144 - DNA, 528 bp, Homo sapiens
tattctagagcagaaacataatatgtacatagcctatgtgtcaggtaaggttatatgttcaaccacttccaagcacaagtacattaaatgaaagggccgtcatggcttattccttaatgaatttgaaaatatttygtttttgttttcagacatcatgaacataacagtcaccaagtttgaaatggatgaaattaggttgtagagatggttataattaaaaaatgcagaaaattaaatttgtactttatattctattgttatctgataagtaacagttataatttttacagtttttctgggagttctctgacagccagtccatttaaatctatgttttcatagtaattaaaattaatctatattgcaggacacaaaattatgattttagctggttaatgttatgagtataaatatttatatgtctatataatacatatataggcagatatttgttgagcacatatatatttatacaaatgtatgtgatgtatatatttattcaatgttaactttagatcctaaattttg

SEQ ID NO: 847145 - DNA, 567 bp, Homo sapiens
aataagagtgcaagtggggcagctcaccgaatrtgatctgctgttctgctgcgctgcagctctttcatgtcctcagttgacaagctctgacttggagaaggcctgcagcctttgagcagtgaggagtggattattctaaactgtctccgagatcgggctcgcagattgttaaacaccgatgtgcgctttgcatggggctcctctgggatacgcgtaatttaaattacgacatgagcatttcattttgtattggctggtacacagtaaatggagcaagcgggagccggctgatttccagagagacagaaaactcgaaaactgcagctgagagtcatttattccctccattccacagtgttctctcactgaagtgcagaaatcagactgacatacgatggccggcccttccatctctggaggatgcagcactccagaaaggcaagcagggttggagaaggggcccggatctgccctggaaattagccaggaagagtcatggaccctgctgtgctttgccatgatttcaggatccctcatcccaatcaactaacaggaggggaactgagt

SEQ ID NO: 847146 - DNA, 567 bp, Homo sapiens
aataagagtgcaagtggggcagctcaccgaatgtgatctgctgttctgctgcgctgcagctctttcatgtcctcagttgacaagstctgacttggagaaggcctgcagcctttgagcagtgaggagtggattattctaaactgtctccgagatcgggctcgcagattgttaaacaccgatgtgcgctttgcatggggctcctctgggatacgcgtaatttaaattacgacatgagcatttcattttgtattggctggtacacagtaaatggagcaagcgggagccggctgatttccagagagacagaaaactcgaaaactgcagctgagagtcatttattccctccattccacagtgttctctcactgaagtgcagaaatcagactgacatacgatggccggcccttccatctctggaggatgcagcactccagaaaggcaagcagggttggagaaggggcccggatctgccctggaaattagccaggaagagtcatggaccctgctgtgctttgccatgatttcaggatccctcatcccaatcaactaacaggaggggaactgagt

SEQ ID NO: 847147 - DNA, 567 bp, Homo sapiens
aataagagtgcaagtggggcagctcaccgaatgtgatctgctgttctgctgcgctgcagctctttcatgtcctcagttgacaagctctgacttggagaagscctgcagcctttgagcagtgaggagtggattattctaaactgtctccgagatcgggctcgcagattgttaaacaccgatgtgcgctttgcatggggctcctctgggatacgcgtaatttaaattacgacatgagcatttcattttgtattggctggtacacagtaaatggagcaagcgggagccggctgatttccagagagacagaaaactcgaaaactgcagctgagagtcatttattccctccattccacagtgttctctcactgaagtgcagaaatcagactgacatacgatggccggcccttccatctctggaggatgcagcactccagaaaggcaagcagggttggagaaggggcccggatctgccctggaaattagccaggaagagtcatggaccctgctgtgctttgccatgatttcaggatccctcatcccaatcaactaacaggaggggaactgagt

SEQ ID NO: 847148 - DNA, 527 bp, Homo sapiens
ctgcgctgcagctctttcatgtcctcagttgacaagctctgacttggagaaggcctgcagcctttgagcagtgaggagtggattattctaaactgtctccgagatcgggctcgcagattgttaaacaccgatgtgcgctttgcatggggctcctctgggatacgcgtaatttaaattacgacatgagcatttcattttgtattggctggtacacagtaaatggagcaagcgggagccggctgatttccagagagacagaaaactcgaaaactgcagctgagagtcatttattccctccattccacagtgttctctcactgaagtgcagaaatcagactgacatacgatggccggcccttccatctctggaggatgcagcactccagaaaggcaarcagggttggagaaggggcccggatctgccctggaaattagccaggaagagtcatggaccctgctgtgctttgccatgatttcaggatccctcatcccaatcaactaacaggaggggaactgagtcccatcat

SEQ ID NO: 847149 - DNA, 567 bp, Homo sapiens
aataagagtgcaagtggggcagctcaccgaatgtgatctgctgttctgctgcgctgcagctctttcatgtcctcagttgacaagctctgacttggagaaggcctgcagcctttgagcagtgaggagtggattattctaaactgtctccgagatcgggctcgcagattgttaaacaccgatgtgcgctttgcatggggctcctctgggatacgcgtaatttaaattacgacatgagcatttcattttgtattggctggtacacagtaaatggagcaagcgggagccggctgatttccagagagacagaaaactcgaaaactgcagctgagagtcatttattccctccattccacagtgttctctcactgaagtgcagaaatcagactgacatacgatggccggcccttccatctctggaggatgcagcactccagaaaggcaagcagggttggagaaggggcccggatctgccctggaaattagccaggaagagtcatggwccctgctgtgctttgccatgatttcaggatccctcatcccaatcaactaacaggaggggaactgagt

SEQ ID NO: 847150 - DNA, 501 bp, Homo sapiens
gagagaagatggcgcaagggtttgggagacaggatccctggggtctgttagggatgcagggagcaattggtrgagcactgggtgacgggtggggtggagaggggagagaaggctgcagaagcagcagggcccagagcacaggccccttgtgtcctattgaggaatggcaggtttgtttcatgaaaggcacttaagcaggagagtgacaggatcagatgggcatttcagcacaattgttctggcggcagtgaggattagagaaaaggaggcaggaaactatttgtctctgtctcgggagaccaggaaagtaatcccgttcctgagaatttagcctggagaaactctcaaacatctgttcaaaaacagcaatgctccactgtttgtattagcaaaaaaccctaaatgttcttccacagagaataaataaatagattgtagtatagagccataatagaataccatatggtagttaacatgaatgaattagggcaacatgtggca

SEQ ID NO: 847151 - DNA, 501 bp, Homo sapiens
gagagaagatggcgcaagggtttgggagacaggatccctggggtctgttagggatgcagggagcaattggtagagcaytgggtgacgggtggggtggagaggggagagaaggctgcagaagcagcagggcccagagcacaggccccttgtgtcctattgaggaatggcaggtttgtttcatgaaaggcacttaagcaggagagtgacaggatcagatgggcatttcagcacaattgttctggcggcagtgaggattagagaaaaggaggcaggaaactatttgtctctgtctcgggagaccaggaaagtaatcccgttcctgagaatttagcctggagaaactctcaaacatctgttcaaaaacagcaatgctccactgtttgtattagcaaaaaaccctaaatgttcttccacagagaataaataaatagattgtagtatagagccataatagaataccatatggtagttaacatgaatgaattagggcaacatgtggca

SEQ ID NO: 847152 - DNA, 621 bp, Homo sapiens
attctgtcctccattgtttctatggagaaggcagctgtcattcttatcgtatccccggatttcatatatcttttaacttctggagtctttaagattttctgtttatttttgcttctcaggcatttgattatgatgtggatttctttattttagtattattattattttttccttcttgggtttgttgaactttgggagcctgtagatgctggaaatttgaaaaaaaaaatggccattatttcttcctatatttttttctgtctcgtttcctccgtctttgggaccctggttgacatatgctaacctgtcaggtgttgtcccactaattactgagatgctcttccttatttttttcaatattattttctcagttcagatcattacatcgtgtgtttttttcaaggtcatgctcatttcttccgccacttctgatctgctttaagcccattcaatagattttacagatttattgatgtataattgccatacaataaatcacacatatttaaaatgtaaacctggaggagttttgacataggtttatgactatacaaagggcacyatccccaaaagcttccttgggctactttgaaagccattcctctctctctgctttctgat

SEQ ID NO: 847153 - DNA, 602 bp, Homo sapiens
cctctgcctcctgggttcaagtgattctggtgcctcggcctcccragtagctggggttacagattcccgccaccacgcctggctaaattttttgcttttttaaaaaaaattttttattttaagtagagacagggtttcaccatgttgcccaggctgatctcaaaatcctaaagtcaggcaatctgctcacctcccaaagtgctgggattacaggcgtgagccaccgctcccggcctaaaatgcactatttttaatgtcttctagagaacactctcaatttatgtatgagctgtgcttgggttttaaagagagaactattgtatcacgcgcattttaaaaaaccatcaagttccttatccagccaacaatgatcaacggtcagcctacttacagtccacgtttcagaacatttattcttaatcccaaagttggtttaactgaacacctctggactcattaagaatacttagcaaagcaattctaaaaacaaataccaatgttagactttggaactgaggagtaaacagaaagacagtttgtcattttgctgagctcaagactcagttgtttgaggtcaggaaccatcagataaataagcagag

SEQ ID NO: 847154 - DNA, 602 bp, Homo sapiens
cctctgcctcctgggttcaagtgattctggtgcctcggcctcccaagtagctggggttacagattcccgccaccacgcctggctaaattttttgcttttttaaaaaaaatkttttattttaagtagagacagggtttcaccatgttgcccaggctgatctcaaaatcctaaagtcaggcaatctgctcacctcccaaagtgctgggattacaggcgtgagccaccgctcccggcctaaaatgcactatttttaatgtcttctagagaacactctcaatttatgtatgagctgtgcttgggttttaaagagagaactattgtatcacgcgcattttaaaaaaccatcaagttccttatccagccaacaatgatcaacggtcagcctacttacagtccacgtttcagaacatttattcttaatcccaaagttggtttaactgaacacctctggactcattaagaatacttagcaaagcaattctaaaaacaaataccaatgttagactttggaactgaggagtaaacagaaagacagtttgtcattttgctgagctcaagactcagttgtttgaggtcaggaaccatcagataaataagcagag

SEQ ID NO: 847155 - DNA, 594 bp, Homo sapiens
actacaaaagcttacaagtacattaaaagatagaacatgtgtaaaaccactcatgttggaaaattcaagtagatttcaatatttcctcatgtgttttccaggtastaaagtccgtttatgtatctctttcattctctagtttcctacacaaaaacttaaccatctaaaaatagtgcaaatggaaatctaagactaatctagccattactgtcatgcacacaaaactctctgtgcccttatggctggatgagcaatagacagtgtctattgtcagctctctcagttattctcataatgggctttgctaacagcacacagcttcatgggcactgtgtctgatggtcacacagctctcataggctattcctctatatatctgtcccatttccttcccactgtgacaaacagacggttaaccagtagctgaattaataagtgaagtgattttcctccatacagtaaccacgtttgaagacacagtcattttgtaggtgactttaaaagtcataccttattcatgagccatcatagaatcttgtatactataagagaggatggtaatttctcaagtaacaaaaaagtcaataatatcac

SEQ ID NO: 847156 - DNA, 605 bp, Homo sapiens
tgtctgtgtgctcaagattattgttaggtgttattgcagttcacatcagaactgaaagattattattattattatttttaccagaaaacaaaggtagatgcgagtctgacaatcacaagggggtaaaggctgttgattaaaaacaaactctggatagatttaaaacttgtgtaagatatgaaataagaattctaacttgctgaagaaccatgtaggagagtccatattttccttgctatcgtacaaaaaggagagctacctctcatttcctttctttttcaaatatcaaggaacatatagagttaacataaatctactctgacaaatttctctaaggtttgaaatgaagcagaaaggaaaaacatttgtgctttattgtttttcatgacacactttatgtgatgttgaacatgtctatgcagcacatctactgataaccactggtgaaaagcagccaatattggaagcaagtgttacgaatctaragataactagaacaattaaatacatattaggaaacatggacattgccaaaatgattcttctgattttatcaagaataactaaagcctttcaatgttacactatgcaatccctagccaaag

SEQ ID NO: 847157 - DNA, 670 bp, Homo sapiens
cgactgcagatgcatggacattaggatcctgctgatcagagctgacagctccgtgttgtaaagtaatcctttaggaagaaatmaagaactactttaaacacacataggttttctaggatcattaattcctgtattcctccttctctcaattatttgttttcagtctgtatgtaccctagtttggtttttccccaagcctttatttctattcagattcctttgaaagagaattgcttattttgcagacctatataatagagaggtacttttggattacttgtcagattcttatgcagggagctttgtctaaggcatttttaggtgctggacatctagtagagtgctttatatatgataggaactcaaaaagcactctggggagaagaattatagacatattaaaaaacaaagtggttagagaatatggatcatttttataaatgtatcttgacacagatgtaacacagaggatttgggaacagtgagatgagtatgagaggatgagatgagttggagccaagtcatgaagagtttagcagcagtgttaagagagaaagatgaactgaatcataatattggatcagaagtttattgaatgtaggaaaatatgttaggctatctttatatcctctgtagtctctgatgcatacttgtgaatgtcaagtaataa

SEQ ID NO: 847158 - DNA, 580 bp, Homo sapiens
ctgcataattctgatttttgttttcactataccttttcctggatgtggcaacaaagccactgcggggtgccttcccctgctctatataagwaagtggccatcacattaactatgataaatacttatagcttttagtagagaaacaactaaagagaaatacgggtgacaagagactggagagcaaggagacaggggcaagggctagtctccaaaagggcctggacagcttactttccctctaatgacacaatgtggaactacaataatcatgtcttagctttagcactaaatagctttatttctataaaaactctatctactgaagatacaatagccaaaacttttaacagtaactagtcttctcaagtcatcataagaagaggatggttttttacaagtttccttttgacttttcccctaatttttctataatatacatgtatttcaataagaaaaaaagccaacataagtaatttttaaaaaagaattgagaaacaagcaacagctctagcccccttcctgatatatatcaaagaatttcagtaaacataaattattattttgttagatatgagttcta

SEQ ID NO: 847159 - DNA, 564 bp, Homo sapiens
cagtggccaccccagtaacttatttttatttttatttttttaactttcagagagagagacatagtagataatctttctaactatcaaggagataaattcatcagcctgcacacacattttcctcattagatagttttctttctttgttatttacatagatggaggactgtttatgttctcagaatgaacaacagcattaatcatatatttccaggattttttttttttgaaggagaattaagacccagtatttcggatgattgggagaaagaccttagtgatgaactattagaaaaataggattttccccccttaggcaaagtctatgaggatattcatacgagaaatagaggaatgagcatgatgagaggggaaggggtgagggaaggaggctttaaaaggaaccagaaacagtaaatggctgtaaggatagagaatatacatagcattcattacaragtcaaagataaatttttaaaatgcacatgcagtggctgtgggaggaaaatcaacttacattcctacattcataaaggactggcagggaaatcaggactgtaagat

SEQ ID NO: 847160 - DNA, 544 bp, Homo sapiens
gtatttgattttcctatcattgtgaacccacaattaaaatgctcttaattattttttgcttacactgagctccggtctcttgtaatttttactctgttaaatgtrgttctgcaccataggactgcactcaaaacaagcttgccacatatgtaatttgtactaggacagtgtttatatttttgttcagataacaaaataagttaaatgtggtgtaaattagatcatttacaaataataatttgttagcagcttttaataagtagtatttttcccaactggtgaagtattaatgttggtagttgaaaacaataggaatgtatggaatatatggttcactggttcttttgttcctgtcaaatagtggcacaatggatctggggtttttctcagtataatgctggcatatttgtttcaaattgtacatagactctaaaaagttaggctttcaaattctggtcaatatagtttgctttaaatagtagctgcctctactacaagttttatttaatttgttgacaaatgagtctgctatgaaaaccggtcc

SEQ ID NO: 847161 - DNA, 646 bp, Homo sapiens
acctttcaaatacctagaatagaacatacattgaacagattcaaaaggcttaaaaactttgatgattctctcaacagcattcaacatccacctactattcaactgctttacatgttagtcccaacttcagtttctaatctctgtccttgcataattgttctcttcattctacccaaggaaaagtaatctctcattcatctatgttcctatggctcattgttcctgtcagtagttatagctctcagctacttctgttttatgaaattatttgcatggctgtccctccagtgaaattataagttcctgattggtagtggccataatattcacctcaattcccacaccagcacaattcctagtaaatatttggagctcaacatatattttaagagtgaatttcagcaattaaaatcattctgatatatcacaagtataacctgatttttgatgaggttaattcaataccaaaacatgctttagtgtacctttaggtttattaaaagttagagcctgccttagctttggaagaatttcaagaattttcataagtatcatcaygactccttacactactctccatgatactaaaagtatgaatatttcttcatagcataaagaaaataagactaatagaaattaacttact

SEQ ID NO: 847162 - DNA, 611 bp, Homo sapiens
ttatattggagatccttctggaattggaactgcatcagaccagtctggttcaacttttgtgtaacaaggttgtgagttgtttttcagtttccrtggacccccagattgaaggtcccataacctgagcatgcccaggtgaacccaaaatgcaaccacaggcagaacctaagtaccggaccaaggagcaaggactgtattaagaggcagatacagaatggcaagatgtagaatccaatcagatcaagtcctgttgttaccatacggcatgatccagtcagatcctggcttccagcatcatttcactgcaagatccaatcagaccacacctcatgccccatccctataaaacctggcccagcccccagcttggggagacagatctgagtgtttcctcttgtcttcttaccagttgactcacaatacacctttctcactacaaaaacccagtgctttggtgttcagctttccattgtgtgtgggcaaatggatcagttttctttagtgacagaagttgctctatatacctcttcaacctggctgtttatttgtatttttataatatttttataatgaatcagtaataagtaaaatactgccctgagttttatgag

SEQ ID NO: 847163 - DNA, 653 bp, Homo sapiens
cctttgttctttagattcattaaatgatrttggaaatactgtaaaaataacagtactttatggtaattgtttaaagctgcaatgcctgcaaggtacctcacagtatcttgtagtaattgcttaaagctgcaatgccctgtgtggacagcaccttattcactacccaacccactcacacacacaccctattgatgctcatgctttatcactaggctcctaatccaaacttcctgttttcttctaattaatatcacatcaccctaattgggtttttcacttgtaagctttgtggattaacgtttctattgctatgttaattagctcttacgtaccaaggacgatctctacaaccaagaaccaaaattaccattctagaatatcactataataacatgggcatgagcagtctctcctggaaaccatccaaacaaatttaattattgaagtatttaagagattatgttgtaaaactgttttaccaccaaagcagtcactcacatagcataggtactcagaacagcattttgaagaggtttcagtctaattccacaagcgtttttcatgtacttacatgtgctacacactacaattttttgtgttaagtgcttgctggtagagttcctattttacatgagcttacattcttttagggg

SEQ ID NO: 847164 - DNA, 497 bp, Homo sapiens
gaacagtcaggaaattttcatagattacaataatgtatatcacaaaggatacacgattgtgttattcatatgtgtaatcacccatggactaactagaaataacagtggtcttattatgcaaacagcagtccataatatgcaaatgaatataaacaaaaccaaacacaaacctgcagaataatgtttactgatttgtccttaaaaatcccttttttaaaaatcgcattttcctgtcttctcaaaaacattaaataacatcaaggatgaatgcatgaaaaagtttatattttctcttttgcatttttgaaaaggaaccacaatataatcttattctgattattcgatttatattctcccaaggccattrctgcctcctggcatcattatatgcttgtgtaaggtttatatggtgtctcttttaattgcttaaactaatctattcaatgactgcaaatctaatgcacactggaacaggcagcccataaattccatccttc

SEQ ID NO: 847165 - DNA, 591 bp, Homo sapiens
cttgggcctttctgtactccctgtgtgtacatggaggcttttttttaatttgtttgtttttaatgttaaatgtagaagtcaaatttagagatgatkttaatggagccactaatcggtttatgaaaccaccttgacctttaccagacccattttcctcagtctcccaatcaaactggttgacctggtttatttaaggagctttctcacaattgtaattgtatacacatatacatacacatacatggtaagtgtatatgatttagaaattcattgtacagagcaaacatactgatgaaagtattatgttatatgtcaaaagcgactttacaaataacttccttgcaacaaaggtcttatttgattactaaaaagccattttatatatataaaaatacattctggccctttgaattgggctttgacaactttaagtaatggtaaaaaagaaaaaaaagattcctctccttattccatagtatgtttattattaacatgtattgttatcacattgttttaaggaattataatggtacaagtttactttcgcatttcactcttttattctatgtgaggatatctacacaagatatg

SEQ ID NO: 847166 - DNA, 638 bp, Homo sapiens
atcatgaaccaattaaacctcttttctttattcattacccatagcaatgcgagaatggactaatacagaaaattggtaccaggtgtggggcattgctatacagatacctgaaaatgtggaakcgactttggaactgggtaacaggcagggactggaagtgtggagggctcagaataagacaagaagatgagggaatatttggaacttcctggagactagttaaattgttatgaccaaaatgctgatagtgatatggtcaatgaagttcaggctgaggaggtcttaggtggagatgagaaacttactggaaactgaagcaaaggtcacttttgttacacattagaatagagcttggaggcattttgcccccccgcctgccctggaaatctgtggaacttcgaatttgagagtgatgatttagagtatctggtggaagaaatttttaagcaagaaaaaaattcaagatgtgacctggctgcttcaaaaaacctattcttatattcatgagcaaagaaatggccagcaactggaacttatatttacaagggaagcaaagtgtaaatgtttgcaaattttgcagcccagctctgtggtagaaatgaaaaacccattttctggggaggaattcaagctggcta

SEQ ID NO: 847167 - DNA, 522 bp, Homo sapiens
agggacttaaagcagaaaattcaagtttggtaggtgggagtcaggtaggagataaagatcttrtagatttcttataagtaacttctgaataaattacttatttatggattggtaagattatatcacacatgaagctaaagattagataccatggatcacacttataactactatgataatcataacctctattaattaaaaatatatagcaagctcagtatttttttaatattcgtagtttttttcactgccagatttaaggaacagaatatttaaattgtgtttggagaatgaaggtgagatgaaatgttaatcaaccttgaatatcaggttaaagactgaattttataaagttggagactcaagtgagttacagtggatatattttttaagtagtgtagaattattataatctagagctagacattatgaaatccttaaaataactcatatatccttaataaattaaccatattattttagcagatcacagaacacatataattaaaattactcctaaga

SEQ ID NO: 847168 - DNA, 658 bp, Homo sapiens
aaatatatttgctatcacttggcaatgatgggcttcaggacatgctaccgtaaaatgcagcaccttgayatttgagaaagcagcagaagcaggaaagtctctctcaccttcccctgctgctcttctctcctaaagcagatcataaaacctagaaaggattatctgaccttcctctgaagcagatcataaagccaccactggaaagacgctctcaccatacccagaagaaaggaatattcttacctccggcaatacaaggacacagagaggagtctgaacaaacaggtcttgctaagttctgcagtttattaccactagatcataccctctttgtccaatcatacttttccagaacaatcccacttcttcattaaacctagcataaaaagtatacaggtttacctgcctctccaagtcttcatttctttacgaagggtcctatgtcatgaaaattttattttaaacgaatttgtatgcttttctcttgttaatctgccttttattataggagccttaggtctgaatctagcaatggggaagagaaaatacatttcttttcccatacaatgataagtgttttatgggttcatattctttgatctagtaataccaattctagaaaaagattctaagaaaatattcagtaggaaaagcactt

SEQ ID NO: 847169 - DNA, 601 bp, Homo sapiens
gtcaatctggtttattctgctggcttctattaaaatatataaccatatttctatagtacttacagctatcttgttgagaaaacacagacaccacagtctaaagtggttttacatattcatttctgtttaaaatggtctgaagaattcagggaaaactaaatttagcctctttacacagaagaatattaaaacagaaggctctaaaccagcaagaaaagtattttaattagcatttattagaggaggaaaatgataagtaggaaagagacaaacttggaagcaagagttgaacaagctctttctaaactcctatgacaacacttatgtaggtgtatcttaattggaaatttaggatagcagaattggcaaatcgggacaagaattatgaactctttttagtggaagagggagaagcatgggacttgaaaggatagcgtcctataaagatcacgctgtggaaagcaaagaaattcactgagaagccaaaatgttatgactaatattgcctcttacatttgtggtaagataaattctggcatcatcggcacctgaaaggagctgaaggggatccragatcagaaaactctgactgccagggtta

SEQ ID NO: 847170 - DNA, 568 bp, Homo sapiens
catgtgttgctattttaaatcctaataaatttgtcacttytggacagtgctgtgctatcttgaccttgctcagtcaggcttgttggtgaaaagcaaatcatttgaaaaggctgtgccaattcattagttgttgcattttctattttttttttttgcaacatcaactctgaatatttgatcatttttgtaatgaaacaccttaacattttcttgactttctcattcttactactttcattagccctggagttcttaaacaaactatcatactccctcccagaagttacagtttcaacatgctccttgtactgaattttacagtaagcacaagttcaaagcacatttccaaagaatattcttttgttaattttttgaacacagggcttgagaaaatacctgaagtttgagatacatgttaaaaacaaattttacataagcctatatttagatggctggttatttctcatccaaagagttcctttacaggagaaagatttaaaatttacaattttttcatgcagtttcctctgagcatttggatgggcatccaaaggagcactgggcaatt

SEQ ID NO: 847171 - DNA, 578 bp, Homo sapiens
tggctataataatatgttatctaagatgctcaatttctaataaaaattttgagacctgtaaagaaacagaaaagtataacctattcatgagaaaaaaaaaaggcaggtaaaaatcactgccttcaaaaggagccagtttggaattagcacacaaagatttcaaagcagctattatcaaaatgttctaataaataaaggaaatcatgtttaaagaatcaaaggaagacataacaataataattcaccatatagagaatattaatagagataatatgatgcttaattgtatgtgttactttcactgggctgatacccagacagctggcaaaacactatttctgggtgtggtcttctgggagaggttagcatttgaatcagtagagcgagtaaagatcatgctcaccatatgagtgggcaatatccaatccactgagggcctgaaaagaacaaggagctagagaaaggataaatttgktctttctgctagatttgggaaatccgtcttctcctgctttcagatgtcagctgggctcccagatctttggaccaggactaagacttataccaccagcacctac

SEQ ID NO: 847172 - DNA, 587 bp, Homo sapiens
ttgctcaagtaagagatggatcccattttgggtgtaaagcaagggatgggtttgggtatgaccacctctagagttcggagcttgaagcctgaaaattccctctttgaaactgtcatttgtattgttggrtaggaatatgaggtatttaacagtcacaaataaatcttaagctcctgctacctgttttgctatgttatagaagctggaaacgcagccgggaacaatacagacagagtctttggtctcatgaagcttactttccagttcatatcactcacatcagctgtattattctgaaacattccttgtatattacacatgttttgtagaaattcagttcaatgaaataaaccagatacaataggattttttcataaaactataaatgtgaaagcaaaacatccagaattctgtgagagattaaaggtttaccaggcacaggcttgtcactttgaacttctccaaaggaaaaggaaaaatagatttttctctctgagcatgatcctattgttaaaacctatgtgctcaataacaagaaattagcaccatgttttacagtcatagaaaaaaagtgtttctgcatactc

SEQ ID NO: 847173 - DNA, 662 bp, Homo sapiens
aactttgtaggttggtagatactgctcagagcaacctatcaactactaacatcattgttcatacaattagaaaaaaaattctaaaattcgtatggaaccaaaaaagagcccgaataaccaaagcaatcctaagaaaaaagaataaagctggaggcatcacattacctgacttcaactatacaacaaatttacaaaaaccaaaacagcatggtactggtacaaaaacagacacagagaccaatggaacagaatagagaacctagaaataaaactgcacacctacaaccatctgatctttggcaaagtaaacaaaagtaagcaatggggaaacgattccctattcgataaatggtgctcgtataactggctatccatatgcagaggaataaaagtggacaccttccttatagcatatgcaaaaattaactcgagagattaaagatttagatgtaagacctcaaactataaaaattctagatgaaaacctagtgaacaccctttcaacataggtgtgggtaaagaatttgtggctaagtcctcaaaaacaattgtaattaaaaaaaacaacatgtgggaccttattaaactaaagaggttttgcataacaagagaaatgatcaacggagtaaacagacarcctacagaatgggagaaaatattca

SEQ ID NO: 847174 - DNA, 641 bp, Homo sapiens
caccttccttatagcatatgcaaaaattaactcgagagattaaagatttagatgtaagacctcaaactataaaaattctagatgaaaacctagtgaacaccctttcaacataggtgtgggtaaagaatttgtggctaagtcctcaaaaacaattgtaattaaaaaaaacaacatgtgggaccttattaaactaaagaggttttgcataacaagagaaatgatcaacggagtaaacagacagcctacagaatgggagaaaatattcacaaacaatgcatctgacaaaggcctaatatccagaatgtgtaagaaacttaaacaattcaacaaggaaaaaccaaataaccacattaataagtgggcaaaggacatgaacagaaacttctcacaagaagatatacaagcggccaacaaacatgtgaaagaaaaaatgctcatcatcactaatcatcagaaaattcaagtcaaaactacaagataccatctcacaccagtcagaatgacttttgttaaaaagtgaaaaaatagactgggtgtggtggctcccgcctgtaatcctagcactttgggaggccgaggagggtggatcacarggtcaggagttctagaacagcctggccaacatggtgaaaccccatctc

SEQ ID NO: 847175 - DNA, 605 bp, Homo sapiens
tctgcaataataatgatggtgataataaagctaaccttcataggacattgtgtaccagactgatacacgtgctacaattctgttcgttctcacaccatccttcatgggggaggttaagagcattgctcaaaatcacacagctaataagtcatttttctcagattggcgttaaaattatatttaattgggtcctgtgtgtgcgagtgttttaacttttgcattgtcttttatcccacacacggaggcaacatggatggtgagactaggggctatggacaaggttccagggtttggacttgagcatgctgctgagtggctatgtggtcatcactttacttccttttctaacccgtaaaatgatgataataattctacattgaatgaatcctttgtttctactgagcccaaagtctgctccgtaaaggtaaaatacttctcagagtgtagaaagaaaagtttcagattcaagcctttttgtcatcagtaggctggaaaatgaatagaagttagaataaacwatacacttaatgtgatttttccaacaattatgttgaaaaattgttcaaaaatgcattcattccaatgatccttagctttatatttat

SEQ ID NO: 847176 - DNA, 541 bp, Homo sapiens
atatatttttaaattaaaggccaaataaagaatgtttcagacaaacaaaagctgagggaatttattgccacagatctgcactgtaagaaatgaaaggaagttcttgggcagaaggggcatcagatggcrgttgggatctaaacaaagaaatgaagagaccctgaaatggtaaaagagaataaatatgttatattttttcttatttttaattacattaattgataattgtccagagcaaaaacaatagtaatgtggggtttataagaggtaaaatatatgacaacattggacaaagcatggaagaagaaaatggaaatatactgtttatattagggggtctccagagaaatagaacatataggatatatagatttatgaggagatttattatggaatttggctcacacaattatggaggctgagaagtcccacaatctgctgtctacaaactggggacccaggaaagccagtggtgtaattcattgtgcctagctgatggtataactcccagtccattgccaaagactcgaggacctgggat

SEQ ID NO: 847177 - DNA, 607 bp, Homo sapiens
attttttataatttgtgtttgtattttatataatttgtatcaccattttgcatgttttctgagtaccaatctcaccacaccgtcatgaagtatgaaactctagttgacagctgaaggaagggaaacacagaacttttcaatgtcacgtccaagtccacacactgagtaagcggagagccaggatggagggggcccttaaacatgaggcggctctgcccccaccttcgcaggtgttggggcatttggttcccgtgacaccccagcaggtgcggttattatccctgtgcattttatgaggaaaaaacaaaacctggagacgttagatcacgtccaagagctcgaattcaaatgtggggctttcaggtccgaagcccatgttcctggactctaccgcactgcatctcaactctgatgatgggagcagaagagttgacagaaagctaggaacaggagaagggaaggaagagggagagacagaggcagggagagaggacacaggagcagcaaggcctctacctgcacagyccctgggcccaccctggagaaaacactgttcttggaagacctgagcggctggtgaggggggacaatggaatgcacatctgta

SEQ ID NO: 847178 - DNA, 475 bp, Homo sapiens
atatgatcagatattaatgtttaacatacactcataagttattarattatatcattgtccagttttgactcagttattcagtgtgggttactatatttagctcacagatgatctattcttttgctcctagctatttctctgtggcttcccctcctcctgcacgcacccccatataaataccagtctattggatctaaatatgtatattcattttcaatctaacttcatatctggtcacatatccattttatcccacaaacttttattgattacttaccgtatgtaaagctaggcacttcggatacaatgatcaagataaggtctctgccctggagtttatagagttgtagagggtgacaaatatgggcaatgagatgtgtaaattctatcatagaaatcaattagggtattgtgggctacactgaaaaaagaaatctaccaagtaagtcaaggtaagtctttataaaggtgatga

SEQ ID NO: 847179 - DNA, 585 bp, Homo sapiens
tcctcagtctttctcaattttactcaacaagaaaaaaataagaaagtaaattttawaataatagaatgcctttggccacatgcggtggctcacgcctgtaatctcagcacattttgaggctgaggtagggggatcacttgagcccaggagttcaagaccagcctgggcaacatagagagacattgttctacaaaaaaaaaaaaaaaaacaacaaacaaacaaacaaacaaaaacaacaaaaaacagccaaaacaaaaaaaactttttttaaagttagccgggcatggtggtgtgtgcctgtggtcccagccactcaggaggctgaggtgggaggaccacttgggccccagaggctgcagtgagcagttacggtgtcactacactccagcctgagcaacagagcaacatcctgtctcaaaaaagtagtttaacatgtataactaaaagttatcattttcaaagggagcattttccccagatacatatatatttgatgaacatataagataaaataattattcaaaaaaataaaaaggtgaatgaaaagttgtggtttcagggtgccagtgatcaattagtactgac

SEQ ID NO: 847180 - DNA, 566 bp, Homo sapiens
ttcagatatcctcaatagctgtacagtgttagagcctagagatctcttctaattgttcatttgtaacacagtgagtagtttaaacagttctactagtttgctcaccagatgtytttaacagctgggattatttttatatctgtcggaaaatggatgaccttgcctggcctgaagtgtaagggcgaactctgccagacttccaagatgataaaacaagcctagattagaaactaattgctgcatgatttcctcttactactgcagtctttgctgtctggccttttatgggaagcatataaatccccaaaattatataattaagaaaatatattaacagatgttaaaattattatttattattctttacttgttattttctttcttcctttctttctttttttgtactagcatgaaccacaaaagggatatggaataaagactgagcaacacagaatgttcaatgttcaagttcttaccctgcgtagggcctgggaaagtggtggcccagcttcaaatatcaactccaatgactgttccattagtgttgtgtgggcctccaccctctt

SEQ ID NO: 847181 - DNA, 604 bp, Homo sapiens
atgcaatctgaaaacaatccatatgaagctcagtgaacacagctttcgtactttccctaacactggctccagtttgacatcagtacctcagtactattccagaaataattttctattctgtcatttccttatcagccaaatccctcaaacagttctgcagaaagactgcatcatgtcttcatagtaacatgaatgacttgacgaagtgcatcttcaccaggggatgctataacctatataactgcaatccatggtgacttctgatagagttggaccataaaccagaaaacagaatgtatttaaaagggaaaaaatatcagaaaacactgaaatttaagcatcacatagttcccagtgactagatctaccatgatattttggaattgttaatttttttaggtatcataatgaccttatggttatgtatttttctaaaaaggaatttgtatgaagaatgtactgaagtagctgggtgtggtggctcacgcctgtaatcccagcactttgagaggctgaygctggcagatcacctgaggtcaggagttggagacaagcctggccaacatggtgaaaccccgtctctactaaaaatacaaaaattagc

SEQ ID NO: 847182 - DNA, 663 bp, Homo sapiens
tgtcctgcatgcaaatttgcctccaccaactacactagtacttaatacagtgcactaatgctgaattaagaaatgttaaacgtctagtactcagtagggtgcactaagcctgaattatgaaatattaaaagtttagtacttagtagagtacactaaggctgaattaggaaatattaaaagtcagcataattttttttaatgaaccataaatatccccaagtcaaatggccatttgaatgcaactagtattaaatggtatttaactgcatacatctttaatatgcttctgcaaccagaattatctttaaaagggttaaccatccatttatttttaaataaatagaaaaaatcactttattcaatagttccaaaaggtgaatagataccacagcagaaacgtggttttgacttcctgttgatttcccataaacacaaataaaaccacatactggagtggcaaaaagagttgtttttgtaaaaaaaagattaggttaaaaacacctcaaaacaacatggttttagtagtattagcccccaaaytggaaaactatgggtaatcattaggcaactgctttttcctgtgtcttagcaatcataaaaccactcaaagaaccattacataaacaagaaaaagagagctcacagagaaaagaagagctttgt

SEQ ID NO: 847183 - DNA, 578 bp, Homo sapiens
agaatgtgaatgttgggaggtggaaatcattgaggtttcccatagagtgtgcacacaacattcaatatggcatgaaaatgactcagggattgatttgtcattgagaycactggaccctagaagaatctcagtgaattcctgaggcaggaaacaaattgcaataagcagaagatagaatgagaagtgagaaaatggagacagaaattataaacaactatccttggattcctctctatgaagggagaaagagaggacatgccttgtagctggttagtgctcccaaggaacagaatctccttgtatttgtctctgattcctagcatcagctcaggatctggcaaacagcagctgtttagtaagaatttgttgaatgacagtagccaaagtggagaaaatttggagaattgttgttattgtttaagattgggcaaacttaaaaaatgccattaaatggaagagaagaagtcaatggagagaaagaggttaaagatgtaggagaaaggagtttttcagaagtaactcacacaaaacgagaagcaatggcatctatggaagtgctgggaggcatctgatgctct

SEQ ID NO: 847184 - DNA, 578 bp, Homo sapiens
agaatgtgaatgttgggaggtggaaatcattgaggtttcccatagagtgtgcacacaacattcaatatggcatgaaaatgactcagggattgatttgtcattgagatcactggaccctagaagaatctcagtgaattcctgaggcaggaaacaaattgcaataagcagaagatagaatgagaagtgagaaaatggagacagaaattataaacaactatccttggattcctctctatgaagggagaaagagaggacatgccttgtagctggttagtgctcccaaggaacagaatctccttgtatttgtctctgattcctagcatcagctcaggatctggcaaacagcagctgtttagtaagaatttgttgaatgacagtagccaaagtggagaaaatttggagaattgttgttattgtttaagattgggcaaacttaaaaaatgccwttaaatggaagagaagaagtcaatggagagaaagaggttaaagatgtaggagaaaggagtttttcagaagtaactcacacaaaacgagaagcaatggcatctatggaagtgctgggaggcatctgatgctct

SEQ ID NO: 847185 - DNA, 252 bp, Homo sapiens
cagtctatggtattttgttatattagcctgaatggacaaagaaaaaggtaggtaacttttgaggaaatgtggggcttggtatttaatgtgactgtttgtttcagctcttcattatttcaccgttagttatgtctctggaatgagagcttggctcttgacaggcagtgacatatgayacatcacacagcaaggaggaaatctaaagggagaccgcacttcaaggtctctggagtgatggcccccgataactag

SEQ ID NO: 847186 - DNA, 616 bp, Homo sapiens
ataaaaacatgtagctcagctgacgacaatctgttttaatttttcagatcaccagctattctaattatccaacactcagcaccatccacccaccatgcttcattgaactgatggcgcagggatgtgtgtgtgtgtgtgtgttgtgtgtgtgtgtgtgtattatacatatagtatgtacattaataaataatttcttccatcaaacataatttcatgaagttttgtcaatcaggcatcttttaaagatatatgtatgccactgtcctcagaagaagttaattcattcttgcaaataacatccaccaataattttaatagtttataagaaattactcttatataaatagggaatacatcaaattgtttatcactcagatatatcctgtaaggaattagttataatgtttaaaaagaatgtgttacatttatattcgttttaatgacttattgtaataacctgacaaaattaggctattatgtttggctttaagttatattaaaaacatatataagggtttcattagtttaaataaagccattaytgtatataaactaatttgaattaaattatgtgttctaaaagccaaagtattcagttgtaaaatatcaatttaat

SEQ ID NO: 847187 - DNA, 616 bp, Homo sapiens
agatgagacagctgcacagagagacaacttcggatatctgcagatgatcttcctcaagccctcacatgaaatccaatcaacctatgcatatgaggaaaatgtctgaggctgggaaaataactacacaaattatagtgaaaactcagtgaaattcacacagagctaggaataatgtctgtttccacaagccagagtgggaaatcttttaattattggggtactaagtagagtaatcccaggagttttagttcaaatgtggataagttagaccgagactaaacatttttctttttcaaactcacatctcaaaagcaagaccccaaaagattaatctatttttaagaaacctaagtgtgtcataaaacaaagcttaagaatatttataggaacatccagcaatcataaaggaaaatcacaatatctagcattcaatcaaaaacaaccaagcatgcaaagaaacaaaaaagatgcccataatcagaagacaatcaatcaattgaatccaaccaagatgatagagtttgtagacaagtatacaccagtagttataaggggcccatccyccatgcttggtgtggacaccagactctggtcctctgggagctgatgatcactt

SEQ ID NO: 847188 - DNA, 507 bp, Homo sapiens
tgggaaaataactacacaaattatagtgaaaactcagtgaaattcacacagagctaggaataatgtctgtttccacaagccagagtgggaaatcttttaattattggggtactaagtagagtaatcccaggagttttagttcaaatgtggataagttagaccgagactaaacatttttctttttcaaactcacatctcaaaagcaagaccccaaaagattaatctatttttaagaaacctaagtgtgtcataaaacaaagcttaagaatatttataggaacatccagcaatcataaaggaaaatcacaatatctagcattcaatcaaaaacaaccaagcatgcaaagaaacaaaaaagatgcccataatcagaagacaatcaatcaattgaatccaaccaagatgatagagtttgtagacaagtatacaccagtagttataaggggcccatcctccatgcttggtgtggacaccmgactctggtcctctgggagctgatgatcactt

SEQ ID NO: 847189 - DNA, 567 bp, Homo sapiens
taggattacaggcatgagccaccgcacctagccggcaaacttttttaaatggttggcgggggtgggggaaatcaaatgagtaatgttttgtgacacatcaaaattataatgaygtgctgcataacttttggtcaacaatggccaaatatacgatgatgatcccgtaagattacaatggagctgaaaaattcctattgcctggggacacagccatggtaacatcatagtgaaattactttatgtagcctaagtatatagtgtttataaaagtctacagtagtgcacagtaatatcatggccttcacattcactaaccacttactgactcacccagagccagcttccagtcctgccaacttgttcatggtaaatgtcctaaataggtgtaccattttatatcttatatatatctatatatatatttttactgtaccttttctatgtttagatatgtttagatacacaaatacttagcactgtgttacaaccgcctacagtaatcagtacagtaatatgccatacaggtttgtaggttaggagcaataggctatcccatataggatacca

SEQ ID NO: 847190 - DNA, 567 bp, Homo sapiens
taggattacaggcatgagccaccgcacctagccggcaaacttttttaaatggttggcgggggtgggggaaatcaaatgagtaatgttttgtgacacatcaaaattataatgatgtgctgcataacttttggtcaacaatggccaaatatacgatgatgatcccgtaagattacaatggagctgaaaaattcctattgcctggggacacagccatggtaacatcatagtgaaattactttatgtagcctaagtatatagtgtttataaaagtctacagtagtgcacagtaatatcatggccttcacattcactaaccacttactgactcacccagagccagcttccagtcctgccaacttgttcatggtaaatgtcctaaataggtgtaccattttatatcttatatatatctatatatatatttttactgtaccttttctatgtttagatatgtttagatacacaaatacttagcactgtgttacaacygcctacagtaatcagtacagtaatatgccatacaggtttgtaggttaggagcaataggctatcccatataggatacca

SEQ ID NO: 847191 - DNA, 577 bp, Homo sapiens; identical to SEQ ID NO: 820259

SEQ ID NO: 847192 - DNA, 501 bp, Homo sapiens
cttctatttaccaaagagaaattaaaacttatgtctatacaaaaacttgcacatgagtgttcatagtttcatttgtaattgcaaatatgtcattattatcatttctattttaccatagaggaaacttgaattcatatggattaagtaaagtgctcagaattcaaaacaacccaaatgtcccccaacagggtaatatattcatacaatacaaacgagccacaaagggatatactgctgatgcacagaatgacatggataaatctcaaaatgattatgttgtgtcaaagaacccagataaaaaaagagtacatgctgtgtgtgattccatttatataaaactctagaaaatgcaagctaatctacagtaacagaaggtagatcagcagtttctgggacagggctgaagacagtaggagagtttgggagaaaakgtatgaggaggaagtacaaaaggggataaggtaatatttgggtgtgattgacatgatcatcatcttgatt

SEQ ID NO: 847193 - DNA, 567 bp, Homo sapiens
atccctaggatgcaagattggtacatatgcaaatcaataaatatgatccatcacataaacagaactaaagacaaaaaccacataattatctcaatagacacagaaaaggctttcaatacaattaaacactcattcatattaaatatgctcaataaactagatattgaaggaaaatacctcgaaattaaagagccatctctgacaaacccataacccacatattactaaatggcacaagctggaaacatgccccttgaaaaccagcacaagacaaggatgccttctctcaccactcttattcaacacagtattggaaatcctggacagagcaatcaggcaagagaaagaaataaaaggcatccaaataggaagagaggaagtcaaactatccctgtttgcagacaacataagcctttaactagaaaactccatagtctcagcacaaaagcttcttaagctgatacacaacttcagcaaagtctcaggatacaaaatcaatgggcaaaatttgctaacattcccataaacaaacmacagtcaagctgagagcaaaatcaggaatgtaat

SEQ ID NO: 847194 - DNA, 578 bp, Homo sapiens
ttctaacctcatagaatgactttatgcttccatatgcaagggacagtttaaagaacttaaaaaagtcatgtttaatagatactttgtagatattctttatttttttaaatgtgcatttaattcagaaataagatgtggtaaaatttttcaagatcccatcttacctctctttattctgccatctcgtgcaaggcagccatggggtggcacactggtcacaaagatgggcagctcaccactcttacttcccctgcccccagcaacggtcatgccaagggattcatgtggttccttctttacagtaatgtgtttttcttggcatgtaacacactgagtaagatcctaaaacatacaagaaaaaaatcattggataatgaataaaatatagttgaagtaaagttattacttcaaactaaggtaataacttacatggcatttataaagtaattattttttattccttaattgcaaatgaaagtaatacacagttcttaataagtctgctgtggatcaaygtcaaattttggactatgttattttcatgactgtttatgtagctgaaaaaactcaggactgct

SEQ ID NO: 847195 - DNA, 651 bp, Homo sapiens
caatcttcagcaatgacctctgattttttttttttttttaaccaatgcttaacaaatgcccccartgaaaaggaagtttgccctgggtgagctctgagtcaagccaagtaaagacaggcacacagtcatacaggaaacaagtatagggggaaaaaaaagaagaaaaaagacaagcacacaagaggggaaccatagacaggtcagttaataacagatctctgggaatagggctttgaaggttctccagtctgctcttccagtgtctgccagcctcctgatttccactgtgatgtgggctgttgcttttccaatattctggggaggtgaggatggaaatagggtaaactcaaatgccacagagctctctcttcttactgagagtcagccatttttcttgaacaaatgttctccctactgctataattctttggctaatttccacacttcagaaatggctggttctgacaatttcttccagtgttcttactgcttttatggaggagagacttttcagatattcttaattcaccattttcactgacatgacttgaattaatttttgtttattccctagctatttttatcatttttcttgattctaaggtgttcacattctttcagtgtcattaaatacctggcattgtgcagtgg

SEQ ID NO: 847196 - DNA, 591 bp, Homo sapiens
cattttttttaaatttaaagatagtttttataaaaacaagcaatgggcaaagaggatttttttwaaaaaaaccttagtgtttatagaggaaaatggaatctttcaaagtcttcaacagacaacaggccaagtgggggtgcctcatgtctgtaaaatcccaacattttgggaggccaggcaagaggatcacttgagtccagaagttcgagaccagcctgggcaacatagcaagacactggactctataaaaaatataaaatataaaatataaaaagaaacaatggaaccatctgtgtgtctttcagctgaactgtgtgccacgaatcagactgctgatttatctagagggcctggtgtgattcatgtgaaaatgccattcagccactcaacaaaccttccctaagaaaggtgcgtgctgggcccatcggtcctctggaggaagccaagatgggtggatatagctctgcctgctggagcttcttaggtcatagaggacattgttatactaagaaaatattcaagggagacaaaaatgatctttttgggatgcaatcatgtcttataccctttgcttactagcattgaaggact

SEQ ID NO: 847197 - DNA, 591 bp, Homo sapiens
cattttttttaaatttaaagatagtttttataaaaacaagcaatgggcaaagaggatttttttaaaaaaaaccttagtgtttatagaggaaaatggaatctttcaaagtcttcaacagacaacaggccaagtgggggtgcctcatgtctgtaaaatcccaacattttgggaggccaggcaagaggatcacttgagtccagaagttcgagaccagcctgggcaacatagcaagacactggactctataaaaaatataaaatataaaatataaaaagaaacaatggaaccatctgtgtgtctttcagctgaactgtgtgccacgaatcagactgctgatttatctagagggcctggtgtgattcatgtgaaaatgccattcagccactcaacaaaccttccctaagaaaggtgcgtgctgggcccatcggtcctctggaggaagccaagatgggtggatatagctctgcctgctggagcttcttaggtcatagaggacattgttatactaagaaaatattcaagggagacaaaaatgatctttttgggatgcaatcatgtcttatacccyttgcttactagcattgaaggact

SEQ ID NO: 847198 - DNA, 565 bp, Homo sapiens
ctttgcttactagcattgaaggacttcctcttagccckggaatgaaactcagctgcgatgcatgcaaggacttcctttatctggccctgacacccctacagccctcagtgccttgagtctctcacccttggttctccatgtgacactcatactgaagttctttgggcccctggaatgtccctgagctctcttccccctgtgcttttgcacactcagttccctcagtctggaatgtctatcaccatctgccctacacatggccgagccccactgacctattctgtttttttttttttcaaagaagcattccatgaaccctggaccaaaataagtcccctggctgcacacatctacagcgccccaacccctgtcacctccagggttactgtgtcagactcattcactatggtaaccccagcagcgccccagagcatagcagaggtggaatcagtatttgctggacttaattttatgtatgtcttaagagttctgtgcaaactatagaagaggaagagataacttgtatttggagggaagaggtgggcttgaggaggaagtggcatgg

SEQ ID NO: 847199 - DNA, 565 bp, Homo sapiens
ctttgcttactagcattgaaggacttcctcttagccctggaatgaaactcagctgcgaygcatgcaaggacttcctttatctggccctgacacccctacagccctcagtgccttgagtctctcacccttggttctccatgtgacactcatactgaagttctttgggcccctggaatgtccctgagctctcttccccctgtgcttttgcacactcagttccctcagtctggaatgtctatcaccatctgccctacacatggccgagccccactgacctattctgtttttttttttttcaaagaagcattccatgaaccctggaccaaaataagtcccctggctgcacacatctacagcgccccaacccctgtcacctccagggttactgtgtcagactcattcactatggtaaccccagcagcgccccagagcatagcagaggtggaatcagtatttgctggacttaattttatgtatgtcttaagagttctgtgcaaactatagaagaggaagagataacttgtatttggagggaagaggtgggcttgaggaggaagtggcatgg

SEQ ID NO: 847200 - DNA, 629 bp, Homo sapiens
ttttaggtaagaacaattggtttattgatgagtctatggtaaatgtgaaagaactagtaagaaattaggaaactcaagtrtattgctctgaaataattacttcataaaatatttgtaatgatggaaacatcaagattgaggaaacatgaggttatttatctcccattcaatttctggtcagaccaaattatttaagagtgtattagatacttgcactatcagagagtgttgtgtgtattaccaggcattgctgtgcaatgagaatgccttgtgctgtgggattctggtctggaaagacataagaacagagatgacttcccaaagatttttgatgctctactgtaattctcctaaattatttgaaatattttcatttctttcccaactgtaagatccttaatgaaagagattctacactcttgccagttgaagagccaatttctcttatcaggaagttcctgataaactggatatctcctgcttctacttacttcagcttcttcttgctcagccttgagtgggagtacagaaccgaagggaaagtttattgttctttcggtagtaatccctcacaaaataaagcaatcttgggaaaatgcacactgcagcatcaacctgggtaatctgag

SEQ ID NO: 847201 - DNA, 546 bp, Homo sapiens
tggatttgaatataagtgattttcaggtcctgtatcttataagataagaaacaatyatcatcgttttcacagagaacatctgaaccaactgtggttatgtctcacgatgatgaaatgctttgggtcatgggcactctttcctcctccactgcctccatctaagaggcacacatgccatttgacggcagtgtattacgcactgttctccacaggcctgaatggaaggtcactttgacctgctgcacatttttacttaagaactgcttttgacaataagccactagcgtacttgtttctagactgacttgagtttttggcacaatatgaaaagcatttggaaagtgtaagtaaaagccttccgtttcagaagaaataatggccccatttgccatggaaaccagaggactttatgaaaatgcactcaactgttttctgtagtgagcctaaaattattctaaaaataaatcgtattcctggcatctgttagccaatgcacaaagattgcatctcataaggttttccctcttagagaaaaatgccatgcca

SEQ ID NO: 847202 - DNA, 546 bp, Homo sapiens
tggatttgaatataagtgattttcaggtcctgtatcttataagataagaaacaatcatcatcgttttcacagagaacatctgaaccaactgkggttatgtctcacgatgatgaaatgctttgggtcatgggcactctttcctcctccactgcctccatctaagaggcacacatgccatttgacggcagtgtattacgcactgttctccacaggcctgaatggaaggtcactttgacctgctgcacatttttacttaagaactgcttttgacaataagccactagcgtacttgtttctagactgacttgagtttttggcacaatatgaaaagcatttggaaagtgtaagtaaaagccttccgtttcagaagaaataatggccccatttgccatggaaaccagaggactttatgaaaatgcactcaactgttttctgtagtgagcctaaaattattctaaaaataaatcgtattcctggcatctgttagccaatgcacaaagattgcatctcataaggttttccctcttagagaaaaatgccatgcca

SEQ ID NO: 847203 - DNA, 546 bp, Homo sapiens
tggatttgaatataagtgattttcaggtcctgtatcttataagataagaaacaatcatcatcgttttcacagagaacatctgaaccaactgtgkttatgtctcacgatgatgaaatgctttgggtcatgggcactctttcctcctccactgcctccatctaagaggcacacatgccatttgacggcagtgtattacgcactgttctccacaggcctgaatggaaggtcactttgacctgctgcacatttttacttaagaactgcttttgacaataagccactagcgtacttgtttctagactgacttgagtttttggcacaatatgaaaagcatttggaaagtgtaagtaaaagccttccgtttcagaagaaataatggccccatttgccatggaaaccagaggactttatgaaaatgcactcaactgttttctgtagtgagcctaaaattattctaaaaataaatcgtattcctggcatctgttagccaatgcacaaagattgcatctcataaggttttccctcttagagaaaaatgccatgcca

SEQ ID NO: 847204 - DNA, 562 bp, Homo sapiens
ttgtgaagtctctgtctttgtctatcacaatctctatccctatcactatttctccttttcctctcgaagtgtttgcatctctttatttaaacgtaagacaacctctctgtataccgtctacctctctggccacactttttagtctcctatttaaggtgtactttctttgacaatcgtggctcccagagttctagcaaaagttcccaggtctttgaataccactcaatcttaaaaggctaaaaactgtataatttcatttataagatattcgggaaaaggcaagactgtagggataggatatgaatcagagactgccaatggctgaggctggggataggaactaactacaaatggatatgagagaactttttggggtgatggaaatgttccatgttaattgttgtgatggttacactactgtatatttgtcaaaatttggctgtatgtgcattttacctcaataagtctgacattaacaaaaaaagaaaaaggraacaggaaacctgtagagaggagggtattcacataattctttccactccttgctttttttttttttttt

SEQ ID NO: 847205 - DNA, 474 bp, Homo sapiens
atagattgattaattttttttttttttttttcacagaaaagactgcttctggaagtgggctttttccttttttgttgtcttattttgttggttttttaataggcttaraacaattcagggacagaagggtccttaaatatcatcccctccagccccctgacccatggagtggctgcagtgttttctactgatttagtcactactgtgctttataacagaggcatcaagatatgcaagaatcaggcagagcaagtgttagctaaagcaagctagctcaccttaccagaaggaatttaaagttcagaatcaaattccttacgaatgaactgtccaaagggattcctaatcactttgccattcgatgcaccaccttatttttttttatttttattattatttttttttagtatttattgatcattcttgggtgtttctcagagagggggatgtggcagagtcataggataatagtgg

SEQ ID NO: 847206 - DNA, 623 bp, Homo sapiens
gcccactgtctggcactccctagtgagatgaacccggtacctcagatggaaatgcagamatcaccggtcttctgcgtcggtcatgctgggagctgtagaccggagctgttcctattcggccatcttggctcctccccccaagagttctttatacagtccagatctaagtattttgtcagatataggtatcacaaatattttccaccagtctgtggttttattgattcatttcttgtatatcttttaatgagtatacttttttttttgcttttttattgaggtgtaattgacttacgataaactgtatatgttgaaagggttcaatttgatgaattctgacacaggcatacacctttgaaaacatcactacaatcaaaataatgaacatttctatcacccctaaaatttcctggtgccctttaataatccatacctccctccacccctatcctcatacaaccacttatctttctgtcactatatattagtttgcatttcttaaaatgttacataaaatacattgaatcattcggtatgtattctttgttatacctagcttctttcactcagcataatgattttgagatggatccttacaattgtgtatatcaatagttcatccc

SEQ ID NO: 847207 - DNA, 623 bp, Homo sapiens
gcccactgtctggcactccctagtgagatgaacccggtacctcagatggaaatgcagaaatcaccggtcttctgcgtcggtcaygctgggagctgtagaccggagctgttcctattcggccatcttggctcctccccccaagagttctttatacagtccagatctaagtattttgtcagatataggtatcacaaatattttccaccagtctgtggttttattgattcatttcttgtatatcttttaatgagtatacttttttttttgcttttttattgaggtgtaattgacttacgataaactgtatatgttgaaagggttcaatttgatgaattctgacacaggcatacacctttgaaaacatcactacaatcaaaataatgaacatttctatcacccctaaaatttcctggtgccctttaataatccatacctccctccacccctatcctcatacaaccacttatctttctgtcactatatattagtttgcatttcttaaaatgttacataaaatacattgaatcattcggtatgtattctttgttatacctagcttctttcactcagcataatgattttgagatggatccttacaattgtgtatatcaatagttcatccc

SEQ ID NO: 847208 - DNA, 540 bp, Homo sapiens
gtttcccagtagcactcgctagcccatgagtaatacgttaattacagaatattcttatctaatcaatgtatttgggctggcattatcccagaactagctacactaaatatattcatgagtttttcaactgcattttaaaaaataaatgttatccaattcagaattttccgacaggccctgtaattctggtatgatgagactttattctacagcttttaaaaagtcttctgtagctccactcagaagacagaacattacatttagcttaaaatccccacccagtggcacagtagacactaagtaatttcaagcattcaaaacgacactggcagctgctaggaataaagtcaaatatattccatagagcagagaggctgggccacgccagacatctagggtgatgcaggcaagccactgaratctctgtgtgaggggctatgaagggttcactccagaacgaggcctcggaacttttgttatgggatctgttaagggatggaatattgcgctttaaaacactcaaggaattctaaagtggac

SEQ ID NO: 847209 - DNA, 576 bp, Homo sapiens
gcaatttgggaggctgaggtgggcagatcacttgattccaggagtttgagactaacctgggcaacatggggagacccctctctacaaaaaatacaaaaataagctgggcgtggtggcacaggcccgtggtcccagctacctgggaggctgaggtgggggaatcacctgagcccaggaggcagaggttgcagttacctgagatcatgccactttgctccagcccaggcaacagagagagaccctgtctcaaacaaacaaacaagaccaaaaaaaaaaaaaaaaaaaaaccccacacatttatttctcatagttctggaggctgaggagtccaggctcaaggagtccgggctcaaggagcaagcagattatgtgtctggtgaggaccccactttctgcttcacagatgttttctcacagtgtcctcatatggtagaagaggaaagragctctctggggtctcttttataaagacatcccattcatgtgggctccaccctcacgacctaatcacctcccaaaggccccatctcctaataccatcgccctgggggccaggatttcaacatatgagttggg

SEQ ID NO: 847210 - DNA, 611 bp, Homo sapiens
tatttattcagagaaagatttttaaaaaattatgtctttgaagcttctgcaaattgtcagtttcatattgaaaatctgtgatttccataatttatataaggatctttctcgtgctgtcactcacaagactkaaaaaacttgttttagatgccaataacgtccattttctctagagatggcaaataattccttctaattcttccccacgagcacgcccatttctcctgccaacaacatcacccaagtgactgtatctggtcatgagttccatagaaggatttgatttcctgcatttctaggactcacctgtgtggtatttgtgtgaggactcttttaaaataggatggaatggcaccttttgcttatttgtaacttagttaaggcaaagaaagctttcattgaaagcatttgattgttggctcttgtgactgagcaaaggcccccgtaattgggaaaagatggcatttcactgttctcttctcccatgtggaaatacattcggaaaggcagggcaatttactgactcagcgaggggctgagagtgactgaacacgatctctggacctcctaattctgtaattacttcctttgacgtttttgtctctgcagat

SEQ ID NO: 847211 - DNA, 504 bp, Homo sapiens
aggctggagtgcagtggtgcaatcaagtgctcactgcagccttgacctcagggctcaagctatcctcctgcctcagcctcctgagtagstgggactatgggcatgtgccaccacgcctagctaataatttgctttttttttttttttagatggagtcttgcctgcaatctccacctcccgggttcaagtgattcttctgcctcagtgccctgagtagctaggattacaggtgcccaccaccatgcccagttaatttttgtatttttttttgtagtgatagggttctgccatgttgcccaggcttgtcttgaactcctgggcccaaatgatctgcccaactcagcctcccaaagagctaggattataggtgtgaaccactacacctggcccaagtattttaacttccataaatggaaagaatttaggtgaagtacagctctgaagatgaagctatatacatagttggttctccatatccatgggttccacattcgcaaattcaac

SEQ ID NO: 847212 - DNA, 504 bp, Homo sapiens
aggctggagtgcagtggtgcaatcaagtgctcactgcagccttgacctcagggctcaagctatcctcctgcctcagcctcctgagtaggtgggactatgggcatgtgccaccacgcctagctaataatttgctttttttttttttttagatggagtcttgcctgcaatctccacctcccgggttcaagtgattcttctgcctcagtgccctgagtagctaggattacaggtgcccaccaccatgcccagttaatttttgtatttttttttgtagtgatagggttctgccatgttgcccaggcttgtcttgaactcctgggcccaaatgatctgcccaactcagcctcccaaagagctaggattataggtgtgaaccactacacctggcccaagtattttaacttccataaatggaaagaatttaggtsaagtacagctctgaagatgaagctatatacatagttggttctccatatccatgggttccacattcgcaaattcaac

SEQ ID NO: 847213 - DNA, 603 bp, Homo sapiens
ctgcactccagcctgggtgacaagagccagactcygtctcaaaaaaaaaaaaaaaaaaaaaagacaaggaaaagaaaaaaagggggaggagaaactgtcaactgattaagagactcaagacatcaacagagtacaatgtgtggcacttgtttggatcctgattggaacaaacagacatatatactgagacatatatgagacaagtgagggcaagtgaactgagggggcatttgaaatcacagaataaatttaaatctgtgaccactttattgtggtattttaaaaagaaggaccttatctgttagaaataaatgctgaggatttaaagataaaatgtcttcgagttgttttaaaataattcagaaaggaggtgagactgtgagtaatggagagtggatacatatgaagacaggatgaggttttgaaaaattatttttttaatgatttcttgctctggcatttaaaaaacctaagtttcactagttgtgcaacatttgagtacacgagctcatttctccaacatgtttcctcaccagtaaaataatgctaatgataacatatatgtcacagtgttaaagatttaataactcctattaaaccaag

SEQ ID NO: 847214 - DNA, 625 bp, Homo sapiens
cctcttatatgggatattttctctcgttttcctaagaaaattttatgcatcatttttagacacatcttccaggacctgcctctaaaccaaattargcacatcttcctctgtgcaccttgcatttagtcacatctccctctgttgcaccttgctcaggggtttgcactataactttctaattacgtgtgcttttcccctactagcatgatgcatttttaattaagggcacaactctctgtggccctgtggcctcaaattgtgcacacaatacaatgataatccaatggtgatgagatgagaacaagaaggcaacactaacggagtcccatcaacaggcagaagaggatcatttgtaatatttctcttcattctattattgttttcttagagcctttacaatatggaatcatctatattatccagcacaagcaagtctgccgatttcagatgagttatattactggcaaagatgaaagaggagtaatgacaagttacatcagattttctattagaaacaaaatcacaaaaagcatttggctcttgataaagtgtgtgttcccagctttttaagatcaaaaaagaataataaagtataaacttgatacaacgtattcatggcagaaag

SEQ ID NO: 847215 - DNA, 612 bp, Homo sapiens
agaacacaggaattctcaactattgcacttgggagggtaaattagcacaatttatctatagagcaggagtccacagtgttttcttaaaggtccagacagtaaacattttagacgttgagggtcatgaggcaatactgaggatattctgtgggtacctgtataaccactaaattatagaaaccatttttagctcacaggttgtataatacaggtggtgggctggatttggtatctgggcttgcaggtccctggtatagagcaatttgggaagtacctaagatctaagcattctacttttggacatatatcctagagaaattcacataagtgggcacgatacataaatgtattgcagcattataaaagtacaactttggaaaacagcctaaatagccatcagaaagggaactgataaacaaatatggcatattcacagtccgcggagtaccacacggctctctataacaatgaccaaattagcttcatgtggagtaagataaaaagatctcagaaaaaaatagccagtgaaaaatttaactgcagaatatatgttgagtttgataccatttgttctaaaaattgctgcyacaaataattgataaggagggaaac

SEQ ID NO: 847216 - DNA, 412 bp, Homo sapiens
tttcatcactgaaaacatacttgaggaagctcattataatggaatgagacaatacttttcattaatgactttcatttatttttaaartttgaacaatggaacagtctgattattaaaataatattaatgtaagatgacaattaaatagttgggaaattgcaaataagatgattggtgaaaaactaccaaaataagatgagctgcaaaaataggttctccctgaaagagtactcttctagggttaggggtaggaaacaggatgctttattcaaggaaagtcataattctgatcattgcagttcagtggaccaatgatattaatatacaacagcaggaaaagatggccaattttatgtgaatcatcctctaaaaggaagtacacaggatattattttatcatttcatcattatg

SEQ ID NO: 847217 - DNA, 505 bp, Homo sapiens
attagcttaatatgtgtaaattattataagaaagtgatctaaaaaaggtgctgaaaaggtcactgcaaaaactcatgaataaatattagatttaaaattcagtctcaaatgaaacttckggttctgttttgctcagctaaattctgtattttgaaatttattttacataaaatggtgaccagctcttttgcatacagggtgtgaaaaacacaggataacagtgcaacataggaaggtcaactgacataggaggtaaaggaatcctggcaaagagaaagggctgatggtggaaaagattgccagaagtcagattctagacaccactgaagaacaaacatacactcattcctctaagctgatttcagagaggtcctccctgctcaggaacacatccagctcttttttcaagggtgtgattagcaggaagagatgactgcactttatgaataagaaagcttcatttgagaaacaaagatcccaccagctataactgcaataacaacct

SEQ ID NO: 847218 - DNA, 505 bp, Homo sapiens
attagcttaatatgtgtaaattattataagaaagtgatctaaaaaaggtgctgaaaaggtcactgcaaaaactcatgaataaatattagatttaaaattcagtctcaaatgaaacttcgggttctgttttgctcagctaaattctgtattttgaaatttattttacataaaatggtgaccagctcttttgcatacagggtgtgaaaaacacaggataacagtgcaacataggaaggtcaactgacataggaggtaaaggaatcctggcaaagagaaagggctgatggtggaaaagattgccagaagtcagattctagacaccactgaagaacaaacatacactcattcctctaagctgatttcagagaggtcctccctgctcakgaacacatccagctcttttttcaagggtgtgattagcaggaagagatgactgcactttatgaataagaaagcttcatttgagaaacaaagatcccaccagctataactgcaataacaacct

SEQ ID NO: 847219 - DNA, 532 bp, Homo sapiens
ctttccttcccaatagtccactgcaaaatacggtggagaatgagcatccttccaagaccaaagaggttcttggagaagaacaaaggcaattaggcagaaaagggaagttggtctttgggtttaagatttcctctctgaggttatctgggattagagagtctacttgacttttgcttggactcagtagctttaggttgcatttcgatatggtttggctatgttcccacccaaaccttattttggattgtagttcccataatccccatgtatcctgggagggaccaggtggagataattgaatcactggggtggtttccctcatcctgttcttgtgatgattaagtctcaccaggtctgatagttttataaggggcttcccctttcactggtcactcatacttcttcctgccaccatgtggagaaagatgtgtttgcttccccttccaccatgatcataagttttytgaggccttcccagccatgcagaactgtgagtcaattaaacctcgttcctttataaattacccagttt

SEQ ID NO: 847220 - DNA, 580 bp, Homo sapiens
ctgatttgatcattacacattataatacatgaattgaaatatcacactgtaccygataaatatgtacaattatgcgctgattaaaaataataaaggcaaaaacattatttgctgcttatctgaaattcaaataaaaaataaatgctgacatgctttaaaaatggtttaaattttgcttttcatattgaagtctttaattcatctggaattcatttttgagtatgcagtgaggtagagatctcagcatagctctttacatcaatacaatcaatactcccaacaccactccttgttggtctcaccaccctctgcactaatttgttgagctgcttctgttttctacatacatgggtccctgctgggtctttctagttttttctgtaagtctaattttctatacctataacaatactgacactcttttaatgattgtagcttactttcttgtttcatgtttttatttttgttcaaccttcctagaggtttattgacttgatttaaaaaaaaccaaaacccagcttttgttattcttgaatattatagaagctatacaagtttccttactttctgtatcattaat

SEQ ID NO: 847221 - DNA, 625 bp, Homo sapiens
tcctaatcccatttgtggagtacacagtgttgaatcttcttatccttcattttcagatgggaggaaactaaaacccagagtaggaattagagtcaagaggttagtaccgaaagagtcagcagatasgaactctttcaaatctcagagtgcttctctttaggtgaattaaataaactcatacgccagaagtgcccatgagtaaagtgtttgaaggtgcattgtgttttgttagtgcctccattaccctctggcaataaccaaaactattgaattgacctcaataagcaagactcacttttccctcattagctgcattagaggtggactactgtgaactggaatcaaaggataattctcacataccaaaaaaatttccttgaagccgctgaaaagttctcgaacaactttcctcatctggggcaccagtttgaatatgcgcagaggtctcaggcaccgaaggaccattagaagctgagctcccgattcagcaggtacattttgaggcatccaacaaagaaatatcaagctcacctaaaggggaacaaatgatctctggaatttatacaattcatcccctactatttacattttctgacagccgactggccacaacttttcatttagc

SEQ ID NO: 847222 - DNA, 547 bp, Homo sapiens; identical to SEQ ID NO: 846379

SEQ ID NO: 847223 - DNA, 564 bp, Homo sapiens
acacttaaaattttgaaaataaaaaccaggaggaaattagaaaggcaggaagataaagtctcattataaaaaaaaaaraaaaagaagataaagacatttttcagtcaaacaaagctaaggaaaaaaaaccaccacagaagcttcacactaaaggaaatccttttttttttttttttttttttttttttgagatggagtctcgctcttatcgcccaggctggagtgtagtggcaagatcttagtgcactgcaacttctacctcccgggttcaagcaattctcctgcctctgcctcctaagtagctgggattacaggcgcccgccatcatgcccagctaatttttgtacttttagtagagacgaggtttcgccacattgggcaggcaggctggtctcgaactcctgacctcaggtgatctgcccaccgtggcctcccaaattgctgggattacaggtgtgagccaccgcacccagccaatactgacgtattctttaagttgaagaaagatgacttctcaatgaagcaaggagatgccaaaaggagtaacaaccaatagaactagtg

SEQ ID NO: 847224 - DNA, 575 bp, Homo sapiens
ataatgattcggcctttattataaaaggaaaaagcatgaataattatattctagttttgtataaagtggtgcaagttttttattgttctttaatcttatggtacttagaatatggttgacagaattacatcacatttttaggaagtaaaagatgtgtgctttaccagtgatttactgtcgtttatataatattaaaatattgtgcacaatattaaatagagcttaaatgtataaacccattaattttctcttaaatactctgaattgttatctacgaaatcagtagttaaaatttaataactaaaatttaaaatgaaaggccttccttcagtttataagatttacaggctcagctctcataaatataaatagatgaatcttcaatatcatcaatatatagtaaatgaaaagcaacacaggcaagataaaaaaagctgaaatggtttgcagaggaaattctacctaaagtttaaagataagtggtgtttcctggmttataaaatttagaaacgcattgctaaatcttttcataaaactggtttataacacgtaacaaatccccttgtaatgaatgt

SEQ ID NO: 847225 - DNA, 623 bp, Homo sapiens
tgacccaatcgaccataattcaccactctgaatgacacagatatttgtgatcacttccccttgaaattttgctttatctcattcttggaattgctttataactaaactgacaaatgcattttgttcatttgtttatttcttcaacatatatttattgagatagtccacaatgaataaaataagcatgctccctgctctcatgtagctaataattagaaaaagcaacacaaatgcatttaaagctattgacagatcaggctaagtgctgtggagcatataaacagggcaccgagagagaaaataaaataaggtcgaaagtaagactggctggaaaaaactctgttggaagaaaagagatttcagctgagatagaaaccagaagaaacaagctattcacagtgtgggcaaaacactcctagagaaagtaaaggaaattgcaaacaggaactgttcaaggcaggaaagaaattgttataaactggacctggtggaaggtcactgtggctgcagtgttgtgagcaaaggagagaattgaagagggagatgggkctagaatattgtgtgcatttgggttttgttttatgataagtgtaaaggcaagaccctgagttttcaatagaaga

SEQ ID NO: 847226 - DNA, 623 bp, Homo sapiens
caatggctatttacattcaatttacaaaaagatacatattttctgacacaaaaaatcttgttactgaaacaacatattctttccaaataaatgtattgaggttctatacaatacattaaataaaataaaatcctatctgatctatgtcttatcatgcaaagaataagggagagccgaaaattatcataagctgttaattttaacaaaaaggtcagttccgccttctgctgtgtttcttcatgccttcctgggtccacatcactgtgctttgcaactctatttttcattattgtctcagtaaaaactcagaattatgattcttctcccaagtggcaaccaagagtgaaagacttcaccctgggtgagttcccttgccaaagcagctaagatttcctctgcacccattttctaacgtcaaagagtttaagaggaaaaacaggttattttcttcaacccagaaaatattttgactgacatttttatatctttttcttttataataatatccaaaaatgtttacagctatttatagtttacaaaatgctgccccacaaccagaacactaagaatcatatgttcygaccactgttttgtagatgcagaaataaaagccagaacctaat

SEQ ID NO: 847227 - DNA, 626 bp, Homo sapiens
ccatatttaggagtatcagcttctgagccccagcaacatatataaatgaatacattgttgctattgttgttttgaacaaattgttmtctgttagacaattgagtaagaaaaaagaggaattttaattttaccttcatttatgtttttttctccaacgctcttcttttctttacataggttcaagtttctgacctatgttattttccttctctctgaaagacttcttttagcatttcttgcaaggcaagtctactggcgacaaatttcctcaattttttgtttgagaaagtttttatttctcttccacttttgaaggatatttttacagggtacagaattctagtttggtgttctatttctctcaacactgtaaacatgtcactccactcttttcttgcatgagtactaagggagaagtcagatataattttttgttctttgctaggaaagatatatatatttttcttctggattctttcaaggttttttttctttatctttgattttctgtagtttaaaaataatattcctaggtgtatattttttgcgggggtggaggtcatttactctgcttggtgttctctcaacttcctggatctgtgttttgatgtctgacattaatttgg

SEQ ID NO: 847228 - DNA, 607 bp, Homo sapiens
tattcctactgtattatttatgaawttttactaaattatatcatatttcatttatacagagtaagctaaggaaagatactttaatacgctttaagaaatattgtggtacagttagaacaacctagttttaagtctggaatcagtcagctgtttaccagccattggtcctgaaggttaagttacttaacctgtcaacttcagtattcctcatatgtaaaatggaaatgaaaataatatgtcacaggatgtttgtgagaaataaagtaagacatgtaaagtatttaattagtatactgtctggcacacagtagtctcacaaataggcctaataattaccatcctctcctgcttaagaacccatacttcattaagtttcaggagataaaaatattctggtgcacagtaaagtaaatcaccatgaattctaaaattatatactttttttgtgaactagaatactgtcatatgtagaattaacagaaataaactagatgatcagtagtaccttgggactgtcctttttttttttttttttttgagacagggtctcactctgtcaccccggctggagtgcagtggggcgattatagccagctcactgcagtct

SEQ ID NO: 847229 - DNA, 517 bp, Homo sapiens
atattttatttttagagacaagttctcgctctgatgcccaggctggagtgcagtggcacaatcatggctcactttagcctcaractcctgggctcaagtaagtactccttccaccacagcctcccaagtagctgggactacaggcatgtgctaccacacctggctagtttttacattttttttgtatagacaggatctcactatgttacctaaactggtcccaacctcctggcctcaagccatcgtaacgcctcaacctcccaaagtggggcgtgagccatcaagctgggctgggagttaaattttaaaggatctaaaagaacacgtaggagtaatctttaaaagtaatacttaaatgaccttgaaatgctatagaagcaatcggaaataagatctttttcactcttgcaatgttattttcaaattctacaagtgactcaaacaggaatattatttacttactgagataaagatgttcagcaaattctccagagttgggagttgtggaatcagtttc

SEQ ID NO: 847230 - DNA, 671 bp, Homo sapiens
aagttgattttaactcccaaattatgtatgtcagcgataagttatcttagatacacacgtaaaaagaatttgaaraagataaaaacaattgtaaggaaaaaattaggcaccttagaaatcttgctcttacattaacctcagctgaaagtaaatgtctattcctatcatgaatatgtacttcagtggccatgggcgaaatgcagcaaatgagaaattattgtctctaaactatagcaataaactttttaaaatctgactacaaaaatttttataatacaattaaaataataattacattttttgatacaatttaagatttacttctgtttacaaaagctcattctactgtggcaaattaggttcctagggctgccaaataggttaccacgaacttggtgacttaaaagaatagaaatggattctcttacagttctggaggccagaagtccaaaatcaaggtgttggcagggttggttccttctggagactccgagggagatccctttccatgacacttcttttctggcttctgggggctgttgtgtggctcataactgcagaactccaatgtctgcctccatcttcatgtggcatggcctttatccctgcgtgtctttgtgcctcaaatcttcctttcctttttcttataaagacttcagtcattggctttg

SEQ ID NO: 847231 - DNA, 604 bp, Homo sapiens
ctataaaaaagtatttacagcagatttaataggctaaaaatgacatcaacaaaaatacaacataaataaaaatagtggcatgaaatgaaatcactgttgagattaatccaaaagggcacaccatcggtctgataaacttgctatgagtaagctcttgtctttccagtatgggacaaaagaacagggtgataacatatcaattcagtgtgcataaaatgaggtaattcaattgcttagataagaatcaggcaaaaatatgtccacaggtccattaaatgaaaggaaaacatcaaattaatattgatgtttacaagtaaggcaccatgcctagaatataacacatgcttaataaatggccattattaacatgatcatccttgaaaaaaaaaacagttgctgtggtttctggtttacaatggcatctcttcaccagtgacaaaacatatctatgatgcaaaagcaaaaattccttatcratactgaaaactaaaactgacatatactctattgcaaataatgagagaacagacaatgaaatataagccccgtggtctaagttgaataaaacaatttgtattcaatgcatgtcatattgccagaaaca

SEQ ID NO: 847232 - DNA, 622 bp, Homo sapiens
atccctttgtatccccaggcaattggtttctggaccactcctccttatccccctactttcctataccaaaatcctcagatgctcaagtccattatataaaatggcatagtrttttcatataacctatgcacattctcctatatactttaaatcatctctagattacatccagtaccctaacgcaatgtaaatgttatataaaccgttgttacactgtcttggttttttatttgttatttttattgttgtattatgttttttttttttaatattttcaatactcaattggttgaatctgtggatttggaacctgcagatacggagggctgactatatatttggcattcaggtgacttttgttttgcagtatattcattcaataggggtagaagactgtaatattagttataggagaggcactaagctttagggtaaattttatattagaaatgtattttattgtctaatcattgaggatctgatctcatcaattcgctgactttcattatatccacctggaaagaatggccatgaatatggaaacttatgttgtccttggccacaaatgtttgaaactctccaatctggactagttgtcttttcttcctaggatcctccttca

SEQ ID NO: 847233 - DNA, 413 bp, Homo sapiens
acaggtataaacatgaaactccacttatctggtgttcacttattcaatcagctcagctatccagaaaaaagctgagatctcagagcagacacagtttattaaaaaaaaaaaaaattaggattctacagttcaaaaactttgcttgcattgttctgaattcatttcctcttattttggatatattctagaaagcttttccagaacataccagattaacgttgtggaggtgagctggcccaggcaatggcaatagactgcctagaaggagctggcccaggcaatggcaatagactgcctacaaggagaagtaatttctgaggacctcacattaaagcaatggttcccacacttttcagacatgctttagcatcctccsgatatctttcattaatttttaaactcaggccactcac

SEQ ID NO: 847234 - DNA, 544 bp, Homo sapiens
tggggtggctctcagaattgccccctcttcatgccttcagtatcctcatggtccattcccatcaccccacacctgaacctcaacatcagactcataactggtctcaccactacatccctccycaaagccatccttcccagagggagtagcactttatacatccaggatgccagggccttgcaaagatggagagaagtccaggccacttacattttttgaggcttccaatatgttatcaaagaagaaggaggaggaggaagaagaaaaacaaaggccaaggcgcccatcctggccaacatggtgaaaccccatgtctactaaaagtacaaaaaaattaccggggtggtggcacgtgcctgtaatcccagctactcgagaggctgaggcaggagaatcgtttgaacctgggaggcagggattgcagtgagcagaaatcgtgccactgcactccagcctggtgacagagcgagactctgtctcaaaaaacaaaacaaaacaacaaaaaaaacgcaaacaaaaaaaagaaaggccaaggcgggcagat

SEQ ID NO: 847235 - DNA, 479 bp, Homo sapiens
atcagggcatgacccaaggtaactgccacctcgcctgaccaagcatttttaaaaacatatttaaataccgtggacggccaggcatggtgggtcacgcctgtaatcccagcaatttgggaggccgaggtgggtggatcacctgaggtcaagagttcaagaccagcctggccaacatgaaaccctgtctcctaaaaatacaaaaatcagccaggtgtggtggctcacgcctgcaatcccagccacttgggaggctgaggcaggagaaccacttgaacctgggaggcagaagttgcagtgagctgagattgcgccactgtacttcaacctgggtgacagagtgagactctgtctgaaaaamaaacaaacaaacaaaaaataccatggactctttagaataatgtcttcaagtgtataagataaaacattttaaataacagaggaatctaattaaatgaaagtgcatttaaaaatatttttaa

SEQ ID NO: 847236 - DNA, 569 bp, Homo sapiens
gctgtttgatggtaatgactatgatgtggcaatgccatctatcttcctctgagtgccgctgctaccgccttaatggtttttcccttttcaagcgtctgccgattcctctctcatcaggttyacggacgctggagcagagtgtcggggagtggctggagtcgattgggctgcagcagtatgagagcaagttgcttctgaatggctttgacgatgtccacttcctggtaagtggctgcaggcctcctcaatggcagggtgctgctcagtggaaacaggcctccctggcctcccctctggccccacaggagtctgcaacagtacgtagacccaaatcccagggaaagctcactgaggtcactcagacaccaggaagtcagccaggtggtatgtgccttcttcccaaactgtccctctccctctgccccagaaacggctccagagggagctctctttgcagatctgcttcccaagaaggagggtccctgattcagccctgtgtcccctccctggctgtgtatcccatcaaggctgggtacgaggagttttatttatttctcaaaacttggtgt

SEQ ID NO: 847237 - DNA, 664 bp, Homo sapiens
cctctacttcctgtctcttcttcccactggctacaatgtgaaggcagtggcaggagctggggcagccatcttaggccctgagatagaagctgggtgttaaggtrgcagagcagctacagagaaggagcggtggtgcccaactatgtggagctaccatatccagcctgttgctcatgctcaagctgctgtgtgagagagtaatgacctgctgtctcgttggagccaatgctactttggcctttgtcacagcagccaaacctatgtcctaattaacataatgagtttttcgcttccttacctgactgtagagttgacacaagcagcagggagaaccagaatgaataaaggaaggaatgactaactagcttctatggagcccctcttaagttttagacactctgctgggggctttcgtgaattctccaagtaactctccaagggagggaccattatccccgtgtttccagaagaggaggccaacgctcacagaggttaagtgccttgtccacatcatacagcccccaagggacagagccaggattcagccctaggcttgaaagaccaccaccctccacccgcccctaccatgttgctgctttgattgagagactgaacaaacatgagcctccactaaggatgctgctgccatcaggatgagctgtca

SEQ ID NO: 847238 - DNA, 592 bp, Homo sapiens
tgcgtgtgtttcgcaggaggagcaccgtgaggccaagctgaccctgcggcccccragcctggcagccccctacgccccagtgcagagttggcaacaccagccagagaaactcatcttcgagtcctgtggttatgaagccaatgtgagttgctcccaccctcccagcagggccggcctccctgctccttctcggccaggcacctgcggccaagtcccagcagggactccacaaagccaggcccagggcttttgagctgttctccactctcagccactcttgacagctaaggcgaaggggtggaggcctctggatcctttagctagggagttgaatggagggtctctccagctggggcaggagagggggtgttgttattgagaggggtaactacttgattgtgggacagtcccaaattggttgggtcacccctgcatggaaacgcaggatttcctaagcctggccactgctcgcccccacagtatctgggctccatgctgatcaaagatctgcgagggacagaatccacgcaagacgcctgtgccaagatgcgggtagggtgcctgtgtgggctggagggcgctgtgggactgg

SEQ ID NO: 847239 - DNA, 599 bp, Homo sapiens
gggttttagcatgttggccaggctggtctcaaattcctgacctcaagtgatctgccctccttggcctcccaaagtgttgggattacaggtgtgagccactgctcccggcttaagtttaagtttcatagtgycagtatctgaaatccctataagtatattctattgtctcttatttctggtcacttttctttatgttatcttgtcttgtttctgaacattgtattattaatattgtttttgtgagtgccacacattgtatttttaaaattgtagaaataaattgaagctgaaaatgatgtcatctgcagagaatttgtttgcttctgacagtcacctggggttattataatccaggatcaccttaatctgatttgtaaaactgagacaatcagggactatgataattcaaagccagacaacagtcccttcaaagattagctacagacagacttaagcacagagggtttcccaggagcttctgcctttgacaggccctaaatagattccaatgtttgtcctcacaggtgggtcttctggaatcagcaaacacgcctagcggaaaaatgaacccaaatgtcaggttcacttctgcggttctc

SEQ ID NO: 847240 - DNA, 530 bp, Homo sapiens
atcattgactatccccctacctactccttttcccttgcaacatgtagactaccataccctccttctttcccctccagcccactttccctctttggatattgaagacctcaaattcatctttagagaaagkcacagaccacagattacttctgtgattctgtgtttctttcttctgggcatgtccttaaccttggcaaaataaacttctaaattgatggagccctgcctcagatactttctggttgacagacccatcacgggtggttggtagagcatggataaagccttgcacacagtagcagaatgattgctaacactttctggaagggcatacctttggaagggaatgcactggctggggcaatggaaccagtatttgagaagcatgaggaaattagcaattataaggacagtaggatcagatgactgttgctgagggcaaaagatgttctggagaaagacaaggaaaggctgagggtgattaacccagcaattaaatcagcttaacataaaagtcagagggctttctt

SEQ ID NO: 847241 - DNA, 619 bp, Homo sapiens
ttggcttcacctttttgttttttcagtcttctattgattactttttgataaaayatgctgatggatagaagtattaacatagtgcctggcatgtaaatgctccataaataatggccattaactgtgtttttctttctttctttttttcttacaacttagtactctcccaactacagtggggtcagaagagagtggtgaaggaatgtgaacttagaagtgtcagatacactcccaagtcctggcatgtggaaccctgtgacttaaactaaggcacttggcctccaaagctgtcctcttaaatatttcaaataagacagtgcctcacccaataatttgcaaaaagcaacacctatttagaagagtatatcattattaaagtttcagtaaagccaaagaaagaagataacaatgcaaaaagattttgtttcttgtcagggcctgatataaatggaaaagaaaaagatttctgaattattcctaatgtttaattatctttgatcacgccgtttccacagcttaacaaggagataacacctaactaaattctctgaaaattgcaaggccctgtggaaataatagtttataatgttaatataaacaacatactttcccactgaaa

SEQ ID NO: 847242 - DNA, 556 bp, Homo sapiens
acaaattaaatgataagcaaagtagctcacctagtaagcagaagagccaacatacaattctcagccactgaacccaaccatgaaagactttacctatatggacactttcagttcttccacccccactccaaaaaggttctgcctaatcccttaccccagactgcaggtcataaagtgtctgtgtgattatgatgttgaacacagcatgggagcggctgctttcttcgttcatgttggtagcagctaccgttcgagacttatttccctcagacatcaatgactcaatatcctaggggcaaagcataaggaaaagaccataagcaaaaacacaagaatgtagtcctgcacaccaggtatatgtattaattatgattcctctgatgcctttgtcaccacccttccatagaaacctccctgccgctcctccawtgagcatggtttgagcttccacctcactcaagactttgtaatgtatgaaatgtttccctaattctttccatttcccaattgtcttctttctcagttgagtccctattttctcctttttgggttcctg

SEQ ID NO: 847243 - DNA, 314 bp, Homo sapiens
cctttattttcctcgaggcttatcatgaaagggattttatctgatatactttgaaatcctcttattcataattcaactctggggctccctgggtacagtctaagtgagttttcattarcagcctgagcacacacacaaggcgacatcacatgttgagccaaggtgttttcctgagggagactttctgctagcttctacatgaaatggattaacatgcatgatgtgtatgttctttgctgcagaaccaaccaccgtgagtggaccatgatgtctggatgacagactaaggattttaagtgcatatttctactcta

SEQ ID NO: 847244 - DNA, 499 bp, Homo sapiens
actcaagttaaaagtatctgtagttaaagatcccatttctctattaagtgatgtgcgtaagtacacagggaaagagtctagaagaaagtacaggtgggctgggcgtggtggctcacgcctgtaatcccagcactttgggaggctgaggtggacagatcacctgaggtcaggagctcgagaccagcctggccaaccccctctgtactaaaaatacaaaaattagttgggtgcggtggcgcatgtttgtaatcccagctacttgggaggctgaggcagaagaatcacttgaacccaggaggcagagattgcaatgagccgagatcacaccactgtactccaccctgagcgacagggcacaactccgtctcaaaaaaaaaaaaaaaaaaaaaaaatatatatatatatatatatatatatatatatatatgamtcatgcacatgctttttgaggttttttggtttatttttaaattagcatgtgttacatttataattaaaa

SEQ ID NO: 847245 - DNA, 619 bp, Homo sapiens
gggatcttactcaaggccaatgccacagaaygattctctgtcccctcttctggtcatgagacctgccaacctttcccaaagctttcaaattctccagctccagattcccacgtcttctactactattaaatgggccgaactaagttctgccagttcaaagcactgtattattctgttggtttctggtacctaaatatgcttgcttgcaaggttagtttttttctttattattattattattattattattgttattattatttttgagatggagtcttgctctgttgcccaggctggagtgcagtggcacaatctcggctcactgtaacttccgcctcccgggttcaagtggttctcctgcctcagcctccggagtagctgggattacaggcatgtgccaccaggcctgactaattttttttgtatttttagttgagttggggtttcactatgtaggtcaggctggtcttgaactcctgacctcgtgatccacctgcctcggcctcccaaagtgctgggattataggcgtgagccaccgtgcccagccgcaaggttagttttatgctttcccttaactttgcttggggtggttagcagtaaatcagtgaatttgtcttt

SEQ ID NO: 847246 - DNA, 612 bp, Homo sapiens
gtgaaagcaagaagactacttagaaggcaaacgtaataatccaggccagagatgatagtggcctsgaccagcagatggtaggggttaatgtctttgggcagtctattgggtcattttctttcatgtaatatagggataataagaaatcatctcacaagattatatagaagattacagtagataatctagataaattacttagtacactgccagaatacagctagcatatatagctctactctttttagtgtggttatctagcttttgactgataatttccaggattgggacataccatagtactgactattcaattattggaaatttctaaattgaaaccatctttgctctacattcatttgaaactggtttctatgtaaattctaactattagcgttacttccactctctaaaataaaattggttagaatctaattttactattcctggttgaaatctaattctactcactagctgcatattatttgaatgaaggttatcttttttttagagggcggacgtcagattactcatgaaaaattctcctatagtgctcagtccaatgtaggaaatagtgagctatctagtagtgagataagtaggcctgctatt

SEQ ID NO: 847247 - DNA, 596 bp, Homo sapiens
gagctatctagtagtgagataagtaggcctgctattagttccaattctgtcaataactctatgactcgaatcaagttatttctctagaatttcctcatttgtaaaaatggtggcttggtttggaatttttctttttctttctttctttttctttttttttttttttttccagacagaatctcattttgttgcccaggctggagtacagtggtgcgatctcagctcactgtgacctttgcctcctgggttcaagtgattctcctgccttagcctcctgagtagctgggattataggtgcctgtcaccatgcccggctaatttttgtacttttaatagagatggggtttcaccatgttggtcagcctggtctggaactcctgacctcaagtgttcctcccgccttggcctcccaaagtgctgggattacagatgtgagccactgtacccagcttgagatttttctaaaaccatgatttctttttcktcatcattttctcttctttaagctgagaatcctcaattactttaaccagccaaattgttttcctatgggaggtttcagtttggtaaggaagatatatcattcatcttactag

SEQ ID NO: 847248 - DNA, 621 bp, Homo sapiens
gcctcccgggttcatgccattctcctgcctcagcctccccagtagctgggactacaggcacctgccaccatgcccggctaattttttgtattttttagtagagacggggtttcaccatgttagccaggatggtctcgatctcctgacctcgtgatccgcccacctgagcctcccaaagtgctgggattacaggtgtgagccaccgcgcccggcccctggtcctctgctttcatgttcttcttggtcctgttcctcctcctcttttgttggaacttccagtatcagagcaggaaggaaggcaatgggtcaatcgatgctgtcagcttttggatcaaactgcaagttctcaaacagcaaaattaatgagctcaggctttgaagaaaccatgaccctgaaagcatcagttgcttccaattgcatcagttgccacgggtgataagaacaatgatgactcagaatgcctaggttttcccagcagcttctctgaggttttcccrgcagcttctctgattgattcctgacagatgacttcggtgtgtcagactttcagggtatctttccttatgtgatggtttgaggaagagttaccattcacattcctaatggcttcagaatagatg

SEQ ID NO: 847249 - DNA, 606 bp, Homo sapiens
ttgaggaaaaagtacaatattcattgtagtatttacatatttcttaatttatttaacatgaataaaattatctttaagattttttttttwaattttttgagatggagttttgctcttgttgcccaggctggagttcaacggtgcgatctcggctcactgcaacctccgcctcccggattgaagcaattctcctgccttagcctcctgactaagctgggattacaggtgcctgccaccacccccggctaatttttttgtatttttagtagagacggggtttcatcatgttggctaggctggtctcgaactcctgacctcaggtgatctacctgcctcgtccttccaaagtgctggtattacaagcatgagccactgcgcccggccttatctttttttttaatgttcacaggtgatgtttccaagtgttacagccataattccttttttttttcccataagccctgtgtgtttttttgtgtgactttgcatagcatggtgatatttaggaacatgcctctggctcaaccactgactattaacattaacctctccaggatgccaaataggacggcagaacgtttcgacctatctatttagttgtcaata

SEQ ID NO: 847250 - DNA, 606 bp, Homo sapiens
ttgaggaaaaagtacaatattcattgtagtatttacatatttcttaatttatttaacatgaataaaattatctttaagattttttttttaaattttttgagatggagttttgctcttgttgcccaggctggagtkcaacggtgcgatctcggctcactgcaacctccgcctcccggattgaagcaattctcctgccttagcctcctgactaagctgggattacaggtgcctgccaccacccccggctaatttttttgtatttttagtagagacggggtttcatcatgttggctaggctggtctcgaactcctgacctcaggtgatctacctgcctcgtccttccaaagtgctggtattacaagcatgagccactgcgcccggccttatctttttttttaatgttcacaggtgatgtttccaagtgttacagccataattccttttttttttcccataagccctgtgtgtttttttgtgtgactttgcatagcatggtgatatttaggaacatgcctctggctcaaccactgactattaacattaacctctccaggatgccaaataggacggcagaacgtttcgacctatctatttagttgtcaata

SEQ ID NO: 847251 - DNA, 606 bp, Homo sapiens
ttgaggaaaaagtacaatattcattgtagtatttacatatttcttaatttatttaacatgaataaaattatctttaagattttttttttaaattttttgagatggagttttgctcttgttgcccaggctggagttcaacggtgcgatctcggctcactgcaacctccgcctcccggattgaagcaattctcctgccttagcctcctgactaagctgggattacaggtgcctgccaccacccccggctaatttttttgtatttttagtagagacggggtttcatcatgttggctaggctggtctcgaactcctgacctcaggtgatctacctgcctcgtccttccaaagtgctggtattacaagcatgagccactgcgcccggccttatctttttttttaatgttcacaggtgatgtttccaagtgttacagccataattccttttttttttcccataagccctgtgtgtttttttgtgtgactttgcatagcatggtgatatttaggaacatgcctctggctcaaccactgactattaacattaacctctccaggatgccaaatrggacggcagaacgtttcgacctatctatttagttgtcaata

SEQ ID NO: 847252 - DNA, 638 bp, Homo sapiens
acactacctcctatggattcctaaagtattttatgtttaaccccgtcacagcatttgtcacrgtatatcacatgtgtttgtatatatgtctcttaaggacaagaactgtatcttacatatctgtccacccctttgacctagcaaagtacaggcacacagcaggaactcaaaactattggataagtaaggtagtttgaataataaagaatgtagaggccgggtgcggtggctcgtgcctgtaatcccagcactttggtaggtcaaggcgggccaatcacaaggtcaggagattgagaccatcctggctaacacggtgaaaccctgtctctactaaacacacaaaaaattagccaggcgtggtggcacgcaccaacagtcccagctacttgggaggctgaggcaggagaattgcttgaacctgggaggtggaggttgcactgagctgagactgcaccactgcactccagcctgagggacagagcagactccctctcaaacaaaacaaacagaatgtagagatgagacacaatagaagaatgagtaaggcaagatttcttgggttagccagctattctgcacaagcatgtcatagaagacatatgaaatacgctctatggagtttctgttctttcgatcat

SEQ ID NO: 847253 - DNA, 641 bp, Homo sapiens
tatagaatttttcacccagcggtagagaggttgtggtggcctccatcctctcaaatatgtgaaaagcaaagaattttagcggtttcaaaacacatggaggcagggcacagtggctcatgcctgtaattccagcattttgggaggctgaggcaggtggatcacttaaggtcagaagttagaggccagcctggccaacatggcgaaacgccatctctactaaaagtacaaaaattagtcgggcgtggtggcacacacctgtaatcccagctactcaggaggctgaggcatgagaatggcttgaacccgggaggctgaggttgcagtgagctgagattgtgccactgtactccagcctgcgtgacaagtgagactccatctcaataaataaataaatacaaaaaaattaaaaaaaagcacatggaaaggagatatcaactgatgtgatgtgaaggaagagcatcattcattcatttttatcttatttctctaacataaatgaggtaatttatgtgcgcatgctcttatgtgcacaaaatgtggtatgtatgtgttgtgtgatgccactgtggggmgaagcacccgaagttgttatgaacaattaaaaaatttatttcagagaatactaacagtggggtccatga

SEQ ID NO: 847254 - DNA, 549 bp, Homo sapiens
tactcagttaccctttgcgccaggactagacttgaaaacagaaggaattagaatgagctaatcttctcatctctcccttcctttcatgacatattgtagtctctttcataaaaatcagaatggtattggtcagcataattggcaattatttacaatctgtcataacatcacctatctttaagctgagcttgggtggtcaatacatttaaggttcttcttcacctttggatagctatcaaactgttatttaaaaattctgttatcttcccaactggccaacaatgatggtttccatttttgagactagattccaatataagatcttagaaaatattgctaaatgtagaacatggcatattgataacatgggtgtaaagcacaaatgtgataggaatttggggcatacaaaatttactaattataaaccagttactaacactagcattgayagtggtaccattactactactactaccaattcacaactaaagatagggaggtttaagaggttaaatgacttacataatctaaaacaactagtaaatgaac

SEQ ID NO: 847255 - DNA, 481 bp, Homo sapiens
taggagagaatggggagttattatttaatgagtgtagagtttcagttttgcaagatttctggagatttgttgcacagcaatgtgaatgtacttaacattagtaactgtatacttaaatgattaagatggtaaattttatgttattctatatgtattttgccataattaaaagaaacagggataaaaaatactgtgacccatgagttgacattaaacaatcaaaatcctctccactaaagttggagtgcaacgttaccagcatttgtggtctgcctctgctgcctcttgacgacactgggtctggccagccaaaggagccaccagtgggcaaaaggaacccctgcagggctgaggcctggtttagagaaattatatttgatttatrcaacgagtttatactgaaatgtggcaccatccatcccaaattcctcattcattcaataggtacaacaatagcttttacattataccatagcattgt

SEQ ID NO: 847256 - DNA, 389 bp, Homo sapiens
ctcagtgtaaataaatgtctccatttggggttttgtggtgcaataggagtaaccataggtgggtctgtaatcatgcagtggcaatgcaaaactgatagtctaagctgccttacccctatttagtgatgccctggggtcagcacagagaaagggctgagagatgagtctctgtgattttgtaatggtagtaactttgaactcctggctgaagtagagccacaggatttagaaatggaaggggcttagagatcatttatcctaatcctctcatttcatgaaaaaagawttaatcagagaggtaaaatgccttgatcaagatcacaggcttgtgggtgacagaactgaagactgaatgaaggactcctcattcccagtctagggttgtacca

SEQ ID NO: 847257 - DNA, 613 bp, Homo sapiens
aaagatataattttatttgcaccttaaaatgaatacttaagctgctatatacaacatgagtgaaagtggagggamacaatcaggaggttattgcagaccagggaggggaaacctgtgacttaggtgagtgaaaatgtcagtgaagatggatggagtggatggattgaagattactattctggacataagtgataggagctgctgactaatgagataggggaggattaaggaagaacaagaatcaagctttctggcttagacaactaaatgaatgctgttgctattttctgataaggaaaagattgaggagaaaaaattgggagaaaatatcgagaattatttactggacatgttacatctgaagtgtctatgagaaattcaaatgaagatgccagttaggacttgaccccacatattgtcactcttttctcttgcaatctattctttaacataaaaacaagatgttcctgtggaaagttaagtcagatgttctctaaactatcctcaaattacacagtggcttatgaaaccctacctgacctgacccaccatttaatcttggacttaagctcctctattctctctgctggagccagccatgctgcgagcctca

SEQ ID NO: 847258 - DNA, 508 bp, Homo sapiens
ttgttagtaccctgaactttttgatcagctaatgttaattaaacattttttacctatatttatttaaaatttgcatataattttgttttcctagtttaaggattaaggtaatacttacatagttaaatgaatyggacactttgcctaatttaatacattgatttaatttgcagaagtatgtttggaaagagaaatagaatcggttccttgacattttgatagtatttacctgttataccctctaggcctagaactatttgaagagaatgcctttttattacactcaaatttctttattggttatcaatcttttcaaatttcttactttcttttgaaccaacttgggcgtttcattatttgcctcaaatttacccacattttcaagtttattgatgtgtaattgtacataatattctttatgattttatatatctattttacctaaggttatttctcctttttatttaatatttggtctattaagtctgttttatgaggtgcttagcgt

SEQ ID NO: 847259 - DNA, 603 bp, Homo sapiens
aattatttcatcttcagatcattccttaaactkcacacatttgtatatgtttcatatgtcccactttataaataaataaatgaacatatattgtggatgtgtgttaaaagattttttttttagtttttaaaaaaatagattcaggggttccatgtgcacatatattacatgaatatattgcataattgtgagatttgggcttctagtgtactcaacactcaaatagtgaacattatacccaataggtaatttttcaatcatacccaccctcccatactctcccagtgttgattatttttggagtcccagtgttgattatttccatcattatgtccatctgtacccaccgtttagctctcacttataagtgaaaacatgcagtattaaattttctgagttatttcacttagattaacgccccccagctccaatcatcttgctgtaaaagacatgacttcattctttttcatggctgcatggtattccatggtgtatatataccacattttttttcaatccagtcatccactgataggcacttaggttaatcccatgactttgctattgcgaacagtactgaaataaacatgcaagtgcagatgt

SEQ ID NO: 847260 - DNA, 638 bp, Homo sapiens
acacatgcacacatattagaaatcatgagcccacaccaatacctttaatccatttcgtcctcacagaattcttttttccttccccattcmttatttaaatgccacttctttcatagtgagaactctgactctcaataatatcaatatatttacttatttgcttagtcctataatacatcttagtttcagaattgctttgcccacataacaaaaaagattttgctgttttccccaacaacatgctcctaaagattgaaatgtattcatgaactacttggattagattttctcttcttttcccttcagtttgattaagatttatttgaaatacaattgtgtttgttttttcttttagttttcattttttttctgaaaacagaaacacacagtaacatgtaatataaaattgcttttattataaataaccccttacaatgtaaacaaatatattgatattataaaaccactggtcctcatttgttttaatatggcaaaattaaataacctttcacattaaaaatatactctttagttttagaaatgagaaatgactttccttcttgccattaaatgttttgactgcatggatcaggaggacatttaattgactaaacattcaattaaataaggtcttttga

SEQ ID NO: 847261 - DNA, 602 bp, Homo sapiens
acagggatgccttgatatatctgcctttggcaatgccgtgtgtacggagctgggattctgattgctcctattgtgatagtatgccactaatgctctgtyggacggaatgactaactgaagtggtgagaaaactgcgagcctttcaggactgtttttaatgcttttttgacaaatcttttagaacaaatcttttgttcctttgcagggaacaaagtccttttgttttatggtagaggagttattcagggtcctgatcttcaattggcttagctttccctgatgccatttgtcacccgtaactcattggtgctccatctgccatagcccggaatccaggaacagtactcggtggtaaaaagttggagaagtagatacttgcaaatccagccttacgtgatctttcctggctttgataggttcagctttcatcctgaaaagttgtttaaacacttttaatttgtttcaagtgatgaaatgaatttatctcagaagaaaatttaaaaactttaaaatttattttatttggaagaaaatattttttaaatgattattagcattgtatctacaattatttatcttaaaaaggtaaatggccatctcca

SEQ ID NO: 847262 - DNA, 586 bp, Homo sapiens
ctggtcttggaacgttggtttgctgatgactggaatgcaaagatgatgacttctgtatccccagatcctagcacagagcctagtccataatgaggaccccataaacgtttactgaatagataactccsagtgccgagctatcccattaacctcccttaggacttggtttctttgtctgcagagtaacagtcttcttcttttataaggttaacgtgaggatcaaatgcattcacacacgaaaagctttaacaacactgtctggaacatagttggtactgttattgctgaggttgtaactgctaagaaaaccaagtaagataagaggagagagaacagttgttttagaagactcttctgaggatgcaccattggagcaagatctaagtgaaggaaaggagtcagccctcctggagctggggaacagcagggcaggcagaaggcatggtgggggtgagggcttggagatggacaggtgtgaactcggtgtgtttgagggccagaggaagtggtagttttgtaattatcacaatccaccttattatggttttcatgccccaattactatccctaattttctttttctttc

SEQ ID NO: 847263 - DNA, 549 bp, Homo sapiens
cccctccctctatgtgaatatccacaagaatccacaaggatttcccagccggtgctgacgctgcagggcagctttgcaaggctcagagtcagctattgctgaccaggggttctgatgacttgctrtttcttggtctgtgccttcaaaggtccccaaccactgtgctgagagatcccagaacaatccagatacctggcccctaccccttagaagtcagtagaccctcccaagccgagacaatgaaaaaactctccagacattgccaactgtctcttgcaaaatcactcccagttgagaactaccattctaccgtgtacagaaaggcctacccacagcaagaattatccagctcacaaaaccagggtgcttacagatagctcctcccaggagctgagggcctgaagccagtagacctggattctagttctaattccagctccaccataatgattagggtcctcttggacaaacagccgaatcccagatggcaggggaggtgaacagctactatatcccaaaggccaaagaacagctactatatcccattca

SEQ ID NO: 847264 - DNA, 615 bp, Homo sapiens
cccccacagtctttccctgggtcctcagctcatcttctagtacctgtcttttccttgccagaaaagggagtctaggcatggtargtacaagggccacgcaggatgaatggagctcaggaaatgttgccagcctaccatgccaaagagatggatccacatggccaatggaaagcaatggagtctccaccaccccagcccactgtgtccttttcctatagaggagactaaccaaatcaaaccatccttaaaaccaagggcctggaggcctttcatttccatttgtgtttatctttccttcctcccctccctcccacctttgctcccttccttctttcaacagatagatactgggcacttactatatgtcaggcatgtattatttatttatttacttgacagagtttcgctctgtcacccaggctggagtgcagtggcgcaatcacagctcactgcagccttgactttccaggcatcaacaatcctcccacctcagcctcccaagcagctgggaccacaggcgtgtgctaccacacttggataatttttgtatttttggtagagacagagtttcgccatgttgcccatgctggtcttgaaatcctgagcccaagcgat

SEQ ID NO: 847265 - DNA, 612 bp, Homo sapiens
catgattcattgatacataaatgattttggacactaacaacagtagttgcagcagtgaagcaggggtcgaagccaatctgcattggaytgaagagtgagtttgaagtaacgaaatggaaccagacatgtaggtcatttatagcagaatggttgcaagaactgcctcagcaatctggcctctgctctcaaacctgcccctgactaacaaggcaagctgctttatttgtgtctcagtttccttcttcatctgtaaaagtggaataatagtaactacctcataaagttgttggaagggttaagagagttaatagcaatatatgtaaagtatttagaattgtgcctggtattaatacatggtgtatgttctaagttagcagttattcttcggaatgatgatagtagctgtacaatggagataaaagataggacctgctgtatatagttccttatcaaaaaggggattgtcacaggaggtgaacatgaagtagaaggaaacattagtcaagagagactggaggtatttcactgctgattaaatggagccacttgcaagaagatactgaaaacaatagttctgtatctctaaaatagggagagggaatggtcccaggg

SEQ ID NO: 847266 - DNA, 537 bp, Homo sapiens
atattttgtttccctcttaatttctactttgaatgttgggttatttagaagtgtattaatttccaaatacctggatacttttctggatattgtgtttctattgctaacgaagattcctttgtaatcttcggaatttcggtctttggaattgcctgtgacttactttatggcccagcatatcgtctatcttggtgaacattccatgagcacctgaaaaggagttttataaatgtcaggtcaggatgaccaacagtgctgttcatatcttctatgttttttgtttgttttttaatatctagttattaatattgaaagggaatattaaaacctcaaactatgattgtgtatttatctctccctatcaatcagtttttgtttaatgggttttgaagctcttgtattaggtgtatacagttttgattgttatrtctttctgatgaatttgtcctttcatcattataaactctcctaccaaattgctttgtggtatcacttccccttcagattgaagaacttctttcagcatttcttgtcata

SEQ ID NO: 847267 - DNA, 658 bp, Homo sapiens
atttgctcttattcctcagttttaaaaataaggtagttctctagcaaggaaatttcattagggatgacttttttcctttaatgaagatactatttgtatttttacattgctacctgacgttaattgttgggttrttcttcattctgaagtgggttaatatttaaaatcacaaaaatctgatattaaaatacttaaaaatattaagttgtctgttgacctggagtgataccaaaatacctactgtcaataattaagcaggttatacattgaaacagttgtttaaaaaacatatagactggtttttatatgcacagaatcacttgagcaagtgaacattgacatgttagcagtatttctctcgcgaggtggagtttggagaggctttcaatctcttaagttatttaagtttttcataacaaaaattattagaaaaaatatcaaagacatgcccattttgaaaaaaataattttgaataatgaatatatttaaaaatgtgttattataattaaaatataccagtagaaaccatagtcctgaggaaaccttttaatgccattattagaaaaacaaagttgcagacattagtgaattataggtattttagagaaacccctaaaattcattatttcaagcaatgtatctttaaagcatagttgc

SEQ ID NO: 847268 - DNA, 658 bp, Homo sapiens
atttgctcttattcctcagttttaaaaataaggtagttctctagcaaggaaatttcattagggatgacttttttcctttaatgaagatactatttgtatttttacattgctacctgacgttaattgttgggttgttcttcattctgaagtgggttaatatttaaaatcacaaaaatctgatattaaaatacttaaaaatattaagttgtctgttgacctggagtgataccaaaatacctactgtcaataattaagcaggttatacattgaaacagttgtttaaaaaacatatagactggtttttatatgcacagaatcacttgagcaagtgaacattgacatgttagcagtatttctctcgcgaggtggagtttggagaggctttcaatctcttaagttatttaagtttttcataacaaaaattattagaaaaaatatcaaagacatgcccattttgaaaaaaataattttgaataatgaatatatttaaaaatgtgttattataattaaaatataccagtagaaaccatagtccygaggaaaccttttaatgccattattagaaaaacaaagttgcagacattagtgaattataggtattttagagaaacccctaaaattcattatttcaagcaatgtatctttaaagcatagttgc

SEQ ID NO: 847269 - DNA, 640 bp, Homo sapiens
acacatgcacacatattagaaatcatgagcccacaccaatacctttaatccatttcgtcctcacagaattcttttttccttccccattcmttatttaaatgccacttctttcatagtgagaactctgactctcaataatatcaatatatttacttatttgcttagtcctataatacatcttagtttcagaattgctttgcccacataacaaaaaagattttgctgttttccccaacaacatgctcctaaagattgaaatgtattcatgaactacttggattagattttctcttcttttcccttcagtttgattaagatttatttgaaatacaattgtgtttgttttttcttttagttttcattttttttctgaaaacagaaacacacagtaacatgtaatataaaattgcttttattataaataaccccttacaatgtaaacaaatatattgatattataaaaccactggtcctcatttgttttaatatggcaaaattaaataacctttcacattaaaaatatactctttagttttagaaatgagaaatgactttccttcttgccattaaatgttttgactgcatggatcaggaggacatttaattgactaaacattcaattaaataaggtcttttgagg

SEQ ID NO: 847270 - DNA, 619 bp, Homo sapiens
gatacatttccagaagcagatctggatctctagctgactagatagagaaactagttggttaaatattgacaataccgtactctttaagtattatcaawtcaatatctgtttttttattatttcttcacatagtgtaagtacgtatgctttattttatggtttttataacttaattttcttgacaatgacatctatgtcagtcagaacacatttttattgagtgttaataaaactaattactccttaagaaaccaattattccctatcatatggggccagaccattaccaaattatcataaggggaaacataatataaagaatagcaagaatagacattggacttatgtaggcatggatttttgaaatataacgaaaaccttgcttatctagatactgaatatttagcttcaatttaaatatgctaaaaggctggacatggtggctcatccctttatcccagcactttgagaggccgaggcagggggaattacttgaggaccaaagatcgaaatcagcctgggcaacatagtgagaccctgtctgtaaaaataaataaataaataaataaatagcttagtgtggtggcatgcacctgtagtgctagctgtttgggaggct

SEQ ID NO: 847271 - DNA, 636 bp, Homo sapiens
aagatataatttcttattttctactgtgtttctctatcaatcaacgttctaccagagggaaagaaccagtaggatagacagatggatagataggtagataggtaaattgtaaggaattggctgatacagtcatgaaggctggctaggaaaatcaaaatccataggatagggcaggcagtcgaaaagaacagactggagttgaagctgccgttcacaggcaaatctcctcttcctcaggaagacctcagttctactcttgaagcctttcaattgactggatgagacctacccagattatcaagggtaatctcctttacttaaagtcaattcattatttatattaaccacatctacaaactacatttacagtaacaccaagatttgtgtttgacagaataactggctactatagcctagcccagctgacacataaaactgatcattgcaattctcttttatattatgtaattattttttacaataagtctgcatcactttttttttttttttttgagatggggtttcgccaccttgcccaggctggtctcgaactcctgggctccagagatcctccctccccagcctcccaaagtkctggggttacaggcatgagccaccacatccagcctgtattac

SEQ ID NO: 847272 - DNA, 559 bp, Homo sapiens
tgattctcagttgcaggaagagtatccctgcatagttaaatccccctcatttctcctaatgcctcattcgggaaaattcttttgcttggcaaagagtattttcactctcagttggcatacggatgatagggattattgaaagaagcaggaggatagccatacacagatgttaattgtctgaagacttataaatttgtgtagtttgtattgttaggattttttttttctcattcaggtaacagaagctaacttgagataactgaagaaaaggggacttcatgagagtccccactcatgagagtgctcccagatctgaatgaaaggatgaaaaagccaagcttaagaatgataggcacccaaacagatggtgttcttgatagcaggcagtaattctttgggtgaatgagttccaatgtggtattttttttttttttttactttggttaagatgcagattccagaaagagactgttcacttagctcagcatagttgaagtgtctgyctcttcagaagggagacccgaatgttttttttttttccataattcactgaactatg

SEQ ID NO: 847273 - DNA, 625 bp, Homo sapiens
tctcaagttgatttgaaatttgcctccatgcaatctccatgcattgtttctaactcttccctgtgaatatatactgagttctcatatttcttgtatatttaggtcttgcaactgtgattttaaaatgagcttattttatataaaaaactctcaccgatcccagttttatttaataccttttgaaattgtgcaactagtgcatgtgtgtcataaaaatcatcacaacaatctacaagggcataaatgtaagcggtagtaactatctgccgcttgctagtgattactgcctgttagagtttggcaagcatgtttccagtcttttcctatgctcatatccataccttcaaacatgtacgtgttactatctcagtctgtttgcattgctataaaggaatacctgagactgggtaatttgtaaagacaagaggtttattcagctcagggttctgcaggctttacaagaagcatggtaccacctcaccaggtatgcttctggtgagkactcaggaagcttccaatcttgccagaaggggaaagggagctggaatgtcacagggtgaaagaggaggaaaaagagagaaaggaaatgccagtctcttttaaacaaccagctgtcatgtgaaca

SEQ ID NO: 847274 - DNA, 496 bp, Homo sapiens
aaagaattaggactaaggttgagaaaatcaactccaaagctatgggaaagtctaagttcacttgatwtttttagaagccaaaaaaccctacagggaccaaattaatcactgttagaaaatcaaatcacactgatttctttcagcccaaagaaggattatctgaagttgctttgtatatttaaacagttaagaggatcttttggaatgctttttcacatccactaatactatttctgaaaagagcctggtcatctgggtacctgtatctgtccccaaaagccacgacttaaaggttaacatttgttctatctagggagtgttttaataggaattgtaataacccattagagatggaaagattgaggatgcaagaaagcatgaacaatctaaggaaatttacacattaaatccttaggtaggcaagatgggctccagggtgttgtggagcggctagcctcagggatagtttcatctacggtaataataaaataaaata

SEQ ID NO: 847275 - DNA, 564 bp, Homo sapiens
gtcctttgcactcacaccacaacaatcaccagaatacttctgtgaccagatgtatgagagatttcccccaatgcaagcaatcgcttctgcagtggacaccaggtgggtgtcctcccacccagttcaattccaacattatctacctggagacagtgtcacatcccacaggttgagggctccccacttccaatcccaatctaaagccccaggttgttttacctatgcttctgactaactggctataaattggggttcccacaacctcttactccagtctgattaatgtgttagagcgacgcacagaactcagggagacagatttaccagtttattataaaggatattacaaaggatacagttgaagagatgcacagggcaaggcatgtaggaaggggatgccaccctccatgtgctcagccatctggaagctttctgaatccagtccttttggatttttatggaagctttgttaagtaggcaatgattgattaaatcactggctgttggtatcaacttaaccttcacgccctctctcctmcccagagattaacaggcaggactgta

SEQ ID NO: 847276 - DNA, 564 bp, Homo sapiens
gggagtagtgctcaggcctgtaatcccaccagtttgggaggctgaggcgggcagatcacctgagatcasgagtttgagaccagtctggccaacatggtgaaaccccatctctactaaaaatacacaaatttagctgggtgtggtggcatgcctgggagatgtgccacagtacttcagcctgggcaagagtgggactccatctcaggaaaaaaaaaaaaaagacttaatattgagaatattgagaagatagcaatactccccaaactgatctacagactcaatgaactctctattaaaattccagctggctttttttgcagaaattgacaagctaatcctaaagttcatacagaaattctaggcacccaggatagccaaaacaatcttgaaaaggaacaataaaatgtgaggattcacatgtattgatttcaaaacacactacaaacctacagtaacccagactgtgtagtactgacataagaatagacgtatataggtcatcagaatagaattgagagtctacaggcaaaatagtggaaatatattatggatttatagaatatg

SEQ ID NO: 847277 - DNA, 598 bp, Homo sapiens
tgaaacatcaggaataaaagatggtacagcactatagatctaacagacattgaaagaataataagaggctgggtgcagtggctcatgctggtactcccagcactttgggaggctraggcaggtggatcacttgaggccaggagattgagaccagcccagccaacatagtgaaaccacatctctactaaaaatacaaaaaattagctgggcatggtggtgtaatcccagctacttgggaggctgagacaggagaatcacttgaacctgggagacagaggttgcagtgagccaagattgcgccactgcactccagcctgggtgttaaacacagcgagttctaagtttctcttcaaagaatcagtatgtcagtatgttcagttctttgttctccattttcaagtttaacttccttgttctcttcatctctttgcccctagtttcagtaaacaaccttcccgccagttctaatcagtagttcacatctgttcccctggtcacctgctccgtcctgagtcacccctggtcacctactctgacctgagtcacctttagtcacctattccataaccgtctttcctgccgaaactgctcaccccgc

SEQ ID NO: 847278 - DNA, 476 bp, Homo sapiens
gattgagaaaaatacgtacaaaaaatattttctaaaaagctactggaaagttaaagttttaaaataaattgagcatattcatacatttgaaaagtttttaaaaaataacaaagatattttattcggtctacagaaaatacttaatgcacagatggatttaaaaccccagtggggttatattgctgtaggccacagtggtctgagagttttaaggaagagagattattagaatgagagtttcagaaagatctctgaactggctaggtttccagactgttggactttcataaaaaatagggggattagctttttaatttttcttaataaggtcatttaaaaaactataattgttgcatgaaaggatattttaataccaaaaatatagaaaaatataaagttggaataaaagctaatarttttgaattgaataagtttaatgagaaattcaatactttgactttaattggctcattttt

SEQ ID NO: 847279 - DNA, 413 bp, Homo sapiens
ggtactcctactgtatgctgtgttgaataataaatttcttcatctgatccaccaaatctcatctacattggtacyaatggagttgtggctggtgaacctgctttcttgcttagtcgtctccgttggagtcttgttatttcttgctattctctaggaggttggggctcttctctaacaaagggtgccatgacacaggcacacacacacactacaaaatgaaaataaacatgaactagaaagatgtttccttattcaagaaatgcagataaatggcaaagctgttggaaaccagaaaaccatgtaattttgagtatttaaaatcaatcctgtattgtgatacactaagaccaaacttgaatgttattccacataagaatctagccaacagaatgtagttcagatttgggaaatga

SEQ ID NO: 847280 - DNA, 489 bp, Homo sapiens
aggcactatgccaaattgtgattaaccactgtctgtggtgatgaaatggcaggtttttatcttctttttattttagatttgtgttttctggattttccacagtgaatctcttttataatggtgttttgtttggttttgttttgttttttgagacagagtcccgctctgtcgcccaggctggagtgcaatggcgctatctcggctcactgcaacctctgcctcccaagttcaagcaattctcctgcctcggcctccagagtagctgggattacaggtgtgcatcaccacgcccggctaattgttgtattttttttttttttttttagtagagacggggtttcaccatgttggtcaggctggtctcgaactcctgacgtcaggtgatctgcctgccttggcctcctaaagtcgccyggcctataatagagattttttttttctttaatgaggcagagcaggaagctcattggctatggagttaggaaacgc

SEQ ID NO: 847281 - DNA, 535 bp, Homo sapiens
ttaatgctataaatgtccctctgaatgctgttttagctccattacatacaattttatatgttatatttacattttagttcaggtyaaaatatttcctaattttctttgaggctgtctcttagatctcatggattatttagaagaatattttaacttacacctatttgagaattttgcagatagctttttgttattgatttccagtttaattatattagtgtcagagactatatttcatatgaattcaatttttaaacatttgttaggttttattttttgacccagacctggcctatcttggttagcgtttcatggtcactcaacaggaaattaaaatctacagttgtttggcagagcgtcctattaatgtcattacatccaactggctgctggttttattcagttctttatactggctttccttctgtcagcatgtttcatcaattactaagagaaaagtattgaagtcttcacagccataattgtagatttgcttatttcttgtttcagttctcagtttttgcttcatgtgctt

SEQ ID NO: 847282 - DNA, 561 bp, Homo sapiens
ttttagctcccacgaataagtgagaccaygccaagtttgtctttctgtgcctgacttatttcacttgtcacgaaatcctccacttccatccatgttgttgcaaatgacagattctaattcttttcttctggctgattagtactctattgtgcgtacgtacaacattttctttatccgtttgtctcttgatggacacaggttgcttgtaaatcttagctattgtgaatagtgctgcaatagacacaggagtgaagatatctatttgatatattgatttcctttctcctgagtatatacctagtagtgggattgctggattatatattagttctaattttatttttttaaggaatctcgaaactgttctccatagtggctatgctaatgtacattcccaccaacagtgtacaagggttcccttttgtccatatcctcaccggcattaattattgtttgttgtttggataaaagccattataactggggtgagataatatttcattgtagttttgatttgcatttctctggtgatcaattatgttgagcacttttgaatatacc

SEQ ID NO: 847283 - DNA, 561 bp, Homo sapiens
ttttagctcccacgaataagtgagaccacgccaagtttgtctttctgtgcctgacttatttcacttgtcacgaaatcctccacttccatccatgttgttgcaaatgacagattctaattcttttcttctggctgattagtactctattgtgcgtacgtacaacattttctttatccgtttgtctcttgatggacacaggttgcttgtaaatcttagctattgtgaatagtgctgcaatagacacaggagtgaagatatctatttgatatattgatttcctttctcctgagtatatacctagtagtgggattgctggattatatattagttctaattttatttttttaaggaatctcgaaactgttctccatagtggctatgctaatgtacattcccaccaacagtgtacaagggttcccttttgtccatatcctcaccggcattaattattgtttgttgtttggataaaagccattataactggggtgagataatatttcattgtagttttgatttgcatttstctggtgatcaattatgttgagcacttttgaatatacc

SEQ ID NO: 847284 - DNA, 619 bp, Homo sapiens
gctattaaatggattactaaaagttgtttttaaatatgtttttcatgttgaactatgagggtgatatgaatkgacgtataacaaaattggtaaactctcagaaattctcagggccctaaagaagatcaccctacatcaccaccatctcaagcatatcttccgcgagacacagaagaaacttgagaagccacaatgagcacatatactgagcactgatactgatgcacttggcatgcatcacagacaactgtaatttttggtagactgattgatgtgacagtgttcatgttaaacaatgcagttatacttcacattagtcccagtaggcaggtatgacccatcagtattctctacggcaaaaataaaatgtacctctaacctgtctcacaactgcttcctgattcttccgtgttccaccatgattcacgagggaatgctggtggacccaccaccttgagggtccatgggtgcataagagatgactgtaatgcatctctggggaatgatgtgggaggcttattaggcaaacccattgtgtaaatgtactgacaataattgtttttatattgcaatataaagagtataacagaacataacagattttgtatccttggtttgt

SEQ ID NO: 847285 - DNA, 665 bp, Homo sapiens
cagacactgataacatctacaggcatcaaggccatccaggaaaacatgacatcattaaacgaactaaataaggtgccaaggatcaatcctggagaaagagagatatgtgagctttcaggcagagatttcaaaagaattgttctgagaaaactcaaagaaatttgagctaacacagagaagaaattaataattctatcagataaatttaacagagattggaataatttaaaggattcaatcagaaattctggagccaaaaatgcaattggcatattgaagaatgcatcagagtcttacaatagcagaatcgattaagtggaagaaagaattaatgagcttaaagacagattatttgaaaatacaaagtcagagcagacaaaagaaaaaaagagtttaaaaaatgaaacatgactacacaatcaagaaaattgcctcaaaagaacaaatctaagagctactggccttggagaggaggtagagaaaaagacaggggaagaaaatttattcaagggaatagtaacagataaattaccaaacctagaggattacatcaaaatccaagtacaaaaaggttatagaataccaaagagatttaaccctaacaagactacctcawggcatttaatgatcaaacttgaaaatgttgagaggatcctaaagcagca

SEQ ID NO: 847286 - DNA, 524 bp, Homo sapiens
ccacctgggaatgcagccaagtaagtctcagcctcattttactcagctcctacttaagatggagtagctctggttcaaacgcctctgacatttttcccctccctttcataagagaacccttaatcctaaaggttgcagagggatgaaaatccatcttctgtaacttcttcaggctgaataggggcaatgatattcctgcttaactattagggtctcttgtattcagagtagagaggagctcagtgagaaggcatcaatattgtgagggtcattcataactccaagttccaacaaaaggtggtatctggaagattagtaagtgtccaatttaagaaaacggtgagcaaacttgtctgcattcctacacaaagagtacaactgcaatatgttccacaacagcaaagcaaaataagtaaaattatcccaagtaaactaaattagaaggctttccatgaagtgagaaactgttggaaccaagctgatayggggttgctagctgattccaatgtgcccagaattagagg

SEQ ID NO: 847287 - DNA, 625 bp, Homo sapiens
ctattcaggaagctgaggcaagaggatcccttgagcccatagtttgaagctgcagtgaggcaagtgaggcacgattgtgccaccgcactccagcctgggcaacagacaaratcctgtctctatataaaatcaaatcctgcaggccaggcatggtggctcatgcctgtaatcccagcactttaggaggccgagacaggcagatcatttgaggtcaggagtttgagaccagcctggccaacatggcgaaaccccttttctactaaaaatacaaaaattagctgggcgtggtggctcatgcctgtaatcccagctactcaggagggtgaggcacaagattgcttgaacccagggggccgatgttgcagtgagccaagattgcaccactgcactccagcctgagcgacagagtgaaactgtctgaaaaaaataaataaataaaatcatgcagtatgaaatttttgaggttgtcttttgcactcagcgtgattcctgagagatccatcccagttgctgtgtgcattgatgctgctttcttcttgctgagaagtagtccatggtgaggatattccacagtttgtttaaccattcattcactaaacgacatttgggttgcttaccatttggg

SEQ ID NO: 847288 - DNA, 625 bp, Homo sapiens
ctattcaggaagctgaggcaagaggatcccttgagcccatagtttgaagctgcagtgaggcaagtgaggcacgattgtgccaccgcactccagcctgggcaacagacaagaycctgtctctatataaaatcaaatcctgcaggccaggcatggtggctcatgcctgtaatcccagcactttaggaggccgagacaggcagatcatttgaggtcaggagtttgagaccagcctggccaacatggcgaaaccccttttctactaaaaatacaaaaattagctgggcgtggtggctcatgcctgtaatcccagctactcaggagggtgaggcacaagattgcttgaacccagggggccgatgttgcagtgagccaagattgcaccactgcactccagcctgagcgacagagtgaaactgtctgaaaaaaataaataaataaaatcatgcagtatgaaatttttgaggttgtcttttgcactcagcgtgattcctgagagatccatcccagttgctgtgtgcattgatgctgctttcttcttgctgagaagtagtccatggtgaggatattccacagtttgtttaaccattcattcactaaacgacatttgggttgcttaccatttggg

SEQ ID NO: 847289 - DNA, 625 bp, Homo sapiens
ctattcaggaagctgaggcaagaggatcccttgagcccatagtttgaagctgcagtgaggcaagtgaggcacgattgtgccaccgcactccagcctgggcaacagacaagatcctgtctctatataaaatcaaatcctgcaggccaggcatggtggctcatgcctgtaatcccagcactttaggaggccgagacaggcagatcatttgaggtcaggagtttgagaccagcctggccaacatggcgaaaccccttttctactaaaaatacaaaaattagctgggcgtggtggctcatgcctgtaatcccagctactcaggagggtgaggcacaagattgcttgaacccagggggccgatgttgcagtgagccaagattgcaccactgcactccagcctgagcgacagagtgaaactgtctgaaaaaaataaataaataaaatcatgcagtatgaaatttttgaggttgtcttttgcactcagcgtgattcctgagagatccatcccagttgctgtgtgcattgatgctgctttcttcttgctgagaagtaktccatggtgaggatattccacagtttgtttaaccattcattcactaaacgacatttgggttgcttaccatttggg

SEQ ID NO: 847290 - DNA, 476 bp, Homo sapiens
cacagccagcaggttgcatgtggcccaggacggctttgaaagtggtgcaacacaaattcgtaaactttcttaaaamattatgagatttgtttacgattttttaagctcatcagctatcattagtgttagagtattttatatgtggcccaagacaattctccttccaatgtggcccaaggaagacaaaagattggacacccctgatttagatattcttatctataaatggcaagcagcatatcatctttgtcacctcaaaatttcataaggaggaaaataagtccaaaataatcgcaacagatacctggaaaattatgattgatccagttataacaaagggtataaaaggatgaagaggtactcaggaaaaacgtggcacccacaatgtacattttcactagccaaattcaaaacaatagaattcacatgaattctttcaaaacacatttcagttctgtggaaaccaaatgtttgaa

SEQ ID NO: 847291 - DNA, 633 bp, Homo sapiens
agattatattaaagtattatatcaatgttaaatttactgaagttggtaatcttactctggatatgtaacactaagataatattcttattcttaggaaatatacactgcacattgataaattaggtcaaaggacatgctatttccaactttcaaatatatattatctgtctcaaatgttatatattgagatagatatttgacatatatgtaaatacaaataaatttgtatatatacatagagagaagagagaaaggggaggagagaaaggggatggaaagaagaatggaggaaggggtaagaaagagaggaagagagcacaagcgcaaacgataaagcaagtacagcaaactgttaatgaacagtgtatacataagtgttctctgtactattcttataccttttctgtatgtttgaaattatttctaagtaagtttttttttttttttttttttgagacagagtttcactcttgttgtccaggctggaatgcaatggcgcaatctcagctcactgcaacttctgcctcccgggttcaagcaattctcctgcyttagcctcccaagtaactgggattacaggcatgtgccaccaccccggctaattctgtttttttagtagagacgatgtttctc

SEQ ID NO: 847292 - DNA, 633 bp, Homo sapiens
agattatattaaagtattatatcaatgttaaatttactgaagttggtaatcttactctggatatgtaacactaagataatattcttattcttaggaaatatacactgcacattgataaattaggtcaaaggacatgctatttccaactttcaaatatatattatctgtctcaaatgttatatattgagatagatatttgacatatatgtaaatacaaataaatttgtatatatacatagagagaagagagaaaggggaggagagaaaggggatggaaagaagaatggaggaaggggtaagaaagagaggaagagagcacaagcgcaaacgataaagcaagtacagcaaactgttaatgaacagtgtatacataagtgttctctgtactattcttataccttttctgtatgtttgaaattatttctaagtaagtttttttttttttttttttttgagacagagtttcactcttgttgtccaggctggaatgcaatggcgcaatctcagctcactgcaacttctgcctcccgggttcaagcaattctcctgctttagcctcccaagtaactgggattacaggcatgtgccaccascccggctaattctgtttttttagtagagacgatgtttctc

SEQ ID NO: 847293 - DNA, 528 bp, Homo sapiens
ggtagttttattatgatgtgtctaggtgtggttttctttatattgagcctgtttattagaatataggatttcttgaatctctcaaaagtcttagaaaattatcaaacattttctcttccaagactgcttctttctcattctcatatctccttctgttaccaggggtctttgctcccagagctcccaagatggtggcgggccatggcagtggcggcaggccacgtccaagatggtggcaagcctcgtgttctctgacctggggttcttggcctcacggattccaaggaatggaatcttgggccatgcggtgagtgtcatagctctattagaagccttgggtcattgaagagaaccgtggaacctagtgactagtgttcagctggattaggacgaacctgggcacttagccgkgcaggaataatggcaagcctttagcctattcgggagcggcaatgggcgcctcgctggatcaggagcgcagcagacaccctgccggatccggaggggtggaagtcagcagtgggtctg

SEQ ID NO: 847294 - DNA, 655 bp, Homo sapiens
atgcatttatgacatatctaatttcttcttaatttttttgatattttctaggctgtgtggttcatctgtaggtttttttgaattatcacaaatctccaaartattttccaatatgtttattgaaaaaaatccatgtacaagtagacccatgcagttcaaaccctgctattcaagggtcagcagtactgcataagacatgctaagacattgttaaactacatagcaaaaggccactggcctaaggctatctctgtacttcgagtttctacctaacaaactgccacccaacttagtacataagcaaaccagaacataactaggagtacatttttgtggtaacaaatagcccggtttcagccagccacaaatatcccatcttcacccaatcaaaggcagccaactcatcataccatgcacaaagaaggcagaagcctacctgtagccaatcaggtgatttccttactttgcttccatgtttgtcctataaaagctcactgctcacactactgagtggagtgatctaaacctcttctggtctccattttcactataaaatttagtaattgtcttttcaacaatatgcaagcacatggaaaagaaagtctacgtttactaaatagcactgcattattttttaggcttttcacctactttt

SEQ ID NO: 847295 - DNA, 626 bp, Homo sapiens
ggttgcaaggggaacaataataattacacagtgcagaaatcagatacccctttgactagtgactgaaatgaacatcaccaataaaggacagacagacatcatgtgcctctggatacgatgccccaaagaggagrtaatactactcttgtactatttgactggaaatgcatagcctgagtttaatgatgaggaagcgttatagaagccccaaacaaggaacattccatcttacaaacaggaactgtttttaacatgtcagtgtcataaagaagaaaaaaatctaaagagatatgtcaactcactacgatatatgattttagactgaatcctgtactgaaaaaacattactgtgtctgataggcagccactaaaatggtcccacttccagatatttgcccctctgtataatcatttcccttgaatgtaggctgaactaacgacttactgacttgcttttaatgaatagaagatggtagaagtaatagaatgtcacttcaaagataaggttacaaagaaatgctggaagtttctacctgtggggcttgttccctcacttattctaaggtactagctgccatgctgtgagcagccctatggagaggaccatgtggtgaagatatgagaga

SEQ ID NO: 847296 - DNA, 690 bp, Homo sapiens
tgcagaaatcagatacccctttgactagtgactgaaatgaacatcaccaataaaggacagacagacatcatgtgcctctggatacgatgccccaaagaggaggtaatactactcttgtactatttgactggaaatgcatagcctgagtttaatgatgaggaagcgttatagaagccccaaacaaggaacattccatcttacaaacaggaactgtttttaacatgtcagtgtcataaagaagaaaaaaatctaaagagatatgtcaactcactacgatatatgattttagactgaatcctgtactgaaaaaacattactgtgtctgataggcagccactaaaatggtcccacttccagatatttgcccctctgtataatcatttcccttgaatgtaggctgaactaacgacttactgacttgcttttaatgaatagaagatggtagaagtaatagaatgtcacttcaaagataaggttacaaagaaatgctggaagtttctacctgtggggcttgttccctcacttattctaaggtactagctgccatgctgtgagcagccctatggagaggaccatgtggtgaagatatgaragaaacttctggtcaacagccagtgaagtactgaatcctgccaacaaccatgtgagtgagcaggaaagtggatcctccccacactgagccttcagatg

SEQ ID NO: 847297 - DNA, 690 bp, Homo sapiens
tgcagaaatcagatacccctttgactagtgactgaaatgaacatcaccaataaaggacagacagacatcatgtgcctctggatacgatgccccaaagaggaggtaatactactcttgtactatttgactggaaatgcatagcctgagtttaatgatgaggaagcgttatagaagccccaaacaaggaacattccatcttacaaacaggaactgtttttaacatgtcagtgtcataaagaagaaaaaaatctaaagagatatgtcaactcactacgatatatgattttagactgaatcctgtactgaaaaaacattactgtgtctgataggcagccactaaaatggtcccacttccagatatttgcccctctgtataatcatttcccttgaatgtaggctgaactaacgacttactgacttgcttttaatgaatagaagatggtagaagtaatagaatgtcacttcaaagataaggttacaaagaaatgctggaagtttctacctgtggggcttgttccctcacttattctaaggtactagctgccatgctgtgagcagccctatggagaggaccatgtggtgaagatatgagagaaacttctggtcaacagccagtgaagyactgaatcctgccaacaaccatgtgagtgagcaggaaagtggatcctccccacactgagccttcagatg

SEQ ID NO: 847298 - DNA, 490 bp, Homo sapiens
taacttgtcagcaaaggggaatattctaatcctattcaagatcatcagatacattcatttttaccacaccgtgtataaaatggtgtgtttatgaaaaaacttagtatccatttatttctcctttgtgtattstaagacttgctttccttttttgtttttggcctcattaagtagattttatttagcattatttctttagtatgatcaagccaattatgaaattttgcacttttataaatggcattagctttccttatgttcaatatttccaactatgtcaatagatacgtttataattttatgatctttcaacaaggtcagttgagtttatcacctgtagttcagcatcagtgctgcaagtaattcttcgctggttgtctttggacctttaagaaagagaatgatacatagggttattaagcaactaattaacctttgtgtggtgtaatgtccctttctgcactgagattatgcatgttctcttctttca

SEQ ID NO: 847299 - DNA, 665 bp, Homo sapiens
cttcctttgtattccactgtgtgactggcacaggtctcttcctgctgtgggccggcatcaaaagcttgttgactgcgtaactgtgccgttaagctgcrcggggaaaggactcttagccaacatccttctctcggccccagcagaaaatccagcatggtcatatgactcatctgggacccagaacgagctaggtgttgggaaaacaaagtacaaagcccccagcgtgctctgttccccacagctcgggtcccaggactggggctccttaagctgagtaggctgagagctaggctggggctgcctgtcccctccagcccctgcctgcttgattctgtcttcacagcctgggggttccacaaacaagaaagccagtctggagatgctcccacgctccttccccccagcaccaaggcctaaatgtccccacttacgctgcatgctctctgacaccctcacagccagctcattgtaatccagatctccagcaaagtcagctcccaatagtccgccattgccagcatacatgccgccttctgctgctgccccatagcctccgcctgggccgatgtcagtgccatagggacccctgtctcctgcagcttcaccaaaggcaccgcctgcacccagggagcctgcaccacctcctcctgtgctcatggaagagc

SEQ ID NO: 847300 - DNA, 614 bp, Homo sapiens
tcagaacttttgagtcctaaagccagtcctgagtaagtcatgcataacctcctggtacctataacataaggtctgcagaatgcataatttcccaagccctgtagagattgggtggtgggtactgcagaaagaaggggaaggtttcatgagtaaatgtaataccaaagcaagttttgaatatgagtgcctcatgggtcggtacatctgtggacatctgttgttttgccatttgttctgccgagttggagacacccagaatcccctaggctgatcccttgactttccacacctgtccacatctgaatttttcgtttgtgatctaagccagcagcactctaagggcctctagaaactcagacgcgacatttctaggcacgctccacaaaacaaaaacaaaggacattttcctgctcctgactactcaggaaaggtttgtttctgctctggtcataagaacacaaagtgagaattttgtgctaggaagagttcagaaagagaacactatgakaaagagcacatgagactccaacatgggaaactagagattctgggaaaatcttggaacggatggtttgggtttatcacatgttgggacctcagactaaagcctgctt

SEQ ID NO: 847301 - DNA, 614 bp, Homo sapiens
aaatagtctataacttaattatgtctgtatgactgctgttattattttcaggctaactgtccaccasggtttgctcttggggcctacaggctgcccttaggcccttgccatgtgctaccctctgttcacaacagggtaattacttcatccttcatgcaagcatgggaatttctttctgaggcttcttcttcttttaaaggactcacctaattcatccttaataaataatgaattatgctcattcattttttattcatactgcaaaccatttaaatttatcaatttgctaagttctgtggtagatacagaagaaatgactcacttaattaggccagacccacccaggatcatcttcatttgttgaaacttaaagtcaactgataagtttgtaatgagctcataaaaagaaaacgctgcatgccaaatccaattctgatgtagtgcttgacataatggatattcttaggtcagggatattcttaggataggctctcgaaagacatttccttgttgttgttgttgttggatttttttccaacttttattttaagttcagcggtacatgtgcagaatgtgcaggtttgttacataggtaaatctgtgccacggtggtt

SEQ ID NO: 847302 - DNA, 584 bp, Homo sapiens
aagatttggaactgagagacaaattaatcactgttatggtccaacattttcctactcagcatccatttatacctctgtagatacgtgtaaatttccacactaaaacactaacactgttatgcttaacaagttgcaaatatcattcaaccaaataaaagacagtctcaccttctctgccaaaataagcaattcaaattcccaaaaatcatggtatcatctctaagtgaaaacaatcccagaatctttttctgggcaacttcatgttgaatgggaattttcttcttttcagtactaaactaactagcagaaggcaaagttgtggtaacagaaagcatctgcaagagtgttcataagtataatgaagggaacagctagttctgcatctcccttaatctctagatcacaaatcaagtgtccaagttcaaccaagtacaataactcatcatttactctgacctgaatgtcctccaaaatrtatgtgttaacttaattgccagtgtgatagtattaagaggaggggccttttggagatatttagaccatgagggctccatgttcatagatgagattagtgaccttagaaa

SEQ ID NO: 847303 - DNA, 519 bp, Homo sapiens
ttccaacttcaccattgtggtaaactttggttactcttactaccttaaacaacatcatctttccttcaagaaatgcttcaaaacacatggctttgttgatggtgacccttggcccakttgtagtgagaggttacctgtgggcttacccaaaatgagccaatcagagtcctcctgtgggattttgtatctgacagtggttggaaagactcctgtgacttcctaccagtaaatctactagaacgtgcccttgaaattgccagggaaagggtacactaccacacacagagacttacttgagaaaatgaagccaacatttataaagtgacagattcagtgtggagaaaattccaatgccattgtcacccctgtttccaatcctaccaccacatctacccttgcattctctagataattgaccaataagttgtctagtctgtttagggtaattacaattttgatttctatcattttcaaaagcaagaaagatggcaaatacaactacaaaacaccacatgatat

SEQ ID NO: 847304 - DNA, 626 bp, Homo sapiens
gcaagacacaaacttctgaatctgagtctaaggcctgtgtctttaactacaacattcatctgcctataaaaggaggaaawcaggatttgtagagcatgcacacattttattattgagcaggaataagaacgaaggcctctatatgcccaccgcaaagtgtactctgccttcagacagcttaagttcctaggtatagccttatggttaagctgtagattgctaagacctaacctataatacagtgcttcaaactgtgcatttcagagtcctggcatttctacctacctcgtggactggttatcattttagaatgaaccttttgcagtgctaattcctgggctaaataacaatagtaatgatgacaataataaaaatattcagtggtggtggtgatgatgatgacaataatgatgttatcactacaggttccattccaagtggccttgtttgtcagagaattgagcagaaagcaaattggaaatctgaaatgaaaagggttaactggtaaattgccatgtgtgaatctgctttggtttttgcattttctgtaagacaatttgaattctaaatggcactccaacccagagagtgtgaaatctgaaacttgcactgtgaaagtcatacaa

SEQ ID NO: 847305 - DNA, 608 bp, Homo sapiens
gtgctaattcctgggctaaataacaatagtaatgatgacaataataaaaatattcagtggtggtggtgatgatgatgacaataatgatgttatcactacaggttccattccaagtggccttgtttgtcagagaattgagcagaaagcaaattggaaatctgaaatgaaaagggttaactggtaaattgccatgtgtgaatctgctttggtttttgcattttctgtaagacaatttgaattctaaatggcactccaacccagagagtgtgaaatctgaaacttgcactgtgaaagtcatacaactgagctctgataagtaaccttaaataatttgagacttaatgcaccattaagatcatttctgttaccatcttgtaacaattgtgtggccaatgttaatagatagatttccttttagaaaggctggggccttcctccagccctgaatggcacgcctggactgtgagatgccaatgcatataccatctagccatagtggaagagtgattattcytaaaaagtttcaattaagctcctcttttgatcttgtctagctgccttgtaagttggttagatggagacttcaaactttgtgagcacatggtagg

SEQ ID NO: 847306 - DNA, 534 bp, Homo sapiens
tatgtctttaaaatgccatttttcttttttcttagatgtgcagtaatttattagaggaaacataaatggaggataaacgggagatggagcaagcgtaggtagagagagccatcagacagcagtgcaggtctgacaccatacgccccagtagtttgactcctagggagcttttatatcccttatcatttttctaagattaagctccttttgtttcctgattaatttggtggccacatctgtccggaacttgtgggacgtcctcctcttcatcatggcaggtactccagcatggcctgccggccgccgaggccgccacccacagcctacaggctcgccatcgctcattcccactcccgcagccccagctggagccagatggcgcgtcctcctgaagtaccatttctcttttgccccctttgttccctttacctttactgttttcatcttttaagtctccctgtttttccctttttttcrgtttctctctttttctatttcctttcctctagaactctagttttctacccgcaaaag

SEQ ID NO: 847307 - DNA, 375 bp, Homo sapiens
ctcagaggcagttcgtgaggattaggtggccacttacagtgcctggcagagcaagggctcaaggacaacagcttctggaactgcattccccaaaggcctgtgttttctccatctgtgtgggtgagacctagggtctcctgtcttcctatcctgtaagaggacctgcaggcgcccaaccctgcatcctgaattcatcaagaaagggaaaacagtgaatgttttttcatctacatgctagagctttggrcctaaaacatttaaaactgctcaaaataaaatgctattttaatagtatgagtcaaaatcacactgaaggaattttgaaggccacattctcaacttttaagtgcttctccccaagctgcccaccaagat

SEQ ID NO: 847308 - DNA, 625 bp, Homo sapiens
caaaaagtcacaaaaatatacatttatacatatacatacattacaaaatgtaaaaacagcttcatgatactcatctatatgggtcaagggcatggtattcaggcagmcttcaaagaggaggtgatggctgagattaacttgaaggacaagggttcccaaaaccctcctggaatggaaaacattgtcaaaaggcccagagaagtgaggccttcttgaagaactgcaggcagctctgtattccagcgcacaggagcccgtggaggggaggaggtaggagggagctggtcttcatctctgtgagacggtgcagtatgacagttatgacacagacccggggccaggctaccccgggttcagtctcagccctggacttgcccagctgcatggccttgagcaagtcgctctacctgtctgtaccttaatcccctcctctgtcacaaggatggaagtgaggattagagtcaatgcacccaaagtccttgaatgtcacctggcacgtcctgagcattgcatacatgttagctaacgcgacacaataatgaaccgtggagtgattttaagcagggaactgacctgaaagttgttcaggaagaccatcctcccagcgacatggagggtctaagcc

SEQ ID NO: 847309 - DNA, 634 bp, Homo sapiens
attgatctcagtcagattatttctctgagctttagtgtcctggtctgtagaatggaaatagaatatttccttcatagggttgatgtgaagattaagggatcaaatgtgcatgaaacacctaaagtgaaatctcaataagttggccacttttatataataataaatccttaatgctttagtacttacataagtaatgaattacattcacttcaaataaacacaacacagaaaaaccacttacagtaattataggctaaaataacaatgcatgacttgcctgctaatattatacattagtgagtggtttcttatttataaaagttgaaggtctttaagtagaagagcttctgcattttaaaaaaaaaaaaaaaaaaagagctgccgaattgtaacactaacattttgaaaaggaagcagcaaaaacttggattctagaagagattatcttctagtggctcttaagactgtgacagtacagctagtgtcaattcgatagtgattaacttaatccagtgtttaatgtaaagcacaacttcttggtagatktgaaatgttttcttatatttagggtccagcttatctgaaatacattatgcccgaaaatatgaactactcgccagaactctgaagttta

SEQ ID NO: 847310 - DNA, 631 bp, Homo sapiens
tactttatgccactgaattgtgtgtgtgtgtatatatatatatatatatatatatatatatatwttttttttttttttttttttttttttttgagacagagtctcgcactgtcgcccacgctggagtgcagtggtgcgatcttggctcactgcagcctccgcctcccaggttcaagcgattctcctgcctcagcctcctgagtagctgggactagaggcgcatgccaccacacccagctaatttttgtatttttggtagagacaaggttttgccatgttggccaggctgctctcgaactcctggcctcaagtgatcctcccacttcagcctcccaaagtgccgggattacaggtgtgagccactgcacccagcctgaattatgcacttaaaaatggttcaaatggtaaattttatgttaggcatattttattacaataagtaccacaaacaaggaggcccttggggctgtcaggcagaacgttctcccatatagattgcttgccgtccccggtcattcttgttttgtatcaaattatatacagtttaatctctcaatagttatgacattgattaaagcccctgatataagaagtacaaatacttaacacccctctcccgaaaatatccttg

SEQ ID NO: 847311 - DNA, 546 bp, Homo sapiens
catcattagacttacactgaattttgcagcagaaactttatagggcaggagagaataagatgatatattcaaagtactgaaaaaaacctagcaatgcrattattatactcagaaagattatacttcagaaatgaaagagaaataaaatatttcacagacaaagactaagggaatttatcaccgctagaccagccttagaagaaatgttcaaggtaatcttacatctggaagtgaaaagatgatcaccattatgaaaatgtgcaaaaactataaaactcactggtacagttgatactcaaaggagaaaggaatcaaaccttatggctacttaaaaccacccaaattgcaaaaataagatgggaagtaagaaacaaaaatttatataaaacaaccagaaaacaatgaagtgacaggagtaagtcttacttatcaatagtaaccttgaatgtaaatggattaaatttcccatttagaagataaaaactgggttaatagattaaaaacaacaacaatgaggcctaactatatgctgtttatgagaaactc

SEQ ID NO: 847312 - DNA, 546 bp, Homo sapiens
catcattagacttacactgaattttgcagcagaaactttatagggcaggagagaataagatgatatattcaaagtactgaaaaaaacctagcaatgcaattattataytcagaaagattatacttcagaaatgaaagagaaataaaatatttcacagacaaagactaagggaatttatcaccgctagaccagccttagaagaaatgttcaaggtaatcttacatctggaagtgaaaagatgatcaccattatgaaaatgtgcaaaaactataaaactcactggtacagttgatactcaaaggagaaaggaatcaaaccttatggctacttaaaaccacccaaattgcaaaaataagatgggaagtaagaaacaaaaatttatataaaacaaccagaaaacaatgaagtgacaggagtaagtcttacttatcaatagtaaccttgaatgtaaatggattaaatttcccatttagaagataaaaactgggttaatagattaaaaacaacaacaatgaggcctaactatatgctgtttatgagaaactc

SEQ ID NO: 847313 - DNA, 467 bp, Homo sapiens
tgggatccattgtttgttctcaaacctatttctgccagtcgtacttgttagtttaattragtaatttaactagatgtcacttgagtgaatagcacatgagtgaaagagttgtgttttctatgaaaacagatggatgctttggaaagataagatgctagaaatcgtacttttgaatgagccataggcaaaactacagacaggataggggaggggtatgtagtaatcttgaaagaatctcctttcagatttttttaagtgcccttaatttctaacttcactttataaaattccaacctggaaattgttgaagatgcctaatgaaagtagtttatgaagttcctatcagtagactcatgtcacaattagaagcctttggccccatatcaaaagattagtgacgtgtatgtgttaagtcaaaataaaatgtctaaggcatgcacgtatcatctttacctgttcaaccaatt

SEQ ID NO: 847314 - DNA, 577 bp, Homo sapiens
agagtttttgtaaatcccatgtctttaatctcatttcgctatttctcaacaccctattaacataaagcttaagcccttggcttgttgctttattttctraaattttaaatttcatcgaaactgcctccactaagctaacatgtgcttgagtcactggggagaagaaaatttccagagatgtgatagaaaacaaattgggcttgtagaggaaggattgttcggaattattatattgtcagacccattgtttatttcgctcacattttcctaggtctgagcgctggagtatttcttcaccagaaaagaattttggaggggcgggggaggttgttttgcacatcctttaaactcttcctatttaagcattttagaggaaaatgatgttttccttcatgaaaacagataaaaacaatctctaagtttccatttccactgagtccttgctacttagaagggaatacagtcctatacaaagatattaaagacctgtaaatatcttttccactaaatttctgagtataattttagtgctttactcacagccaacccatgagttcagttttgagatgagtgtttt

SEQ ID NO: 847315 - DNA, 635 bp, Homo sapiens
gctttttagttctttcttggaagaaaagttgtattggagccagacrgtgatacagatgctatcttgaaaacatcttttactgcatttcacttgaaatgcttccttacatgttaaatattgaaaacaactaaaacatagagttctcttttgattatccacctatgtattatttatggaaaatattttaaatctggcagtatccttagcctatattcctttgagtttgcctctcttgctcgtctggcttacataaactgtaccaacaacctaaacagcccatgtttataaaactcagcctgatgcctgcccgatcaagtattgcattggatttattcatttacagtatgttgaacacctaagtgccaggcaccacaatgtgctaaggtttcataacagatacggtgactgcctccatggaactccaatttgagagggagacagatgttaatcagattatcacacaaagatacaattacaagctagtttaaaatgtatgcacaggggacccgatttgactggtggtaaagctggtcaaggaaggcttcactgaagatgaaacgtttgagcttcatataaaataccttcacattgcccactatgtaggattaaccatacaatctaatgatcttaactgc

SEQ ID NO: 847316 - DNA, 635 bp, Homo sapiens
gctttttagttctttcttggaagaaaagttgtattggagccagacagtgatacagatgctatcttgaaaacatcttttactgcatttcacttgaaatgcttccttacatgttaaatattgaaaacaactaaaacatagagttctcttttgattatccacctatgtattatttatggaaaatattttaaatctggcagtatccttagcctatattcctttgagtttgcctctcttgctcgtctggcttacataaactgtaccaacaacctaaacagcccatgtttataaaactcagcctgatgcctgcccgatcaagtattgcattggatttattcatttacagtatgttgaacacctaagtgccaggcaccacaatgtgctaaggtttcataacagatacggtgactgcctccatggaactccaatttgagagggagacagatgttaatcagattatcacacaaagatacaattacaagctagtttaaaatgtatgcacaggggacccgatttgactggtggtaaagctkgtcaaggaaggcttcactgaagatgaaacgtttgagcttcatataaaataccttcacattgcccactatgtaggattaaccatacaatctaatgatcttaactgc

SEQ ID NO: 847317 - DNA, 574 bp, Homo sapiens
ttattatcagggctaataactgagaagtggcctyattctggactgataggtcacatctaggaagttggagtatcatgcagtaaatccatccatctataaatcataagctattttcataaaacacatccatcatggttcactccaaatctacaatctcaaaggatacattttgtcttagtgagatgtgtgtggggaggtttcctgtgcctaccatgtcgaaaatagtaaatgtttccctgagggccaattaagcatgataaatctcaagttgttcctcacaaagcaattgagtaagcaacaaattgtttaaaagttgttttaagatcatgctttcttagggagctagtacttcccacagtaactgtggcaccatattttgagataattcaagttatttttataggttgtgatagatgtgtctttatcaaaatattcccacccaaaccatattaatctttggaagaaaatggagactgcagataactattataggaattctatgagatcaagacatgttagtcatagaatatctctcagggtctttgggaaaacaaagtttgtctaaagcagtata

SEQ ID NO: 847318 - DNA, 566 bp, Homo sapiens
tgttctgttgcataggccagaaggcagtggcacgataatagttcactgcagcctcaaactcctggactccagcaatcctctcctccagccttagctactcaagaagcaagttgctgggactacaggcacaccccaccatatccggctaaagtgtttgttgttgttgttttgtagacaaggagtttttctatatcgaccaggctggtctagaactcctggcctcaagtgatcctcctgctttgccctcacaaaacatcaggattacaggcttgaaccactgcacccaccctgcaaagtaaaatttttatttgtgtgtgtgtgtgtgtgtgtgtgtttgtattttacttaataccgacagattttgtactaaaaatatcatacattggaataaattttaattttctcccattaaacatatagtatttagctgtagaggaaacacgttcagttttccaggragcccagtgattacatgaagataagacaactgtttggaatgtttacttcatcctcataatgtctaatataaatactgaatctccagagcccaagtgtgtctttgcaat

SEQ ID NO: 847319 - DNA, 579 bp, Homo sapiens
tggtgtgaatgcaaactagtacagccactatggaaaacagtatggagattccttaaagaaataaaagtagaactaccatttgatccaccaatctcactactgggtatctacccagaggggaaaaaaaaatcattatttgaaaaagatacttgtacacgcatgtttatagcagcataagtcacaattgcaaaattgtggaaccaacccaaatgcccatcaatgagtggataaaaaactctgatatatatatacaatggaatactactcagccataaaaaggaatgaattaacagcattttcagtgacctggatgagattggatactattattctaagggaagtaactcagcaatggaaaactaaacatcgtatgttctcactgatatgtgggagctaagctatgaggatgcaaaggcataagaatgatacaatggactttggaaacttagggggcaagagtgggagrggggtgacagataaaagatattaaatatggtacagggtatactgctcaggtgatgggtgcaccaggctctcacaaatatccactaaagaacttatgtaatcaaatattactga

SEQ ID NO: 847320 - DNA, 615 bp, Homo sapiens
attatggccactcacctcagcctcccaaagtgctgggattagaggtgggagccactgtgcccagtctcaatcctccctttcctttgtacatatctgagatcctcccacccyaccccttgcccaggacccttcctggctgggtgtcttctaggacggacagtggtggcagcagcgtcagtagagacagagaacaaggggtgaaatttgggaaggtaagcctttctttttcccccagggcctaggtgcaggttcagcccccctgctctcactttctccttgacttcatttcttcataagactggctagagagtgatgcgataccaggattaaattctgcaaggaaaatgcaagcttttagcttcaattccatcacttaccagaaggctccaaccctaccaaggtgaccaatcaacactgctgttggttgcctagaattcccttgagaacttcccccagtggagaggttattaggacaagattttagaattgctggatttccagctgtagtcactctaaaatagcacgaaaacaacacacacaccctctggcaacacttttctctccatctccactaatccccttgtgtagatggtgggcagattctccacataaaac

SEQ ID NO: 847321 - DNA, 648 bp, Homo sapiens
ttctagcgacctcaccgtgtctcccttggaaaacaggaatgaggggacttagaaaggaaggttctcattcctgaagttacccacacaagctttgacccctcacagtttctactgcattggtcctttccctcctctgtcttcccttcctcttcccattccttcccttttatttcctttcacttccaggtcagatacggagcctacctccctgccctccacagcctacctccctgccctccacagccgtatgctccgtccagccaaggactatctttctcaggcttgccatggggcagtaactatttctaaggcagcactgaaacttcaggaagtctaaggcattttttttttttaaagctaggaacaaagataaagggacagaatacgaagacctggtcctctggtccttcctcctccccaccttctcttttcttttattaaaacctctggagaatgacatggttgccatgtaaatgttcaggaagtggcttccatcctagccccgtgaatgccataggatctctggaggagagggaagagtcagatagaagtcttgaagccatctggggagaaagaaaggcttaccttcccaaatttcagccctcgttttctgtctctrctgacgctgctgccaccactgtcctccta

SEQ ID NO: 847322 - DNA, 613 bp, Homo sapiens
tgtgttagctaaacatgtctttaactcccagctgcctccatcttagtcatgtcttagtcgtcctctaattcattttccatgttttaactcataataatgtctgttgctaacttacccaaaccatcgcataacttcccatcagccctaggataaaatccagatcctgtaataaaataaactaaagtctgtcatctgagtctaagcattacttcctgctgatcttcactattttatcttttatgctttattggtgctaaactacttccatttccctacatggatcacatagtgcatattccagtcctttctttttacttgctttccttccacttgaaatataatttcccttcctttcttttccactgcccctgcctaaggaacttcaactcagccctgagcctagcacaggtgacaccccgttaagggatgccctgaaccctgtatcttcttgccttgctacctgttaccttggtcattctttcttgttacacatagtctgctgtgcttggattgtgtgccagtctcttcacctgtrtatgaattaatttactagaagccagggaccaagttgtcttctatttatcaccagtgcctcacagtccctggcctgtgg

SEQ ID NO: 847323 - DNA, 411 bp, Homo sapiens
tatttatcaccagtgcctcacagtccctggcctgtggtaggcacaaaataaatattttaagctgagtggagtcgaagtgaatgacaatcctgttgctgaggcagtgcatgaaataaaaagattcaaatgcaaagtgccaaatgagagcttagtgactcaaaagagagaacaattactctgggctagggagggttggatgaggcagaatattcgatagaatcagcattgtgttgcacgggcttttatgttcctttcagtctccacagagctacagtaaatggaggaagtggttgattcgaaagtttcagggagggaacagmaggcctctcttctgttgagtaatgtgtcccttaaagcacgtgaaaaatcaagcatggaacaggcttttatatgaataaacaaaataattaa

SEQ ID NO: 847324 - DNA, 401 bp, Homo sapiens
acaatactataagctcttagagcactgccaagtatgccacagtatgtttcaatacatgctaatcattattagtgtcattgttcaaagcacagatttgtgctagatcccacctgtctggaacacataaccaatgagaatgcagaatccagccctttggtgtcttctccctacaactccaaggaacccattctgagcttccagtaaggcacagactttactactttggcaaagaatcagcaccgtagtatatattacaggtgcacaaaataagtaagtgagtgaataaatgaatgatcagataagaacacatatacattaaccacatcactctgtgagaaatgctggctgtatgttgatttgtycaacagaaaactcaaactctatattctctggttaaaaat

SEQ ID NO: 847325 - DNA, 280 bp, Homo sapiens
ttgccaaacacccttgtccttcaaagatggttcaaaatgtgagtgtgaaaaagatatttattatccttctaacatattaatagctraggtattactacatcttttctccatgttttgcaaacatgtgtattatatatgtttaaatctatatttatttctttacatatccataaccagtaaaacaggtgagatcacatcaatattccaattcctgtccaacctcacaaaattgaatttccctctgttccatgtttgcagctccctctactgacagtaagaa

SEQ ID NO: 847326 - DNA, 551 bp, Homo sapiens
ggctttatgacaagcatgtgctatgtagagttaagcacacagagatccaaaacctttgagatcatttctgtgttaagtgaaagtcaatgtataatgagcagatttcaaaagtaaatatgtgtatgtcatgatagtccttaaaaaatgcttttaacattatccactcattttaacataaaaaagtttctaatacataattttataaaagaatcataagaatcctctaaaacaaagaagaatatttaagggttaaataatttttttgtcacaaaaatactatcttggagggaaattagagtgtttggtatgtcttgtgattggtttgaaaggacaagacaaaaagttttggttaaatgcgagtgtacctttctgcaagacctggtatcatctggggtatagaaatggcatcaggcatttctatttatttatataagatggagggtgctgcagtcttggcccttgttgcagaactttatgcaacacctgtgcccgtgtttrcagggcccttctcatcatttaagcctcattaaccacaccagaactaaattgca

SEQ ID NO: 847327 - DNA, 621 bp, Homo sapiens
tacaaaatgtgtattgttgaaaagtcctattctacattgataaaatgtttttaagaatgwgagatttaataagccctgggcaaactacttttatgaaatgagcaaatattctccatttatctagcctataaatttgaattgtcaggttaatatacacctacacttaatatagtaatgatcatgatgatataaaaccaccaattagctctagatctgtgatcagtcttgtacataacatagtcaaagataaaacactcttggccttaaggagcttgcattataagtcagagataaaatataaagagagtttgtattcataggagaccagatctggaaaggcctagagatgggaatgaaaatgccttctgagttggcatgagaggaaggccatagtattatttagtgatattttccttttgtgtcatgaaaacagactgtcatttagccttcccaactaagatctcaggttttgcgtgatcttcctaggaacactgtgaccttttcaactggcctcttggcgaatcatcctgggcagcaagatggcttccctctctgggatttgatggctacctacagaatctctggtgtccttaggtaaaggcctcatgtgtccagtagttg

SEQ ID NO: 847328 - DNA, 528 bp, Homo sapiens
agcaaatgacccatgtctgggtgtgtaaagatacagggagacaaagtgaacagcactttagtaaatgaaccagtgtctgggcgtgtaaagatacaggcagaggtgaatttcggggatgggtggaattagtctgcatggtttaaaaagagggttttgttttttkttttttttaagtatcaaggtcacatggggcagcagtctagtcagtagaaacgtggagataaacaacattgagagaggctggggcctgtggaaaaattagtctaagtaaaaagcggggaagggataaataattagcttattggtgttattgcgacatgagtaagactttttatccttgaactatcagtaaaaatctgccacacccacagataccttatatacatggggtgtgtgtgtgcatgtgtgtgtaaaaaatgaggaaaatgggctgtatttcattctacaggcacagccttttatagaaaatcagcatacacaacacaggcatgttgatccttaaaatgaatgtcttcaagagtagcctta

SEQ ID NO: 847329 - DNA, 635 bp, Homo sapiens
ctttcccaccaatgatgtacaagagtccacttttctctaaatccttgtcaacacttgctgtcttttgttattgtttgtttttcataatagccattataatgggtatgaggtgatacctcattgtggttttggtttgcattccctggatgattagtgatgttgacgatctcttcgtatacctgttggccatttgtatgtttggagaaatatctattgaagtccttttcgcatttcttaattgggctatttggttttttgccgttcagttgtaggagctccttatgtattttaaatattaattacttattaaatataaggtttgtaaatattttctctcattccatagtttgtttcttcattctgctgattgtttcctttgctgtgcagaagctttttagtttgatggagtctcatgtgtgtatgtttgcttttgtcaactatgcttgcttttgtcaactatgcttttggggtcgcatgcaagaaatcattgccaacatcagtgtcaaaaaacktttttctatgttttcttcttaatattttcatttcaggtttcaagttttagtcttcaattgattttgagttgatttgtgtgtatagtgtgagataaggatccaatttcattcttttgcatgtga

SEQ ID NO: 847330 - DNA, 620 bp, Homo sapiens
aactactggacacatgaggcctttacctaaggacaccagagattctgtaggtagccatcaaatcccagagagggaagccatcttgctgcccaggatgattcgccaagaggccagttgaaaaggtcacagtgttcctaggaagatcacgcaaaacctgagatcttagttgggaaggctaaatgacagtctgttttcatgacacaaaaggaaaatatcactaaataatactatggccttcctctcatgccaactcagaaggcattttcattcccatctctaggcctttccagatctggtctcctatgaatacaaactctctttatattttatctctgacttataatgcaagctccttaaggccaagagtgttttatctttgactatgttatgtacaagactgatcacagatctagagctaattggtggttttatatcatcatgatcattactatattaagtgtaggtgtatattaacctgacaattcaaatttataggctagataaatggagaatatttgctcatttcataaaagtagtttgcccagggcttattaaatctcwcattcttaaaaacattttatcaatgtagaataggacttttcaacaatacacattttgta

SEQ ID NO: 847331 - DNA, 550 bp, Homo sapiens
gcaatttagttctggtgtggttaatgaggcttaaatgatgagaagggccctgyaaacacgggcacaggtgttgcataaagttctgcaacaagggccaagactgcagcaccctccatcttatataaataaatagaaatgcctgatgccatttctataccccagatgataccaggtcttgcagaaaggtacactcgcatttaaccaaaactttttgtcttgtcctttcaaaccaatcacaagacataccaaacactctaatttccctccaagatagtatttttgtgacaaaaaaattatttaacccttaaatattcttctttgttttagaggattcttatgattcttttataaaattatgtattagaaacttttttatgttaaaatgagtggataatgttaaaagcattttttaaggactatcatgacatacacatatttacttttgaaatctgctcattatacattgactttcacttaacacagaaatgatctcaaaggttttggatctctgtgtgcttaactctacatagcacatgcttgtcataaagcc

SEQ ID NO: 847332 - DNA, 279 bp, Homo sapiens
tcttactgtcagtagagggagctgcaaacatggaacagagggaaattcaattttgtgaggttggacaggaattggaatattgatgtgatctcacctgttttactggttatggatatgtaaagaaataaatatagatttaaacatatataatacacatgtttgcaaaacatggagaaaagatgtagtaatacctyagctattaatatgttagaaggataataaatatctttttcacactcacattttgaaccatctttgaaggacaagggtgtttggcaa

SEQ ID NO: 847333 - DNA, 402 bp, Homo sapiens
atttttaaccagagaatatagagtttgagttttctgttgracaaatcaacatacagccagcatttctcacagagtgatgtggttaatgtatatgtgttcttatctgatcattcatttattcactcacttacttattttgtgcacctgtaatatatactacggtgctgattctttgccaaagtagtaaagtctgtgccttactggaagctcagaatgggttccttggagttgtagggagaagacaccaaagggctggattctgcattctcattggttatgtgttccagacaggtgggatctagcacaaatctgtgctttgaacaatgacactaataatgattagcatgtattgaaacatactgtggcatacttggcagtgctctaagagcttatagtattgtg

SEQ ID NO: 847334 - DNA, 620 bp, Homo sapiens
gatagtggaataaagtgcattaattcatgcttttttacccatgagtcaggcgtgaaactccaggactccagatacaagcctaagtgccyggttcactactgtattctgcttcatgttatctcttttgaagaaaagcctagttgggtttcatatttcaaaactttttcttgtgaaatctctcatccacttcatctctaattgaaaatgcctcgctctggaaatcacaaacttttgttgtttgtttgattcaaaataaatcaaagtgacttaattttgaccactcacatgaagactgaaaacctttataaccatcatggaaattacagaaggtaaaggtaaatcttttacttttatggggctggcaattacgtttttgcatgtgtttagcacatagaattcttcttggtaagtgtaaaatgctgcatatgtacagataacttgtcagctaaaaatgcttaaggctctagtctgcattccaacaggatgtgtgtgagcagatgtttatttcaacacttcatcagttgagccatcactgtatattaaagagtaaaaagataacagctgaaatggatgaaggagtgaacaatgaaagacacaatgttactccgattgcttagaaa

SEQ ID NO: 847335 - DNA, 630 bp, Homo sapiens
agactactggatgaatttattccatttgcattttatgttatagtcttctatagttcctcaaatatttagtatgaccaaaatgatgcagtagttttacatgatatatgtaaatagaaaaatcatttaaactttatgttatagatttatcattttgatgttgctttatatgtaatatatggtaaataatacagatttaaggatttttttgccaattttttgctttttaaaaattgataaggctgggtacagtggctcacgcctgtaatcctagcactttgggaggctgaggcgggcagatcatgaggtcaggagttcgagaccagcctgactaacatggtgaaacctcgtctctgctaaaaatacaaaacagccgtgtgtggtggcgtgcgcctgtaatctcagctacttgggaggctgaggcaggagaatcacttgaacctgggaagtggaggttgcagtgagccgagatcgtgcctgggcaaccaatgtgagactccgtcccmaaaaaaaaaaaaagatatataattatacatatatatgggtgatatttattattggtgtatatgtatataatatatgtatatattatatgcatataatatatgtatatattatatgcatataatatat

SEQ ID NO: 847336 - DNA, 554 bp, Homo sapiens
aatttctcaaatggaaaaaaaaggatcatctaaagagattaactttcttgactaacattacacacttagtgactgtaacttaacccaaaatcttctaatcctaggtaaaaaggggtagaaatctttaatttatggttcttattaataaagatgaagtgtttcaatagctggtttttttgagatgtacttttgtatttatttacccctgagcaaatatgatactcaaatttaaagggagaacacatttgtatttctcattaatgccacctccattgtcttagcacctttattttccttaactctttaagagtgttagaataactttataaatataacactttcaaagagaaattaccattttttggaaaatcccaggctcttctttattctccttgacctttcccttggtctttctattgtatttccackgaccataaaccttggattctttgggcatcaatgacctacaagtctaagtttctccttaactgctctttcccccaattctttcactggatctcctttccttttccctatagcctatttgggcaatt

SEQ ID NO: 847337 - DNA, 687 bp, Homo sapiens
gtgcaagttgttgttggatctactattctaaggtccrgaggatggtggccctcttctcacagatacatgaggtagtgccccagtggagactctctgtgggggctcccatttcacatttcccttccacactaccctagcagaggttctccatgacagccctgctcctgcagcaaacttctgcctggggatccatatgtttccatacatcttgtgaaatctaggcagaagttcccaaacctcaattcttgacttctgtgtatctgcaggctcaacaccacatggaagctgccaaggcttggggcttgcaccctctgaggctacaacttgagctgtaccatggtccgttttagccacagctggaacagctgggatgcagggcaccaagtccctaggctgcactcagcagtgggaccctggacttggcccgtgaaaccatttttccctcctaggcttcccagcctgtgatgggaggggcttccatgaaggtccctgatgtgctctggagacattttccccattatcttagtgactagcaattggttcttcattacttatgcaaatttctgcagctggcttgaatttcttcccagaaaagggtttttcttttctattgcgtcatcaggctgcaaattttctaaacttttattctctgcttcccttgaacactttgccacttagaaatttcct

SEQ ID NO: 847338 - DNA, 645 bp, Homo sapiens; identical to SEQ ID NO: 827588

SEQ ID NO: 847339 - DNA, 615 bp, Homo sapiens
tcgcagggaggagctcgggggctgaggggctcaggagagtctgtcttgggaagggaaggcccgaaggccctggggagctgctgagctgtgacctggctggaagctgggagggtgaygtccctggaaggaagacactggcatgccgcagccaggtgcaggcagccaaaggacaaacccgcgtgtgagtcttcacgcccagagactggaggtggaaaggtgggtgccaggggctggggcaggggtgtgagtgttccatgaggacagagcttcagtggggaagatggagacttctgtggatggagggaggtgacagccgcagcgtcaggtgaatgtgctcagggccactgaactgtgtgcttaaaaatggtaagatggtgaattatgcgtattttaccacaataaaaagaaagaaaaaagaaaaaaaaaaaggatatcaaaagcgacagggagcccaggcagagggtgggtaaagtgaggagggctggaaggtgacagtgagagccgttttcatccaaactcccaattccagcatcgctgggcagcttctgtttgaagagaatggaaataaacgctctgccaggagagcaggtctacacaggacaagctctgggacag

SEQ ID NO: 847340 - DNA, 470 bp, Homo sapiens
gcctgacctgggcagaaaaaattaattgagaaatttctcaaaaatttatcacacttaaaacaaacttgcagatccatggccctcagcaaatccaaagcaagataggcacaaaaccataygtaggcagtcatatcttagtcaaagtgctaaaaccaaagataaaaagaaacttttaaaagcagacagaaaaaatgtcacattgcacaacagtgacacagatgatggctgaccttgtatcaggacagtgaaggtcagatgacaaaggaatgacatttataaaatgctaacaaaaataaaccatcaacccagaattctgtatgcagcaaaaagctttattaaatgaagacaacatgacttcaaaagctgtaccctaagcaatacttaaggaatttcttcaagttgaaggaaaatggcattagatggaaactgatcaatgaaaagcactggaaatagtaaatattgagatgaat

SEQ ID NO: 847341 - DNA, 552 bp, Homo sapiens
gacagacacagaccctgactgtttcagcccctagatccagccgtgcctgaaactggtccacttacatgaactaaaaaattccttatttttcttatggttgtttgctttggtatctatcgcttggagctraaagcattctgacataacctctttgtggtcccagattaagaatgtcttttttcctggcagcaactttcccttttttatgaagctgccaatcaagctctagaccaccatgagtggccccttgcagcctgagttgctcagccagagatgtttggttggaattcattagcctaggagtggtcttatcataactgtaaaggtatattctatgtgggttttctgaaatatttgtaatggcttaaggcagaatcagctaattatggcatacagaccaaatctggcctgcaggctatttttgtaaataaagttttattggaacaccattcatttgtgtattacctgtggctgtttttgtgctacagtggcagagttgagtggctgtgacagagaccacatagttcacaaagcccaagatatttatgatcg

SEQ ID NO: 847342 - DNA, 577 bp, Homo sapiens
accaattttctgtatttccattctcacactgctataaagaattacttgagactaggtaatttatgaagaaaagagatttaattgactcatagttccacaggcttaacaggaagcatgaatgggaggtctcagraaacttaaaatcatggcagaaggcaaagaggaagcaagcaccttcttcacacggtggcaggagagagagagagaggaaagggggaattgccacacacttttaagccatcagatctcatgataactcaatcactatcatgagaatagcaaggaggatatctgcccccatgatccaatcacctcccaccaggcccctcctccaattcgacattagatttggacagggacacaaatccaaaccatatcacttattatatatgtaaaagagtttattttaggaagttgattctgacgggttagttttttgcaagtaatacagtgagaaaaatagatcaccgttcaattcttgcttcaaccactgactatgaaatatgtaaccaatcattttgcctatatctttactgcctttatttcatctagtagaagagatcaaatactttaattt

SEQ ID NO: 847343 - DNA, 594 bp, Homo sapiens
gtatataccacattttcattatccagcctattattaatgcacatttaggttgattccttatctttgctattgtgaayagtgctgcaatggacatacacgtgcatgtgcctttatggtacaatgatttatatttccttgggatatgcattcctttgggaataatgggattgctgagttgaatggtaattctgagttctttgaggaatcaccaacctgctttccacagtggctaaactaatttacactcccaccaacagtgtatgtgttccattttctccacaaccttgccagcatctgttatttattgactttctagtaacagccattctgactggtgtgagatggtatgcatttctgtagtgattagtgatgatgagtgatttttatatgctttttaaatgcatatatgtcttcttttgaaatgtgttcatgttctttgcccactttctttttaatggggttgcttgtttttcgcttgtaaattttttgaagcttcttatagattctggatattagatctttgttggatgcatagttggcaaatattttctaccattctgtaggttgtctgttactttgttaattgtttcattt

SEQ ID NO: 847344 - DNA, 597 bp, Homo sapiens
tttcatttttgagaccagatgatatggtttggctgtgtctccatccaaatctcatcttgaattaccacatgttgtgggaggaacctggtgagaggtaactgaatcattggggtaggtctttcctatgctgttctcatgatatgtgaataagtttcatgagatctgatggtaatataaggggcagtttccctgcacaggctcttctttcgtctgccgtcatgtaagatgtgactttcaccttctgccacgattgtgaggcttccctagccacatggaactgctagtccaataaacctctttcttttgtaaattgcacagactccggtatgtctttgtcagcagtgtgaaaacaaactaattcaccatgttagtgttcacaagatgttcctttttcaggagagacttctcttttatcagagcaaaggtacatctattctcatataggatacgacttaaaactccttaaatagctgtcctgctcccactatgatgtcttcytcaatttggcaaatttatcctgattgcttagcttagtcaggatcttctgaactactgatttactacatgtgtctaagtatatatttgtatgtttgcttg

SEQ ID NO: 847345 - DNA, 616 bp, Homo sapiens
atttaaggtgacacaagagtttataaaaataagtaaacaagtgtaaaggaaatttatctttaaaaaatgtggggtttttttgctgctacatgaaaaaggcaagaaaaaaatgtttttaaatgacactttaaatctgtcatataaactctaaaatataacagtctctctttcaaatttgtaaatcatatttttagttctcccagagcattaaaaaacctattattgatgctaagcaatatgctaataggtgcttggtttataagagacttctattttgttttgcagtgttattcatgaatctagccacactgtggagaaactaggtgcactcacaatgctgttgggagtataaattggtctaatacctgtggaggcagtttggcattatctatcaaacaaacaaatactcagcttcctgagtagctgggactacaggtactcaccaccacgcccggctaatttttgtatttttttgtaaatatggggttttaccatgttkcccaggctggtctcgaactcctgaggctcaagcgattcacccagctcagcctcccacagttctgggattacaggcgtgagccagcatgtctggcctgtagcttcttttatatacaca

SEQ ID NO: 847346 - DNA, 619 bp, Homo sapiens
tgcactgttagtctgatgtgcttccctttgtaggtgacctggcctttctctctggctgcccttaacattttgtctttcatttcaaccttggaaaatctgatgattatgtgtcttggggatgatattttcatggagtatcctacgtgggttttctgcttttcctgaagttgaatgttggcctgtctagctaggtttggaaaattcccctggatgatatagtgaaatacgttttccaaactggtttcattctcccatctctttcaagtaccccaatcagtggtagatttggtctcttcacataatcccatatttctcgaaggttttgtttattctttttcattctcttttctctattcttgtctgcctgtcttatttcagaaagacagttttcaagctctgagattctttcctctatttggtctattctgacattaatacttgggattgtattgtgaagttcttataaagtgtttttcagctctatcaagtcagttatgtccctctctctatgggctattttaactrtcagctcctgcattgttttatcatgatttttagtttctttgcattgagttacaacatgctcctttagcccagtgaagtttggttttatccacat

SEQ ID NO: 847347 - DNA, 644 bp, Homo sapiens
tgaattctagctagttgctttaatacataagcaggaaaaaatttccccaccaaaattcaagggtctttcctaaacaggtcattaatcaatgccttctcttcaggagcccttgaaatagcacatttatcatgaatccatgaaggtgttttaaaaaagtctcccagagatacttactggatagacattttcttccagttcaggatccagagttctggcaccaactgcagaatgaagaaggaagttctcagccaggggcctttttatgccttctaaatcccttaaaaggagttatggctttgggagcccttccccaccccttcagctgagggagggggaacagaagttgctttcagctctcagatccccctgatgcttggctttatttgggcttgctgttcccataacagttgtttggctgttttccagagacctcaatccttcccaaggagaatgagaacagattagaaagaaaggagctaggtgggagtggccagcgtcaggcctgagctgatcccagtcaccccactggaccttggcaccattctctggggcccrcctccccctaatacctctgtgccttcattctcaccctcattcattaactcacttatttttaaaaatatctattacataccacctatgaa

SEQ ID NO: 847348 - DNA, 680 bp, Homo sapiens
gttactaatgattcttgcagttgaaaaaggcaggatgactttctaaccaggtattactgtgattctagaacactttcccacctttaatatccaacttcgtaaggattagatttggggatatttttcctttgtacttagaatatctgccagatgtcttgtagttgccagccatcctcagctgcgtgcctgcctgactccaaaacttttctgtaggagctggcaagacttgcattaaatatgacagtttcaacatacttgttggcttaagtccagccaacactgactacccagggtaactaaatgttcttattatcttaaataatctaggcctaccccagatatggcagcagtgtgactatctccctaaactcataggaagtatataaaagagatgaaagacctaagaaaaatctgggtattataagggaaatagatgctgagtgatcaatcaataaatgtctgctacagcaagagagaatgttccttgttttataattttcttctagacacagtgtcatttccagattttcacggcagtctttcctcaacacaaaattcacaaactaccttytcctctataaatctccttctaccagtcattttcataccctgagtttggtcagatttcccatgtatacaatatagttacaaagcagccagccaaatcatttttctgcttt

SEQ ID NO: 847349 - DNA, 582 bp, Homo sapiens
tgtatgtccttccttgtttcagtgccatagattatattctaatgaatttttttggtatcacattttacagtgacatttgaattttctttcaagtctcatattcatcagaacaatcagaagtggaaatagctgtggtttgaatactttgatcttgtctacctaaataacaggctttctaaaagaaaataatgtttatttgggaatagggctttgcagtgggaattctgttgttacagtaaaccatgtgcatatacagggaggtaaaagaagaccaaagtttttaaaggaaaaatgaggaggatttcataattattttgagataattattcttggctacaagggtcaataaagtgcctccattctgaggttggaccggcagttgctggcagatgtcctcacagaagtttttttttttttaaaaaaaacaacccccaccacccccccaaaaaaacagtgttactgtgttgcccaggctagatgtaaactcctgggttcaagcaatcttcctgcttcttgggtagctgggattataggtgtgtatgtaycatgcacctggcttgtttttgtttcacgttttgtata

SEQ ID NO: 847350 - DNA, 475 bp, Homo sapiens
taaagataataatattaattcttgcaaaatatggtaattaagaaaattaatcttttaccacaaaccctcgtagcagagcacatcttcccatgatctttttttttttaactcctctataaatgaatattgtacctagagtggatgcattcctcttcttccttttgggaacgccctactctgtctatagagtaagtggacattcaccacttcactgtcttaaacttgcttttgctttggactgtggacttgccctgaattctttcttgtgcgaaatccaagcaccctctcttgggatctggattggtacccctttctggtaacaacattatgaagcctccacagaaatccctgaagtacggggttctaagagcttctgagttggtgaacacatccatatcccaaaaaggtcatacaccctgattccatggggacagaagttccygcacttaggatccttccagatcttgttttatgt

SEQ ID NO: 847351 - DNA, 692 bp, Homo sapiens
gactgacataggttgggcttgaaatatgacctgaacagagcagttttgccatttgaatgtggagccttatattgaataaactgaaacttttccacttggttttttccatctctttggagaacaggactggacactaaagcaggctctggcaggagaatgtcctggtcttgcagaatcttctggttgctaaggctgaggacacagccccactgtcctttctctggcaacaaaggacatttgtcacatgttggggcgacttatgtttctaatttgggacttaactgcactagtaaaagacagcaaatgtggaatcagtagaaaggtagagattgtgcatttgaatcaagactttcttccacttcacattaaagtgtaaaaacttaatgctttgcatttgaataccttctgataggtggctaggtgtctcacataagcgtaaaagatgagtaatgcaggtggtattatcattcttatgggcaagaaggagaggctgtaaatcaagttaattgtataaaagcataaagctttggggacgaccagtttaaggtcacacagggagttaatgttagccagatatctagacccactaaggcttcatttttgctctaaaacttatgaatggagagaaactccatttacaaaagaattcacttggaarctactaaaatgtatttctggggatcctgcaatga

SEQ ID NO: 847352 - DNA, 546 bp, Homo sapiens
actctcactgtgacactgggcttgttaactgggtgttgttaactctgatttaccgaggcctaaaaagcctcctcattttccccttgatctgagcatcagaacgagcattargatcaggtccatctaattctttttttttttttttttttttttttttttgagatggagtctcgctctgtagctcaggctggagtgcagtggcgcaatcttggctcactgctacctctgcctcccgagtcccggttcaagcaattctcctgactcagcctccggagtagctgggattacaggcatgcaccaccatgcccagctaatttttgtatttttagtagagatggggtttcaccgtgttggccaggctggtcttgaactcctgacctcatgatctgcctgcctcggcctcccaaagtgctgggattacaggcgtgagccacagcacccggccaggtccatctaattcttaaccattttgctatactgctaaatacagaaaggccaggcttacaatgtttacatttattatgaattattaatgacttataaact

SEQ ID NO: 847353 - DNA, 607 bp, Homo sapiens
cattttatggaaaattattgagcacagtcttttcatgatccctgtatgctgtgtgtcctgagggcactaactcagagtgtcctgttactccctcatcagtgygtcacctggacaattcactgagctcgttctctctctctctctctctctgtgtgtgtgtgtgtgtgtgtgtgtgtgtgtgtgtgtgtgtctatctgtctttctctttcattcttttccatttggccctgttctgtcccaacatgaaggcaataatttgttacctcattaatggatctatccttttagttttttaaccacttccctatgctacccatgaaacctagttggggctctgttgtgtctgatttcccctggcttattctttactttttcctccttttccaggctcagcagggagctgctggaggtagtagagcctgaagtcttgcaggactcactggatagatgttattcaactccttccagttgtcttgaacagcctgactcctgccagccctatggaagttccttttatgcattggaggaaaaacatgttggcttttctcttgacgtgggaggtgagtacctttctatgaaggtgataaggatccactgagtcttccat

SEQ ID NO: 847354 - DNA, 314 bp, Homo sapiens
acagccaaaccatgtcattaatgtaatttctgagcacatttgatgtaacttcttaacacatgcagagcaaccaccacctatgtttaagytatggggtgaatcaatgctttgcagcaatataacaaactctttgaaagattctcccaggttgcagtactcagtaggacttctgaataaaattaactttaattatttaaaagcctgtttttttttctttagttgacataacataccaggatattgtagctggaaatacataggaggttcttgctctcacgaaccttacattccagtaaggaaaacagacaataaga

SEQ ID NO: 847355 - DNA, 633 bp, Homo sapiens
tctgggccaggaaccttggactgtcttgggtaaaattcgccttggatcctgacttgyggttgggaccagggttctgggtcttagcagtagaatggaatgtcttgtttcctactgagactggaaacaagactggaaacaaggtgaaccttcactgaactgatcgaggtaggccctgttctgtttgtgggggaccatgggataaatcccatcctccctcaaaaggaggccctgaggtttgcagcttgcctgtagccacctagaacaagcagtgaaatggtaattcttcgggcctgggccctagcaaaaggcagggggtccttggtgctctgttcaaactcccggcccctctctactgctcttccctccacccccagagtgctggcctccagacattccttaacctttgctttgtcttttgcccagaaataacgaatctgtcccagatgactctgaatgtccaaggccccagctgtatcttaaagaaatatcggctagtcctccatacctccaaggaagagtcgaagaaggcgagagtctactggccccaaagtgagtgttcttgtgccagctccagctttgcctgctctcgacgtgccaggcaagttgtgcccacacctcctcccagcaaggtcc

SEQ ID NO: 847356 - DNA, 586 bp, Homo sapiens
ccaacccagaaaaggaaaaaaaatatattgttttcctcttaaattgtgttaaacagttgtttcccactttgaaagttcattatatttatttgtcatcagggtaattgatctacacttgttgctaagtctgttgcttgcctcctgatgaacagattcattaagctcatttctaatctctgtcttctaaattcaataagcactataaaatttctttccttgtatgggaattctaaggtctttttttttttttcctcaacagcttgaattcctgtattctgattaagatagatgaagtatttgcattctatccatattcataatcttctttcagagtcaacctaaaataccacatttgttgcccaggcagacacaggcaatgtgttaggagagctctgcagctttttgtttagatggatgacgacccatctcttttcaaatccacagaagaggtggtcactaggtgaattcaggctgttaagacatcagaacagtcatagtgtcttttgtgtgwgacagaaactgtaattaatgatttctcccccttttttgctaaagaaaaaaagagcgacttgcagttgacagacat

SEQ ID NO: 847357 - DNA, 434 bp, Homo sapiens
tattttcatgttgtatgtatgtctggatttatgatagtgcccaatcacttatcttctgcaggttcctggggagcagagcaacgcagtgaaactgaaattattaagttgtctgaattcataatagttggacttgcccctccatgaaatagcactgcacagccaattggaattcatggccctagccctttattgcatcatcatggtttatagtccataacaaatacaaatacagaaaggaaccataacaatatgatacatctgacctgccagcctaccttctggggctttgcttgatgagcttgcattctcaatgcatgggacaaaagcaaagggaacactctctgtttaccccttytaaggcctgaccttgggtccctagtccgtatctttgaccttgtcatcaccaccacaggcagccaatctcaactgggaaa

SEQ ID NO: 847358 - DNA, 582 bp, Homo sapiens
ggctcaccacaacctccgcctcccaggtacaagcaattctcttgtctcagcctcccaagtagcgtgcattacaggcatgtgccaccatgtccggctaatttttttgtatttagtagagayggtgtttcaccatgttagtcaggctggtcgcaaactcctgacctcaggcgattcacccgcctcagcttcccaaagtgctgattgcaggcatgcgtgactgcacccaaccgatggttttaatgaatagggtgcacataggaagccagcttcagccaccttgaccttggtgggagattgtcaattaccacttcaagatcaaaaaatgcctgagccacctgggaaagacaatccttggaggtttatttcagtgctgtggatcccagtaatgtgtcacaaggtggaggagaaccacctttgtgcacagtgctaggagcttgatatgcaggaaattattcaactcctctgcactcagatcaattcttgcacttccctgatttactctttatcacagggaggccaaaccctgcaaacaacattccaaggttctcttgccaaaagacctcacctctgttcagttcagct

SEQ ID NO: 847359 - DNA, 526 bp, Homo sapiens
ccagatattaaatatataagcattctactagaactaaagttaagaatttgaaatagtctcatgtgagtaattaaaataacaatagcatctttttcaagaaagttttttttaatatggtggagataatgacatggaaaaaagtagttaattatttttggtattcccgtatttcatcagtaggttgccatagaacataatagttatataatcaaacagcagaataattttatatgaggtttattgatacagaaatgtttggttcagtgtttgtcttccagttttgcagattttcttttcgattttaaaactggagaatacattaaaaccagaaactttcagcctctataatgccctcaaaactcagcaggttttgaaaatgcctcttccttctcttctcctccccataatcytgcttatttttggcattaagtgagtcaggggttccaaacccaaatacgtttttcaaggctatgtagtcagtgtgaatgagagaagtaaatctgttgggtcctgtgccacactggag

SEQ ID NO: 847360 - DNA, 407 bp, Homo sapiens
ttccgttggcactccagtgcaccccctctgctctccctgtctagccctccgttggcactccagtgcaccccctctgctctccctatctagccttcccttggcactccagtgcaccttggcttcatgcccagggccccacccaacactgagggcattgccttttcctttgtcgcccccactttgtctacaaggaggaaaccacagccagagggagtgcaggcctcactggagcttcaggcctctccctatttaacacccctagggccgaccatgcttttakaaagacagtgagagactcagggcctgagaaggtatttctttttttccttttcctacctgacttgtaaatgaaagtttgtgaaagtccttcaaggagatataagtcaaatggtaaaataactatcatg

SEQ ID NO: 847361 - DNA, 525 bp, Homo sapiens
gctctctgggacttcttctcccttgaggaaagctgcactgcccaattccaagttcactcctccttctaggggacagcccacaagaaagattggctgaattgaaaataggaaggccacgcttctctcctcaattaaaaaacactacatgacgctctcagcccttgggatcctccgcaggagcagctgggtctttgttctacctgcactgtagctcagcacctcgctcctcctacagtcctgcctccccatttcctgaggcatgctgaccctacagctcttcaggatgcttcctgcattcctgtatccatctctagtctgccttacagagaaactgaccttggtaagttgtctgtaaagcttactctaaaatataaatttgaagcctgaatactcatcagctygcaatgaggacctcagggctggcagtgagtggggctgggcaccatggctgggatgcaattgataaaactttcactggcagtaagctgggatggcgtaaccacaggcaggaaattccttggcatc

SEQ ID NO: 847362 - DNA, 594 bp, Homo sapiens
agaggtggaggtgggagcatcatctgaggtcaggagtttgagaccaaccggtggcaaaaccccatctctacttaaaaaacacaaaagtyagtcaggcgtggtatcgcacgcctgcaataccagcactttgggaggctgaggtaagtggatcacctgaggtcagcagttcgagaccagcctgggcaacatggtgaaaccccatctgtactaaaaaacacaaaaatcagccaggcatggtggtgtgcacctgtagtcccagctgctcaggatgctgaggcaggagaatcgcttgaacccaggaggtggaggttgcagtgagccgagatcacgccgctgcactccagcctggggcagagtgagagtctgtctcaaataagtaattaaaaaaagttacttatatttatctatttatggcaatatttctgaccttgaatttatggaagtgttataggttttccttctatccctcccatcagcagccacagtgatcctcccagtaaatctgcccatatatcacactgctgctgaatacattcccgcagctcccggttacttacaggctaaaattcaaactcccgctcatacagccctcca

SEQ ID NO: 847363 - DNA, 594 bp, Homo sapiens
agaggtggaggtgggagcatcatctgaggtcaggagtttgagaccaaccggtggcaaaaccccatctctacttaaaaaacacaaaagttagtcaggcgtggtatcgcacgcctgcaataccagcactttgggaggctgaggtaagtggatcacctgaggtcagcagttcgagaccagcctgggcaacatggtgaaaccccatctgtactaaaaaacacaaaaatcagccaggcatggtggtgtgcacctgtagtcccagctgctcaggatgctgaggcaggagaatcgcttgaacccaggaggtggaggttgcagtgagccgagatcacgccgctgcactccagcctggggcagagtgagagtctgtctcaaataagtaattaaaaaaagttacttatatttatctatttatggcaatatttctgaccttgaatttatggaagtgttataggttttccttctatccctcccatcagcagccacagtgatcctcccagtaaatctgcccatatatcacactgctgctgaatacattcccrcagctcccggttacttacaggctaaaattcaaactcccgctcatacagccctcca

SEQ ID NO: 847364 - DNA, 629 bp, Homo sapiens
ctggccctgtcctaagaaccgaggccacagaactctgaacttttcctgtaacaccccatctccaatatcgaggctccaagatttttaaacgcatttgcagaaattctacaaaggtaagagatttttgcmaaagttaagcggaaaattctctgcctgccacatcctaaatcattaaaagtcttctaataaatctatccctttcagctttcgccacttcacccaagtcgtctctcaatcagagtttgtaacggggaacaaatttccaattattagagctgtttatttctgtagcgatggacccccaagcctttcataagcaaacctattgagcccaaaccatgcctttcatggatgacagcttcagaataagagcagtttgtctacattgcagggagaaaccagatgtttcccttgagtcgaaacaagcaaatgacaattcagtcaaactgcagaatagcctaccaaaaaaattttttttaataaattccagggcagtaatatgtgtgggcctattttttgaccctgaacacctccatctatacttgtatttttcattgttcatgcagggcactgattgcttttgtagatctctaacaacaatctccatgcactaaccctggttaatgtat

SEQ ID NO: 847365 - DNA, 621 bp, Homo sapiens
aataaggcaccagagacaaatcctggaaagaaagagacacgcaccctttcatacagaattcaaactagctgccttggggaaacccaatgaaattcaagataactcagagtaggaattcagaatcctattagataaagttaacaaagagattgaaataattaaaaataatcaagcagaaattctggagttaaaaaatacactagttatactgaagaaagcatcagagtctattagcggcaggattgatcaggcaaaggaaagaattagtgagcttgaagacaggctatttgaataaacatggtcagagggacaaaagaaaaaaagagtaaagaagaatggagcacacctatgagatctagaaaacaatgcccaaaaagcaaatctaagaattattggccttaaagaggaggtacagagaaatatagaggtagaaagtttattcaaaggaataataaccaagaaattcccaaatctagagaaagatatcaatatkgaaatacaagagagttatagaacactaagcagatttaacccaaataagactacctcaaggcatttaataatcaaattcccaaagatcatagataaagaatggatcctaaaagcagcaagagaaaagaa

SEQ ID NO: 847366 - DNA, 599 bp, Homo sapiens
ttagcttgctcattcttgactcagtttaccttagttgttaaatcttttatcttagaatatttctcagttttatatctcttcaattccctgaagagattaagattttaaaaagatttcatttttttatctcatttcttctgggccttgtaaattattcttctaaataattaatttattccatcttaatctctaaatcctaatcatagatttgagaatttagatctcaaggattaattttacttccctccattgcttctacccttttatatctattgatttaaatatttcagatttatctcatatttattttaatttctaattttcaatcatctctaacatttttaagcgcccattatttctgtatttttcacgttatctcacattttccccattttcttattttttaatgtgtttcatttttattcttggcaagaaatgagccttataaattgtgaacaaagggttcatgttagaaccaaaagataatagtgattttaytttttaaccataagttgctttaataccctcttcttaccttcccccaaaaaagtcatggacaggaagctgtggcaagttgagattgtctcttctttgaatta

SEQ ID NO: 847367 - DNA, 601 bp, Homo sapiens
ttattcaagaagatgaagaaataaagtaagtattagtaactgtgagtaagaagtaacttgctatcaatgaaattaagattatagaatctcattcaaggatttccaatacaggattaatctttttttcctcctgaaatgtgttaggaatattattgtctggaggttgtgtgttaaattgagtgatgttgatttattacttcattctaattcactttctttaacaaaattggattattaaaatatttatgtgctgttgaatatatatagtcatgcccccaaggaggctgcattgcatattaaggaatggaatgtaaaatataatcagaacattgggaacaaaagggattcaatggtacaccacaagatgatgccattataattttatctgctttaaattactgagttaactcatgaaattttcattgaacattgggaaatgacaagaggttcctctgttaacaactggcacagttagggataaaagtatgctctcagtctagtaagattatgttccatatggtagatcaataaatccatctgtgcctcctctcttaccatcagcctagttgytaatgtgtaaatacagcattgctcaagcttt

SEQ ID NO: 847368 - DNA, 646 bp, Homo sapiens
ggaaatcttcctataatggttaatttttaaaatttaatgtatataaaaataaggaaattctagctctacrataaagttccataacattataatagtactttatattttacaggttgtttcaacacttaatctcatttaaccttcacaaaaacacagacacaaatattctcattgtcgctgaaaacccttgataaacacaaggaacatactatatctcagtaaaccaatctctattactttgacttttgaactgaccaaataaacgctacctttctttttttttttttttttttgagatacagtgtcttgctctgtcatccaggctgcagtgcaaatggcacaatctcagctcactgcaacctctgcctcccaggttcaagcaattctcatgcctccgtcacgcgaatagttcagataataggtgtgtgccaccatgcccagctaatttttgtatttttagtagaaatggggtttcgccatgttggccaggctggtctcaaattcctgacctcaagtgatctgcctgcctcagcctcccaaagtgttgggattacgggcatgagccaccatgtgcagcctcatttttcaattaacaattgcatttttatcgatcaaacactttctgcaaatcttttcaaagaggagg

SEQ ID NO: 847369 - DNA, 283 bp, Homo sapiens
gtacatctgtaaaggaaatctccatttgcagggttgtctccctctctataccaggaagagaaggatgacttccaatcactagaaactcttttatgttataaatggagaaggcaccaacttaaatctgcataataaactttacctttgtttactatgcttttcctgggcatctccccataactagccttcccttccatggtattcatgcctgaactcaaagcyacctctttgggatttacttatcttcccttaggtatcacatgcacacacgaggtatatatgt

SEQ ID NO: 847370 - DNA, 560 bp, Homo sapiens
taatttgggatccaaatgtggcagaaccatgctgtcccccaaaattatcttatttgatgctgggtagttggagttgggagtgcacaaacagcttagtttggctcactgcctagctatcattccccttgactcacttcgaagcctaaatactggactcttttggaacagatttgagcttctttctgaacaccttatatctggctttccacaggaggtggaggaggtcttggattccttggaggcagtcctcttgggttgggtctgctggaagcaggtcatctatatattccagcaaggcacaattgtcatttggctaggccttgaggtctgaagccagtgcttcttcaaagattgtgagagagtttttgagtgcttgtgggagtcttgtccaggtgaactgcaattcgctccattgaaatgcaaagatgggctaattggtgccagacgaagacagaagaatgcatctttcaggtctaggsaagcaaaccagacagcacttgctgaaataagtcccgttaaagaatatggattaggtaccactgggtggatggtcactgtag

SEQ ID NO: 847371 - DNA, 616 bp, Homo sapiens
aaactttcccaactgttcgtagggataatatcacygttgtaaaacctaagattggtgctccagatatttgtcaaatcctgcacttgatggagcagctggcgccaaccaggtcaataaactggctcgtcttgtgacctccactcagaaactgaatcagcagaagacagcttccactccctatgatttcatctatgacccaaccaatcaacactacacgccccacttcctggacccttcccactgaattatcctttaaaaactctagtctctgaattttcaggagattgatttgcttaataactctgtctcctgcatggtgcagctggcctcacatcaattaaactctttctttatggcaatgctgtggtctttgtttgtgcagagggcaggaagaacccatcagttgtttacaaggcttctttaagatttaatatatatggaaacaacaataaaaaagcatacttaggctttgataataaaaatccctctgatttaaattctttctgacccattgagagccttctcctgtaatgttgctttgccaggcttgcacttgacctttgatctccagtaacagaggctaactccctgttccatccatgcttatcctgacttt

SEQ ID NO: 847372 - DNA, 616 bp, Homo sapiens
aaactttcccaactgttcgtagggataatatcaccgttgtaaaacctaagattggtgctccagatatttgtcaaatcctgcacttgatggagcagctggcgccaaccaggtcaataaactggctcgtcttgtgacctccactcagaaactgaatcagcagaagacagcttccactccctatgatttcatctatgacccaaccaatcaacactacacgccccacttcctggacccttcccactgaattatcctttaaaaactctagtctctgaattttcaggagattgatttgcttaataactctgtctcctgcatggtgcagctggcctcacatcaattaaactctttctttatggcaatgctgtggtctttgtttgtgcagagggcaggaagaacccatcagttgtttacaaggcttctttaagatttaatatatatggaaacaacaataaaaaagcatacttaggctttgataataaaaatccctctgatttaaattctttctgacccattgagagccttctcctgtaatgytgctttgccaggcttgcacttgacctttgatctccagtaacagaggctaactccctgttccatccatgcttatcctgacttt

SEQ ID NO: 847373 - DNA, 570 bp, Homo sapiens
gactcttatattggagatccttctggaattggaactgcatcagaccagtctggttcaacttttgtgtaacaaggttgtgagttgtttttcagtttccrtggacccccagattgaaggtcccataacctgagcatgcccaggtgaacccaaaatgcaaccacaggcagaacctaagtaccggaccaaggagcaaggactgtattaagaggcagatacagaatggcaagatgtagaatccaatcagatcaagtcctgttgttaccatacggcatgatccagtcagatcctggcttccagcatcatttcactgcaagatccaatcagaccacacctcatgccccatccctataaaacctggcccagcccccagcttggggagacagatctgagtgtttcctcttgtcttcttaccagttgactcacaatacacctttctcactacaaaaacccagtgctttggtgttcagctttacattgtgtgtgggcaaatggatcagttttctttagtgacagaagttgctctatatacctcttcaacctggctgtttatttgtatttttataatatttt

SEQ ID NO: 847374 - DNA, 603 bp, Homo sapiens
agtatttcccatgctttattctgtatcatttttacagccaccctgtgctctatgcattattactcccattttatccaggaggaaatggaagttctgaaaagtgaggtaattttccccacacgctcacatcttggaagtggagggctaagcttcaactctaggatttcttcaaccacgaacacctggctttgtttgtttcctgtttttgttttttaatctgctatgtcacttcacaaataaatgataactattcttttttctcacctgtcatacctaatcactctctaagacctgagtattgttttcactttgtttttttaaatgactcttttattaatcccctcatttccattctcactgccagcaccataattctgacaattatcaccatataatagaaatacggtggcattttaaatcagctttttagctttcatttcctccaccttccccaaattagtttccttaaatcactctcagagcaataatcactgatttagacccaagtagggcatcaaattaacaaagacctwgttcatctactccatcctttcctaggtgatgtgaactggatatttccctccacaattcctcattactagg

SEQ ID NO: 847375 - DNA, 639 bp, Homo sapiens
cacaatttgtccaaatagacttcaaatatgcagaactgtggttagaaagctgagctcatgcatggccacagatctgcacaacttggccctctttgatcaatatctaggactgacacaattgcacagtgatctgcatagataagatggtcaaataattagactgaataggcagccattctgacactgatcattataggctagacataagaattcgatataggttagccctttgttaaaaagataaataaataaacagatgccctcagtgacttgtatgtataatggagatggggaatggattggggaataacaaatttcactgccagaaacactcctactgccctctaaaaatgttaggatcagtctcaaaattgggaagggatccagagtgaggactaaggagaaaaatcctggatatgtgtgagaatgggggctaagcattttttttttttttgcttttttttttttttttcagacagggtctcattcctaggcttgagtgcagtggcatgaacccctgtaagcttgaatcctgggctsaagcaatccttttgtctcagcctccccagtagtcaggaccacacacatgcatcactacacctgattgatttttattatttattattttttttgtagaga

SEQ ID NO: 847376 - DNA, 647 bp, Homo sapiens
cctttgttctttagattcattaaatgatrttggaaatactgtaaaaataacagtactttatggtaattgtttaaagctgcaatgcctgcaaggtacctcacagtatcttgtagtaattgcttaaagctgcaatgccctgtgtggacagcaccttattcactacccaacccactcacacacacaccctattgatgctcatgctttatcactaggctcctaatccaaacttcctgttttcttctaattaatatcacatcaccctaattgggtttttcacttgtaagctttgtggattaacgtttctattgctatgttaattagctcttacgtaccaaggacgatctctacaaccaagaaccaaaattaccattctagaatatcactataataacatgggcatgagcagtctctcctggaaaccatccaaacaaatttaattattgaagtatttaagagattatgttgtaaaactgttttaccaccaaagcagtcactcacatagcataggtactcagaacagcattttgaagaggtttcagtctaattccacaagcgtttttcatgtacttacatgtgctacacactacaattttttgtgttaagtgcttgctggtagagttcctattttacatgagcttacattcttt

SEQ ID NO: 847377 - DNA, 579 bp, Homo sapiens
taaacagtgttgtcccagatgctgagtgtcatcttcttatactagggtaaaatccatacttaaatgctccccactaattgtaaccccaaaatactaacctggtgactcacrttataaatctgaggttgaaaaccagcaactcatcatgacaacaattgatttggacacatcttaatatacaggctcatttctcagcctcagttttaatttggtgcttgagatgaaattctgtttatgaaaattaaatagaggttaactgaagattaggctgttctgctttttaaatgttctcggctttaatatgacaccatgtgacatccaggttttatttctgtttgtgtcggtgtcatcttcctgactcacttcctcaaaccagctaataaacacaaaaggtgaatacaaattagtatgcttgtcacagctgctatcactctggaattcccttttaaaaattcagaatatgaaagataagtaaaacaatgcctgcttattgcagcttaatttctaggaaagattggtgtccagaagccacatctcaggcagtactctgtcaatgttaaagagctttttagctagaaa

SEQ ID NO: 847378 - DNA, 694 bp, Homo sapiens
atgttatgtcccctaaaaaaatgatttataaggaattatgcagacattttggcacttttttttccacagtttttattacacttgtgacttgtaattctataaacagtgttgtcccagatgctgagtgtcatcttcttatactagggtaaaatccatacttaaatgctccccactaattgtaaccccaaaatactaacctggtgactcacattataaatctgaggttgaaaaccagcaactcatcatgacaacaattgatttggacacatcttaatatacaggctcatttctcagcctcagttttaatttggtgcttgagatgaaattctgtttatgaaaattaaatagaggttaactgaagattaggctgttctgctttttaaatgttctcggctttaatatgacaccatgtgacatccaggttttatttctgtttgtgtcggtgtcatcttcctgactcacttcctcaaaccagctaataaacacaaaaggtgaatacaaattagtatgcttgtcacagctgctatcactctggaattcccttttaaaaattcagaatatgaaagataagtaaaacaatgcctgcttattgcagcttaatttctaggaaagattggtgtccagaagccacrtctcaggcagtactctgtcaatgttaaagagctttttagctagaaacaaaaaagaggttgta

SEQ ID NO: 847379 - DNA, 596 bp, Homo sapiens
tatttatgtactgatgtaaattgtcagatgattttaagatagctatagtctacatttccaaaccaacttcatttttccacctcttgagtgtttccataacagatttgcatgtgttgcaatagaaaaacacatactgcctgagtgctctgatgatgttacttctagagccttccctggtacagcttgttttgacctaggacaaatcactgaaaccatctggtctttggcttcttcatttttaaaagggtagagggaaatatttggatctgatgaatgcaaaaaatttttttaagattctaatgctaaaatggaatcttacacattggttagtcccaagaaagtaaataacagaaagaaaatctatctacatatgatgaattgcaaagggaataatttaactataatttcaatttactatcaacatgattccattaaatgactttgaccatcattttctcttttagcaaaataatttacaaaaacatttataaaggagataygtgtatattttctttctgtttttaggggtcactgggcttttaataatttcctatatggttttctaaggacaattttaaaactttgtttatatgtgt

SEQ ID NO: 847380 - DNA, 594 bp, Homo sapiens
tgtcttgggcctttctgtactccctgtgtgtacatggaggcttttttttaatttgtttgtttttaatgttaaatgtagaagtcaaatttagagatgatkttaatggagccactaatcggtttatgaaaccaccttgacctttaccagacccattttcctcagtctcccaatcaaactggttgacctggtttatttaaggagctttctcacaattgtaattgtatacacatatacatacacatacatggtaagtgtatatgatttagaaattcattgtacagagcaaacatactgatgaaagtattatgttatatgtcaaaagcgactttacaaataacttccttgcaacaaaggtcttatttgattactaaaaagccattttatatatataaaaatacattctggccctttgaattgggctttgacaactttaagtaatggtaaaaaagaaaaaaaagattcctctccttattccatagtatgtttattattaacatgtattgttatcacattgttttaaggaattataatggtacaagtttactttcgcatttcactcttttattctatgtgaggatatctacacaagatatg

SEQ ID NO: 847381 - DNA, 464 bp, Homo sapiens
aataaaggataaagaaaaagccttaagacaaataaaaaattactgaattaaatgaaaaagaaaatacattacaatttgtggtacayggttaaaacagtgctgtgagggaaattcatagcagttaatctatatattaaaaaaaattaaagaattccaagttctcacatgaagaaactagaaaagaagagcaaaataaacccaaagcaagcagaaggaaggaaatcattaagaataaaaactgataggttaaaaacagagaaacaataaaaaagctctttattgagcttcttatttgaaaagaacaataaaattaacaaacttctagcaatacttacaaagaaaaaaaaaagagaagacacacattaccaatattaggaattaagtgagatattactcaaaccttgcaaatatcaaaaagataattgtaggataccagaaacaattctacacatgtgtttgacaaa

SEQ ID NO: 847382 - DNA, 646 bp, Homo sapiens
cttataggcaattttaacaatcactatttctagattgcaatcttcctgtggttacatagaaagccaagagaggcactgtgctgacatagcaaaggtatgcccgtccaggagagaaaaattggatgcctaacgattgccaaacccctgataattcagactattagcgtcaatgtcaacgcgcagtatttaggacagatactgataaagatagggtggacggccacctcaccttgtcaccatctgaatgaggagccctgagatgggtcccctcccacctgcaatggcccgctggcatctgcaggtggaaggtgcagggatgcagagactaaagctgttctcctgcccctgcagagcccagccttggaacagacagacaccatttcatttcattcactcactgctggctgcactacctgaacacacgccctctgacaccatctgtgagttactcatgcttcccacagcagagggagaaggtactttgctcacccctcctcccacagagggggatgaagtcaggagcctggtggaggcaccgctgaggaagggcctctgaaaggaccaaagacagtgaccagcaagtgtttcttgcaaggccaaggagctraagcttccaggaggggctgcacagtcttgaaaagcatca

SEQ ID NO: 847383 - DNA, 628 bp, Homo sapiens
tcttaagttagcatcaggtaaaccttttcttttgggtagttttcctcctaggcctttgcatatgagtttatttggagctggttagctacaagcatacattctaggagggkcctgcatggtactcaccatcagcccagactgactcagccccaagagacagagctgcctgcctccaggtcttgctgtggctgtgatcttggcaataaattcctctgtgaattggactctgagttccattttcagagggagagtttcatgatgtaatgacaaattagctgcagccaagctcactgcaagagtccttgtcacttgaaatgtactctgggtaagccagtcccgtggacagacactccaccaacttcagcttgtgtgagtatctgtcacgtggcctttgaggctgccttagactgggcttgagtgcagcactgaagctgggtctacccccatgcccttgggaaggcctaggtgtgcaccctcccagtcttcccataaccactggctacacctgactgataggcacctacctacgtcctagtgtaatcacgatcactgctgtcatttactcaacactcatcctgagccaggcattgtgctaagcactttaacatgaatttaaaaagaaaaaaaa

SEQ ID NO: 847384 - DNA, 474 bp, Homo sapiens
gatatccctccacataaagctgggatcctcagcgcaagggtaaactatttaaaaaacaaacaaaacaaaccggaaggagggggaccagggaagagaaaaagaagggagaagggagggaaggattaacttgccggtctggaccttaacaatagatggaagagcgtaaattacttcagacaatgaatacccacaagcaggcctatgacaggtctcttgcccatcacaacaggacccatgttgtccaaaaaacttgaagccaataaaattaaagtagtcctgtgttgtctatgtacctaggcacttggaggaatccaggcttcagagtttttcataaacatttccaagagttaacatataaatttcactaaacacacgaggaaataarccactacaagtttacagaacaataaattaaagaatcagacaaacgaaactcacaaatattggaaatgttagaaacagaatataaaatat

SEQ ID NO: 847385 - DNA, 528 bp, Homo sapiens
tcaagaccagcctggccaacatggtaaaaccccgtctctactaaaaatacaaaaaattagccaggcatcatggcaggcacctgtaaatcccagctactggggaggctaaggcaggagaatcacttgaacccaggaggtgtaggttgcagtgagccgagatggcgccattgcactccagcctgggcaacaagagtgaaacttcatctcaaagaaaaaaaaaaaaaaaggtagatttttttaaaacacatgcaacattcaggctgggtgtggtatctcacgcctgtaatcccagcattctggaaggccgaggcgagcggatcacctgaggtcaggagtttgagaacagcctggtcaacatggtaaaatactgtctctactaaaaacaccaaaattagccaggcatggtggcgtgcacctgtagtyccagctactctagaggctgaagcaggataattgcttgaacccgggaggcaggggtggcagggagccgagattgcgccactgcactccagcctaggcaacagagtg

SEQ ID NO: 847386 - DNA, 321 bp, Homo sapiens
ccggtttcactgttccagcaacatttgatcagttacttaatccttcctcttaaacatctctctgagtcatccagcctctcctggatattgcctttgtcactgctgagtctgtcttgatttaaatttttgatattttaataataaaatttttttgatattttgttcatcatgtattttgtgcacacatatttatttctaaaaatattgcattaaaatattatttattattaataacttggggttttagcacttccttaawttttacatcagagataagcacctcacttgccttaccttattcttggtcctgcggacaatttt

SEQ ID NO: 847387 - DNA, 561 bp, Homo sapiens
aaggccaccagacttccagacatggagcagcacagcctaaatgactccaagagcaacacacatcaacccgttcattgtgcaacaaagcagggctaagagcaccttccaggcacctcccacgacctcccagaaawacttggggaaaattatgtggggaattgagatcttgtattatgtcagtatgggcatgaatcattgaaatttgggttatatatattaagtggctttatttgtacccacaaacagataaggttttggggaaattgaggtcatatatgaaataaaagaaaaaactccatttgtgattgtgaaagacagtcactctcagtatgtgattttctaaaaggctcacgcactataagcaaccatcagttaaacacattaatggaacagagcaatgatctattcaggtcaggacagtgagtcctcacgtgtgggagagtcattgcagaagatggcataaagcttagaggcagctaaagattgacatcaaactggtagggcattgcttaccaaaacattgaccatatgatttgggaggccaaggtgggcaaattgccc

SEQ ID NO: 847388 - DNA, 621 bp, Homo sapiens
ttgggtgctgaacgaggtgactagtgtctggtttgttacgtgtattttgcctcggctgggatgaaaaatrttaattcggttccccgtgcaacctgctgggcagcatcttgcaaaaataagaatcttttgcctacggttccgtaaaagagaaaagagtgattttcttttataaagtggtttgacctctatagctatggcacagggaactgggtcatcaaaagccgcttcgttcttctggaagctgcagagaaggggaacctggaaacctagtatgcaggcaaaaagggtaagaatttcttaccagacaaatttctggtatttctctctctctttctctctctctctcaatctctttctctgtctctctatgtgtgtgtgtgtgcttgagtgcaaacagtaaacaacactgtttgtctcctctgcaaaggcagactggtccccaggcaacaagggggactttttgggaaagggttattatcaattctgtttcagagtcaaaccatgaactgaatttcttcccaaaattagttcagcctatgcccaggaatgaacaagggcagcttaaaggttcgaagcaaggtggagtcagttaggtctggtctctttcactgtcataatttc

SEQ ID NO: 847389 - DNA, 621 bp, Homo sapiens
ttgggtgctgaacgaggtgactagtgtctggtttgttacgtgtattttgcctcggctgggatgaaaaatgttaattcrgttccccgtgcaacctgctgggcagcatcttgcaaaaataagaatcttttgcctacggttccgtaaaagagaaaagagtgattttcttttataaagtggtttgacctctatagctatggcacagggaactgggtcatcaaaagccgcttcgttcttctggaagctgcagagaaggggaacctggaaacctagtatgcaggcaaaaagggtaagaatttcttaccagacaaatttctggtatttctctctctctttctctctctctctcaatctctttctctgtctctctatgtgtgtgtgtgtgcttgagtgcaaacagtaaacaacactgtttgtctcctctgcaaaggcagactggtccccaggcaacaagggggactttttgggaaagggttattatcaattctgtttcagagtcaaaccatgaactgaatttcttcccaaaattagttcagcctatgcccaggaatgaacaagggcagcttaaaggttcgaagcaaggtggagtcagttaggtctggtctctttcactgtcataatttc

SEQ ID NO: 847390 - DNA, 522 bp, Homo sapiens
taaaaataccccctcatgcaaattgctattggctgtgacctctggggattagtgggtggctrtggcaatgcagggtgcttgtgcagggctggagaagaggggtgggtggaaacgaggcagaggcagaatgactgaacataccaggagagggcagaagtggtttgggtgactggggtttgggcaccattacagatacagggaggtggaaagggcagtttggaaagaggagtttagtttgagtttctcttcctgcactctttgccagttgccttctgggtatttgatagctcagtggagccccgaaggatggtgttgcagagaaaaactgctgggtcccagtctcagtttctgcactaaactaagcaaaagatctggggatatattaatacttgctattcataggaaacagactccggagatccttgagaacagaccaaaagctacccacttttcctaccaagattacccatttaaaaatgcattgaattctcccagctacctattttgactgataaccggatg

SEQ ID NO: 847391 - DNA, 630 bp, Homo sapiens
agcaagcactcctctagaacacatttcaaagtgcaagctcttatcaaacctctgcttgcatcacacttgctaacacccattggccaaaaccagtcacacggccaagcacagtcaatatgggcaggaattacackgagcttgaatacaagggtgtgtagttcactgagagggctacaattctgtcatggtgctaggactacctgtgtgaaacaagagaatatcatacaaatggatgcttgtataggcatggattatctctgggacagtgcaaaagctagtacagaatttgaggaagattaggcagctgaaggggaccaggtggctgggatacagagaattactttcactatataatttaactgtacaatacacacattaccaaaatctaaaaattaatttaaaattaaaataacatgagcacaaagaagactcagaacagtgacttgattgtagttggtgttaattaaatacttctttaattaaaaaagaaccaaggataaaagaaaaactaagaagatattcaaagacattcattttcatatagtaccttattaggcaaaaacctcttcctcataataagaaagacataaccctcaaccatctagtttgttggaaaaacaaatccctcat

SEQ ID NO: 847392 - DNA, 477 bp, Homo sapiens
ataactattgttcagaagtgggtctctaaggagtgaagagggctctgttaatagcccctaatggggagccctattcatgttctgtgaggcgtggctgttgctccagcactgcctgcctttagatcccttcccagatctgacacaatttggcacacacagaaggctcagtcaacactgcccagctgggtgatggttgggcagatggtgtttgttgcccaatctgccagactggtatggcaagtccaataaacatctccatggaaccagcagggacatcaacagagtagcaatctgcaggcttcatcgccgagccttgccgcctccactttccccctgtggggatcagaaggacccttgtmagatggaaatgcaccaggaatgtgggcccttcatccccagaccgaaagaaggtgttcacgctttcatgcaggtcagcactgtgttgggcagagagcagcacatggctgaacagattgc

SEQ ID NO: 847393 - DNA, 665 bp, Homo sapiens
gctgccatcatttgatttaaaaatacactgaagtgggagtccaatctgagatttaaggtttattctctgtaccttcattcactggcgtgtccataccacgataataagaccatcccatgggacaagaagaggagggaggcaattacggaacagggtttaacggtaaagactttagaatcacactgcccaggctccttacttgtctctgccattgtttgtgtgacctcaggcaagtctaaaagtcagtttgttcatctgtaaaatggagatatctcatttaatctccacaacaatcatgtaaagctaattccgctaaaacatttagtgaagtattaggcacagagtaagtagaggatgttgtttttatctcatattaagtcattagtcatctgaaagagtgcatatatataacctggtatggttataagaagtcatttccagagccttcttccatagtcagctttgaccactggagcatcaagcagtacccgtcaggtttattctcaagcccccaagtgtttgctattcttgttttataaatccygttcctctgttgcccaaatctacctttgtccagaggctccctgtctaccccattcagaatctgatgggtgaaactacatcagtggggaagctattgtaagatgtgaattaattcagttaga

SEQ ID NO: 847394 - DNA, 625 bp, Homo sapiens
cctgccaaaaggaaggacacgttaagaacatgaagtcctggctaacgcatcacatctgacagtcctcattcattccctcattgctgagtctccaccccggtcgtcttccrtggtgctctgttttaacaagcacaacgtgacctgggtatgtatctaaagtatgattacttgtggcttttttcctagtggcaggtgaagtcaggtagaccccagacaaaaaatatgcgaaccacagcattgaaagaagatgatagagctttctcctcccagcacagaggctgaggaaaacaagagttctaagaaacaaggaaatgtatgtgaaactgttagaagaaaacacttgtttaaaaggaaagatgaagcttagagggtggaaagatgtggaagtctttgaaggagaaagagaccctgctatttcttttagcaaatacacattgattcttcaggtctcacctccaactttattctaatagaagactctcactccctgggctgagtgaggtacctccacacctggcacttccccatgataacacacaaatataatgtaattttctatttctttaagcagaaattatttttatgcatcattacatatatatctatatatacttatttatctgtt

SEQ ID NO: 847395 - DNA, 565 bp, Homo sapiens
aaatattttctctctaggttttttctgcctatgcaactacaaaaactttcaagagattcatgaccaattatgaaattggcagtttctacttacagctttaatgaagtatgagcaccacaaaacaatctgatacacaaaatgccaaggataaaagtacagctttgtttggccttaacagatatctaacttgtttcctgttaagatatattcaagtataaaatctcataccaatttcataactgttcaacaaaatatatttatgttcagtatttcattgggctagataatggggcaaatattttttgaaacttatcaagtctatgaaaatactatttggcttaaaaaatggcacaggtttgggaggctgaggtggcaggatcacaagatcaggaatttgagaccagcctggccaatatagtgaaaccccgtctctactaaaaatacaaaacttagctgggtatggtggcgggtgcctgtagtcccagctacacgggaggctgaggcrggagaatcgcttgaacaatttctataggtatcagcgatgcacacatcatgaataataaaa

SEQ ID NO: 847396 - DNA, 605 bp, Homo sapiens
tgaaacttgtcacacctgaacacagagatagcaatcctcattgctgggtcatctctcagtggcaggataatatacttgaaaggatgatcagttgtttcctggttttttccttggcccctactaggtaccctgattcaaacaaggctgttcattggttagtttctcagagaaggatattgtgtagaaagctcagggaaaaaaaagtgtgtggtatgttggcatcatggcactactggaactggaaggactgtggcactgggatctagtggtgggtgccccgctttctggatggcagggaaaggttctctgatgcttaaatgagtccttttttctgtacatttgggatatttcataattaaaaattaaaaagtaattatctataagcaggagaaaattttatcttataatatcaataaataactcttagaatactctcaagattaattttgagaggaaacttataatcattaacttttatattgagcaacaattctataaaaacacaacagcytaaatcaattcaaaccttaaagtaaaaatgtttgcaacatatatgacctattttgtaaaggggcagaatccacaacaaagaaccctagtaaatc

SEQ ID NO: 847397 - DNA, 629 bp, Homo sapiens
aacactgtctcaaaataaataaatagatttaaaaaaaaaacttagaactgagtatttcagaaacttttttacacaaggaataatgaatatccatgctactatttgctgtctcaaactactgcggaaacgggctttttctcatcatgtctattgtgcgaataataatctgtcaagaacttctactttggccaggtgcagtggctcacatctgtaatcccagcactttgggagaccaaggcaggcagatcacttgaggtcaggagttcaagaccggcctggccaacacggtgaaaccccactctactaaaaatacaaaacttcgctgggcatgatggcacacatctgtaatcccagcttgaacccaagaggcagaggttgcggtgagctgagatcacactgctgcactccagcctgggcgacagagcaagactctgtctcaaaaaaaaaaaaaaaaaaagaatttctactttaatgccaagttagaatttcttctgacttgctcattagagtctaaaattatctcyaaagctgtgagaatttctatttacctttttcttatgaaatcaatttcaagttttataacttttctaggacctaatataaacatataatgtatttagtattcttca

SEQ ID NO: 847398 - DNA, 459 bp, Homo sapiens
gattctgccagggacagagggttctcttcgtttcacttktccttaacccactatgctttttcttgctcagatttaacaattctattccagagctctacacacacagatgtagaaacaaaaatgggctgataacacctggcaagaatgtctcccagacagaattctttctgacatatggcaacagcctcccttatccctcccccaaaataagctccccaatgccaggtgagtctgaaagctgtgcccatttactagattgcaagcctaggtttaagtctgatgtgaaaaatgcatctctgctcagtaatcatctatcattcaagccccccgcctttaacttaggacctcaagatagttaaaattgggaaactgggcataaaaaataatgctcccaagtagtaagtattaccgctttttgccaaaggctactaaaaaactttcagagggaaaagtacactg

SEQ ID NO: 847399 - DNA, 459 bp, Homo sapiens
gattctgccagggacagagggttctcttcgtttcacttttccttaacccactatgctttttcttgctcagayttaacaattctattccagagctctacacacacagatgtagaaacaaaaatgggctgataacacctggcaagaatgtctcccagacagaattctttctgacatatggcaacagcctcccttatccctcccccaaaataagctccccaatgccaggtgagtctgaaagctgtgcccatttactagattgcaagcctaggtttaagtctgatgtgaaaaatgcatctctgctcagtaatcatctatcattcaagccccccgcctttaacttaggacctcaagatagttaaaattgggaaactgggcataaaaaataatgctcccaagtagtaagtattaccgctttttgccaaaggctactaaaaaactttcagagggaaaagtacactg

SEQ ID NO: 847400 - DNA, 587 bp, Homo sapiens
tgctgttcttgtgataatgagttctcatgagatctgatggttttacaaggggcttttccccctttgcttgacacttctccttccagccatcatgaaggacacatttgcttcctcttctgccatgattctaagtttcctgaggcctccccagccatgcagaactgtgagtcagttaaccctctttccttcataaattacctagtctcaggcagttctttatagcaagcagcgtgagaacggactaatacacatgcaaacacccttttatataacagaatggatttaaagtagatttgctaaaagtcaatgctgtctttgcctgaaaagctatcgtagttcctgagtttcagacatctagaacaacccaatcctgaatcactgaaaatcagaatgactcaggattctagaaactcaagaaacccaaaatttaaaaacctcttttctgaaacagtcaccgaatctggttacatggtacactgaagtttgtcaactcaggtagcaaagtcttatgaaracagaggaaatgtgaccagctttgccagctggaagtactgctccccctgccatatctgcatgaggacaggaca

SEQ ID NO: 847401 - DNA, 608 bp, Homo sapiens
agccaggaattgaatctagwctactggaataatagtcatgggctatatttttaggatttgaaaagatggaaatagcattactttgtttacaacaatctggggaccaaactccttgagcctgctaaaatgaagactgggatcaagtatgcttgaaatagtaatcttaaagaattcattttgggtggctttgtcttgggtattttgttgaacccagttaccttgatcattttttttctttttttgagacagcctctctcttgcccagcctggagtgcagtggtgcaatcttggctcactgcaacctccgcctcctgggttcaagtgattctcctgcctcagcctctggagtaccttgggactatgggcgtgcaccaccacgcctggctgatttttgtatttttagtagagacggggtttcaccatgttggccaggctggtctcaaactcctaacctcaggatccgctcaccttggcctcccaaagtgctgggattacaggcgtgagccaccattcctggcctgataaattgttttctagctggtttctgatcacttatgttctagctggtcattatgtattatttcatgaaagataggctctgtttagat

SEQ ID NO: 847402 - DNA, 507 bp, Homo sapiens
atgtgcctttcaaaacttgagtgttgacatcacagtgattgtccagaaataccccaaacacattatttgaatgtctgtcaagatatttcttatctcagctgaaattatatgaatcactctaaggccacattagtgacgtctgctgccaattttgaatgtagagtcagtttaacagtctagtaggaaatgtacggctcatatgtaaagtaatttgggcttctgtcctaccttctcccatctccccctttcctctgtggaactcaaaaatcacaacagatggcagaggcagaggaaacaatgggtgctccctgatggcagtgagtgaccaaaatcagtttgttatttaggctgcattatgcttgcaaaggcataattcaagggcaggctataggtggaccaggtctggagtggttcarttttacacatgttgtatttagacatctatcagagattcaggtgaaggtgctaagtagaaataaatggatataaaatccagagcttgaggga

SEQ ID NO: 847403 - DNA, 536 bp, Homo sapiens
agtaatcactctgaagtccagttgtctaatatttaaattgcataaatcatagcaattttrtctacatcacagagttgttgtaaggaaattataaggtatgtgaaaataatatggtagataacattcattgaatacttatactgtgctgaggattttacatgtattatctcacatcatcaacccaacaacccaaagtagctgttattattattatttgacagctttacagatgaggaagcaaagctaatggaaatttgataatttgttcagactcatagagctagtaagtgcagagcttatgcttaaactcagaaccgacttgaaacctcatgttcttaaccactttcctatattatcaagatgaaaaattggttaaacaggtcagcattaactttttcttacgtaatgtatgctttgattgctgtttgctgataaaccaaatgtacagtcatgatgatttgtggaaaaagaataccaggagaatcccactcccttgatgagttcacggttcaatcaaagagcatttcagtggaaat

SEQ ID NO: 847404 - DNA, 522 bp, Homo sapiens
ggaagtgacttaagccacctgctggtgtagtcattagtttagagatatatagctatagatctgccaggcactaatgcygaaaagaaacctactctgaaaggataaaatattattttagtaaaatcaaggtttgtaaatccattcagatctgtaccaaaaattaatcagaatatatgaattttttaagacactactttacactcattaaaatgactctttttttattttactttaagttctggtatacagaaataacaagtgttaataagggtgtggagaaatccttgtgcactgtgggtagaaatgtaaaatggtgcagccactacagaaaacagtatggcagattctccaaaaattaaaaatggaactactatatgatctatcaatctcacttctgggtatatacccaaaagaattgaaagcagggattcaaacagatatttatacacctatgttcatagtagcattattcataatattcaaaaaataaaagtaactcaagtctctactgatggatgaata

SEQ ID NO: 847405 - DNA, 552 bp, Homo sapiens
ggaggatcacttgaggccaggagttagagaccagcctgagcaacacagtgagactctgtctctataaaaaatttaaaaattagctgggtgtggtgatgtgtgcttatagagtaatatagttactcagaaggctgaggtgcagaaaatacaaatattagccatgcctggtggcatgtgcctgtagtcccagctactcaggaggttgaggtggaaggatcactttgagtccaggagtttgacgctacagtgagatatattcatgacactgcactccagcagcctgggcaacagagcaagaccctgttatccctccaaaaaaaaaaaaaagaaagaaaaagaaaacaaaattactccagatggtaatgaatccacaagaaaaataaacaaacaacctgaaatgataaataaggttactataacaaaagctacaaatatatatttgcttycctttgttcattttctttaaatgatgtaaaagtaataattgtagtaatgtattgttgagtttgtaacaactataacatgtacaacaacaaaaccacaaaaaaacag

SEQ ID NO: 847406 - DNA, 577 bp, Homo sapiens
tcagtggcagcaggcgggccaagccctaagtcttttcttcctcatgcggtacccccagtcgtccttttactggtgtcagtttaggacctgaaagcagagagcggaggtgctggggtcacactctctggccatcccagagctagtctgtggctagcgggatacttgatctcgtcaccttgtactctttagtccagcagtcacccagtattgttttgttttgttttgagtgcctaccggcagcttttttaccaacttgcaaacttgaggcaaagtaagatagagtctttggttttgaggcctggcattttttttttttttttttttttgcctgagtttataacccttctttaggaggacgagtggaaggagtagtgggaattgctagctactgccaaaccactttatgtctataattaagctaacattaagaatccatgcggccaaatgaaaaatgaaaaaaaaaaaaatacgagtgtatgctgcaaaggttaaccattggttaacttaaagcagtattttgctgttcrtgtctatgttaggaaaactcaaacaagaaccttaacagagagaatggatt

SEQ ID NO: 847407 - DNA, 647 bp, Homo sapiens
tggaatctctcagagcagaaagccccagtagaaattattaatatggataaatcaaaaaatcacagcaaacacatgtcatcattggaagctatggaaataactatgagaagacataacccaaaaacatttaaagtatttatgtctgtggagctgtgaatactggcagggaagattggggcctttctgtactgatagatatttcttaaatccttgattatatgttaattttattaaaggaatacataaatttgaaattaaaaacaaggataagatgagcatccacctgagttgcccatgtctgaggaaatgcactgttgaagatgtcatccactgtatcaggaaatcaatatttcctatccaaatcaccaaatgctaaatccctcctaccgagtcctgtattagtctgttctcacactgctgtaaaaaactgcccaacactgggtaattggaaaggaaagaggtttatttggctcacagttctgcatggaggcctcaggaaacttacagttatggcacaaggagaagcaaatatgtccttcttcacatggcatcaggagagaaaastgccagcagaagaaatgccagacatgtacaaaaccaaagatctcatgagactcactcactatcataagaacagcacgggggaa

SEQ ID NO: 847408 - DNA, 613 bp, Homo sapiens
aacttccaagtttgtttacttgctattttcttgagtcttgaaggaggcattgttgccatgacaaggaattctttttctgtgtttgtgcccagatattakagaacagccaatatacagaagatactaaataggagctctgtacctgtaatgaagtctgctgtttgcagagagcttgctccagggcacacaagtgttgactcaaagagagttgatccgattgaatagctgatgctgcggaagcatccacttgttgcttcagttgctctcccagctcatggagaaaaaagagggaatctttaactgtgcccagtcctttgaggaggtcctagaagaggtgaaaatatgcccactctgaagcatgttgatactccttatcataaacagcaatcggcaaagggctacacatgtagaaacacaccattcctacggatcatattattaggctaaataaacttcacctgtggaaaaatgaacacgcactgaaccccattttttaaaatgctatgttaatattttaaacatacattatacacatataacctatggctatatataattactcttttgttagtaaaagctatgtaggttcattacaggaccttggggaaatgca

SEQ ID NO: 847409 - DNA, 548 bp, Homo sapiens
ttgtgtctggaattggttccttccggtgggttcttggtctcgctgacttcaagagtgaagccacagaccttcgcgtgagtgttacagctcttaaaggtggcatccagagttgtttgttcctcccagtgggttcgtggtctcgctgacttcaggagtgaagccgcagaccttcgcagtgagtgttacagctcatgaaggtagtgccgacccaaagagtgagcagcaacaagatttattgtgaagagtgaaagaacaaaacttccacagcatggaaagggactggagcaggttgccactgctggctcgggtggccagcttttattcccttatttggccccgcccacatctgctgattggtccgttttacagagtgctgattggtctatttttacagagtgctgattgctacctttacaaacctttagctwgccagaaaagttctccaagtccccacctgacccagaggcccagccggcttcacctctcaatatggtgtttgtgtttgttgctataaaaattagtcatttctctcatgtcaagaacataat

SEQ ID NO: 847410 - DNA, 633 bp, Homo sapiens
aaattaatatgccttttctcctgttaatctgtcttttgtccatttaatacacagaaccctcaggtactgaaccagacaggttaaaggaaagttttgccccgacaccatccaagtagctcagttgtgaagacaggatttgaacccagaattcatccaaaagcccatgttcttaaccactaggccgtagtgcctttcactgaatacctgtcctcaagaagctggtgaaaatgcacatacataattatgaaacaaagcaaaacattttaaatactttgttggtataagaaagataacagggctgggcacggtggctcacgcctgtaatcccagcactttgggaggccgaggcaggtggatcacaaggtcaggagatcgagaccatcctggccaacgtggagaaaccccgtctctactaaaatacaaaaaaaattagccgggtgtggtgacacgcacctgtagtcccagctactcaggaggctgaggtaggggaatcgcttgaacctgggaggtggaggttgcagtgagcagagatcgtgccactgcactccagcctcrtgacagagcaggactccatctcaaaaaaaaaaaaaaaaagaaaagaaaaagaaaaagaacagtgagattctaggatca

SEQ ID NO: 847411 - DNA, 521 bp, Homo sapiens
cttactgaattagaatctgcatttaaacaagacccccaagtgttttgtagatacattaaagttcgaaaaacactaatatagaattcactattgtaggcaactgggactcaatcttgttggggaccycctgaagagctatgaaggacatactttgaattatccatccaacagacagaacaatgaaatattaaccactggctctcatctcccattggtcaaggcttgccctcagggatgtgaactctctttcactgccaggtttgcacaggttcagaattgctgagctgcaggtatctcatgtggtgtagcagtgaagcctcagtacagaaagtgagaaagatgtgtatgtgatgtggctgagggaaagtgctgtcagaatcacatccatgtgcagctagatgctgcagcaatagtttgagtacaaacatgggccaagaggctatgaggtgggacaccaggggtatccaaaacgctgccaatatacaatcaatggagcactgtttttcaagtggtagattcct

SEQ ID NO: 847412 - DNA, 631 bp, Homo sapiens
ccctcattaagcatagttctgatcgtgacagaacaaaggagaatgtccctaagaattctcattactgtatcacagcaagttgtatttacaacaaaaatccaattctctatacaacacattgcttcgtaacaacatgcaaggtaggtatcaccaatttataaatagtaaaaatgtgatttaacgtgtaactttgccaatgcccatagtgtaagttctggagctaggatctgacctagagccatctggtggtaaagcccatgatcccacttacaccagataccatttagcagacttgtggtatccacgccactcttcctgtttcagcagtaatctggtgtgtttcaatagatggccatatctctcaggaacctacaatttgacttttaattttgggagggaaaaggaattcaaattagccattagtaaacataggaatattctatagagcattgtcagagttgcaaatgccacaaggtatagaaaaatcctggttcataccaacttgttgcttccctcttgatccctccagaagggcagcaacaagggaaagaatgggaygtgttgacacagtaaagtaatcctgacttattttaataaaaacctgttactgacaaaggtgattttaagattt

SEQ ID NO: 847413 - DNA, 475 bp, Homo sapiens
agggatccactcccttcaatccaggagcctgtctgcctcctgctgccatccatggtgcctatggtgcccagsctgcttgcaccaaaaggcacctgcaggccagtgccaagccaccctcagccctccccctcagtttctcctctcatgctcattttgcccaaattctggaggaggccgaggtagcagggtactggcatgtcagcactgccccaagcatgtgcacacctggccaggctgtgccagtgcccaggataggccccaacctggctccaagattggagtagggtgccaggagtggagaggccaggcagcaggagcagacactctagagcctgtggggccagggggttgggggggacttctgaggcccccaagagtgaagactgcagagactctcgggtcctgcgcttgggagggtggccacagctgcacctagggaactcccgccttgccaactcaaaaggggtggggctcc

SEQ ID NO: 847414 - DNA, 597 bp, Homo sapiens
gaaattcagtggatcctttcactttcataaaaggtattccttcccacgtcaagagaaaaagccaacatgtttttcctccaatgcataaaaggaacttccatagggctggcaggagtcaggctgttcaagacaactggaaggagttgaataacatctatccagtgagtcctgcaagacttcaggctctactacctccagcagctccctgctgagcctggaaaaggaggaaaaagtaaagaataagccaggggaaatcagacacaacagagccccaactaggtttcatgggtagcatagggaagtggttaaaaaactaaaaggatagatccattaatgaggtaacaaattattgccttcatgttgggacagaacagggccaaatggaaaagaatgaaagagaaagacagatagacacacacacacacacacacacacacacacacacacacacacacacagagagagaacgagctcagtgaattgtccaggtgacacactgatgagggagtaacaggacactctgagttagygccctcaggacacacagcatacagggatcatgaaaagactgtgctcaataattttccataaaatgtg

SEQ ID NO: 847415 - DNA, 578 bp, Homo sapiens
gctctagggatcctcctgccttagcctccctagtagctgggactactagggagtgccaccacgctcagctatttgaaatattttaaaatatttttgttgtagagacagggackcgctttgttgcctagactggtctcaaactcctggcttcaagcaatcctcttgcctcagtcttccaaacttctgggattacaggcttgagccatggcacctgccattgcttctatgtaaacactaactaacacacccaaactaggcttttaaggtgctttccctcaatggagtcacagtctttcttcattctttacaatggggtcagacatattcaaccttagattgacagtctctatcacttgatgctgtagggaattcagtcggcctgcctgaatgcagttggggaattttttgaaggttcttctataccccatcttacggctttcaaatgctcagcagggttgctatgatagcatgccttcttattcagttcctattctggacacgcagcttgcccgtgactgttgcatgtcaagtggctggaaccaatcagcttatctaaggcttcctcagaagccaatcag

SEQ ID NO: 847416 - DNA, 607 bp, Homo sapiens
caagaatgtttcattgttgacatactttatataagtagagatttaaattagataaggatcatttcttcaagaaaattagattccagagggatgatacatttacaaaatcattataatacaattgtattttgcacaaaaactgacaagcacaaatagagaggatactgatgggtagagataggaaggaggcattctcagtaaagggcagcatgagtggaaacaggttaaaaaggccagggagatagaaggaatacgatgcttcagtttctttggccagaatatatgaaaatggagtaatgataaaggacttaagagactggtgaaagatatgaaatgtcatactgattttacgcttgaacctgggaggcagaggttgcagtgagccgagatcacgccattgcactccagcctggatgacagagtgagactctgtctcaataaaataaagaaataaatgtcatactaattttgaatgtcactcttagtcaaagagaagactaaacatttcagagtagctttcgtcacaaatagaggtggtgttctttcatgacarccgaatttctcaaacaagcgtgacagcagaaacccctgagactgtgtcagaatc

SEQ ID NO: 847417 - DNA, 516 bp, Homo sapiens
gtaaaggcttaataaagtcttctttgtttccttgttactgttacaatttccttggctgcagtgagaaacgtaaggcattgaaatcaggtggacttcttcaaactgtgtccctggagaagccagttgcctctcttaatcttagtttcctgatatgctaaatgaaaataacaacatattacagtgctgacaaacgattacaaagactaattaagataaaatacatttaaaaaaatctgtcatggtggttcgggcacagtgctcatgcctgtaatcccagcagtttgggaggccgaggcaggtggatcatttgagataaggagttcgagaccagcctggccaacatggtgaaaccctatatctactaaaaatacaaaaattagctgggtgtagtggcaggtacctggaatcctagctacttgggaggctgaggcaggagaatcgcttgaacccgggasgcagaggttagagtgaacaaagattgcaccactgcactgcagtctgggcaacagagtgaga

SEQ ID NO: 847418 - DNA, 623 bp, Homo sapiens
gaaattgttcgtaacatttccttatcaagttgtaaatatttgtagaayctgtagtaacgtctcccttttccttcttgatattagctatttctccattttatattctttatcagtctcacccggtatttaccaattttattagtattttctaaaatctgcttttggctgtgtttatcttctttcttctatgtttgtttcattatgtcattaatttcttctatttttattatttttttctgtattctttgggcttatttaaatgttattttgttacctctaaaaatggttgcttagatttaatgtttgcctttcctttttcctaatatattcatttaaatctataaatatccctatattactgatttagccatattctacaagtttcatttctaatatttttgttatcacttagttcaaaatcttttcttatgtccattataatctcttatttgattcgtggattatttaaaagtatactttttgactatatttttctattgttttccagcttaaaggcatttggtcagaaaaagttctctgtataatttcaatcttctgaaattctgtgaaatttgggtttgtttttttttttattccactatatggttgattttctaaaattt

SEQ ID NO: 847419 - DNA, 557 bp, Homo sapiens
ggagaacctgggccgctcacctgggtccttctgccagcagtcgagcattagtcggtgcagaaggttaggacagttcctggggggtggcagccggaagccatcctccacagccttgatcacctgggccacaggggtggggagcagagaggaggctctgggtttccccagcatatggtgtgtgcacacacacatgcacacacacagacacagacacacacacacacatgcgcacacacagacacagacacacacacacacacccaaggaagcctggggcagtggccaggcagaaccagaagcaagcagacagagaagaggggcctgaggcaggaagattgagggccaacgggcagaggtcaggaagctggggcctgagctgagagggtcagaaggcatgcagctggagccacgggttactcacgtcttggccagacatgtcccagtaaggccgctccccaaaggccatcacctcccacatgatgatgccraagctccacacgtcactggcagagctgaagtggccaaactgaagtgtctcgggagcggcccatagcgct

SEQ ID NO: 847420 - DNA, 516 bp, Homo sapiens
gcctttttttttgagacagtctcactctgtcgcacagactggagtgcaatggcctgatctcgcctcactgcaacctccacctcctgagttcaagtgattctcctgtctcagcctcccaagtaactgggattacaggcatgtgctaccacgcctggctaattttttgtatttttagtagcaactgccaccaaccagaaccgcaaaatgttggctgtctaccaggggcatgagcagttgatggaaaattacaagaggctggccagtgatctcctggagtggattcagcaaaacagcccccctgactggagaaccccataccccaaaagaccttccaggagatgtagcagaagtctttcatgactactggtgcatccacaagctgtccaaagtgcaggagagaggccagctggagctcaccttcaacacgctgcagaccaagctgcacctaagcaaccagcctgccttcaygggctctgagggtaagatggtcttgaacatcaacaacagtgggcagca

SEQ ID NO: 847421 - DNA, 521 bp, Homo sapiens
ttagttcaatcaatgcaaactcttaatacctcccaactcaagtatttcccaaggtgtgctctcattaaatgagcttgaaaatgctttgtattttatyggcctcttgggatatcaaaggatctgagaatttctgcagtaaacaaggtttttaatttcattcaacttggcaatttcaaacttataaccaccattcccattgctaattcctgtagaaatttcacacaattaaatgtccccagaaacatagtttgggaactattgttctttgtccccctttcccattacagctgtgtagtggatacccttggtaccccattcagatcctctagggtcttttaaccaactttttttcaccattgcccagctgtgctcttgccattaaaagtttatacctttgaccttcagaggactgaccttgggcctgtaaccagcctcacctgtagagagagtcagaagtgactcagagtttacatctcccttaggatggattctagcccatggctagctggtatgggatacag

SEQ ID NO: 847422 - DNA, 513 bp, Homo sapiens
ctgggctcagtggctcatgcctgcactcccaatgctttgggaggcctagatgggaggattacttgagcccaggagttcaagaccatgctggacaacatagctataaccctatctctacaactaacaataatgaatgcaaatgtttaggttcctccctagacctgctaagtcagaacatctggagtgaactcaggaaactgtgttttaaaaatccctccagatgattctgatcctcatgaaaatttagaaattagcattttacaccaatgatgctcatccctgtgtatcagaatccctagagagcttaattaaaattggagagtccagattcatgccccagatctattaaaactgtattttcacatagcccttcaggcaattctgataaactcaggattgaaaaccacatatttatacaaaataaattgtactgctttatacgctttcagtgtttgtatatcagaatttatcagacttgatagtttttmtccctctcagagagaaacataatac

SEQ ID NO: 847423 - DNA, 507 bp, Homo sapiens
ttgtataatttttagttgatattatttacttttagtgaggtggccttacagagctcctactatgtgtaatcttccatatgaaagcattataaatgacctgagataatcgtggcttcaaggaacttgtggaatgattagggcaagaaaacacatgaagggcatcatctccacgaggcctccagccttagcccaacagtaattagatgccctccatctaggggcttctatgcatggggataatctcatctgtctgtagttcagcagactggaaacagattctaagaaaagaggaaggtcttgtttgtatgctcagcatctattacagtgactgacatatggtagacagtccattagtgtgtcatgaataaatgagaatgctctagaatgcatggcagcatgtactatctgcatcagcacagattttaaktatcttaagagttaagaggacaggacaattcatagagtgctcagggaaatctactccaaacatgcactctgtaagtttaa

SEQ ID NO: 847424 - DNA, 488 bp, Homo sapiens
cttttgagcaccagcaggagcaaactccatgcatgcccccaaggcagtatctggtggggttcctgcaacccctgaagccccagagggagtgttacagtggtcttttagctctgccatytgcagacagcttaagtgttagcagctctgcagagcctccctctgccttttcatgtgagggagctgtcttccaccagtgagggcaaagggccagtgtgacagccttttgcatctgcacttgtggctcctaggctcttgtttggcatccaggagaaatgagtttggacgaaggaattgaaagatggtaaaaacaggattttatcgctgataaaagtggccctcagcaggaaggggagctgaaaaggggatggggtgggaaggtaatcttcccctgaagtccggctgtctctggccagattcttctctgaagttatgctgtcaagctgtctctctgaagtcaagccacttctctcagacgttgagccatagtc

SEQ ID NO: 847425 - DNA, 590 bp, Homo sapiens
tagaaagaagagccaagacccaagaagggaattgaaggtgcgagggaaactgtcatgcccgccctgccctggccttcttatacgggtgcctgttccctggctgcaggtcacgtgccacatcttgattctgatgggcatagcacattgacaactgaacaaagccacccggcttggaaatggtccctggtcaaggtgaaggacacgcctggtgctgccagaggccaccaggcagctgcaggcacgccctcttccttcctcccacacgcttggtagcacagagcctcattcatccaggccagcaggtcacagccatgggaatgtcatgctcagttcccagggaaaagggcagaggctttttcccctgcagaagaaccagtctgcacctagggccttgcccgttttccccaagagtcctgtgattatataagcatcatctgtccctgatgctggggtcctggtcaagacttccccagggcggggctggggtgacacagctaggccctggcctggagttcaaccaccctttgtcctgatggcactttataaaaayactgtcagcctggtctctgggataacagggttacaagcct

SEQ ID NO: 847426 - DNA, 634 bp, Homo sapiens
tctgctcgtgctcccctgggacagttggtggtacttgcagctgaagtcagctctgccccttaagtgctcctttctcctcctccagacatcactgcgtcaattctctttctctctctcttgtcatcagtttttctctcctggatcattttcatgcaaaactcctcaaaatagtttctgtactcacagtttccactttttcttcctccctgtctcctccccctaggcagagaaaatgtaatttcttcatttatagttgatttgattttcccctgtgctctcaacaagagaaatgaatgctctagcctaggtaaggcatgatccaggcggatcagttaagcagcccctctgggcagtgttcccttctctcagacatcatgcctttcctcaaggtggcccaggtgtacggggagaggggtcagtggcttaaagctagagggagaggtccttatgaagcttcacgccggctcctggggtgtcaggggctggcatttgctagactccagttccatgttcccttcctgcctggtcaccagtggctctgctagccttgggcgcakgggcctgtggctagtgaagaggtagcttctttcttggactcaggtgatgctatcaggagcacttgacatcttcccca

SEQ ID NO: 847427 - DNA, 517 bp, Homo sapiens
ttgatatggacatcacctctcagagcctaaatatgctgaaaactgaagtcaccagagaagcatcttgataacattcactgtttcagattaatagagggagttaaatacacaagcggcatcgaaatggcattatatctcctgcaggctgttagactaaatgaaatttagtctgtaatgcttgctggagaaggttaaaaagccttaaaaggcccatacaaaagccatttcctacccagtggggtcaggccgtcttgccctcgggaggtcttcatcccagcagactccctgagtcggccccgggagctcctcagcttgcctggctgcctgtgtcttctgacacgtgtgttcttcccctgtgccgactatgtctactctgcgccttttgctgtcytcgttgacgaggcgctcctctgccactccacgcttactgctgcccgggcactctgtctggtcagcattccagaaaatggatcctactgctgaacttccagggattcgtgggggtagaaatggccct

SEQ ID NO: 847428 - DNA, 604 bp, Homo sapiens
agatgaagacgtgttaatctagctctgtctgcatacctgaagacatctgagctgctggaatgtccttctccacccacccgctgccaagcctgctggctgccctggcacccaccaactaggcaggcaggggctccaggccatggaaaggagaactctgtgcctctgacacatgcacctatccattctccacgtggacggagagagacagggaaatttattgcagacatctctaggcccttctccatttacaagtaagaaattgaatgggacacatggagctcctagtgattccttcccaccttccacagggtgtcaactgcaggacggaagccaggaggcccaagttacagaagggatatgagacttactataaaggacattctctgatggtttctaggggttaaatagcagtctcaatttttccctcaaaaacaccctaaaaatatttaacttccaaatcatcaacttctggatgtagttggctgcacraaagtaacatccctacatatatttatgttccaacttagcactatcgcactctttttttttatcttcagaaacagggtcttcctctgttgcccacgctggagtgcagtggtgtgat

SEQ ID NO: 847429 - DNA, 540 bp, Homo sapiens
gacccgcagggccagtctcctcaaaggaaagggtcccaaaggcaaacccacccgaatcacaagaggggcgcycctccccccttctctgggttcagatttttaagcagatcttcaaagctaaaataaatgcccattaaatagccacatgcaaatagaatggagccgggcagctaaacacacaaagcccatctcacataaaacaaaagcatgattgatggcaacccggatgctcgtgtgtttggaaaaaaaattatacttgtccagtctcccagttgtctaaattattgaatagcgatgtgcatatttcaacgggagaaggtggctaggttagagacccacggtcggcacgaggaacgccacagtgtggtatatttgggctgggaaaggctcccgtgcaaagaattttaacacattcttctctgggcggccgaggaggccacgctaacctgacagctctggagcaaacggttagagaaaatggatcgctttcctcggcccaggatcccccacagccccaccccgtcccggcccggggcggcg

SEQ ID NO: 847430 - DNA, 568 bp, Homo sapiens
aatctgggaggcagaggttgcagtgagctgagatgacgccattgcactccaacctcggcaacgaaagtgaaaccctgtctcaaaaaaaaawtcagtctttctaagaaagggaggtcaggggtctatcatcaggtgcctggaacagtcagatcagttgtcaaccttgagtttttccagacgaactcaaggggggctggattttcccagagctcaggctgtaggctgctagaagccatgtcagagtttggtcaaagctctcaagagacagatttagatgaagtttttcaggccgagagtttttgcggttctcagaagacagtggcattgagtacattcacactgccgtacaaccatcaaaaccctccattgccagaactttttcatcttccaaaaatgtgtacccattaaacaatagctccccattcctcctccccttagcccctgacaacaccaattctttctgtctctatgaatctactctaggaacctcatataagtagaatcatacagtacttgtccttttgtgattgatttatttcactgagcataatgttctccaagattcatc

SEQ ID NO: 847431 - DNA, 566 bp, Homo sapiens
ttaagctctgttctgatttatattcttgtgcaataaactactctaaaacttgttggcttaaagtagaagaaaaacacaacattttattatgctcatgaattgtgcgtgacaaaaaattaacatagaatataatggggtatgaggttgcctattttctttatgtctgaaaactcacctgagagacatagcctaggagtgatttcacattggctaactccttcttatcctcctttgtgggttccagttcttcacatagaattatttaaatcctattccttgggatttcatacttttccaccttggtctgtagcctttcattgggtgattttatctcattgctttggttaatggctcgacaaatctatattggaagcacattttttctttcttgagcttcacacatgaatatagcagaaaagtgtaaacctaatatgttataagtgytcctttccaagtttgctcctctgactatattttttaatgagtgatcacatagttaggtaaatgtttcaaataagaaaactgcaagtaatccatttctcttaaacctaaaattcactgaaact

SEQ ID NO: 847432 - DNA, 595 bp, Homo sapiens
accttatgattcaggtactagttttgctgtcatcattgtgcagtggtgtgattgaaacttagaggcggccaggtgtgttggctcacaactgtaatcccaacatttttggaggccgagagaggttgcggtgagcyaagatcatgccattgcactccagcctgggcgacagagcaagactccgtctcaaaaaagaaagaaagaaacttagaggcattcatttaattacttgttcaaagtcactgtactagtaatgaccattgctgacattagactccaaagcagtctgattcttgaatccattttcttattgaacatactagaatcagtgaatttgtgcatgaataaatttctgaaaggcaataatgagcttctataatgtctttatatacctgtttatagcaaaacttacagctatttaaactttggtaaatggtagatgactgatggaaactaaaaataaatgatgaattcatgcctggaaatggcagagagattaattaaatcagtgtttctctgaacttgacaatttttaaaatcacttggaatgattaaaaaaatacacaccctgagcaacacccctgagtggtgtcattat

SEQ ID NO: 847433 - DNA, 526 bp, Homo sapiens
ttgccacttctagcacagtcccttgctttatcaataaacaaattagagtgataacccaaaatacttatgacagagaattaagattaggcctttgtgggccaccatrgattgatcgcagtaatgaccccgatttgttcatgcttccctgtatccatgcccttgggtagtgtcttaccacatggacactggacttgactcacctcagccaatgggatagtacaaatgtgatgcagaggcttgaaaagcacttgtgcaagggcatttggcctgactgctcttgaaccatgagttgccttgtgaaaaagcctaggccagctagatggaggctgattgaccacatggagcagaaagaaaaaaaccacccagctgagcactcccaccctagctgttcctcaacaaggccagccaagatcagcctaccctggccccaaagagcagaaccacccagctaatcccaacccatattgcaggcccaaagaaccagcagctgaataaacagctgtttagccgtccactttggagcttg

SEQ ID NO: 847434 - DNA, 483 bp, Homo sapiens
agcccagctggcttcacctagtggatcccacactggggctgcaggtggagctgcttgccagtcctgcgcgtgtgctcacattcctcagcccttgggtggtcgatgggactgggcgccgtggagcagggggtggtgctcgtcggggaggctcgggcggcacaggagcccatggagtgggtgggaggctcaggcatggcgggctgcaggtcccgagccctgccctgcgggaaggctgctaaggctcggtgagaaatcgagcacagcaccgatgggctggtactagtgggggacccagtacaccctccgcagccactagcccgggtgctaagtccctcattgcccggggccagcagggctggccggctgctcccagtgcggggcccgccaagcccaggcccacccrgaactccagctggccagcaagcgccacacgcagccctggttcccgctcgtgcctctccctccacacctccctgcaagctg

SEQ ID NO: 847435 - DNA, 489 bp, Homo sapiens
aagaaacaaaaaacaaaaaaaaaagaagaagaaagaaaaagaacatgcgtcagagggaagtcaggtaccatgtcctgagaacattcaatcagccctatgtagaggtccatgttgtgaggaactgaagccttttgctaacagcagtgtgagagagccaccttagaaataagtcctctctcaacagtaaggctttcaaatgaccaccacttcttttttttaaattttttattttattttattattattatactttcacttcttaagagactctgggccagaactgtgcatccaggcttttccaaaattccttaactatggaaacagccagatagtaagtgtttgccattttaagcgcttaggttttgaggtaatttattatgcaacaataagtaacatcatgagacrgaacttttattttcttctaagtgcaatgctaaaattttgaagaattttagcacagttttaatctgatttgagcagaggcaggaa

SEQ ID NO: 847436 - DNA, 592 bp, Homo sapiens
ggaatctaaaaattaaaaggttgaatatacagagatagagaatgaaacagtggttactaggattaaggtagagggtatggggagatatatgtcaaaggatataaagcagcagatagataggctaaacaaacctagaaatataatgtaccacattaggactatagttactaatactgtattcaagatttttgctaattgagtagatattagctgctcttgccacgaaggagaaaaaatggttaactatgtgagatgctggatatgttcatttgcttcattctattaaccattttgttatctacatgtatctgataacaccaacttatatgcaaaaaaaaatttaaaaagaacataaaactgtaaaaataaattaataaacaatcgcattggctcaccatacaagaagtgaaaactgatggtgctatatgtaagagaaaatagaaaaatccaccatcactgttgkagtcaaatttcatcctctcaacaactgataagtcaatcagaaaaaaaaggactcaatactttgagaaaactattaaaaacttgacttcatggacatatcaaccattgatttttaatgatatcactgcca

SEQ ID NO: 847437 - DNA, 299 bp, Homo sapiens
aaaaaaagagatattttacattcttttttcatgctaagtctttggaatctggcacatgttttacacttaaagcacactctgttggactagccacatttcaagtrctcgaagtacttgtggctaatggctaccatattttacagtgcaaggctagccacagtcatttatagccgttattccatcctggggagtttgcactttatcataggcaggtggcaatgggggaagaatgaagatgatggcaacacagaagagaatcagaataattaaatttgctttttggaaagttcacctgctgc

SEQ ID NO: 847438 - DNA, 299 bp, Homo sapiens
aaaaaaagagatattttacattcttttttcatgctaagtctttggaatctggcacatgttttacacttaaagcacactctgttggactagccacatttcaagtgctcgaagtacttgtggctaatggctaccatattttacagtgcaaggctagccacagtcatttatagccgttaytccatcctggggagtttgcactttatcataggcaggtggcaatgggggaagaatgaagatgatggcaacacagaagagaatcagaataattaaatttgctttttggaaagttcacctgctgc

SEQ ID NO: 847439 - DNA, 695 bp, Homo sapiens
tgatcagacttgagcaggtcctgaaggcacaagtaagttacatgaggaagtggcacaaatgyccatggtctccaccctgccaccctgacttctcttccccagcctgcaccaatggcctcatggggagttccctatcatcagttgacagaggaagagaagactagggcctggttcacagatgattctgcatgatatgcaggcaccccctaaatgtggacagctatagcactacagcccctttctaggacatccctgacagacagcagtgaagggaaatctcagtgggcagaactttgagcagtgcacctggttgtgcactttgcatggaaggaaaaatggccagacgtgcaattatatactgattcatgggctgtagccaacggtttggctggatggtcagggacttggaagaagcatgattggaaaattgatgacaaagaaatttggggaagaggtatgtggagggacctctctgaatggtcaaaacctgtgaagatatttgtatcctatgtgagtgctcaatgacaggtgacctcagtggaggaggagtttaataatcaagtggataggatgacccttctgtggacagacaccactcagcttctttccccagccacccctgtcatcacccaatggatacccatgaacaaagtggccttagtggcagggatggaggttacgcatgggctcagcaa

SEQ ID NO: 847440 - DNA, 695 bp, Homo sapiens
tgatcagacttgagcaggtcctgaaggcacaagtaagttacatgaggaagtggcacaaatgtccatggtctccaccctgccaccctgacttctcttccccagcctgcaccaatggcctcatggggagttccctatcatcagttgacagaggaagagaagactagggcctggttcacagatgattctgcatgatatgcaggcaccccctaaatgtggacagctatagcactacagcccctttctaggacatccctgacagacagcagtgaagggaaatctcagtgggcagaactttgagcagtgcacctggttgtgcactttgcatggaaggaaaaatggccagacgtgcaattatatactgattcatgggctgtagccaacggtttggctggatggtcagggacttggaagaagcatgattggaaaattgatgacaaagaaatttggggaagaggtatgtggagggacctctctgaatggtcaaaacctgtgaagatatttgtatcctatgtgagtgctcaatgacaggtgacctcagtggaggaggagtttaataatcaagtggataggatgacccttctgtggacagacaccactcagcttctttccccagccacccctgtcatcacccaatggatrcccatgaacaaagtggccttagtggcagggatggaggttacgcatgggctcagcaa

SEQ ID NO: 847441 - DNA, 543 bp, Homo sapiens
tttgagcacctgtaccaaaagatgtgctagacagaggaatgaggataaaatttgaattcttggccacaggattgaggttagtagtggaggaagagtataagctcctcctaaatctacagtgtttgaagttcttcagaaataagtctaggtcatcagtatttttaaaaaatgtgttacatgcatgatgcactatttttgtgtcgagaaaaacaacaaaatgcatattttaaagagagatgagcatgtggggagctctgttgactttgactgcagctactgaaagtagctgacagacaaggataaatagagatcaaattttatataaagtaactcaatttttcttatgaactagattgacttacatcctgtaaaatatgagatttgtgtccattacctacccctaaaacccacaattgcatgtcaccaaaatacagtctctgaagagttyttatctgtggttatagggctgacactgctggcggcattgccactgggtctgtcactgaacagtaccttgatcttcatggtgctgggtgctagggc

SEQ ID NO: 847442 - DNA, 543 bp, Homo sapiens
attgaaccctggaccacccaaagttacccaactctacaaattyttagtttctgcttaagctagattcttacaactgaaaaaatcttaactgataaattatcagaactttgatcagtataataattcttttgttacaaaagttaattgttacaaattagctattctagtttcaagctcaagtaaagataattgcttaaacaattctgtagactgctatctagggatattacttcttctaccaaagaatttttctgtcactagagggcgtcagagcccacagtggccaagtgacaaagtctattaataattatttctaccaattaatagaaatatgtatgggttcttgggaaaggaagagagaggacggagatcttagatttggataggtaatctgtgaatctaatcatatagacattgtcacctcctggagaacatattatttcctacaggattaaagaaatgacatatgcaaatcacctagtacacacaataaatactaatttttacttttacattgcttttcctaaatgaagtgacttcaca

SEQ ID NO: 847443 - DNA, 644 bp, Homo sapiens
attactgagtattaaggtgactagtcttctgacgtgtgtaacatatataataccacttctgcaactctcctgatgtctgcctttgcaccattagtaccgcctctctccagcagaacacactgaaggatggaagatgattaagagcatgggtaaagtaccacagaaaaagacagctaatactaaattaagctaattattaagctagaactaacacctgattacctgcagcatatctggctataaaatcctcaacctctattaccagatcagtcaaaagtggagaatttctgtcaaaacctgtatttatcaagaatacataaattcagactagttttctaataaataatctactcctggttaactcggaccaatacctggtattatactttgcccatcttcttcctagttttcaaagaagtcccttctaaatgtctaaattctagtgcctttaccttataaaaacctagggtgtaattcttcagatcacaggtgggtggagaactacaaccacagaagcaaatacactgacttcccagactctcaggtatattctaataggaccgtagttaaagctttaagcmagaagcagatggaaagcatcaccatccccaactctcccaaagacacctgttttaaacttccta

SEQ ID NO: 847444 - DNA, 646 bp, Homo sapiens
attcattgagcctctaccatgcaattatttatatgacacagcacttttcaggagaaacaatatgaaattgggaaatagaaaaccaagcttctttctctttctcaaaatatcacaccttcttagggaggaacatgtttatgtaattctgatttctctagtggaaaataatagctaacctatgacttttcattttagtgtggtactgtaagcattactcattaagacacctttatctctcaaaaaattttgccaaaatggaaacaaaacaaaaccaactctaggtatatcctgtataaaattgaaatacaagaaaaatggcaacccttattaaatactgtccagtattctaggtaataaagaaaataaatgaagactctacctactttaaaaataacatatctaaaaaaaaaatactggctgtagatataaacacttttcaataaaataacagaatctttatattcgagtgttgacctttaaaggaatctcacaatcatctacatttatttcagcagtgttgtatttggtcaaaagayttttttttgtttttggcaccactttcaccagtttacagtcatataagaaaatgaatgcagttttcattttataaatcattctggaaaacaacttgaaaactggaaaaggc

SEQ ID NO: 847445 - DNA, 564 bp, Homo sapiens
aaaaattctacatattccataaaattcattacagaagatagttttcaatatttctcatgtgaggttctaggtaaccaataatgttttaagtgccagtaaaagaacmcaattgaaattagaaatgcccaaataggaaacccttgatcatttgttcttatgcaactgatcttcctgttatcaggggccactacaaatctgttctggaaataggttaggtaataacaggtagaccaagtgacttgaactccagatcatctgtaactatataaacagatgacacaatacagctacccttgcacctgagcttttcttccagctgagtatagcacagactgtcaggaagtaggataagatggcttaacttctcattcatttaacaaatatttatcaaatcactattgaacaataaactctaattagtaatctaatattaagatgacatgcctaacctcagaggactcaaattctctgactgcgtatatatttctcaactctttgcatttcttctccaattaaaaaaacacaaggtcattgagttaggcagactgtgttcaaaccagagat

SEQ ID NO: 847446 - DNA, 631 bp, Homo sapiens
ctactttgatacataaatgtataaatctgaagaatctaaacccagttgtaaataatcaccactttgtaagagtcgttgcttcagtggctggcttaagtatttttggtggaatgtactcctcaacatttgaacttgacttttttttggtcatgcatgtagaaaaggtttaccgattatgagcaagttagtagaagttgaagaaccaattacttagaggtttatttcctggaactactgccttcaatttcttgtgcagttgcatagagaggaatagggtgaggcattacaggtttccataaagctatcagtccctctcttaacttttcagtcagactcacatcttcacccactgtccaacatccagacacaacaggcagtgagcagaccaactttgttcctggtgttctccctcttctctctgggtttcttttttcttttcagtttcttctctgggcttctttttttctattcagtttcttctctggttttcttttttctattcagtttcttctgtgggtttctttttctattcaatttcttctctgagtttcttttttctattcaatgtcttctctgggtttcattttttctattcaatktcttctctgggtttcattttttctattcaatt

SEQ ID NO: 847447 - DNA, 622 bp, Homo sapiens
tgaatatttactgcagcactattcacaatagcaaagacctgaaatcaacctaaatgcccatcaatgacagaatggataaagaaagtgtggtgcatatacaccacggaatactatggagtcataaaaaaaagaatgagatcatgtactttgtgggaacttggataaagctggaggatgttatccttagcaaactaacacaggaacagaaaaccaaataccgcatattctcacttataagtagggttaaatgataagaacttatgaacataaagaaggaaacaacagacactggagtctacttgagggtgggaggagtgaaaggagcaggaacagtaactattgagtactggtcttgatacctgagcgatgaaacaatctgtacaacaaacccccatgagacgtgcttaactatgtaacaaagccttacatgtacccccaaacctaaaataaaagattttttttttgagacagtgtctcactctgtcacccaggctgaagtgcagtggtacagtggcgcaatctcagctcacagcaacctccacctcccgggttcragcaattcccctgccgcagcctcctgcatagctgggattacaggtgcctgccaccacgcatggctaat

SEQ ID NO: 847448 - DNA, 619 bp, Homo sapiens
gggagtggaggtggaggaagcaaaaaagcagcaggaggccagggagcctatgtgagcccacctggggtcccagagacatgatcccgctgcygccctcattcctaatccacagaggcccctgacaccagccctgatggcgggcaagggctacttgggagggaagagaaagggtagctgggggaggtagaaatggggcctgaagaagagtctcggctgggcacagtggctcatgcctgtaatcccagcactttgggaggcccaggtgggcggatcatttgaggtcaggagtttgagaccagcttgacctacatagtgaaaccccacctctaccaaaatacaaaaattagctgggcctggtggcgggcgcctgttatcccagctactcgtgaggctgaagcaggagaattgcttgaacccagtaggcagaggttgcagtgagccgagattgctccactttactccagcctgggtgacagagcaagactccctctctcaaaaaaaaaaaaaaaaaaaaaaaaagagtcacacgagaggccgagccactgggagggctaaccctgggtgggccggctcctgagtggatgctcccgggatctgcagagctggggagaaccatgct

SEQ ID NO: 847449 - DNA, 657 bp, Homo sapiens
ggtcctcaccccaccaccagcaggtctcggccctgtgcctcataggttcccagccttcccctgctygggccctgggtttggctctggggctgacagcccgtgccttgactgtggcatgtgggctgtggctgccaggtcaggaagaatcagtggacagttggtcacaagcaccctggtcccaaatcttgaaatgctcacgttcttcaacttcttcaactactaccccacccctccaggccttttcctctctctgacagcttcacttcaccccagtgtctcctcctcctcctcagaagtggccgttccccagcatttggagcccaggacccctcccagccctgaagcatttgcctcccagcctcccccgaaccttgctcccctactgccaccccctgtctgtcccggaggaggcctcatagacacttgctgcgtgccactccaaggaggctgtggtgctcctgccaactctccagtggctgccacaactgctgtcttcaggaggaggagggatggccccctcagcctccctgcctctgctatctcagccccagcgtcccggcatcatctgctccacctccaggcaagtcagagccaggcttgccatctgcctggcagcctggggcactgtgcctttatggctcccgggtaggacgtgga

SEQ ID NO: 847450 - DNA, 657 bp, Homo sapiens
ggtcctcaccccaccaccagcaggtctcggccctgtgcctcataggttcccagccttcccctgcttgggccctgggtttggctctggggctgacagcccgtgccttgactgtggcatgtgggctgtggctgycaggtcaggaagaatcagtggacagttggtcacaagcaccctggtcccaaatcttgaaatgctcacgttcttcaacttcttcaactactaccccacccctccaggccttttcctctctctgacagcttcacttcaccccagtgtctcctcctcctcctcagaagtggccgttccccagcatttggagcccaggacccctcccagccctgaagcatttgcctcccagcctcccccgaaccttgctcccctactgccaccccctgtctgtcccggaggaggcctcatagacacttgctgcgtgccactccaaggaggctgtggtgctcctgccaactctccagtggctgccacaactgctgtcttcaggaggaggagggatggccccctcagcctccctgcctctgctatctcagccccagcgtcccggcatcatctgctccacctccaggcaagtcagagccaggcttgccatctgcctggcagcctggggcactgtgcctttatggctcccgggtaggacgtgga

SEQ ID NO: 847451 - DNA, 359 bp, Homo sapiens
aaggatccctgaggtctgaagtccagcatgctattttactagcgatactgtttggaagaataaggtcatgtttcagagaagtgtctgcttttctacaatcaaagaagtagaaaaaaaaatgccttttgctgggatttcttgttcagttaaaacttgtgcaggagttccatccattagcaccgacagaaagtggcagaaggtgttaagaaaaatggctgctgggatcatgagcgaaggtaatgagtggcctgagatgttgagccgacaatgtcctcatcrtctgctgggggcctctgggcttgctaaggcttgaactcctgctttccagaaaggcacagtggtgagtagacaggcggcct

SEQ ID NO: 847452 - DNA, 568 bp, Homo sapiens
ttggtctggcactaaattttgaaaatgagaaaagtacttaacttctcgctgaattcactgtgtgaaatactgcacttcacatttattttcatctctttttctttgtagggttttgtttgttttaaaatagtctgatagcaacataaaagctctaattcttaggcctgttgcctgtttatctaggctgtcacacacaaaaattttaaataactataacagaacaataaagctaccctcaaaatagaggaaaattctcaaaattaccctccttgcactgagtgtttaacttgtaaagaaagaaacaacaaatgttctaaaattaaaaatagaaactctggaaataatcctattattttagttctactttatgcctgccacatagtaggcccataaaagatatttattgcatgactggctggatggttaaatagattcattactgccaactggacaacctgaggtcaacmagccttccccaaggactttagccagcagaactggtccagaaacatatttgggcctagagaagaaatgtaattaactaggcaagtcaagtcttctctaacac

SEQ ID NO: 847453 - DNA, 602 bp, Homo sapiens
gactgggaagcagctgcgccctggacggagaggggcggggactccttggcgcargctgaaggagggcaggtgtcgctggcggaggcagtgacggggggacacagccgccactggatatccctgtgcaagtttcttcgctttcctgtgcatcagtgcttacattggggtaataataaatggtgtgttaaaaaattaaatgaggcggtcaagaaggaatcgtgtcctggcccgcgcggagcctggggtggagggtaagggttggccagagggggccgctgtcaggccacgagcccggggcgggacgaagcggagccacagcaggcataggctccccgggtcccagcctggggtggggcggggaagggcgggacggggcgggatagggcggagcatccctccaaacgtgggcaggcgtaggctcccctggatcccggggcgggacgggacgggacggggccgagcacactcaatcactagctggcatgcgagggccgaagtgattcatacgctggtctccacatcgactgcgccttgtgtcccgggcgctcctggtctacaatggcagcggccgccagccccgcgatccttccgcgcctcgcgat

SEQ ID NO: 847454 - DNA, 643 bp, Homo sapiens
gtctacaatggcagcggccgccagccccgcgatccttccgcgcctcgcgattcttccgtacctgctattcgactggtccgggacggggcgggccggtgagttcggggatggagcctaagcggggcgggggccaaacctggggggctgtggactgcagcgggtttcagaggagggaagccttctagaaggaccggcgcgatctccccggactgcccccacgctcagttccgattcgctgctctttttcgccaggtccgcttcctgcggctgctgcttgccctgcagagcaggaggggggtcaaagaaggcgaaaaaagaaccgcaggagggtggaggggccaaaaagctgcagagggcgaggtggggaggggatccctggtgcaaccccgcagccccactcgtcctcgggaaggagaaaccagagcccccggaacccgagctggggtcaagacatgggtgacgccagcgtcatatagaatagtcactaagcagacaggagtcagcaaaccctttctagaaaggaaaggctgaaggcactttggtccttgctggccgtgagttctctgtctctgtgtcaagtcccgtccctttgtagagcaacagcaggcaatggmaacctgcaagtaaaagagaaacctgaaat

SEQ ID NO: 847455 - DNA, 640 bp, Homo sapiens
tcaaatccagggccatgttggatccactcattcttagtcagcttggtccacatgctgtttctcagcaacttatcagcccagagccactgcagatatttcaacagatttcttttgctagtcacctgaaactgctgcccaaaattttctattcttttgagaccaccgtgtagtatacctgtctcactttggagaaatgtctattcaaattccttgcatatatttaaattgggttatttccctttgtaatattgagttggaagagttctttatatattcagaataacagtccattaccagatatatgattttcaatgattttctctcgttctggaagtttttttttaatcttctaattggagttcttttggaagcacaaaagttttacatttgcatgaaatgaaattaaactaccttttattacgccatttgtgctactggctacagggaacgaggggtgggcaggaagccccctggagtccctgactccctccacagcaagtcaaccagaaaatcaattcaacattcatacatgcatgttatctsacacacacacacacatgcacacacacagagacatgcaggcacaatctctcacacacactcacaccacacaggcacacacattcacagagacacacat

SEQ ID NO: 847456 - DNA, 609 bp, Homo sapiens
aaccttggacaaagagatggtccacacagcaagaaatggaaaatctgaaagtctaaggcaggtagtggagggagagatcacaggctcagagaagtgcccatgccagaggggtctaagtgtgaaaatccagaacaatgtccatccactgtgcttatgggaaacctggaggactcctgtttacccagcatataaagaaggccccatgagaaggcatcagaatggaatgaagcttagggatgcctattgctgaaggccagggttgggggtaggagatgctgttcctgaaatctgctcccagagtaatgggatgaacaattctgaaattccaaattccaggtggaggctgtcaactgtcaggagcaaggagggtgcaatgatggaaatgattagagaagtcacaatgccagctggggacctcagttatacaaagttatgcccatggctcatagaacaaaggggtccaaagtccaaaagagatgsaaacccaccccggatactgctggatttaaataattacaagaaacagagataaaccaaatcaggaggctgaaagtagccagtccatcaagaacgaggctgctttgcctaatttgcagaatgaagccactt

SEQ ID NO: 847457 - DNA, 595 bp, Homo sapiens
ctaaagatagaagtggtattaaaatgttgtgcattcgtcaaatcttgaagaagtttcaaatttttaggttgattctaacctctcattttggttgacacaataatccataaaaacaagtaaagcgcccactctgatctggaaggggtaaggaggtgaaagtattgataagccaaagtgacagcctcttttgtagacatgatcctgcctaaatatctcatgcccctcaaaagagggccctgaacgccctgcttctgcagagctccatgcagtccttgaagcactctctggctgtctctgcaagtggctgaacagctcctcctggtctctgtggggctgcagaggctccaggtccccatggctcaggggctgtcatgctcaccaggtcccatcaagggtgcaccccactgtgggtggtggaggagaccaggtgtagctgctcctgcctctacacctctcctgacyggccaatcttaacaggaggaaggagtagggatgagtggagccatggaggttggtgctggaaagaacagaaatgaagaccttcgtccaatcccccaaatgatggggatccctttctgagttctagcagccctgg

SEQ ID NO: 847458 - DNA, 594 bp, Homo sapiens
aaaacattattttacattttattttgtacaggttttgtagtaatatgtccactttcacttatgactttaatgatttgagtctcctttctcaatctatataaatgwttgtcaattatatcaaactttttcaaagaacaaacatttgacttatttggttttctctattgattttttattttctgaatcatttagttctgctctaatcatgataattccttgcttctgctagttttagatttagtttgcttatcattttttagttccttatggtgtagagttagaatattgagttgagatctttcttctttttttaatataggtatatgcagctataaattttactctgagcatgggttttactaaaactctacatttttacaagttgtttattccttttactttgtctgaagacattttctaaaatcttttgtggtaagttctttgacccattgttgagagtgtattgtttaacttacatatattttgaagtttcccaattttcttatgttatcaatttctagattcatagcatcatagtcagaggagattcctttgtataattaatatctatataattttattgagacttgttat

SEQ ID NO: 847459 - DNA, 625 bp, Homo sapiens
cttgtatggtaaattattgtcctaaagtaaaatgaccagttgtttaaaaggagggattttagggcaagtcagaaagtmcaaggatgtctcatacggtccatgtgagtcatgaaaagatttgtgaaagggaatttatggaagaaatgttgtacaattcaaaggttgttagacctcctaaatgcttcataaaatgccactataactcttgtcgtacaacttgcctgcttaagtaaggtaagacctggggacatgtggagttagccaagcccctagctatcctggagagtcagctcttgtctgcatttcttcctggtgtgtgctaggctaggctccacacttagtacctaattaaaatctcttacttaccaaggttttcaccaaaaataaaagttgctgagagttaatattataacatgaaattaaaactactaaagaaacgattttacatgcaaaggtgtgtaaagaaagtaaaatgtgtttttggtgaaagattataagaagccatggaaatgtggatttttttttttcctttctgcctaaagtgttaaatgattgctttacgtaagaaaaaaatctaaaatttaagcaagttgtggaaggtttataaaaattaattgtaagatat

SEQ ID NO: 847460 - DNA, 625 bp, Homo sapiens
cttgtatggtaaattattgtcctaaagtaaaatgaccagttgtttaaaaggagggattttagggcaagtcagaaagtacaaggatgtytcatacggtccatgtgagtcatgaaaagatttgtgaaagggaatttatggaagaaatgttgtacaattcaaaggttgttagacctcctaaatgcttcataaaatgccactataactcttgtcgtacaacttgcctgcttaagtaaggtaagacctggggacatgtggagttagccaagcccctagctatcctggagagtcagctcttgtctgcatttcttcctggtgtgtgctaggctaggctccacacttagtacctaattaaaatctcttacttaccaaggttttcaccaaaaataaaagttgctgagagttaatattataacatgaaattaaaactactaaagaaacgattttacatgcaaaggtgtgtaaagaaagtaaaatgtgtttttggtgaaagattataagaagccatggaaatgtggatttttttttttcctttctgcctaaagtgttaaatgattgctttacgtaagaaaaaaatctaaaatttaagcaagttgtggaaggtttataaaaattaattgtaagatat

SEQ ID NO: 847461 - DNA, 604 bp, Homo sapiens
caacagcgcacatacggtcttttttctccacaacctcaccagcatctgttgttttttgactttttaataatagcctttttttttttccgagacagactctcactctgtcatccaggctggagtgcagtggaatgatcttggctcactgcaacctccacctcccaggtacaagtgattatcctgcctcagcctcctgagtagctgggattacaggtgcatgccaccacacccagctaatttttgtatttttactagagatggtatttcaccatgttgcccagaatggtctcaaactcctgacctcaagtgatccacctgcctcagccccccaagtactgggattacaggtgaacaactgtgcccagccaatagtaggtattctgactggtgttaattgttatctcattgtggttttgtgtttctctaatgatcagtgatgttgagctttttctcatattattgttggccacatgtatgtcttttgagaagtgtctgttcatgtcctttkcccactttttaatgtggtgatttgtttttttcttgtaaattttttaagtttcttatagatgttggataatagaccttggtcagatgcatagtttgc

SEQ ID NO: 847462 - DNA, 645 bp, Homo sapiens
ctgcagaaacgattttaaaatttttctctgctaataaaaaaaaaatccaaggagttgtcttagattgtccaatgaaatgctcagagcaggaaaattgcaagccggaaggagaagtctgtggtttgcaaatgctcacctattgtctgtggcatttagtgttcggtacactggccaagtttcatagaatgagaattatcatgatttcatgtaatattgtaaatagtatgctacttctgcccttatctccttctctttcactgtctgctccttcctatgcaactatgtatatatttgaataaattttcactccaatggtagcatatacaagctgaatcttagcatgcatgtcaggaaaaccatccatggagtaaaggtgagggcagaaagatggtatccacagaatggctataaagatgtctctatggtcttagtacctggattccagtcttcagtggacatggggccacattaataaccttactggacaaataatctcacaccatgactttccataccatcagatagtcttactcaagccaatatatttgtcctctgcatagaatactttgtgcatgaaaagsctattctctgaggaacagcactgaagaaagaatatcttaaaaaaagaaatatcaagatttgatt

SEQ ID NO: 847463 - DNA, 583 bp, Homo sapiens
agcctcccagcctacatctttctcctgtgctggatgctttctgcttttgaacatcagactccaagttcttcagttttgggactcagactggctctccttgctcctcagcttgcagacagcctattgtgggaccttgtgatccagtaagttaatgcttaataaactcccttttatctctatctatctatctatctatctatctatctatctatctatctatctatctatctatctatctatctatatcttattagttctgtccctctaagagaaccctgactaatacaggcttaatgcagaacaaaaatacaggtggaaaatttgggtggggtgaaaaataggtaaaacttcattattactaatagtgttgtagtagcaaaaataagcttttaatggttaaatataatcttgacttattaaaataaatgatattgtttgtattatttcattttttagacctggtcctggaactgtatagttaagtggctgcattcttccatcagaaatgccttytcatgtgcattcttaccaagtcatatttcgacttctgtcttctatctgaaggcaggtcattactttaatg

SEQ ID NO: 847464 - DNA, 538 bp, Homo sapiens
atacatggaaaatggggaaattttatgttatgtaaattgtatctcaaaaaggctctttaaaattttttaagtgagagaaaagttaagaatttattagaaaattagaaacaagaaattttaaaggaagttaytcagatcaaagaaaaatgatactagaaggaaatttggattcgtacaaagcaatgaacaaaacccagaaatggtcactatgtgggtaaacataaaatatattttgctcatgtaaaaatatccttaaaatgtaattaactgttcatggaaaaacaataaaaatgtattaggggtttataatatatcagcatgtagcataaatacataaaagtaatagcttaaaaatggagggggagacagtgaagtgatgtttgaagtttgatgtgaagtggcacagcattatttgaaggtggattgtgatacgtaagtggtatatatgttaatatctagaaccacactttccagcaagtaagccattatatgcatgtgactactgagcacttgaaaagtgatgaatgatactatgcag

SEQ ID NO: 847465 - DNA, 628 bp, Homo sapiens
tttaataattaatgatgttgaattgaccattttttgtgcctacaagtcattcataaattttatttcattatatatttrttcaagtactttgtgaaaattattgggtttgtcttattaggttatattacatatatggatatatatatatagttatatatacacagaaatatgtacatatatattcatgatagaatgttttatcagatatctgatgcaagtattttctcagcccattttgtagcttgtttgtgtattttttaaatgtgactttaaatgaaaaagtagtaattctgatgaagttcaaatatcaatttttaaaaattccatgtgatttggtgtcacatgtgagaaatctttgcctaacttaagattatgaagatttgctgctcctatgttttcttgtaactgttatatttaggtttataattgtgttggggttccctaagaccactaccaagtttggtgatttggtaggtggactcacaggactcaacataaagtcatacactcaagtaagatttgttacagtaaaaggacacaaataaatagccataaagggaaaagatacacggcgctgaagttcagaaaaagcaggtacaagcttccaagagtaattgtagaatcacag

SEQ ID NO: 847466 - DNA, 594 bp, Homo sapiens
atttacctactttttttttttaacctttctcccccagcttcccagactgcaagccccaggaggcagggccacatctctcctgttcacctgttgtccccragagcccatgcctagcatgcagtagacattcaacaactattaggtttttacagaggaagaaactgaggctcagagaggcaaggcacacagctggtaagtggtggtgctgggattcgaactcaggctggtctcactccaaagccagcatcttaactctgccctggctactaagccagggacaaggcagaagaagctcaccctggccgagctgacggtggtggaggtgccgtggctgcctgtggatgaacccgtgtcactgtaggagaccatggagtaggtgtccccagccccggggcctgggggctgccgcgccttcatggactcaatctcacgcctcagcaccaggtggtcgaagcgttctaggtcttgcggggaaatggtgcctctcacctcagagaggagtgagaactggaggcggggacaaaaggggcactcagcagggagcgctactagaaggtggaacaggggccctgctacccccaaaggactggcatg

SEQ ID NO: 847467 - DNA, 628 bp, Homo sapiens
ggttgactttattaaagtattaagtagatacaccatctgagaatttaaaagtctgtctttttcattcaaatagttgttcatcctattttttttgttgttrtatgtattggctagagacttcaggataatgtcgaataatattaatgataatattgactttaatggtgtattagtcatgtctcttattttctgaattcgatgctttgacatccagggctttgttgtccgtggagggactgcccctctcaggataagctaattcctggacgtaagcaacttgcctgcatgtatgtcttcatatataaaccaaccaatccagagctcataccccattctttatcctttctttatcaccctctattcttctttatctatctttatccttctttatcactctcatgtcccaggccactatccgcctgccctaattgcctcagggccaggtagcagacaactagggacagcctctcctccccaagataccatgaaattattcaaactagccaatcctaagactggttgccctgccttgcttgttccttcctgtggaaagtacagtaaagagtcttgctcgtgctttcccccgtcccctctacctcctgactgaccttgatgtttccctgttttg

SEQ ID NO: 847468 - DNA, 552 bp, Homo sapiens
tttcctgttactcctcagctactgccaaggcatgaggtctcagcacacttgactacatcacagcagggtgcttggccatgcactcagaaaatgtgcccaaagggtggttccctagcaagtcaactgtctgtgcatcttgtgaaatatttgctgctggctcctgattcttctggaatccttttctggatgctgtggattacctagcagccaggcttggcatgggttctggagcaggaatccctgaggcagattaattatggacttctgagcaggggatattgatatcgttgatatccaggaacagtttgtgtgtggcttccaaccaagctgcagctagcttatgagaagaagcaagattatcaccgaagagagtcatgagactgtgggtctgcaagttggcgcattgtctggatcactgtccagcttcagtgatagctggactgtggccccagagcagctcargaaatcaccatgtggaagttgctggaacaaccatagccactctgaaaccttcacacttgacccttagaatacttggaccagcttctgaaa

SEQ ID NO: 847469 - DNA, 626 bp, Homo sapiens
catggtggtgggcacctgtagtcccggctacttgggaggctgaggcaggagaatggcgtgaacccgggaggtggagcttgcagtgagccgagatcatgccactgcactccagcctgggtgacatagcgagactgtctcaaaaaaaaaaaaaaagacagatgcacgcttgccttaatcgtagcaccattcacaatagcagggacttggaatccacttaaatgcccatggatggtggattggataaagaacatacagtacatatacaccatggaatactatgcagccataaaaagagtgaaatcctgtcttttgcaacaacgtggatggaggtggaggccattatcctaagtgaataacacaggaaggaaaaaccaaatactgcacgttctcacttacaagtggtagctaaatgatgagtacagatggatgcaaagaagggaacaacagaccctgaggattacttgagggtggagggtgggaggagggagaagatagagaaactacgggtactgtgctcttacctgggtgacaraattatctgtatacctaattcccatgcaacaagcccacacatttaacccctgaacctaaaataatatctgaaaagaaaatacataaaaataaaa

SEQ ID NO: 847470 - DNA, 626 bp, Homo sapiens
catggtggtgggcacctgtagtcccggctacttgggaggctgaggcaggagaatggcgtgaacccgggaggtggagcttgcagtgagccgagatcatgccactgcactccagcctgggtgacatagcgagactgtctcaaaaaaaaaaaaaaagacagatgcacgcttgccttaatcgtagcaccattcacaatagcagggacttggaatccacttaaatgcccatggatggtggattggataaagaacatacagtacatatacaccatggaatactatgcagccataaaaagagtgaaatcctgtcttttgcaacaacgtggatggaggtggaggccattatcctaagtgaataacacaggaaggaaaaaccaaatactgcacgttctcacttacaagtggtagctaaatgatgagtacagatggatgcaaagaagggaacaacagaccctgaggattacttgagggtggagggtgggaggagggagaagatagagaaactacgggtactgtgctcttacctgggtgacaaaattatctgtatacctaattcccatgcarcaagcccacacatttaacccctgaacctaaaataatatctgaaaagaaaatacataaaaataaaa

SEQ ID NO: 847471 - DNA, 609 bp, Homo sapiens
gtgaccgcatcaatgtttcaaactscagaacaaaactgcccacactcccagcagccaacttccacctggatctttctttgatcttcagtgctgggatatagtcctcgtttgcttagggagaatttttggaagcattcttttctttccaaggtttttttcttgaaattgagaaatagcgcagactaaagagtagttgcttcatatgcttcatatttattttactgcagcctctgtatttctgtggaggcccatttttaagattaattttgttcatggattacacgtgtagagcatacacattcatattgacatggattacctgttaatattgggaggcgttactgggttagcgtgtgtaatgtttattggtgtcaactttttaatacatcgttatttatgaagctgggttaaacgtcctttctactgctgtgtgtttaaactcactcccctccaccgccccatgtcccgatttaaatgtataaattggatgagattaatttctcctaaattggaaggacttgatctataaatatggtggagagggagggataataaccacactgatgttaacatgtctgaaactactcttaagtatttaagcttttcttt

SEQ ID NO: 847472 - DNA, 609 bp, Homo sapiens
gtgaccgcatcaatgtttcaaactccagaacaaaactgcccacactcccagcagccaacttccacctggatctttctttgatcttcagtgctgggatatagtcctcgtttgcttagggagaatttttggaagcattcttttctttccaaggtttttttcttgaaattgagaaatagcgcagactaaagagtagttgcttcatatgcttcatatttattttactgcagcctctgtatttctgtggaggcccatttttaagattaattttgttcatggattacacgtgtagagcatacacattcatattgacatggattacctgttaatattgggaggcgttactgggttagcgtgtgtaatgtttattggtgtcaactttttaatacatcgttatttatgaagctgggttaaacgtcctttctactgctgtgtgtttaaactcactcccctccaccgccccatgtcccgatttaaatgtataaattggatgagattaatttytcctaaattggaaggacttgatctataaatatggtggagagggagggataataaccacactgatgttaacatgtctgaaactactcttaagtatttaagcttttcttt

SEQ ID NO: 847473 - DNA, 516 bp, Homo sapiens
ggcttcaccatgttggtcacactggtcttgaactcctgacttcaggtgatccaactgccttggcctcccaaagagctgagattacaggtgtgaaacaccgcactcagccagtctatctcttaaatataaatattttccagtgttttctcctgggctctctctccttgtactcacacttttgagggtaatctcatctatttttttgtcttcaaaccaccgaaatcatgctgataactcttaaacttctatctccagcacagcttccttctgagctcagaaccacatttaatttttttatatccctgcagtacctcaaaacaacatgccttacctacaaaacacactttttcttccctggggtggtatgaccttttacccaggtcctttgttttctagtttttgttttttttttttaagagacagggtcttgttctgtcaccaaagctggagtgcagtggccattacagctcatggcagyctcaagtgagctcatggcagtctcaagtgatcctctaa

SEQ ID NO: 847474 - DNA, 635 bp, Homo sapiens
ttgcactgtgtatctggaaaaactgcagacactcaacaccatcccatgaaagcagccagaagggaggctgcccaagaccatgtgaatccacctcttgcatcagtgtgacctggatgcaggacwtggaatcaaaggagattattttggagctttaagatgactgccatgctacattttggacttgcatggggcctgtagcccctttattttggtcaatttctcccatttggaatggctgtatttacccaatttctgtacccccattgtttctaggaagcaactaacttgcttttgcttttacaggctcataggcagaagggacttgctttgtctcagatgagatgttggactgtggacttttgggttaacactgaaatgagttaagactcttggggactgttggaaagacatgattggttttgaaatgtgaggacatgagatttgggaggggccagagttggaatggcattgtttggctgtgtcgccacccaaatctcatcttgaattgtaactcccacaattcccacctgtcatgggaggaacctggtgggaggcaattgaattatggtggtgggtcttaatgagtctcatgatatttgatggttttaaaaatgggagtttcccttcacaagctt

SEQ ID NO: 847475 - DNA, 621 bp, Homo sapiens
tcatttgaattgtttccagattttagctatttttaataatgttgctttaaatacttttgtacacgtctttttgtgaacataaacactcatgtcttttgtgaataaacatagaaataaaattgcttggtgataggttagaaatattgcttacatttaatagatactggagaacagtttttcataatggttacaccagttttgccttccatcttttctgcatccttgccaatatttggtgttactaactcttaacttttgccactctgatgggagtgtagtgtatctaattgttgttttagttcatatttccctgttgatgaatggaacttaacatgttttcatatgcagttaaaccatttggatatattcttttgtgaaatgcctgtttaggtttttgggtttttttttttggggtggggggtgtctatgttttctttatttgaagttctttatattttgtgggtactagttctttgttggatacatgtattgtgattatatatctatgtacatattttttctttaccaatctstagttttccttttactctcttaaagctatattttgataaaaagattttcttcttaatgggatatagtttattgacatgtttctttatg

SEQ ID NO: 847476 - DNA, 545 bp, Homo sapiens
ttttggagcagttttaagtttacagaaaaattgagcagaaagtacagggagtttccatataccctcctcccygaccttacactttcccccattactaacaccttaacaccttgcattagagtgataagtctgttacaactgatggaccgaaactaatatattattattaaggccacagtttatattagagttcactctttgtgagtccagcgcaaatcccttctcttctggaaagccttcttcagccagcccagccctcagaactctctcccagactgaatttatgcccttatagtcagtgtgtcctgctcacagctctagacacatccaaccttgcttgtaggcaccatgtgtgcgtgtttcagggttgggtttcttctgctaaactgtaaactccttgagggcagggaagggactcacaggctcgaagtcttacacttgctcagtgacagccaggggtccctaaatatggtcacaggaacccttgatctgttttctatattgcaaactgcctgagggaagccatattattaatcaaagtaaga

SEQ ID NO: 847477 - DNA, 437 bp, Homo sapiens
gacaggaacctcactgtttcccaaagcttttatttatttattttttattttttggatgactcagactacagaaaactgtctttaatatgagtcaaaaccttcctccctctatcttcttctgatactagtttccaactggaggttactccttacaaataagactcctgattcactgaatggctcttcaagtgctgttcagagcagagcagacataagtgcctggtatcaccgttcttttcttgtttgaaaaccctgatttctctccttccacatagtttcctgacacgtgtgccaactgtggtttctctgaatctcccaaccttgtatggtcctaggggctgtgatatggtttggctgtgtcccctcccaaatctcatcttgaattgtagttcwcataaaccccatgtgtcatgggagggacctggttcgaggtaatt

SEQ ID NO: 847478 - DNA, 603 bp, Homo sapiens
ttttttcttttttatttttttatttttatttttttgagatggagtcttgctctatcactcaggctggagtgcagtggtgtgatcacggctcacttcaagttctgcctccagggttcatgccattttcctgcctcagcctccccagtagctgggactacaggtgcccaccaccacacccggctaattttttgtatttttagtagagacagggttttaccgtgttagtcaggatggtctccatctcctgacctcggcctcccaaagtgctgggattacaggcgtgagccactgtgcccagcccatagctagtccgtttctacacaatctctctactggggttctattactcctccttttggctctcaacacagttctgttaagtacttgcatctggacgatgaaaaatatgttcatcaatggcactgcaatttcttccctagtggcagccaatactctggtaccataggctatttcggcagcatctccccccttggctatctcaggtatggatcagacacygttcagtgcatccccaatccgcatgggacatatcaagctgtctgaatggtatcattgaactttgctcactaggatcgaagggag

SEQ ID NO: 847479 - DNA, 540 bp, Homo sapiens
tgtcatatgggtgctatcacaggcttctaaattaagcttcagggaatctgaacttcttaaaatcataagcaaaattgtgtgggtgagagggtgtgtgtggtgcctctttatatatatatgggcgtttctcaaaggagaggctccacggctctgtgatattgtcaaaggggttttccaggaaataccaggggccgggtaaggaaaaacccagggaagaaatagctttagtttagggctttaaagggaggaaaatggaaactaacatttatttcagacccactatgtgccaggtaaaacttctagtgtggcaaccctagatatgtccttgtttggaatatgggaatgggtgggaaacaagttggaggaagctagcctttattgagtactgggccaggcagcatcattttatttaatgcttacagtaacgtttcaaaataggtacagtcatgtgccacatactgttttggttagtggctgactgcatatatgayggtggccccacatgattataataccatatttttatgattataagattat

SEQ ID NO: 847480 - DNA, 424 bp, Homo sapiens
ttaaaagcatactttttattcacctacaattgcatacatttattcatcatyttcccctagtatcataaacaaacattaagtcaaagctttcttcacattcaaaatctgaagattcttctgaattgctttcggcaattatgcccagaatcagacagacttgctgcttcatataatttaggcctcacttctaacactgatctcttcagtataaagaaatattttaaaatactgcagttttctgttacatttccttttttctatttttttaaactgttaatttttaaaattcactccattatagtcagaacttgagtaacagtcactggataacatatcaacttctcatttagcttttaaaattctacaatgttctccaagagtttaacaattactactatctaatgtctactatgtgacatatgac

SEQ ID NO: 847481 - DNA, 601 bp, Homo sapiens
agtgagaattggctggatctggaaaaagaccaaatactcatatacttgagctgttttaaggaggttgatccataaaatgcattactaatgtatagtggcttcaatcccaaagcaagtgaaagtcraagtgaaagcaatcagctgttactttctccttttacctgaggggatagagaatgttttcaatttgtagatggaatcatttctgttcattgacatgggtggtattttccttgctattcacaaactgactgtgatttgcaagtttcagaatttctcactgatgaataattcagagaaaaggatatatctttatttttgtatattttccttccagtttcccttaaataaagggaatgtattatgttcattcatgccactgtttcattcatgaagttatgtttagaagtaaaaataaaagtctcagaaaatttagaaacacacattttaaaggaaactaaacataaattaaatattctcattataattcagttgctgtgatggcagatcaaattcaaggaattcagaccttttgacaaacctttattaagtatggtagtaatagtctaaagatttgcatagagggacatcattttaacct

SEQ ID NO: 847482 - DNA, 559 bp, Homo sapiens
gttatcatttaaaattaatgaaattacatttttattctacaaaaggatataaggttgttcatcacaggttgagtgctctgtgtacaccccrcctggaaaatagatggctacctgtactgttgacaaggtttcacaccgtcacgcaaacattcatttcctttttggcatcatttcttcttatttaggttattttctcactactcttaagtttcccaccctcttgtttttggccttcattctgtagaagaattagatccctataactacgtgtgtgtatgtagataaataaacacacacatacatggatacacaaacataaatacttatatatctaaactatgaatacagaagtacagtgttatgggaaaagcacaccacagaggttgaccaaagtcccagcacctcacaatgcaatttttagggtcaaaaaaacccacaggaaataaaagtatgcacaaaatcacctatgcaaattattaacacaactcctgtctattgctcaataatactgcaaagttttcttcagattaggttcaccatgagtatttcccagagatat

SEQ ID NO: 847483 - DNA, 537 bp, Homo sapiens
gaagaggatttagacctaccagaaattaaaacatacaataaaacctctataattaaaatagytgggtaatgatgcaggattggaggagctattggaatgggatacaaaacccaaaatttgcatataaaatacagtatcatggtttttaaacgatattgtacaatgaaaagaaccagtgctccttggagaaaaagcttattccagggctggtgcaagaatgttacatgagtatgaaatattttgtatgctagaaagttctttatgttattctatttactttgatatgtttttggaatttccaataataagctctttttagaaagtatggtcttggagaaatggtaaaccatctagatggttcatttggcttagttgtaaaattataattttatttttaaacatagcttttcaaattaagggtttgccttttaggggcaaagattttgagacaaagagaacaatagataagctatacttcaaaactcatatgcttttggtatcatgtatacagtaattggttaagctgaagattctagg

SEQ ID NO: 847484 - DNA, 524 bp, Homo sapiens
aaatttcatacccctcttccccgccttccaaacacygaaggcattactttttcactttcttaatgttgtctttcaaagagcaactaatctgccacttcaaattagtttgacctgttctagaatttcacatatgtataaaataatgtgatatgtgcttgtgacttatttttgttgcggtggtcctttttaatcattgagtagtatgcgttatctgaatatctcacaacaatttgattttccatacaattgtttttggacattttgattgtttctagtttgaagctattataagtaaagcagccatggacatgcatatacaagtcttgtgtgtgtgtttaatttctcttggcctgggagtgctattgctatcacctggtaagagtacgtttaactccataaaaaacattttccaaagtagtttgtactctcaaatagcaacagatgatggatccagctgctccacatccttgccaaaatgtggttttcaatctttattttttatttttagccatttcagcgattgt

SEQ ID NO: 847485 - DNA, 552 bp, Homo sapiens
cataagccaaaacaattttagatgtttacataaaatttttaattgcatggcaatcgcttagtgagtcactgattcatctgataaaattcagaaaatgtttaacattcgccagatctgagagttttactctcagatgacaagcaggattccttttttcatggaacttgtggcctaatgagagagaaaaataataaaataagaaattacaataaaacacaaaacactgcacaatagggaaagtatctcctagtatctgctaacaggacctgtagaaggttcaactaatcaagtctgtaggtccaagggaaaaccctgttcagttaagattatgtttgctgcaagtaacagagatctaaaataatagtaatgtaaacaatgtaaaaacgcattgctggcttatgcaaacatctgtaggcaggcagttgtgcagcaaggctctgaatccactcgggagctgggctgtcttatcttgctgctacacccttcttagcawgctatctcaagagccaagatgactgctaaggttacagcaaacatttccacactccaaac

SEQ ID NO: 847486 - DNA, 645 bp, Homo sapiens
cagaacatcactacagatcccatggacattaaaagaataatcaaagaggattataaacaactttgttcccacaaagttgataacgyagatgaaatgggccaattccttgaaagatgcaatcagccaaaattcacaaaataatttaaatattgtctaaataggcctatagctagtaaataaatggaatcaacaattaaccttccaaagcagaaagttccaggccaatgagttactgattaattgtatcaaacaattgaagaataaagtatatgattctccacagtctcttccagacggtagaagcagagacaatacatccaaactcattctatgagaacagcattaccctagtgccaaaaccaggcaaagtcatcacaagaaaagaaaactataaaccaatatatctcgtaaaaatggatacaaaaatcctcaaccaaatattagcaaaaggaatccaacaatgtataaaaacaattatacacagtgacccagtgggatttatcacaggtatgcaaggctggttcaacattcaaaaatcaattaatgtaatccatcatatcaacaggctaaaaaggaaaaaatccacatgatcaagtcaatagatgcagaaaaaaattgacaaaatccaaagcaattatgaaaaaa

SEQ ID NO: 847487 - DNA, 612 bp, Homo sapiens
agtttgagcttatattttaaagggaagcaaagagtacaagattggaaaatttgcagcctgacacgtggccragaaagaaaaagtgttttcaggagaggaatacaagtggtctgcagagcaaccacttgcaagagagatttgtgtgactaaaaggaagccaagtactgatatctagaacaatggggaaaaaagcctagaaggcatttcagagatcatctaggcatcattcccagctccgcacccacaccccatcagagtcccagaggcctaggaggaaagaatggtcttgtgggccaggcccaaggccttgtagactcaggacacagatccccacatcctggctgctctggctacaccaacagcttaaaggtctccaggtgcagcttggctcaccactccagaggatgcaagctataagccttggtggcttccacatagtgttaagcctgcaggtactaagagtgcaaaagtgaaggaagcatggcagcttccacctagttttcagaggatgtatggaaaagcctgggtacccaggcaagaaggctgccacaggggtttgggggtagcccacacagagatactttactagggcagtattgagaagaaaagtgg

SEQ ID NO: 847488 - DNA, 564 bp, Homo sapiens
ttctcactcaccttcagaagtgaattctaaacctgtagtgatttccaaccctgatagcagcattaaaatattctgatgagctttacacaagtgtagatctcacagccatagctctgaactgctgaatcaggatcttttgagggtgaagtgaatttattacatcatactttcattattttccagttactctgagttctgacaaaagtacatatgtattgtggctgagcgcggtggttcaagcctttaataccagcactttgggaggccaaggcaggcagatcactcgaggtcaggagtttgagaccagcctggccaatgtggtgaaatcccgtctctactaaaaatacaaaaagttaatgggcatggtggcaggtgcctgtaattgcagctacttgggaggctgaggcaggagaatcgcttgaacctgagaggcggaagctgcattgaacagarattgtgccactgcactccagcctgagagaaaggtagaattcacttctgaaggtgagtgagaataggaaataggataaaaaagagaatttagagtccctaaaagaaaaactt

SEQ ID NO: 847489 - DNA, 572 bp, Homo sapiens
tcagatctaaaatgacacttaaatttagtcccaaatatctgtgcatgaaatctattttaggtaagacccacgaagctckctgccacaatttttaacacaacactaagttcaagtaaatttataatgggaagcaattatctatatacattgtacatatattagattttctattgactttaggaagatgaactgatcttctgaatttgaaaatgatcaatgctgattaaatcagatatattttatgtcatctatagttttattcttttgctttcaaaatgaaactggactaatgcatgtttttctctcctcaattaactaaggtctatgtccacatatctctgaggtagcatctaatcctctacatttctctagtgaacattgtcaggggactaaggcagacaagaatatgatatgctgtgatttcacagcagtaaataaaccacagcaatgaaattaacattgtgaatttgttaacagggcaattgatatatgatgattttcatgacaatcattgtaaagaaagacgctgtttccatgccactctactccaagcaaaaaatcaaaacaaacaa

SEQ ID NO: 847490 - DNA, 514 bp, Homo sapiens
tcagaagaagagctgaaagccagaaacaaaaggcgttagaaccaggcagtggagcagtgggagggactcaaaagatggaaaacctttgctttctgttgcatgaccctttgcactggctgagayttttctgcacccgtgttcgtgattattttaataagtttaaaacattagagttgctaaaaaacgggggtatccgatacgtgatgttttctgtgatgtataacctattccttgtgactcacaaaacttccctgaaggatctgctgtaccctaaagcctcacatctgtggctgtcagagagacatcaagaaggtaccagcacagctacaggacgagggatggccaatgagagctgcgcagagctggtgtcaggctcagagcggaagctggggggctcccagcaggatgcagagagtatcggggcaccccggattccccagggctcaggtgggggatcagtgatgggaacctaggcctccaggggcgaatggcccaggagtggcgggaaggtcca

SEQ ID NO: 847491 - DNA, 623 bp, Homo sapiens
cctccaagttggccggtggttgggggggcgggttctcgcgggtgcctggggctgccccaggagtccgtgaggacagcggcaagcgcgccccaaactcttgtctcctcacattccagaaatgggccccggagaccagatggatggtgatggcacagagagagcctgtgcgtgtgcggggcgaggacgtgttttaactctgagcagcgctggatttgtggtgatgttgtaactcctaacccatgatttatgagtggtttttgacttagaaaagcatgttctctctgcccggactaacagaatgctcaagcctggcggaggcaccccggaaggctcacgcacccggcccctctgtccggacacccccataggcctgactcccctgtggccccgtttccccagctcaccaggtaagggctgttcacaaagaagaagaaaaatggcagaactttcattaatgacgttcacgttaggagaacttgcccttcaccacacacccactgaaacaacagggcttcctcctgaggaaaatgggaagcgccgggrggagtctcaggtcctggtagttgacggcaagcttcagatccaggagagatgagtctcatttccatttaaaaaataattca

SEQ ID NO: 847492 - DNA, 623 bp, Homo sapiens
agaatccccaaactcccaccaaatagcatttataattgagaattacatgttaaraattcagttagctttctaaatttaagcatatgcatatcaacaaatgttaaaaactcaaaacacaatgtatacgttgaaggaatagataaaaatgggaagatagaccagtgaaaagtttttatggtcatggtctttgtttatttcttcttgagttataccatcagctgaaaaatgtacatacctcccaacattttatttgcagtctaagtctcttcagtgttaacttgcatctagttagtcggtttcctttctctgtggctggtttggtggcttagatggaccaaaacagttttggctgttgaccttgcaatatatccccatgaagatttactgaatgggacagggtgtagagttcaatccagtttgcagtttgagcataagaaagattctggaaaagacctgcttattgtatgtagtttgtacaaaccaaagatggtgtcctgggaaagaaatctgctgataacataattctagtggtgttcttagaaggtcaaattgtttcctgctgagtttccttgccaaaataattgacttgcaacctggaaacagcagcaagaagggtgaaggga

SEQ ID NO: 847493 - DNA, 598 bp, Homo sapiens
agtcaaaaaatagtagatgttggtgtggatgtggagaaaagagaacacttacacactctggttgagaacgcaaattagtaaaacctctatggaaaacagtatgacgatttctcaaagaactaaacatataactaccatttgacccagtaattccactactgagtatccacccaaaagaaatcattacataaaaaagataactgccaccaggtgcaggggctcacacctgtaatcccagcactttgggaggctaaggcgggtggatcacctgaggtcgggagttcgagaccagcctgaccaacatggagaaaccccatctctactaaaaaatacaaaattagccggtgtggtggtgcatgcctgtaatcccagctactggggaggctaaggcaggagaatcgcttgaacctaggaggcgaagtttgcggtgagctgagatcgagccattgcactccagcctgggcaacaagagcgaaastctgtctcaaaaaaaaaatacatatataagaaaataactgcaagtatatgtttatcacagcatttttcacaatagaaaagtcatggaatcaacctaagtgtccatcaacagattgaagaa

SEQ ID NO: 847494 - DNA, 531 bp, Homo sapiens
aaacataataaaatgttgttacgtatctagagctaaactttggtaatactcatgatgactttctacacatatatrttctagtttttccaataggcataaatgccttaaaatttgtgaaagatttggtactgtaattgattgagtaaaaagtgaaatatgtaatgtgtactctgtcagaaaataggtcaaggcagggaaaagtcagagatttgtgatttttagggctgtacatataaggcaaagagagattaatcctttcagagatgtaattattacttttggaaggtctaaatcaaaggtattagagaagtcaataacagatgacacataccaaagactacagcattttcaggctgatgaaccaagagactttctggcttatttttcaattttatggttgttatcttgtaaagagtatagtacctgttgtcacaaagtaattaaccttaaagtacaggtggtctcattcaagagagaaaacactgacctttgccatccgaaagccctgtatgctattccaaatacaggaag

SEQ ID NO: 847495 - DNA, 612 bp, Homo sapiens
aaactaagcagtatgattagcatatttttttaaagtcagaaasagcaggaagtcaaataataagcaaaaggtgacttgacgagtgtggaatcagtataatgtttgaatgttgaattgcatgaggctaatccacgctatgctcgtcgccataatacagctatgaatgtcaatggcactataatacccaaccattggctgaaactccttctgacctcacatgtgcttggatgatcaatatgtatatttgttctataagtatttgtgtctcaccaaattttcttctgattgtctcatctttctttagttaatgaaaattaatcagattttaattaagtataacccatctgagaagattgctaacattgatacaatatgctccactttatctctcaaggtataaacaagcctggaagttcaaaatctgccttggttctgtgtcttgcctgctgtcaaacatcatttttaatttcttaaagcaaaacgaattttttaacaattaacataaagcaataaaagtagccaataatgtatatagatatgttaaatgcacatatttaaaatatcaaagtgtctccaatattttttcttctatataaatacaggtagggtcag

SEQ ID NO: 847496 - DNA, 612 bp, Homo sapiens
aaactaagcagtatgattagcatatttttttaaagtcagaaacagcaggaagtcaaataataagcaaaaggtgacttgacgagtgtggaatcagtataatgtttgaatgttgaattgcatgaggctaatccaygctatgctcgtcgccataatacagctatgaatgtcaatggcactataatacccaaccattggctgaaactccttctgacctcacatgtgcttggatgatcaatatgtatatttgttctataagtatttgtgtctcaccaaattttcttctgattgtctcatctttctttagttaatgaaaattaatcagattttaattaagtataacccatctgagaagattgctaacattgatacaatatgctccactttatctctcaaggtataaacaagcctggaagttcaaaatctgccttggttctgtgtcttgcctgctgtcaaacatcatttttaatttcttaaagcaaaacgaattttttaacaattaacataaagcaataaaagtagccaataatgtatatagatatgttaaatgcacatatttaaaatatcaaagtgtctccaatattttttcttctatataaatacaggtagggtcag

SEQ ID NO: 847497 - DNA, 651 bp, Homo sapiens
atgtatctttcataataaggggtggcttacgtttacaaaaagtctattgaatattggttttggttttctawaaaacaaaaaattcaggtttgtagcgtaagttttgatttcctagaaggcttcaccaacttcaacaaccttaaaaacaatatgtacagaatacatatagtgtttgtatagggctttttttttttttttctgagacagagtctcactctgttgcacaggttggagtgcagtggtgtgatctcagttcactacaacctccacctcccaggttcaagtgattctcgtgcctcagtatcccgagagggtgggattacaggcaccctccaccatgcctagctaatttttgtattttttatagagacagggtttcaccatgttggccacactgctctcaaattcctggtctcaagtgatcttcccacctcggcctcccaaagtgctgggattacaggcatgagccaccgtgcccgggctttatagcgcttttaagagttaaagcttcactataatcatcagggatggagtatttttattacacaaggctctgtagtgcattagtcagtcagttatcttcctgatggttagtacctcttcattgtgtcatttgtcatggcatttattcaatatggtattttacataaa

SEQ ID NO: 847498 - DNA, 563 bp, Homo sapiens
gatccagagttcccactactgtgtatatatatttcaaaggatatataatcatcagtatatcaagagacatttgaactcctatgcctattgcagcacatgcacatagccaaagtctagaatcaacctaagtgtctatcaacagatgaatgaataaagtaaatgtctcatatatatacacaatgaaatattatccagcctttaaaaaggacatctacatgaatgaacctgacagaccttatattaagttaaacaaactaggcacagaatgacaaataccacatgatcattctgatatgtgaaatctaagaagcagaactcatagaaagatagtaaaatagtggtcactttagagttgggggtgggggagtttaggtatgttggtcaaaggacacaaaatttaagttagatggaggaataagttcaagatatctattgtatgttatgatgactgtagttaataatatattttacacttgaaaattgatagaagagtgaatwttaaatgttctcattacatacacaaaaatgatcagtatatgaagtcatgtatgtgttaaatattt

SEQ ID NO: 847499 - DNA, 469 bp, Homo sapiens
tcaacacattgatttaggccaggaccttcctctctggtgtagatggttgcaatagcttctcaggtggtctttgtacttctacttcctacctatctcttctttactgatcagctggaataatatttttgaaaacataaacaaaagtcactcctctgctcaaaatctttgcacggtttcctgctgtacttggaatacaaccccaagtcctttcctagggcactagccttgtattggccttgatcactgctcctgcccacctcataccacttgtcatttggccattatagtccaacaacatccactcatccgctttctcgcaggccctggaatattctaagcactttcccatctcagggygttgtgaatgctgtttcctctacctgctctcatcctcccactctttatcaactaagttctcacatacacatgtttgatctcaagctgtgtgtgtttacttgtttgttatttg

SEQ ID NO: 847500 - DNA, 535 bp, Homo sapiens
ttttacttaccctagtcacctgagggctttttcccttccttacccagattcaaatctatgatcagtcatgataatcactgctgcactgaaatcctcaatggataattactgattatctactacacactgacactgatctcaactctctcccttttctctcttcctcctactcccagttttctctccttttaggttctctacccaccaccttgcatgaaattccttagaggcagatgacaacattccagaggtaggatccagttaccctcatcagtaagcatcagacaactagaaatccaatcacaatggctggatatcagactatttaggattaaagctttgggccccatctctaagagaactaaattcttatacattaattatgcatgcgggaatagtatctttaaaatatttcagccaatccttgtatcttaaagaacaccattaatattctcaatcaagagccaatttctaattcgttgattagtaaggcctaagactttgrtagaagtacagataacagaagtaatgttgt

SEQ ID NO: 847501 - DNA, 600 bp, Homo sapiens
tgcacttcctctctctttcatgaattgtcatatgggttccaggcacatgaacattgctgtcatcaacatctttcccatcagcattttaacacactgttatttgtcatctttattcctctttcctctgaatcacatgggtgaataccacaagcaacattttgagcagaatgtccagataccagagaatacaaatatatgattctatttatttaaagttgataaacagacaaatctatgctgtcagaagtcaagagagtggttacctttgaggagggagaggtggtgaataggagggagtataaaggaaggatcctggaatactgataatgtcctatctctagatctgtatttggctacacagatttgttcattttatgataattcattgagctgacatttaagattcgtatagtttttctctttgtatttcagtttaaaaagttaaaacagtaacaaaagcagagcaaaacaaaatcatgtctatggtctayaaggaccaaaatgatctggccatttctctttctttgacctaattcctatattctcccccttgttcactttgctccagcccccttggctattccttgagcaggccagggc

SEQ ID NO: 847502 - DNA, 573 bp, Homo sapiens
ggttatggtaaatagtactgccataaacatgggagtgcagacatctcttcgaaatactgatttcctttctttgggcgtacacccagcagtgggattgttggatcatatagtagttctgtttttagttatttgaggaacctccatactgttctccatagtggctgtactaattgacattcccaccaacagtgtacaagcattccccttgctatacatccttgctagccttctcaagaaatcttttgacaacttccaaggtccaattactttgacactcaatttttagacagcaatttcttggatagagtttggttattgaagagaatgaggaagctcttcccagtcaaaaagatgttgtgccccatcctttatttcaaggaaacctttcctgacaaccttggtcagtttcctactgtaagatcccatagtcccctatacttcatcactacattcatcacctttgaaattaagtgattactatctragaacaaagactatgtccatgttattcagtgccatgccaccaatacctagcatagctcctggcacatagaaggtgctcaacaaatattg

SEQ ID NO: 847503 - DNA, 631 bp, Homo sapiens
atagacaattgaagcaaatttactcaatttcagaaatctgttatagtttttgaagcaatcttcctatctcgggattgcagttctaaacgaaataagaaacaatgtaaaactattttttaaatctacccatcatgtatgaattgggttgatttcaaaaatcactcattaggtggttttgaattaagcacagcagtacaaacaaacattaataaacaattttctgatttgcagaaactcacaattcacttaagagttaaaacaaacaaaatataactataataaatagcatatgatttgacagtcagctacatatcatttccctctcctctggcaaatagctgggtcattcagccatgcaactaaactagtacctagtggatcactggaaaagtttcccagtctaaactcagttacatttagtagctcttcatgttcaaaaattatattcgtgatccagcattagtaccagaccttcagacatattatttcattaataatgtctcacttagactgttttctaccaagcatatttactttcagttggccaaactaacatgagaattgaaatctgttttatgaaaaaagggaactcttgaccagtcaacawtcaatatattataacttgtattta

SEQ ID NO: 847504 - DNA, 605 bp, Homo sapiens
catttgttacttggctatcaacttttcatctttttgatattaaactgtcattcatttacactgatttgttatttttttaacaagagacttcaaaacccattaactttttgatttttaagaattttaagcaagtttttaaatatggacatttgagagttttataaatgacacatgctattttataggtcttgaattaataaccataatattaatttggggtgatagtggggtgcctgcacatctgtgttgcaatttctctcctggatagcatataaattataacataaatgactttggtgtattgcaatgtctgcaactatatcctagaatgttcatttaaattatgaccattaaaattaataatagcttatctttacataatgattacatagttttaggcagctatctaagtactctacattaaccaacttagtcctcatgggttatctctgaggccagtcctatcgttgttcctcatttacaggtggaaaaaccacrgtttgaactcagaaagttggcccctcagtcttgctagctaacatcaatagcacccactatctctagtgctccagatgaaacagtgactccttcagggtggcatcttg

SEQ ID NO: 847505 - DNA, 670 bp, Homo sapiens
tggaaggatgaggataacgtagtgccttgttgaagaaggaagagatttggattaaattgaaattgattgggtttctaaaatggatgaggatcatttctgactttttctatatctattatattttgtctattatcttatttagttacaaaatctagtaacctattatccacagatttttaggggtagatgttttctacattacaaaacaataataataataaaatataaacttgtctgtagagtacgtcatataactttctattatatttcaatcttaagctgtccgaataactgcaatgggaacggcacaacttcctgccatcttctcgtgattgatgggctctcttgtctctctgtttgcctttgcatgttcctcttggcctttgggtgtgtagttcccattgcagggctaataatccattaagtcacagaagcaagtctcccatcaagagtttagaagtcatcatggtgccattgttgccacaatctatggaatcttataacagagaaaaatagctgtccccattgggcccaatwctcaaaaacgtaagagcacattactccccttaatcatgatgacagagaagtgtgtgtaaagatttgggaactgataacaggtatacacaaatctgccatatgttaccatgatgagtaggctaagatcagctta

SEQ ID NO: 847506 - DNA, 636 bp, Homo sapiens
taataataaaaaaattcgtatgttccttgtgagggagaacatatgggatccctcagtaacaaggttaaaaaatttttttattgagctcatattagttgccacatatccgagatacttggggtaaatgtatttggtgtaaacgaattacttttccctggagacaagaaagccaagtgttaagagaacagcagccttctttttgggggaaaggattattcaagggacagaagagagggaacatccaagacaaacaagtatgaccttccactccatcctgaagaaacttgtctctcagagctttccaagttgtggagatgatgattccatttccattcaaaatcatcctctgtcatttcaacttaacgggaaaaaccaatggcattttgaagacaagatgtctgggtgcatgtttatttttagaaggagacagaccacagcacattcattctgcaagaaagaagcaagtcctggctctgcatactgaatcagtgagcaatacctcaaaagtggaaagattaaactctccaaagaatgggggcagtggcctcagcttatttattttctcccaggaaacagcacagcactgggtrtgccagaactgcagaagcagcaccataataaacaaactgtcttctc

SEQ ID NO: 847507 - DNA, 646 bp, Homo sapiens
agcaaggcgtggtgactggccttcaagacattcatgatccaccagtatcatgggggtcatccacaagccagctgtggtaagcmctcctggagaattataagcacgatgtgatgagagaacaaaccaggaaattatgtcctggaaaaggtaacatataagccttaaagaatgattaagaattaaaatgttctgcatggcagataaagagatgagcctaagaaagtatgaaggaaagagaataccaatgaattgggaaataatgatcaagtttattggtttcaagggtcttttaagagggtagaaggacaaatatgtctatctccataataagcttctgtaattcattctttatataatgtggaattttatgaaatggggagtggcattatgtcagacttgtgcaagatggaccagaagagataaaccacattcagattgtgaaagaatctttcctagttttatcactgtctatgcttaaatatcctgaaatcttttatcctttagagaaagcaggtaatggtggtggtgatggtggtagtagtgagaaacttataactaaaaccatattcaggaagttataagcaggttttgtcaaatagacatgcttctgtgaaaagataagaatgatgtagttcagttgtttgct

SEQ ID NO: 847508 - DNA, 464 bp, Homo sapiens
ccagaagggcagggctaactcacctgggatcctgcacaagcttttttttttttgagacggagtcttgctctgtcaccaggctggagtgcagtggcacaatctcggctcactrcaacctccgcctcctgggttcaagcaaaccccctgcctcagcctcccaagtagctaggactacaggcgggagccaccatgcccggttaattttctgtattttagtagagacggggtttcaccacgttggccaggattgtcttggtctcctgacctcgtcatctgcctgccttggcctcccaaagtgctgggattacaggcatgagccactgcacccagccacatttttttttaatgtcaaatatatatatatttttttactttaagttccaggatacatgtgcagaatgtgcaggtttgttacataggtatacatgtgccatggtggtttgctgcactgaccaacccgtcat

SEQ ID NO: 847509 - DNA, 612 bp, Homo sapiens
agcatagccaggattcaaatcccattctttctgactcatatgcccacagactctttttttctcttatttctctctctgttgcaattagcaagattctagcattaactgtattttattttactstggcactttgaaaattggatcaagtttttgcagttttgtattctcgcagaatcacttatgataaacacaaagcagacaaaacaaaatgctaaattgctgtggttatgttttgctgactcaatattccattcctcaacttgcagaaattggtttcctttgtgcatacgtctgcactttcacatatacccacgtgtggtcagctgaaaaatgactcctcgaaagatattcatatcaaactcctggcagctatgaatgtgactttatttggaaaaagggtctttgcaggtgtaattaaatgaaggatgttgagataaggtgattatttgggattgctcaggttggccctaattcgaatgatgaatgtctttatgagagaacggcagagggagatttgagacagataggagtgaaaacacagagaggaggaggaggcaacgtgaccatggaataagacattggagtgaagtagccacaagccaaggaatgcct

SEQ ID NO: 847510 - DNA, 602 bp, Homo sapiens
ttgaggcaataataaatagcttaccaccaccaacaaaaaaagcccaggaccagaaagatttatagctgacttctatcagaggtacaaagaagacctggtaccatttccactgaaactattctaaaaaattgaaaaggaaggactcctccctaactcattttatgaggccagcatcatccttaacaaaacctggcagagatacaacaacaaaaaaaagaaaacttcagaccaatatccccaatgaacattgatcgaaaatcctcaataaagtattggcaaactgaatccagcagcacatcaaaaagcttatccaccatgatcaagttggattcatccccaggatgcaaggttggttcaacatatgcaagtcaataaatgtaattcatcacataaacagaactaaagacaaaaaccacttgatgatctccatagacgcaaaaaaaggcctttgataaaattcaacaccccttcatgttaaaaactctcaataaactaggttctgaaggaacatacctcaaaataatgagagctattatatgacaaacccacagtcaatattatagggaatgggtgaaractggaagcatttcccttgaaaacca

SEQ ID NO: 847511 - DNA, 619 bp, Homo sapiens
tcccagggagaggcacatgagaggagagagaagggaatatgctccattctctcttcacttcaggatgcagtcacagagcagctcctacctggtatgtggcagtgctcacaacagaaggaagagacatagcagtaaaacgtggttgctcctaaagatgcttggaaatattgaagatcagagaagccttattttgtccaggtagcaacttcatggaaaaggtctgtttcaatatatatatctatgttagaattcagaagtgagatgcttgttacaagaacatgtgttaacagttacttagattgaaaaacgaggacagactttttctaatagaaagcaaatccaatttgactgattgattttgtaatgacaactggctttgcgtggtggatacctccacaagttgacagagctgagtctgcagttatgaggtttggatgcatatattgaatgatcagataaaaatatgttatcagctgggtgtggtggctcacacctgtaatcctagcactttgggaggccgaggcgggcagatcacytgagatcaggagtttgagaccagcctggctaacattgtgaaaccccgtttctactaaaaatacaaaaaattagccaggtgcgg

SEQ ID NO: 847512 - DNA, 624 bp, Homo sapiens
acaaatgcttgtatttgcaaaggattgttattcaarttctgtagtttcaatgcagtcagcatgccacacataaagaatgactgtgatcaaagtattttatcactttcaagtcatgcttataaaatgctcaataaatgtatttttttaaagtgagaatattttactgaacacaaacggtttcatctggggactacacaaccttatgtggtggttttaaaatatgtccacgaatctttcaaaattgctccttcgaaagatcgtacctcatgtccctccccttcttaatttccctcccctggcatgtgcgtagacttagttatttgcttctaactcatagaatgtactggaagtcacagtatgtgacttctgaggctggatcacaacaggcgctatttctgccttgccttcttggattgctttcaacagggggtcactcatcactgtgtttcaggacatccaagctgcatgaggagaggctcacgtagggggaaaccgaggtttgcagcagcgactcgccaggcgtgtgagtgagccaacctggaagcagatcctccagttccagtgaagtgtgtggatgacatcagctccagccttcattttgaccacaactcatgagatgcccta

SEQ ID NO: 847513 - DNA, 604 bp, Homo sapiens
tggagcgagataagcgggatcagaaacatcatawctacccagaggcatcaggcttcttttgaaattatttgcttagcgggaagcaagctggaccatgagcaaatgtcagtttctgtattttctagcaatatctcccagctatggatgtgattctggaagtgtttcagcttgagtgagtgaatgccatttttttgtttaggagcaaactatagctggcttgcaatctgtaatacaatctacacattcttaattgcccaaattttcttccctgtgtcgtcttatgtcataaggccccttttctttgtcaccaaggagacatcttggttggcacacactggggccagggggtcacacagggacatggcatactgggatctggccattgggaggcttgctggtatcacgggtgtgagtgtgacctctgactgatgagcactggtccctcacccactctttgtacccttctgcaccctcctcctggattaagcaccctcctgctttgtacaccttttcctggggtgaccagtgccattcccctttccttgaatgccttacattgtgtagctactaagtctagggtttctgttttcattgttttccattt

SEQ ID NO: 847514 - DNA, 699 bp, Homo sapiens
ctcatgcattctactagagtcacattagcctccttcctrgtctttgaacccaacaagcgcattcctactcaggacctttgcgctttccattctctctgcctggaacgcccttcccaggatacctgtggttcacacccctattttcttcaagtcttggttcacatgtcgtcttcccggggatgccctccctgacaccagttacataaaattgaatccccttcataactccatccttgacttatttttcccaatagcatttatcatcaattagtatactacataattttcaattttattttgtttagtatgtatctatccctaccagaatatacgctcattaaggccaggaatttttaacatttttttcacacctgaataattcccaactgttaaagtgaacaatgttcaggacacagcagatgttcaaaagatatttgctgaatgaataagtacctatgaaaaatgtgctcatctccatctttatcagacaaagattggcctcaggcttagaattgttggaaggcatcagtatctagctacagttgaaaattatgtttgtcaaaggataatttttaaaagataaaatcataactttcatacaaatataaaatgaacatgtgttaatgattttatttaacttattaatgagtgaacaagtaagatgttacaaccagttcaaaggagaattcaagtaacaca

SEQ ID NO: 847515 - DNA, 530 bp, Homo sapiens
aatattgtgctcattaaaaattcccccttggttttagcatccattgatgtttcttgctttatccagacatcacagtgatagcccccaaatgatgattttttccaatttgttctgcattgactagtcacccctcagcattctgttaggttggtgcaaaagtaattgccattgaaagtaatggcaaaaaccacaattacttttttttttttttgagacggagtctcgctctgtcgcccaggctggagtgcagtgacacgatctcggctcactgccaactccacctcctgggttcacgccattctcctgcctcagcctcctgagtagctgggactacaggcacccgccaccatgcccggctaattttttgtatttttagtagagacgaggtttcaccgtgttagccaggatggtcttgatctcctgacctcgtgatccgcccgccttgacctcccaaagtgctgggattacaggcgtgagccaccrcgcctggccaaccacaattagttttgcaccaacctaatactacaagc

SEQ ID NO: 847516 - DNA, 559 bp, Homo sapiens
tacttttatttctttaaggaatctcccaactgttttccatagtggttgtactagtttacattcccaccaaaaatgtaaaagtgttcccctttcaccagatccacaccaccatctattatttttagagtttttaattaaggcctttcttgcaggagtcaggagtaaggtggtatcacattgtggttttgatttgcatttccctgataattagtgatgttgagcattttttcatatgtttgttggccatttgtatatcctctgttgagaattgtctgctcgtgtccttagcccagtttttgatggaactgttcttttttcttgccgatttgagttccttgtagattctggatatgattctttgtttttttgagtctctgtcacccaggctggagtgcagtggtgtgatcttggttcactgcaacctccgcctcctgagttcaggtgattctcctgcttcagcatcccyggtagctgggattagagtcatgcaccactgtgaccagctaattttattttattttttttgtatttttagtagagaccaggttttgccatgttg

SEQ ID NO: 847517 - DNA, 607 bp, Homo sapiens
atagtgagagatggggtctagtttcattcttatgcatatggcaatccaattttcacagcaccatttattgaaaacagtgtcatttctcacagggaggggaacatgacacactggggcctgttggggggtgggggactagggtagggatagcattaggagaaatacctaaggtagatgatgggttgatgggtgcagcaaaccaccatggcacgtgtatacgtatgtaacaaacctgcatattctgcacacttaccccagaacttaaagtataataataaaaaaaaggaaaacagtgtcatttctccaatgtatattcttttcagctttgtcaaagatcagttggctgtaaatatatggttttatttttgggttctctattctgttccattggtctatgtattttataccagtaccatgctgttttggctactaaatccttgtcatataatttgaagtcaggcagtgtgactatagctttkttctttttgcttaggattgatttggctatcagatactttttggggtccatttgaattgtaggattgttttttctgattatgtgaaaaacgatattggtattttgataggggttgcattgaattcatat

SEQ ID NO: 847518 - DNA, 632 bp, Homo sapiens
attggctttcctgcctttgaggcttttggactcggactgagccgccagtggcttctttcttmcccagcttgcagatggcttatcacgggactttgctttgtgactgtgtgagccaattctccctaataaactccctttcatatatctatcctattagctctgtccctctggagaaccctgactaatacagtgggttaacaaggtggtcgcttctctttttttttgagacggagtcttgctctgtcccccaggctggagtgcagtggcgcgatctcagctcactgcaagctccgcctcccaggttcacgccattctcctgcttcagcctccagagtagctgggactacaggcgcccgccaccacgcccatctaattttgtttttgtatttttagtagagacggggtttcactatgttagccaggatggtctcgatcttctgacctcgtgatccacctgcctcagcctcccaaagtgctgggattacaggcgtgagccaccgcgcccagcctactggtcacttctcatttaattcatgaaacagaagcagagaggtattggcacaggctgcagtcaagcattagcctcctgacgccctggacataaactggcttccttggtaagcctgatgtct

SEQ ID NO: 847519 - DNA, 509 bp, Homo sapiens
tgaatgagaagaaagaaatacctgagactatggagaaagacaaatataagagaaggcagaatttagatcagttgtagtttaggagtgtggactgcattttgaaaaacctgttacctaatcagtctttgtacctgaaggtacaaaccacagtagactgtggaaaatatttccttggccttaaacggcagggggaccctatgtaacagtttgcccctttccaaaaggattgagttgaaatgatgattaggctcacttctatatgtgaagttctgtgatatttgatgttcaggcaggtattttcatgcaagaattcagacactattggatatcagaaagaacattaggaatagaggaatcagaaaccataactgtgtgrcttatgacaaggcatttgacttctcaggttgttttagaactaccatttgacccagcaatcccattactgggtatatacccgaaagaataggaatcattctatcataaagacacatgcacgcatatgttaatca

SEQ ID NO: 847520 - DNA, 523 bp, Homo sapiens
tctcttttttttggttgcctgtttatatcctttgtccattttttattggatcatttatttttcttacacattttaaggcattgtttatatatattctgtatactaattctttgttgtttacatgacttgcaaatatctagcaaatgtgcagattttataacctgtgatccagcattctatgcttaggcatataccctggagaaaaactctctcacacatgcccaaggagctatttaggagggtgtttcctgtggtgctatttgtaaaagcacaaaaagtgaactagcctaaatgtacattcagtgagtgaatgactcatcaaattatggtatattcacataatggaaataagaggttaaatgaataaactggctctacatgttattaacagagatgatgscagaaaatattatattggccaaaaatgcaaataaaaaatcaatacatacagtattggatatatacaagttttaaacgtcccacaaaataattctaaataatatttatgggtaaatacatataa

SEQ ID NO: 847521 - DNA, 580 bp, Homo sapiens
tgattagaatttctgttccatttcctggaaaggcaatttccagtgctttctgtgacacccacgccttctccacaagmccgcaccctttactctttcagcaggtggctctgcctttcatctcaatgacagccatccagaactttcagaatgaattcacttgttttggcagacccaaggtccagccccagtatgagcctggagaccctgacactcacaaggttgttaacagcttttctcataagaaaaaatgtgttcaccaacctcagatattgtcgttattctcaagtcagtcacacacaagtctgtgtgtgccatttgaagagataaatacatagacacacacacacacgcacacacacacaccccaaaacacagtgcagcattgagagagaatctgtaattgtttgcagttccagagggggagaccagtctttctaggcagaatgcttgcttgctctttcagtgctctcctagtgccttgagtgacatgacaaagctgtagttagatgtcactataaaccagccccaaattatacaggagtcatgattaactatgattgcaggcctaaggcaggtaata

SEQ ID NO: 847522 - DNA, 624 bp, Homo sapiens
tttgttcttctccacggcacttgttaccatccgacacattatacatttgcatttttctctattgcttatctcccctgaaacaagaacatcatctccttgtgggcagggatgttgyccattttgttcactgctatatctccagtacacctaacatgtaatagatgcacagtaactttttgtcaaatgaatgcagcaagtccaggaaagatttaaaaagcaactcgcctctactgaagaaactagagcatacaatatgaatcaagtaccctaagttctaaaagttttgtatattttctcttacccaaccaagaccacctcactctctattatttatcagaatataaaatcaagaagacaccatacatgagtactcttaggtatttcttaagagccttattctgcttgtggttgtattgcaaattcctcccacagtcctacttttcctcaattcagcaacaggtcataactgaacatatgtgacagctgttaacttttacatctaacattaaaaatgtatttagattcacagatccatatgatgactttcttcttgatactttgcctatgggtatattaaatcattactgggtaagaagaataccctgtaacaaccaagacaaatga

SEQ ID NO: 847523 - DNA, 618 bp, Homo sapiens
ttccaccccagctccatgcagcagccaaagtaatccatttataatacatcagagcaagcagatcagtttttggctcaaaactctgctrtccagtggctatccatcacactcaaagtaaagtcaaagtccttacaatgaccagcaaggacttgcttgatctgggctccatcacctccctggtgtcatttctcactcttcttgctcttccctcattccattccagcctctgtgcttttctcgtaatgtaccaggaatgctagagcttttgcactggatctaccctctgcctagattgctaatctctcatatctggtttggctcacctcttcacttccttgatgtctttgcccaaatatcaccttttcagtgtagcccaccctcgctgctctacacaactcccaccctctatctccagtttatgttttctttcccttgtagctctttattatgctcttggctactacatgattagctttttattatgcccttgcttattatctgtcttcattgctagactgtaagctccgtgacagcattttttgttttcttcattgatttatttcaagcatatagaagaatgcccagtatatagtatgcactcaacaaaaagtttgttgg

SEQ ID NO: 847524 - DNA, 560 bp, Homo sapiens
aactgaatggtagtaaaaagwtaacatatcaaaattttgtaggatgctgcaaggtagtgcttagaaggaaacgtatagctttaaatgttatattagaaaaggagaaaaacccaaaacaatgaactaagttttctagaagaagaagaagaacaaattaaatttaaatttaaatttaaataaaaaatggaacatttaatttaattaaataaaaatgggaaaccaattgaaaaaaataaaagaaactaaaaaagtgatccttgaaagcatcaattaaattgataagcctcaactagattgattaatcaagaaaagagataagacactaatgatcaatatcaggaataaaaagggggtcatccacagagatattacaaactttacaatgataataaaggaatattatgaacaatattattctggtaaatttgaaacctggatgaaaaggacaaattctgcgagtgaaacattaccaaaactcacacataaaaaaattaaaaatccaaatagtcttttatctattaaagaaaatgaatttttagtttgaaaacttcccttaaaga

SEQ ID NO: 847525 - DNA, 669 bp, Homo sapiens
ttctcacttcatatatataaaaacttcaaagcaatataattccattcttccattcatcatttgtgttatcatatctttgatttctatacctacattatacactcrccttataatgctagtttttgttttcacaatcagttttcatttaaggaaatttcaggaagagggatgcagccttgtatatttacctacctacttaacatttctggtggcttgctttcttttctacagatttgcatctctatctgtatactttcccttcagcttaaaggacagtgtagtgcagaactactagtggcagattctcccagctttttgttatctgaaaatgttttatttatttatttatttatttattttttggagaaagagtctcactctgtcacccaggctagagggcagtggcacggtctctgctcacggcaacctccgtctcccaggttcaagcaattctcctgcttcagcctcccaagtagttgggattactggctaattttttgtatttttagtagagactcggtttcaccatgttggccaggctggtcagaaactcctaacctcagatgatccacccacctcggcctcccaaagtgctgggattacaggcatgagccaccacacccggcctgaaaatgttttatttcttcttcatttttgaaagagtttttg

SEQ ID NO: 847526 - DNA, 543 bp, Homo sapiens
caaaactcatgttgaaatttaaccccaatgtggcagtattgagacatgaaacctttaaaaaatgattgggtcacagtaggcagagctcttatgaaatagattaatccattcatgggctaatggattattgggttatcatgggagtgggactggtggctttataagaagaggaaacgagacctgatttagcatgcctattcccctcaccatgtgatggatgcactatgccacttcaggactgcagagagtcaccaacagaaagaagatttgtgtcccagctcttccacctcctagttcttacctctgggatcttgggccagaccccaagtctttcttgcctcagtttcttcatgtataaaatgccgctgataatggcatctatctcatagggtgcctgggaggattaaatgaagtaatgtttggagcatgcttgrcacatagtgattaaggtctgaccccaatccacaaacctccaagataaccgacctctagaacaaagaggacaggtccactatgccttatctgaaatcctatgaatagctc

SEQ ID NO: 847527 - DNA, 588 bp, Homo sapiens
  misc_feature 550, 552, 556, 561: n = A,T,C or G
cgggactatatgaaaagaccaaacctgtgtttgaytggtgtacctgaaagggacagagagaatggaaccacattggaaaaagcactttaggatattgtataggagaacttccccaacctagcaagacaggccaacattcaaattcaggaaatacagagaacaccacaaagatattcctcaggaagaggaaccccaggacacacaatcatcagattcaccaaggttgaaatgaaggaaaaaatgttaagggcagccagagagaaaggtcaggttacccacaaagggaagcccatcagactaacaacggatctctctgcagaaactctacaagccagaagagagtggggtccaatatttgacattcttaaagaaaagaattttcaacccagaatttaatatccagccaaactaagcttcataagtgaaggagaaataaaatcattatagacaacaaatgctgagggattttgtcaccaccaggtctgccttacaagagctcctgaaggaagcactaaatatggaaaggaacaaccagttccagccactgcananacanaccanaatgtgaagatcatcaacactatgaag

SEQ ID NO: 847528 - DNA, 636 bp, Homo sapiens
tcacatggtgaaaacaggagcaagcaagtgagagagcgtagggctgaggtgccacacacttttaaatgaccagatctcacaagaactcattatcacaaaaacagcaccaagycacgagggacccacctccgtgatcaaaacacctctcaccaggcccctcctctagcattgaggattacaattcaacatgagatttggaaggggacaaatattcaaagcatatcgttccaccctggcccctcccaaatctcatgtctttcttacattgcaaaaaacaatcatgccatccaaataggttcctaaagccttaactcattcaagcattaactcaaaagtccatagtctttgggtaaaaatatctgttccaaaaagataaatcagccaaacatacagggctactgtccacatgcaagtttgaaattgagcagggtagtcattcaatcttaaagctccaaaataatctccagtgaatccatgtcccacatccaaggcatactggtgtaaggggtgggctcacaaggccttgggcagccccacccctctggctttacagaattcagccgccaaggctgctctcacaggttgttgaatgactgtggcttttccaagggcaaggggcaagctgctgattgatct

SEQ ID NO: 847529 - DNA, 636 bp, Homo sapiens
tcacatggtgaaaacaggagcaagcaagtgagagagcgtagggctgaggtgccacacacttttaaatgaccagatctcacaagaactcattatcacaaaaacagcaccaagtcacgagggacccasctccgtgatcaaaacacctctcaccaggcccctcctctagcattgaggattacaattcaacatgagatttggaaggggacaaatattcaaagcatatcgttccaccctggcccctcccaaatctcatgtctttcttacattgcaaaaaacaatcatgccatccaaataggttcctaaagccttaactcattcaagcattaactcaaaagtccatagtctttgggtaaaaatatctgttccaaaaagataaatcagccaaacatacagggctactgtccacatgcaagtttgaaattgagcagggtagtcattcaatcttaaagctccaaaataatctccagtgaatccatgtcccacatccaaggcatactggtgtaaggggtgggctcacaaggccttgggcagccccacccctctggctttacagaattcagccgccaaggctgctctcacaggttgttgaatgactgtggcttttccaagggcaaggggcaagctgctgattgatct

SEQ ID NO: 847530 - DNA, 550 bp, Homo sapiens
acatttaaatatttttataattatttkcacttaccattttatttacataattttgacagctgagcgacctagtaatattttaaaatatattttctaattaaacacattaaattgtcccaatggcaaacacctggaacataatattcttgcagatgaaatttgactcagagccaaataatttgatataaattctgaattttatcttctgtcttctttttgtaaagggttcatgtaattttctctctcctagaaactaagaagcgtcaatcagggtactatttctacttttctcaatatattgctctggaattctggatcagtcataatcttttaatgtctctcaactgtaaaatggggctaatcacaaggagtggatccagactttgtggaaacagaagcttatatatttggacatgtggtctttaaaacctctccaaatatatacctgtgaaattatatggcttttaattatcttcacagaaaacccatatctactaacactgatcctatctgaagataaagaaaggtgccatatatacagaaggcgcat

SEQ ID NO: 847531 - DNA, 550 bp, Homo sapiens
acatttaaatatttttataattattttcacttaccattttatttacataattttgacagctgagygacctagtaatattttaaaatatattttctaattaaacacattaaattgtcccaatggcaaacacctggaacataatattcttgcagatgaaatttgactcagagccaaataatttgatataaattctgaattttatcttctgtcttctttttgtaaagggttcatgtaattttctctctcctagaaactaagaagcgtcaatcagggtactatttctacttttctcaatatattgctctggaattctggatcagtcataatcttttaatgtctctcaactgtaaaatggggctaatcacaaggagtggatccagactttgtggaaacagaagcttatatatttggacatgtggtctttaaaacctctccaaatatatacctgtgaaattatatggcttttaattatcttcacagaaaacccatatctactaacactgatcctatctgaagataaagaaaggtgccatatatacagaaggcgcat

SEQ ID NO: 847532 - DNA, 633 bp, Homo sapiens
acaaacacatctgcctaacatgaggcaaagaatttggrtttctccatgcagtactggatggagggtatgagaagtgggaagaggaagagaagagaaagtagccagtatggcatgatggtgtgatgttagaaactgcatggaaggaaagtgtctgtgcaaatactccagagacgggtggttggtgagcgtttttagaatacagatatctaatactgaaattaagctttttggtactttgaaaatgcaaattctttcctcagtctctatccttcacaaaccttgaataaactcgactacatttccaaagagtttgtggcatgttttatgaaaaccaagagagaagctgtgttatgtatttgaattgatactatgagggaacagagacaggactcatcggagcaagattcccatgtcagtggtgatcattaaaatatctccgtgaactgatgaacgtcttgaagagtgtgttaggctaccacagggtgtgtcatccgggctcaagccaattaatcatatgcccaagttttggtaacacttgctgacacctggattcctcagggtatgggaaagtactaatttttataacattaatgtgctagaaatataaagggaggtttgtactcagtgaaataa

SEQ ID NO: 847533 - DNA, 564 bp, Homo sapiens
gacaggggtctggctttcatcagtttcatctttgatttttaacttaattctcttgatggctttttaaaatcaccagcacrgcatattttaatctccatgtattttattctctgtagcaaatggcaatttctcttcaaggagaatcagagttccaatgtcttagagtttcagctaggctatatttacattcatcaaacacagtttccagaattttcatttctaaaattatgttttaagacagaagctagtagaacttgtcttatccactgacagctgagaccactaacttgtatagaaagctgctacaaattactcaatggtttaaaaattcaatatagctattaaaggatgctgtttcactgtaagcatcaatagagaaactgagcctccagagagttataaagaggtggagtttgatttagaattcctccatctccaaattacctagcacttgtcatgttatcctggacttatccaaaaccctttcttgcttaccccagtgctttattcaaatcattggtttaaacccatatttctaaaacatgttttttctcttcattttag

SEQ ID NO: 847534 - DNA, 600 bp, Homo sapiens
gaattctaagggctggtaagaagaagcagaattaagagaagccatacttttttyttgggtgtaaaaccaagatccctatgagataaacagacacgcacggatgtgtctatgcatacacagacacacacacacaaacacactttgcacatcacacattaaacatatattacatggaattagagtttgtctcaaatgaaactattgtggcctgttgaagctttcaaaaccttccagtagaaaaattgccctaatttggagggtctgcttccacagcagtggggtctctgattctctactcataacatctacatccattagatggaaaaccccttttgaatgagggaatgattcaacatatttatgtcagttgctatggtctgaatgtttgcattccaccaaaaaactgtatgttgaaatttaatccccaatgtcagggtatttggttgtggggccttttggagataattacatcaagagtagagtcttcatgaatgggatcagtgcccttaaaaaagaagctccagagatatttacctgccctttctgtcatgtgggtacacaacaaaaaatgctgtctatgaagcaggaagtggccagcac

SEQ ID NO: 847535 - DNA, 606 bp, Homo sapiens
aatgtaaatgagatcacattactaggactaccctcaaaaccctccagacttcccatttattggacagaaaagtttaaaattcttacagtggcttgcaaagccttttgcctctgaccttatcttctattgctctgtgttccagagattttggcctctatgctattgattgtgtatactaaacatgctcccatctcaaggttgtcacatttgctgtttctactgcgcagaatgttcttctagatatatttgcataactcaatctcttaatttcttcaagtctctgatggcatgtcaccttattatgggcgttttccctaactattttatttaaaaacagcaaattctccagcacttcctatttgttattgttttattttctccataatagtcatagccatctgacatattacgtattacaaattttttacatttattgtctgattccctcatctagaatatcagctacataaagccagaaatatttttgtctgttttgttcactgctgtatyacaagcacccagaaataggcctgcccttagtaggcacttagtaaatactggttgagttaatgacctgcttggtaagtggtgattcattcaatctaa

SEQ ID NO: 847536 - DNA, 267 bp, Homo sapiens
tcacccaggctgaaatgcagtggtgcattcacagctcaccatggcctggaactctcrtgctcaactgttcctcctgcctcagcctcctgagtaactaggactacctgtgtgtgccaccacccctggcaattttttttaaatttttgtagagacaggatattgcgatgttgtccagaatggtcttgaactcctagcctcaagcggtcctctcaccttggcctcccaaagcactgggattacatgttgaaccaccacacctggcctttt

SEQ ID NO: 847537 - DNA, 267 bp, Homo sapiens
tcacccaggctgaaatgcagtggtgcattcacagctcaccatggcctggaactctcgygctcaactgttcctcctgcctcagcctcctgagtaactaggactacctgtgtgtgccaccacccctggcaattttttttaaatttttgtagagacaggatattgcgatgttgtccagaatggtcttgaactcctagcctcaagcggtcctctcaccttggcctcccaaagcactgggattacatgttgaaccaccacacctggcctttt

SEQ ID NO: 847538 - DNA, 620 bp, Homo sapiens
aaaatgactgcaggataaacacaggcaaccatgagagacccggaatcatctcagtccttctgtttcccctaagtctgtcttttgtgggaagctctggtccctagacccctctcagtcaggactccacagtcagtcactctgttccccgaccctcccccagctttccagctcagaaagtgtgcttttcctccctaagggtcagcctccaccagaggccagatcccactgggttggtgagccactggcatgtcacccactcctccaacttcattctctgcctcctgtcttctctctgtagaggtgtacagacattctctgcccgtgattttgctctctcatctcccagcagtgcgtgctgcttcctccacaggagtatttgaaaaggttgacagccgagatctgtgtgtgggatccacttcatcagctcttgtgcatgttttctcttctgcctccttcagcttttcattgtacccatggtgcacgcagtttgaaatagcaagtagttctgtgaggcttatgaatgactgcagtycttagctcctatcacattttttattctaagatccctttgtttctgcatattctattaattttctaaaaacatactgattttgtgtaca

SEQ ID NO: 847539 - DNA, 612 bp, Homo sapiens
attttttattctaagatccctttgtttctgcatattctattaattttctaaaaacatactgattttgtgtacacaatactctttgttatttctctgtggtctgaaaggtggttttgacatttttcccctccctgcttcgtcttgttttctctaagtggtctgttttggctgtcttttatgctggaggttcccctctgatgtctggggatcctaggtggtcttacatttaagagtggagcactcagaaggtcactggtattctgggttcatgagttggggcatggggcactttgactttctgtttgaaactagaccctgtggtggaaagtgatttgtcctgcctgtctggtttgtgggcccctgatgtcactgccttcaagactttcctctcaggctggtcagcttctccaaaacaaagtttttcaagtaatagcctggtagtcagagttctgcgagcctaagtggggaaagaaggctgggggaggcacctcaccattaattattatgtaatgttkatttaaccctcccccaaccattgtcagtccagtacttctttcatcatggctggtgtctcttggtccagggactctgttcttatcctctgaagagtct

SEQ ID NO: 847540 - DNA, 537 bp, Homo sapiens
ggaactgctgctagagttccctggactggtttcccagatgtagaaagttccgaagacctacagagtaactattmaggaagacaaaagtctgaatgagatctatgatcttataggtaagtataaaaattgaaaaagtttggccctccttaggaactctatttcaagaccatttcaaagtatgaaccacaaaatgggaatgtgttttaccacaaaactttggtcaccaggacctcagcttttaagtttccagagttttgcacgtcctcagcctttgcacataagaacatccttggatttccccatgattttctcaaatttgtaagcctaactttaaagagccccagccgccaagccacacttaccttagcagggtggctctcttctccatagccatccattctctctacctcctgcatgtacagcatttcagcatcaggagctgtgagccctctgcaacccaaaagaagcaagattgttcacaaagcaagcttaaaatggtttaaaataaagcttttcttaaaacctatatgtcaattt

SEQ ID NO: 847541 - DNA, 338 bp, Homo sapiens
tgctagttaggtacattaggtacccttttaatttgaaaattcattctcttccgtgtgggaaatactcttgcattatttgttttaaaatttgytgtccttgttttcattgttctctggtggaaattctgttagttggatgataagcccttactttaatctgtcagttgtatattttttctctcttgatttttgacttgatcttgttggtctactcttgaatacttgcttgacttgatctttagtctccttactgaacattttaaaaatgtaggcaagcatattttttaatttccacaaactttttcttgttctatttttcatagtatcttactttgtgg

SEQ ID NO: 847542 - DNA, 639 bp, Homo sapiens
gggaacataaggccaattcacacttcagctataacaggaaatatcctctccatatggcatcactttacgtcatcctcttcatttacacagggtgtaccccaagtagagggtatttaaactcacataaactcacaaaaactctgtaacagggcctttgagcccctatgctcaggcccactaccacactgtggagtgtactttcattttcaataaaacccttcattcggctgggtgcagtggctcacgcctgtaatcctagcactttgggagacgaggcaggtggatcacctaaggtcaggagttcgagaccagcctggtcaccatggggaaaccccatctctactaaaaatacaaaaattagctgggcgtggtggcggatgcctgtagtcccagctactcgggaggctgcgcacgacaatcgcttgaacccgggcggcagaggttggcagtgagccgagtttgcaccactgcactccagcctgggcgacagagcaagactccgtcccaagaaaaacaaagtaagacaaagcccttcattctttccttgctttgtttgtgcgttttgtccacttctttgttcaagacaccgaggacctggacaccctccactsttaacaccgtctatgtgttccgccaggc

SEQ ID NO: 847543 - DNA, 574 bp, Homo sapiens
actcctgacggcatcacaccctcccactcccatccagttgctcagcggtgagctggctgccagctgctggacaggccgaaggacagggcagtcaccttctgctcatgtgggcatctaagccacacccacccctttccccaacttacaccatctttccctctctctgtctctctctgtctctctgcctttgtctctgtctccccgcccagacacctccctgcctatgggtgcacgcacacaccagtggcaggccctgaaagtgcttcctcattgagtcaagatagtagatgggaagccatgccgggtgagagggcagagaatcgggccatcctcaaagacatgaagatgcatttctatttattcatctcccacagtataaaagaggctcatggcaatgagagtggacggccataaacttaaccaagtggtagcctcagtcacagcygctgcagcagaggtggcatctactggaagaggtccaccctggctggcgcttggcggacggccaaccgagctaaagaatgcaggccgggcgtggtggctcacgcctgtaatcccagcattttgggaggcc

SEQ ID NO: 847544 - DNA, 588 bp, Homo sapiens
gaagcaatgtagaaacaaaggagaaagcaggacagaaacagcagggtcctgggatccgcctggtaccagagacttctttttttctctcacttgggctagacccagagacrggcttctggtttagaagaggaatgtgggactggctggccatggattagataactgtggaatcaatgcccttttacttgggacatctttccaagtctggattatttccttaggattaactgggaaatcactgtacaaagaagaagcatatcaatagactgcttccttattttcaacccagaataatgcatttttccattgctagaggactgctttaaaatacacacacacacacacacacacacacacacacacacacacacacacacacacgaaacaccaggatagcacagacagtggctttcagggatgaagatacttcctttcctgtctgttctagtctcttctggttgcgtggaacagaaactagtacaagctagcttaaggagatgaagctttattgcaagaatataaaatgttcttgtgggaatgacatgagtagccccatggacagaaaccttctcagccctgttggggcta

SEQ ID NO: 847545 - DNA, 509 bp, Homo sapiens
tccatgtcgcaagtaacctttaagaaacraccagttgtcaagttttagtgtccgtcaaagaacatcaacaattgtctaagaaggctattgaaatactgcttccttttccatctacatttctgtgagcctggattttctttatatactttaaagagcatatcctaacagattgaatgcagaaggagatatgagaatctagctgactgcaattaacagatacatgaaagagttttgtaaaaatttaaaaactgtggctcttctcacaaagtttttttctggaaaagataatttttttcataaaacatgtaatttatgttaacatataatggggttattgttattttaaaataaattaatgaatacatattttttaagtttcttggttttgtaatatggttcatctcagttataatccacataaacaaaactctttggtgttatcagtaatttttaagagtgtaaatgggtctaaagactaaaaagtttgaggaccatggctttaaagtaag

SEQ ID NO: 847546 - DNA, 509 bp, Homo sapiens
tccatgtcgcaagtaacctttaagaaacgaccagttgtcaagttttagtgtccgtcaaagaacatcaacaattgtctaagaaggctattgaaatactgcttccttttccatctacatttctgtgagcctggattttctttatatactttaaagagcatatcctaacagattgaatgcagaaggagatatgagaatctagctgactgcaattaacagatacatgaaagagttttgtaaaaatttaaaaactgtggctcttctcacaaagtttttttctggaaaagataatttttttcataaaacatgtaatttatgttaacatataatggggttattgttattttaaaataaattaatgaatacatattttttaagtttcttggttttgtaatatggttmatctcagttataatccacataaacaaaactctttggtgttatcagtaatttttaagagtgtaaatgggtctaaagactaaaaagtttgaggaccatggctttaaagtaag

SEQ ID NO: 847547 - DNA, 538 bp, Homo sapiens
attctccctccccacaagcatgttgctctggttcactagttaaagacttcagagtcatctctgtctcacttcacyctccctcactcctatctccccacgaacagcccgagtcctattgatttgtgcctctacaatatctgtgagatatatccttcttctcccctttccagtgccattgcccgaatttaaacctgcactgtcttgcaccttgatttttagagtgacccccttcctgctttccaagcctcctcccatccatccaaactttaaacaacacaacttttaaaaaatacaagtgtgattatgccctatccctgggtcaagactgtaaaggctccctgtgtccataggatgaaattcagatcctaacccagcacaccaggcctttgacacctgctcaatcttcatcacctggtcacaccaggcattctcatgctccttggcttttacacgtgctgttctttctgcccggaattccttccccatccattgtttttactggactcttgctcatctttcaagtcccaacataaaattg

SEQ ID NO: 847548 - DNA, 612 bp, Homo sapiens
gaaggaattctaagtaagggttaaggttgagtggaaaaaagaagaagaatcagaaggaagtggtttcatagtaggataaatcaagtgctgagatgaagtcagttcactaacagactcagagttctattggatayggcatgaggttcttggtgtcaccatcttaggatctgctcatttttggggttttaagaacctgtctgaactccacttagccaactgaagcttgccttcaaagttaacacaatgtgctttctcccatataaaccttttaagctgtttctgatgactgttccccttcctgttagagctccacctcttttaatttagcctccatacctttagagtaaggtctgcaactttcttccttaattgacagtggagatcaatatgtaacccagattgcaaaaatggtttgggaacactgcatgttctcactcataggtgggagttgaacacatggacacagggtgggaaacatcacacactggggcctggcaggggatggggggctgggggagggatagcattaggagaaatacctaatgtaaatgacgagttgatgggtacagcaaaccaacatggcacatatatacctatgtaacaaacctgcac

SEQ ID NO: 847549 - DNA, 471 bp, Homo sapiens
tggaaaaacagtggagggtggcagaaagagagtcggcttggtgtcagaaagctcggggcattgtcccagatctgttgcttcctaggagtgtgaacgatgagcaagtccctccatctctgatgattagttttttcttttggaaaatggtgctaatgtttgctaccttataggcttggtgtgaagattagatgaactacattaaacatgcccagcacaagataggcactggagaaatgctagctttgggtgctttttaaattaattaattaatttatttaatttttttagatatgggctcgccatgttacccaggctggtcttgaactcctgggctcaggttatcttgcttcagcctcccaaaatgctgggattataggcaagagccrccactcctagcctggttgctttttttattttaatctttaacaaaattatttatttatttattttttgtaatcttggcaggcaaag

SEQ ID NO: 847550 - DNA, 618 bp, Homo sapiens
tgtgtacatttaagatttgttctaaatacttgaaagcacgcttgcttgttagttacctgtccaaagcctgttgactgctgggccccagaggaacactagcatgtgcccttgccccgcctgtttctttgtatacaaacagtatacaaaacatagagaagagaactgacagatatttagatctatgggcttttatagaaaataagaattacttttcttctgtaaggtcagtgtttacaccttgtctgcttgctccatactcctctagagactaaaacacctcattgcttctcagaatcatttctgaaactgaggctagaaattacaacagagactctcttctcacctcttcaccagcatcccttgcctcttaaagtcactgaaagaatatcccccctcccccatggaggggtcataacacttttttgtctgtctattccaggaagctcgagtgctttacaacgctttacccagcatccctgggggcaggatcggtgcatgtagatgtttactgtgccaaccccttaaaaggccttctcttagcttagaccctcatctaacccagactaataataaaaagtccccartaactttgctgttatagatcttacagtgctcaga

SEQ ID NO: 847551 - DNA, 645 bp, Homo sapiens
gaatggttggtcttaatgggctttgtctgaaaattgactggaacaattgcttccaaacagaagatacttggaatttcatatatggaatatagatgagatggttggyatttgaccatttaattttatcagtcaatataaaatgatctatattattcttaattttcacacttttccatatttctaatcctaatatactcatttgttgccttttcccacttaattgtataattgcagttcccatgttgcttataatagctgcataatatttcagtcactggtttacataatttaccatcttcttattgctgtttctatttgtgtgtgtgtgtgtgtgtgtgtgtgtgtgtgtgttacaaataacacttccgtacctatagctgtttctttttcttttcctttttttccccctatatttaggggttgttttcttagggaatatttttttctgaatgcgtgaggaacttaaagtttattctataagcatttattcagcatctactgtgtacagggccctggagatacagagatgaattttagaacctgtgcacaagctgtctccatttcctggactctcttcctccctctcccttcacctgacgaattctccatttaaatcccactttgccaatgaggcctttatgtatt

SEQ ID NO: 847552 - DNA, 609 bp, Homo sapiens
tcaacttcaaaatggtatatttctaatgataaaattttgttaatatatcataagaatgttctaatattattttaaaaattgtaactatttcartggcttcacaacattctgttatatatgtatcctattagatatttgactacacaataattgtttgatattaattttactattttatcttattataaaataatacatatttttttgcctatggtctgtgctttgacatttaagatttgtagaaatctacgtaaccatgtataattattttaaaatttaataaatattgaaaacattggattagtaacagaatactcaggaaaaactaatcaattgaaaataataaaacaaaatgttgatatagattttataccttgagatttttttcttactagtatgatctaaaatttttttaatgttaaaaataaacttgtgatgttttggtacaatatctatattaataattgaccagagttttcagtttctttatttgtgttgtttaatgtttgcgtctcataatcacaccaagagcttggagttcagtaaaaatagaaggtagtggaaaaagccattatattccacacattttaccatttgtaaaggcctttc

SEQ ID NO: 847553 - DNA, 491 bp, Homo sapiens
aggtgggagtcaggtaggagataaagatcttrtagatttcttataagtaacttctgaataaattacttatttatggattggtaagattatatcacacatgaagctaaagattagataccatggatcacacttataactactatgataatcataacctctattaattaaaaatatatagcaagctcagtatttttttaatattcgtagtttttttcactgccagatttaaggaacagaatatttaaattgtgtttggagaatgaaggtgagatgaaatgttaatcaaccttgaatatcaggttaaagactgaattttataaagttggagactcaagtgagttacagtggatatattttttaagtagtgtagaattattataatctagagctagacattatgaaatccttaaaataactcatatatccttaataaattaaccatattattttagcagatcacagaacacatataattaaaattactcctaaga

SEQ ID NO: 847554 - DNA, 517 bp, Homo sapiens
tcttaggagtaattttaattatatgtgttctgtgatctgctaaaataatatggttaatttattaaggatatatgagttattttaaggatttcataatgtctagctctagattataataattctacactacttaaaaaatatatccactgtaactcacttgagtctccaactttataaaattcagtctttaacctgatattcaaggttgattaacatttcatctcaccttcattctccaaacacagtttaaatattctgttccttaaatctggcagtgaaaaaaactacgaatattaaaaaaatactgagcttgctatatatttttaattaatagaggttatgattatcatagtagttataagtgtgatccatggtatctaatctttagcttcatgtgtgatataatcttaccaatccataaataagtaatttattcagaagttacttataagaaatctayaagatctttatctcctacctgactcccacctaccaaacttgaattttctgctttaag

SEQ ID NO: 847555 - DNA, 637 bp, Homo sapiens
tagccagcttgaattcctccccagaaaatgggtttttcatttctaccacagagctgggctgcaaaatttgcaaacatttacactttgcttcccttgtaaatataagttccagttgctggccatttctttgctcatgaatataagaataggttttttgaagcagccaggtcacatcttgaatttttttcttgcttaaaaatttcttccaccagatactctaaatcatcactctcaaattcgaagttccacagatttccagggcaggcgggggggcaaaatgcctccaagctctattctaatgtgtaacaaaagtgacctttgcttcagtttccagtaagtttctcatctccacctaagacctcctcagcctgaacttcattgaccatatcactatcagcattttggtcataacaatttaactagtctccaggaagttccaaatattccctcatcttcttgtcttattctgagccctccacacttccagtccctgcctgttacccagttccaaagtcgmttccacattttcaggtatctgtatagcaatgccccacacctggtaccaattttctgtattagtccattctcgcattgctatgggtaatgaataaagaaaagaggtttaattggttcatga

SEQ ID NO: 847556 - DNA, 504 bp, Homo sapiens
tctccagccaaacaagccctttttcagcatttttacatattatgaaatataaatctaaggcaacttttaggttgtttacagagaataaaaagttatctttaaatctagggcttaaaatgaataattagaggtaaatctagttggcttaatcaaaataactgctataggaattacatataattagcgtccaaataaaatccttagcctactctatacaggaaagtaatataaatattagataggaaaatatcaattctctctcttatgtcttctcaagatcacatttaaacccttgatctttcttgtcatttcaagcacaagccaaaatacaagccaaaacacaagcaaatcatgaattttaaatcttgattccaaaagccactctcctagtctggttggaaaaataacraagctatgttctgtattttatcactgcacatttaggccacaatcattcaagtgttttgccaacaatgagcacagcacaaggtaccagaaggcaat

SEQ ID NO: 847557 - DNA, 309 bp, Homo sapiens
ctgaaaatgtaaatattttttctttggtttacagtaataaggagtgtgattccttttttttttctacctcttctacttctacgttttaagagctctgtagcttagtgagctcccaggcttatgaacaccctgacacagctagtcttgaaatgttgccagcattgtaggatttgcatacttaacatgctacttatactgccataaagtatgtaaggtggaaaggatattgtcttttagtgtgggtacatagagcatggcacragttgttgccagcctcacatcacatctgtcttctgattttatacttta

SEQ ID NO: 847558 - DNA, 626 bp, Homo sapiens
gacacactgctataacacgcaaatagtcatatacacatgaaaacacttcagacagcacactgacacgctgctgtaacatgtagatagtcacagacatgaaaacccttcacaacacactgacacgctgctataacatgcaaatagtcatatacacgaaaacacttcacacagcacactgacacactgctgtaacatgcaaatagtcacatacaccaaagtacttcacacagcacactgacacacggctataacacgcaaatagtcatatacacgaaaacacttcacacagcacactgacacactgctataacacgcaaatagtcacataaacaaaacacacagcacactgacacatggctataacacacaaatactcatatacacatgaaaacacgtcacgcagcacactgacacactgctataacacgcaaatagtcatatacatgaaaacccttcacacagcacactgacacactgctgtaacatgcaaatagtcacatacaccaaagtcacacagcacactgacacactgctataacatgcaaatagtcatatacacatgaaaacacttcscacagcacactgacacacggctatgtcagaaaggcatgcagtactctgtgagt

SEQ ID NO: 847559 - DNA, 563 bp, Homo sapiens
ggaaaacactctttaggatattatccaggagaacttccccaacctagcaaggcaggccaacattcaaattcaggaaatacagagaacaccagaaagatactcttyaagaagagcaaccccaagacacataattgtcagattcaccaaggttgaaatgaaggaaaaagtgttaaaagcagccagagagaaaggtcgggttacccccaaagggaagcccatcagactaacagcagatctcttggcagaaaccctacaagccagaagagagtgggggccaatatctacattcttaaagaaaagaattttcaacccagaatgtcatatccagccaaactaagcttcataagtgaaggacaaataaaatcttttacagacaagcaaatgctgagagattttgtccccaccaggcttgtcttacaagagctcctgaaggaagcactaaacatggaaaggaacaagcagtaccagccactgcaaaaacatgccaaatggtaaagaccattgatgctatgaagaaactgcaacaatttacaggcaaaataaccatctaacatcataatgtg

SEQ ID NO: 847560 - DNA, 563 bp, Homo sapiens
ggaaaacactctttaggatattatccaggagaacttccccaacctagcaaggcaggccaacattcaaattcaggaaatacagagaacaccagaaagatactcttcragaagagcaaccccaagacacataattgtcagattcaccaaggttgaaatgaaggaaaaagtgttaaaagcagccagagagaaaggtcgggttacccccaaagggaagcccatcagactaacagcagatctcttggcagaaaccctacaagccagaagagagtgggggccaatatctacattcttaaagaaaagaattttcaacccagaatgtcatatccagccaaactaagcttcataagtgaaggacaaataaaatcttttacagacaagcaaatgctgagagattttgtccccaccaggcttgtcttacaagagctcctgaaggaagcactaaacatggaaaggaacaagcagtaccagccactgcaaaaacatgccaaatggtaaagaccattgatgctatgaagaaactgcaacaatttacaggcaaaataaccatctaacatcataatgtg

SEQ ID NO: 847561 - DNA, 563 bp, Homo sapiens
ggaaaacactctttaggatattatccaggagaacttccccaacctagcaaggcaggccaacattcaaattcaggaaatacagagaacaccagaaagatactcttcaagaagagcaaccccaagacacataattgtcagattcaccaaggttgaaatgaaggaaaaagtgttaaaagcagccagagagaaaggtcgggttacccccaaagggaagcccatcagactaacagcagatctcttggcagaaaccctacaagccagaagagagtgggggccaatatctacattcttaaagaaaagaattttcaacccagaatgtcatatccagccaaactaagcttcataagtgaaggacaaataaaatcttttacagacaagcaaatgctgagagattttgtccccaccaggcttgtcttacaagagctcctgaaggaagcactaaacatggaaaggaacaagcagtaccagccactgcaaaaacatgccaaatggtaaagaccattgatgctatgaagaaactgcaacaatttacrggcaaaataaccatctaacatcataatgtg

SEQ ID NO: 847562 - DNA, 517 bp, Homo sapiens
cattaatccattaaaaagatagaaaatgtacatacaaacacttaactattaagtcacagttgattaaatcrccatgaatgacaggaaatttcataatagccatgcattatgggtgaatgtgatgaacaacgttttggaatatttgatcaagctgattaatttaaaacattacttaaggttcccccccacccccaaatctacagtttacacttgataaaactaatgctatcatagattaaccccttccctcagccaggcacagtgactcaagcctgtaatcatagcattttgggaggccaagccaaaaggattgcttgaggccaagagttcgagaccaacctaagcaacatcatgaggctccttctcaacaaaaaataaaatttaaaaacataataaaatctttactccactcaaaccagagtgggagtttggagtgttctttgtgaaaacataaatgcacagtcatcagtattttaaaaatataataaaaatgaaatgggttactcttaatatttaa

SEQ ID NO: 847563 - DNA, 519 bp, Homo sapiens
tatatacttaaaatggttaaaatggtaaattttatgttacgtatattttatcacaataaaaaatgtaactacccatattgtgctaacaatgtaaggaggagatgagtgtgtgtataaaattagtactagaatatctgtaattcaaggtaagagagatagcggcaagccactagaaattaaatactatggtgttcaggggatgcaaagataatattcaggggttacaggaaatttttcatggagtatatagttgctggagttcatctttggaagattaatgcaattttactgaatagagatggtgggggcaggtatcctacaaaaagtgacccatacaaacaaagcatggaagctaaaatcttgggggtgattttagagctgtgatttctccttgttagrctacagtgtagagcagtgtttgtcaaactttagtctttatacagatcactggggaatcttgctaaattgtagactctgattctatagattctaatatacaatccaaaattctttattgct

SEQ ID NO: 847564 - DNA, 694 bp, Homo sapiens
acatctgcccctatgtatagcataaacctgtttccttttctaaatccacttttccaagttcaccatgctaaatcatcatccctttgaagctcatgcaaaatcaaaccactatcagcatttgtactcrgtcttctggtttttgtttgtttttttcattcttatccattcctttgctttctctttgttgttaatttctttctccctctttttccaatttcaaacttaaacttgtttgtaacctctttgtatcagcaatgatgagggaaaaaccagttattttattagagaaaattcagcacacccctacttgatctgtagaatattctctagctcatatcctcgctaataatttgagtataaaataaggggaagtctttcgagtgtgggcccaacataaagctcttggtccattcttagtagggcacaatgtttttaagataatgcttcccaagccagggtcatagcttgcacctgtaatcccagctactccagaggctaaggcaggaagattgtttgaggccaggagttcaagaccagacagagcatcatagcaaaacctcatttctaaaattattttttaaaattagtcaggcatagtgacatgcacctgtagtcccagccactccaaaggatgtggaagaaggatcccttgagcctaggagtttgaggctgcagtgaaatgtgatcactatac

SEQ ID NO: 847565 - DNA, 648 bp, Homo sapiens
acatctgcccctatgtatagcataaacctgtttccttttctaaatccacttttccaagttcaccatgctaaatcatcatccctttgaagctcatgcaaaatcaaaccactatcagcatttgtactcagtcttctggtttttgtttgtttttttcattcttatccattcctttgctttctctttgttgttaatttctttctccctctttttccaatttcaaacttaaacttgtttgtaacctctttgtatcagcaatgatgagggaaaaaccagttattttattagagaaaattcagcacacccctacttgatctgtagaatattctctagctcatatcctcgctaataatttgagtataaaataaggggaagtctttcgagtgtgggcccaacataaagctcttggtccattcttagtagggcacaatgtttttaagataatgcttcccaagccagggtcatagcttgcacctgtaatcccagctactccagaggctaaggcaggaagattgtttgaggccaggagttcaagaccagacagagcatcatagcaaaacctcatttctaaaattattttttaaaattagtcrggcatagtgacatgcacctgtagtcccagccactccaaaggatgtggaagaaggatcc

SEQ ID NO: 847566 - DNA, 637 bp, Homo sapiens
tttgaaaaactatcaattgctgaagtagtcttcattttaataaagttacagaattatacttaayataaaaaatgcacatagcatattctgccaattacttaatctcattttaaaaaatagttctgtgtatttgacacctgtcaaaaacttagttgacagacttctttattcaatatattacatcttctaggaatctaatcaatgtgtccaatttactattcataatttgcattgcatacttatggctttattccatatttatcttccattttctcatcaccaactttcagtgttcaatagaagtataaatgggaatcatgttattactccaactatacatttgtgtatacaacaatgaatttattaattcacactaaattggaaataaaaaactaagaaaattgtgttaaatttgaaacaatcaaattgaaaagaaagatgtatgtagttttactgtaaatattgtgctaataattgtgcaaatttgccacaaaatctgccctaaataagaaaaagagcctttataataataagagctgacaaatacggtttcttatcagaggcagctacataaactgtgggctcctatgcaaaatgaatatgcctagcttcttattcaaaaagcagcaaggaagta

SEQ ID NO: 847567 - DNA, 510 bp, Homo sapiens
cttaatgtagtcattctgcttggggtgaggtggcatctcattgtrgttttaatttgcatttttctaatggttagtgatagcaatcctattattggatatatattcaaaggaatataaatcattctactataaagacacatgcaggcatacattcattctagcaacattcacaatagtaaaaacatggaatcaacctaaatgtccagcaatggtagagtgaaaaaagaaaagatggtacatatatactatagaatactatgtagccataaaaaagaatgagatcatgtcctatgcagtggcatgaatggagctggaggccattatcctaaacaacctaacacaggaacagaaaaccaaataccacatgttctcacttgtaagtgggagctaaacgttgagaacgcataaacacaacgaaggacctacttgaaggtacagggtgagaggacggagaggatcaaaaaactacctattaggtactatgtttattacctgggtgatgaaataatc

SEQ ID NO: 847568 - DNA, 526 bp, Homo sapiens
ggagaaaaggaaagtggttatttttatttagagcatttctctgtctgtctaaaagaatctattaaaagaaaataaaatcatgtttgcttggctattgaccattctcttccttttataacaaatagatttagtgttcgaccttaagatatttctagcaagcattcaccttagcaaacttttgagtgcctcaaaagagaatctttaacaacttgtaacatttctttgtgtagagcatttttgaaaccttcattgaatcagtaatttagaaaaagacaacctatggtaatataaacagctttagtggagcacagataaaatgaatccctcaaaaataggttgccacataaatacagacctagttaaatttgaattacaggtaacaaaagatttcaatttttagtataaagatamcccatatattgaatggaaaacagctatattaaaaatctttttaatcttaaattcaaatttaactacatatcttgtatgttctgtttgctaaatttgtcacttgcgttcaatggaa

SEQ ID NO: 847569 - DNA, 564 bp, Homo sapiens
gcttcttctcttttgggccctgctagagagaacaattattgctatccgtgaagaaagtgattctgaaatggctttaccagctgtgaattatccaaagaaaattactcacagaatctcatgggaaatgcacaggcgacttacttcttatgagggcagcagataatgcaaagctggcatttgagggggacatggccaaggtaacaggtgccaagtaccctgcagagaggtaggcagaatatagaaatgggaaatccaagaagcggttaattccttgagtatcttttaatgtggtaaaaaaacacataatataaaatttaacatcttaaccattttttaagtgtacacttcaattgtgttaaatacatctatattgttatgtaacagatctctgtaactttttcatcttgcaaatttgaaatttgctattaaagaatgatatggtttggttctgtgtccccactcaaatctcatctcccataattcccatgtattgtgggagggacccagtgaragatgattgaattatgggggcaggtctttcctgtgctgttctcgtgatagtga

SEQ ID NO: 847570 - DNA, 524 bp, Homo sapiens
tactcttaactttgaaatagacactgaagttggcttggttatcactgtcccgggttaaatatcaaggcacctatctgtatgatggacacagcctgatatattccagcctgtattcctttctaagracaagtctcagaggtgtcccccggccacagagctaacacggtagaagcctggctcctctctgctcccttggtctctcgagataccttctgcagtagcacagagctgtttaccaggcctctgtttttgagcttgaaaggttttcactcaggctggcatacacgtttttgacagattgaattgacacatgcagaaatcaccagtggcctttgggtctcactgtggccgtcgtgaacctgcttaaagtgcctgatgcctgcatttctctttacttatccggaagccatttcctaccagcagctcctccctccgcttccccaaaccaaagagtcaagtcttgggcatgggtggataactgggaaaggtgaaaagcaaaccattagtaaaacgagttagttctt

SEQ ID NO: 847571 - DNA, 644 bp, Homo sapiens
ttttctcatgcagaatctacaaatgtgaatgttgttatccttagtttctcactggggagcaccctggggttgggagtagggtagagagcatggtgcaggtataaacggagaaatttgaggctaattggatagtactcttaactttgaaatagacactgaagttggcttggttatcactgtcccgggttaaatatcaaggcacctatctgtatgatggacacagcctgatatattccagcctgtattcctttctaaggacaagtctcagaggtgtcccccggccacagagctaacacggtagaagcctggctcctctctgctcccttggtctctcgagataccttctgcagtagcacagagctgtttaccaggcctctgtttttgagcttgaaaggttttcactcaggctggcatacacgtttttgacagattgaattgacacatgcagaaatcaccagtggcctttgggtctcactgtggccgtcgtgaacctgcttaaagtgcctgatgcctgcatttctctttacttatccggaagccatttcctaccagcagctcctccctccgcttccccaaaccaaagagtcaagtcttgggcatgggtggataacygggaaaggtgaaaagcaaaccattagtaaaac

SEQ ID NO: 847572 - DNA, 636 bp, Homo sapiens
attcttttactttcaatctctgtgtgtccttgaaggtgaaatgaatctcttgtatgcagtatatagttggggcttgttttcctcytttttttttttttttttttttaaagtccattcagccattctatgtctttcattggataatttaatccatttacattcaggataattattgataggtaaggacttgccgctgtcattttattaattgttttctggttgttttgtagatcctttgtttattttcttcctcttttgctgtcttcctttgtgattaggtgactttctctggaggtatgttttgattcctttttatctttcgtgtgtctgctataggtttttgctttatggttaacatgaagcttatataaaacatgttattgttataacaggatattttaaatttataacaacttaacttcgatcatatgaaaaacctccacacttttatcctcacattttataacacaatttatattttttatattgtgtatttcttaacttattgtggctattattatttttaacagttttgtatttcaaccttcctagtaaaaataaaagtgatttataggtcaccactacagtataagagtattctgaatttgactgtatatttactttcactggtgagtt

SEQ ID NO: 847573 - DNA, 546 bp, Homo sapiens
gaagacttgatgcagtaaataccaacaatacaatgcaattatagatataatttcttgcatctcatggggagaagagtataaagcaaaatgtaactataaccataagaccataagaaatcagatttaggaactgagatattttctggtataattagaggtagatggggttattttgattttatctgtgcctacctttcttaaaattacacatgtggatatatgatctctttgaaagaatcttctgatgttaaaatcatatttgtcctatcaattagaatttttcctttcctctttggatgtgtcatttctctgagataattgttctaaggcctctttggttttctaagctttaattgtatttgatacctccttaatgtaacttatatttccccaaatttgtatgtttttaaagccatgcagttctgaaaatattaatcctggtcattsattcattctacattccaatgagtgtttgctatgtggcaggcactgtgttggaaccaatgacagagtacgaatcatagaatcacagaactctaacatcag

SEQ ID NO: 847574 - DNA, 558 bp, Homo sapiens
gtgggcttttgacagtgcctggcccccatctgtttgcccaggatgtcagtttccatgcttttacatttcttctagtagcttcatgtgttaggataagtttygttcaccatctcctatgtgaacttcttcatcaagagtcctcactagtccccacaccagaagccctcgggagactgatgtactgtccgcatgtgtgccacctggagccctcaaagacatggggcattgatgtggacaagaatgtctgccctcgcaacccccaaatgctcagttaggcttggtttcttgggtccctgaaggggccccacctgagcccggaatctcacacttggtttattgtctccttagacctctcacataggagagtatcttgcagatactgaactggaactttaaaaattcccctctttgagtcatattaccgtcaggatttgaacattttaccttcaagtataaaccgagagagggagaaccctgatgctgcccggaacagaagaatttagtcagcattcattttttgagctctttagtgaggctgtggctttgtagggaggtctc

SEQ ID NO: 847575 - DNA, 560 bp, Homo sapiens; identical to SEQ ID NO: 847524

SEQ ID NO: 847576 - DNA, 623 bp, Homo sapiens
gataggaaggcattagtgaaatagccctccgtgaaactccatatctccaaaatgraaatatatccatagtaaacatcaaaatcaaaattaaagggggttcagtaaaacaatggagtaaggaggggggatgagagagaactatgtcaatagtttataatgacaaatgagaagaaatataattgaaaatatggaaattacttctctggaagtcagtatgtcaattacaataaaaataaggagggtgaaaaattaaaacttttaaagcaagaacaattttttttcataaatttatgaacatttttgaacataagtttaggtaaacagaagacaaaattaaaataaatgtaaattaatatatttgtttgggttttcacaaaaacactctaacttaaaagaacttttggtaaaccaaatgccaattttcagtactatttctatttatgagagaagaggagaaaaaaaaatgaatgaacccagtgaaagccattctccctaaacagactgctgatggatgtgcagatggtaagaaccttctgctcttgctgaaacttgcagaaaaacactgtagatcttgcagcttttagaactgccagccaaatgaaatattattacctccatctgat

SEQ ID NO: 847577 - DNA, 623 bp, Homo sapiens
gataggaaggcattagtgaaatagccctccgtgaaactccatatctccaaaatggaaatatatccatagtaaacatcaaaatcaaaattaaagggggtwcagtaaaacaatggagtaaggaggggggatgagagagaactatgtcaatagtttataatgacaaatgagaagaaatataattgaaaatatggaaattacttctctggaagtcagtatgtcaattacaataaaaataaggagggtgaaaaattaaaacttttaaagcaagaacaattttttttcataaatttatgaacatttttgaacataagtttaggtaaacagaagacaaaattaaaataaatgtaaattaatatatttgtttgggttttcacaaaaacactctaacttaaaagaacttttggtaaaccaaatgccaattttcagtactatttctatttatgagagaagaggagaaaaaaaaatgaatgaacccagtgaaagccattctccctaaacagactgctgatggatgtgcagatggtaagaaccttctgctcttgctgaaacttgcagaaaaacactgtagatcttgcagcttttagaactgccagccaaatgaaatattattacctccatctgat

SEQ ID NO: 847578 - DNA, 617 bp, Homo sapiens
atttttttgagcagaaagcttgctggtctctaatttgcacatgtcttgggcagattctacagattttttaaaccaagaggaattttattattattattattattattattattawtattagagacagggtctcactctgtcacctaggctaatgtgcagtggtgcaatcataggtcactgcagcctcgaacctctgggttcaagcaatcctgccgcttcagcctgtagctgggattataggctaagtgaaattttcaagcttcatttccagaaaaaaatgagtggttcatctttagcagccaagagcaggaatgacttatgtgagaggaaaatgagaggctaaagtcagtgagaaaaaggggaagacagaagggaatgtggtcagaaaaacgttccgttactattcctccctggtccttgagctgagaaggaactccagagtgttaaactatcgcatctgcaggggtactggccctgtaacgtcctcctgcagagtactcaccaccttttaagtgctgacttaatggttctgagtccccgctgggccaacagctacaggaggacaggggacaaatcgacgtattcactctgtccccatagctaagcagggcccgagc

SEQ ID NO: 847579 - DNA, 617 bp, Homo sapiens
atttttttgagcagaaagcttgctggtctctaatttgcacatgtcttgggcagattctacagattttttaaaccaagaggaattttattattattattattattattattattaatattagagacagggtctcactctgtcacctaggctaatgtgcagtggtgcaatcataggtcactgcagcctcgaacctctgggttcaagcaatcctgccgcttcagcctgtagctgggattataggctaagtgaaattttcaagcttcatttccagaaaaaaatgagtggttcatctttagcagccaagagcaggaatgacttatgtgagaggaaaatgagaggctaaagtcagtgagaaaaaggggaagacagaagggaatgtggtcagaaaaacgttccgttactattcctccctggtccttgagctgagaaggaactccagagtgttaaactatcgcatctgcaggggtactggccctgtaacgtcctcctgcagagtactcaccaccttttaagtgctgacttaayggttctgagtccccgctgggccaacagctacaggaggacaggggacaaatcgacgtattcactctgtccccatagctaagcagggcccgagc

SEQ ID NO: 847580 - DNA, 611 bp, Homo sapiens
gaaacaatataggagagtggatgctggcagaaaaaggcgtagcrttggaaggagtgtttagacagaatggttcctgctcctcttgctccaggaaaagggcctgggccttcagggtggtcacagggtcaggctgaggagatcctggaggagtgactttcttgtgcagtgagagaccttgtgacgccttggagctcatactgaaaattacttcttgcctcaatggagaagggggagtggagaagagtttcgggggttgtgggctttgggtcggctccctggacaatggtggaggggatccagcgtcctgggccacctctgtttagataagagcttttccgtgagcgtcttggctcatgctgcttcctgctctcgagggccctgtggtccattcacactcagaacatggcccttcttcccagcctctgcttttccttcctcctggctccttctgctggcttctagagtgagtgccagcaatctccccgccctccaccccccaagccagacactctctccctcccagctccccactctccttcacacagtcttttccagggccaggggatcctcgtggccccgcactggggtaactgaaaggctaaaagagtggg

SEQ ID NO: 847581 - DNA, 474 bp, Homo sapiens
ataactattgttcagaagtgggtctctaaggagtgaagagggctctgttaatagcccctaatggggagccctattcatgttctgtgaggcgtggctgttgctccagcactgcctgcctttagatcccttcccagatctgacacaatttggcacacacagaaggctcagtcaacactgcccagctgggtgatggttgggcagatggtgtttgttgcccaatctgccagactggtatggcaagtccaataaacatctccatggaaccagcagggacatcaacagagtagcaatctgcaggcttcatcgccgagccttgccgcctccactttccccctgtggggatcagaaggacccttgtmagatggaaatgcaccaggaatgtgggcccttcatccccagaccgaaagaaggtgttcacgctttcatgcaggtcagcactgtgttgggcagagagcagcacatggctgaacagat

SEQ ID NO: 847582 - DNA, 442 bp, Homo sapiens
gtatatagaaatatatttgtatattgacgttgaattctgaaattttaccaagtgtacttattctagtagctattttatmgattctgtggaattttcttctaccaatctcatcatctatgagtaatgacaattttctgatttttataccttcatttccttttttttttttttttttttttgagatggagtctggtttgttgcccaggctggattgcagtggcgtgatctcagctcactgcagcctccacctcccgggttcacgcgattctcctgcctcagtcttccgagtaactgagactacaggcacgtgccaccacacccggctaacttttttttttcatttttagtagagacgacagggtttcatcgtgttagccaggatggtctcgatctcctgacctcatgatccgcctgcctcaacctcccaatataccttcatttc

SEQ ID NO: 847583 - DNA, 617 bp, Homo sapiens
gatcacatatttctttagaagccgtgatgagaggaaaaaagatgatcgttctcgcaaaagagattatgatcgaaaccctcctcgaagagattcatacagagaccggtacaatagaagacgagggcggagtcgcagttatagcaggagtcgaagtcgaagttggagtaaagagaggcttcgtgagagggacagagatagaagcaggactagaagcagaagcagaacacgaagcaggggtaaataatatattttggttatctttttatgaaaaactccatgtttaaatgtttttaaaaattgcttaacattttgtcagtgttgtcttcatttttttctattatgatgtattctgtggtccaagagaatgctttttaaaaattcctttaaaagttttattccttgcaaattaaaatcacagttaccactacacattcaacaggatagccacgatgatacagactgattctattccatgttggtgagaaagtagataagctgaaactctttggaaaacattttggcagtatgtaaaaatattaaaactacacttagcatatgggtcygctattctacttcttactgtttacctggaagaaatgaaagtgtatgtccacaca

SEQ ID NO: 847584 - DNA, 623 bp, Homo sapiens
ttgttacatgaatatattgagtagcagtgaggtctgatttattgatgcaaccatcacccaatagtgtacattgtatctattaagtaatttcccattcctcacccacttcccacctgcccacattccaagtctccagtatctattattccactctgcatgtttgtgtgtacacactatttagctcccatttataaagtgagaacatgtggtatttgactgtatgtttctgagttatttcacttaagataatggcttccagttccatctgtattgctgcgaagatgtgatttcattcttttttatggttgagtagcattctatcatatatataaaatatttatatatttatattatatatatattcagcactaaatactgaaatatgtagtattccatgatatacatagtgtatcactatacatatagtgtgtgtatacacactcatccccgacattttctctatctagtcatctgttaatggacatttaggttaatttcatatctttgatattgtaaatagggctgtgataagcatatcagtgtatsagtgtagatatctttttaatataatgatttctttcctttgggtagatacccagtagtgggattgctggattgaatgg

SEQ ID NO: 847585 - DNA, 544 bp, Homo sapiens
gaggctgtcccttccctagtgtaagtttgtgtcaattttgctgaagattagttggccataggtgtaagtctttatttctgggttctctattctattccattgatttatgtgtttatccttgtaccaataccatgctgttttggttactatagccttgtagtataatttgaagtcagatactgtggtgcctccagctttgttctttttacttagaattgctttggttatttgggctcttttttgattctataagaattgtagctttttctttctaattctgtgaaaaatgatactggtgttttgataggaattgcattgaatctgtagattattttgggcagtatggtcattttaatgatattgcctcttctaattcatgagcatgggttattttcccatttgtttgtgtcatctatrattttttaatctatgttttatagtttttcttgtagagatatttcacttcattagtcatttagttatgtatcatctatctctcatccatacaccaaggaaaccctatgttataggtgccaataatgat

SEQ ID NO: 847586 - DNA, 544 bp, Homo sapiens
gaggctgtcccttccctagtgtaagtttgtgtcaattttgctgaagattagttggccataggtgtaagtctttatttctgggttctctattctattccattgatttatgtgtttatccttgtaccaataccatgctgttttggttactatagccttgtagtataatttgaagtcagatactgtggtgcctccagctttgttctttttacttagaattgctttggttatttgggctcttttttgattctataagaattgtagctttttctttctaattctgtgaaaaatgatactggtgttttgataggaattgcattgaatctgtagattattttgggcagtatggtcattttaatgatattgcctcttctaattcatgagcatgggttattttcccatttgtttgtgtcatctataattttttaatctatgttttatagtttttcttgtagagatatttcacttcattagwcatttagttatgtatcatctatctctcatccatacaccaaggaaaccctatgttataggtgccaataatgat

SEQ ID NO: 847587 - DNA, 541 bp, Homo sapiens
acctcgcagatacataaaactataaatgagggtcacatggcaaattacaagttaaaacgtacctttaaaaagtatytatttggcttaggttccaagatggctgaataggaacagctccagtctacagctcccagcatgagcaatgaggaagacgggtgatttctgcatttccaactgaggtaccaggttcatctcactggggcttgttagacagtgggggccgaagcagggcaaggcatcgcctcacccgggaagcacaaggagtcagggaattccctttcctagctaagagaagcggtaacagacagcacctggaaaatcgggtcactcccaccctaatactgcacttttccaatggtgttagcaaatggcacaccaggagattatatcccgtgcctggctcagagggtcccacgcccacagagcctcgctcattgctagcacagcagtctgagatcgaactgcaaggcggcagcaagtcttggggaggggtgccagccattgctgaggcttgagtaggtaaacaaagcggccaggaagc

SEQ ID NO: 847588 - DNA, 541 bp, Homo sapiens
acctcgcagatacataaaactataaatgagggtcacatggcaaattacaagttaaaacgtacctttaaaaagtatttatttggcttaggttccaagatggctgaataggaacagctccagtctacagctcccagcatgagcaatgaggaagacgggtgatttctgcatttccaactgaggtaccaggttcatctcactggggcttgttagacagtgggggccgaagcagggcaaggcatcgcctcacccgggaagcacaaggagtcagggaattccctttcctagctaagagaagcggtaacagacagcacctggaaaatcgggtcactcccaccctaatactgcacttttccaatggtgttagcaaatggcacaccaggagattatatcccgtgcctggctcagagggtcccacgcccacagagcctcrctcattgctagcacagcagtctgagatcgaactgcaaggcggcagcaagtcttggggaggggtgccagccattgctgaggcttgagtaggtaaacaaagcggccaggaagc

SEQ ID NO: 847589 - DNA, 541 bp, Homo sapiens
acctcgcagatacataaaactataaatgagggtcacatggcaaattacaagttaaaacgtacctttaaaaagtatttatttggcttaggttccaagatggctgaataggaacagctccagtctacagctcccagcatgagcaatgaggaagacgggtgatttctgcatttccaactgaggtaccaggttcatctcactggggcttgttagacagtgggggccgaagcagggcaaggcatcgcctcacccgggaagcacaaggagtcagggaattccctttcctagctaagagaagcggtaacagacagcacctggaaaatcgggtcactcccaccctaatactgcacttttccaatggtgttagcaaatggcacaccaggagattatatcccgtgcctggctcagagggtcccacgcccacagagcctcgctcattgctagcacagcagtctgagatcgaactgcaaggcggcagcaagkcttggggaggggtgccagccattgctgaggcttgagtaggtaaacaaagcggccaggaagc

SEQ ID NO: 847590 - DNA, 605 bp, Homo sapiens
atacaaagtaacctcatattagaaaaaaaattgccttttttgaattgattttgttctatgtaaattttacaataattatattattccaaayacagaaagctttagatgtctttgatatattatgtcttccttcatttaatatttgggttcaaattccaggtctgtcctagaacacaggacctagcaatagagttcactgtttttgcctctacatataacttaaaatatctgagtcagctagataaaaataataatttatttttaaagttttattttatttttgatttatacataataattgtacatatttatgggttacattgtgatgttttgatatatgtatacattttgtaatgattaatcagggtatttagcttatctatcatctccaacatttattattctttgtgatgaaaacattcaaaaatactttcttctagttattttgaaatatacaatacaatattatatatttcagaatgccgaaagttatttatcctatctaaatgtaactttgcactttttgaccaatctctctccatctttctctttctagactctaataaacactattctactctgaatttctgtgaaatcaactattt

SEQ ID NO: 847591 - DNA, 610 bp, Homo sapiens
attacatttatttaaatgataaaatggtaatacagtgggaggaaagcaatgactgagaagagacatgaaaatgtatctgaccttgagagttgcaacaaatattcccagccaaaccagtctgtttaatatgctttcatgcatgcaagtttatctgtttgactcaaactgtttaaacttataattccatcatggccactttaaatgtttttggaaacaaatacacatactttcacatatttaagaaaatcaccactccaatgtttctgttgaatcagacttttacatgatgttgtttaataaaatatggtaggttttgacatgtatgattttatcatataagtagcgtaactcctcagccaaaaatttagcatttgactctatagtagaaggctgagtcctgtacattatgttctaaagatagacaaaaatctagagattttcttctttcaaagtaaaagcagatgaggcctcccaccaccctctgagccattaaattgttttgccaaagtcacacttttaatttatttgacgaattkgatgtatttatctggtaattgatgtaattcagcaatatgtaattgtatcttcccttttggtgccacgaaatgct

SEQ ID NO: 847592 - DNA, 539 bp, Homo sapiens
agcagttttaagtttacagaaaaattgagcagaaagtacagggagtttccatataccctcctcccygaccttacactttcccccattactaacaccttaacaccttgcattagagtgataagtctgttacaactgatggaccgaaactaatatattattattaaggccacagtttatattagagttcactctttgtgagtccagcgcaaatcccttctcttctggaaagccttcttcagccagcccagccctcagaactctctcccagactgaatttatgcccttatagtcagtgtgtcctgctcacagctctagacacatccaaccttgcttgtaggcaccatgtgtgcgtgtttcagggttgggtttcttctgctaaactgtaaactccttgagggcagggaagggactcacaggctcgaagtcttacacttgctcagtgacagccaggggtccctaaatatggtcacaggaacccttgatctgttttctatattgcaaactgcctgagggaagccatattattaatcaaagtaaga

SEQ ID NO: 847593 - DNA, 570 bp, Homo sapiens
tatactttaattctaaagaaaaataatatttgcatagtacagattagatagacaagaagatgactggtaaggcaatatagtattgtagttaaccacactgatgctagagccacagtgccagagttwtaatcctggctccataatttatgtatgttgagcttggacaagttagttttagcctttttgcctcgtctataaaatggggacagtaggctgggcacagtggctcaaacctataatcccagcactttgggaggccaaggtgggcggatcacctgaggttggtagtttgagaccagcctaaccaacatgaagaaaccctgtctctactaaaaatacaacagttagccgggtgtggtggtgcatgcctgtaatcccagctacttgggaggttgaggcaggagaatcacgtgaacccgggaggcggaggttgcagtgagccgagatcaagccattgcactccagcctgggcaataagagggaaactccatctcaaaaaattaaattaaattaaattaaaataaagggacaataatccccaccccacagaaatgtgaggattaaaaatac

SEQ ID NO: 847594 - DNA, 570 bp, Homo sapiens
tatactttaattctaaagaaaaataatatttgcatagtacagattagatagacaagaagatgactggtaaggcaatatagtattgtagttaaccacactgatgctagagccacagtgccagagttttaatcctggctccataatttatgtatgttgagcttggacaagttagttttagcctttttgcctcgtctataaaatggggacagtaggctgggcacagtggctcaaacctataatcccagcactttgggaggccaaggtgggcggatcacctgaggttggtagtttgagaccagcctaaccaacatgaagaaaccctgtctctactaaaaatacaacagttagccgggtgtggtggtgcatgcctgtaatcccagctacttgggaggttgaggcaggagaatcacgtgaacccgggaggcggaggttgcagtgagccgagatcaagccattgcactccagcctgggcaataagagggaaactccatctcaaaaaattaaattaaattaaattaaaataaagggacaataatccccaccccayagaaatgtgaggattaaaaatac

SEQ ID NO: 847595 - DNA, 596 bp, Homo sapiens
tatatggatagtaaaatcactaagaattctgattgaatcagtgtatgtgaaagagagaaagcaaaaatcttcaaagtgtaaggagygattttgagacaagattatgcagctgtttgtaaggttttatgcaaggtactggggacacaaacaagcaaataggccttataacacagcgtgttgagtgctagatgggagacagacacgatattggatagcacaaagtaaagatctctgtgatagagaacttccttcttacaatctggacagagaaagaagaatgcccgtacactgtggatgtgatttaaaaaaaaaaaaagcagaaagtattcattttagctattagggtctctggaaacaaaggggaattctgctgattcagaagctaaaaacattagagagcaggagggtgggagagggagagatagcttgattcagctgatagaaaatgtagtttcagaaggtctttaccagaagcttgttgtgagggcaaaggtccctgataagagttaagccattttcccaaaaaagaatggaaaaatacagtataattagtactatattgttgtataaaatcactccaatttgcttacatgctt

SEQ ID NO: 847596 - DNA, 611 bp, Homo sapiens
gccatttacttttaaaagggaggacagtccattagctagtcttaggkgctttaaggggagaacagggtgttttcagttgtggactctagttggaggtacttatggaataatatttgacaagggtacaggctaagctgccaaaacaaaaaaaattccaatattcagaattttaaatgttagatgtttagttccctcttactgaagtcaaagatggaatctatggcctcatccatatgaagcttccatctctgggtgcacagctgctgcaacagtggctcttctcagccagtggaaaaaggcaaagtgaagcccatggcaagaagctttgtctttaaggtgacccagagttgcgcataccacttccctttgcatcacactggctcaagggtggaggacggctgggaaatagactttgtagctaggcaggcacatgcccagataaaactcaggatgctctattactaacccaaagaaggaaagaatgggtattaggggccagttaccagtttctaccacaaacccaaagtggaaatgttgagtggaatggtgaaatacacggaatatagaggcttagaagtgtaaaactgaaagccacgaacacgtaagtgtca

SEQ ID NO: 847597 - DNA, 628 bp, Homo sapiens
agttttacccaacaaaacaggaacccaaagcaggttgcagtttcaagactggatctcgtatcattccttctccttgcctttttcatccaccagacctcatcacacacagattcarcaaatctattgcttctcaaaacatgctcaaatataagatgaccctacaaagatcatctctcatttcccaatgggaagaacttcccccacattcaaagaaaggatttggacaacttgattatgagaacatttagcaatacagatgtagtagtcaaatgtctctttatgtttaatttagtaaattaattacacagatatattgaaagtcacataattgataaaatattatacttagaagtgttgatttgttcactcacattttatgaagtaattatattcaaattatattcagttatattcatctcaccagatgacttgagatacagtactgtttgaatctgtttttgatgtggtcactggaaagtacatcattttcaaaacatttaaaagatagacaaattatcccttagtgtatattgtgatcttcacagcataatcactctgaaaggcttatatgcaacacctttcagcactcacaactatgaagaaatgcaccattatgagaattgtttag

SEQ ID NO: 847598 - DNA, 593 bp, Homo sapiens
tgacctacaaatactctttaagttgatcagctagcaaacatttgccagacttctttctttcctacagcaaattattgcwttttcctgtcctgatgaggcaacaatagaaagaacagagaaagaacagtgtagtcagtagaaaatgcagtgatacaaagttgtaactgtggttttctggcacctttgctaactgtacacccagtcagcctgtcttgagccatttccccaactgtaagaattgtgatgtttgttgctctttatgccgtagaaactagtgagactatatgaggtaatgagactgtgtggtaaaaatgctatgggttatgaccttgcatttaaaaaaaaaaatgctgtgggcatctgcatagacgtggtcagtcagtttcattatgcagtaacatgagttacgtgtctctggatgtaagagctctgtctctgatacccagttgccaaggaggttgagctaatttgacttttagctgatctgacaatgagagagaactcttgcctctcttcctctcttcattgctccctaaacctccctgcagaagctgtaatctcccagatggggaaggagaccctttttggtttca

SEQ ID NO: 847599 - DNA, 593 bp, Homo sapiens
tgacctacaaatactctttaagttgatcagctagcaaacatttgccagacttctttctttcctacagcaaattattgcattttcctgtcctgatgaggcaacaatagaaagaacagagaaagaacagtgtagtcagtagaaaatgcagtgatacaaagttgtaactgtggttttctggcacctttgctaactgtacacccagtcagcctgtcttgagccatttccccaactgtaagaattgtgatgtttgttgctctttatgccgtagaaactagtgagactatatgaggtaatgagactgtgtggtaaaaatgctatgggttatgaccttgcatttaaaaaaaaaaatgctgtgggcatctgcatagacgtggtcagtcagtttcattatgcagtaacatgagttacgtgtctctggatgtaagagctctgtctctgatacccagttgccaaggaggttgagctaatttgacttttagctgatctgacaatgagagagaactcttgcctctcttcctctcttcattgctycctaaacctccctgcagaagctgtaatctcccagatggggaaggagaccctttttggtttca

SEQ ID NO: 847600 - DNA, 708 bp, Homo sapiens
attttaaatagaaaagttgtttcctgccccccgccccccctcacccctagtagcgagagtaagtaataaatggttttagggaagttagtctcaatttgggagatggtttgagagagaccatttttcaaacacattaatgatgaaaagcatcattccatgcaaaaggagcttggaacaagctctcccatcattttcttggtgggaccatttcaaagactcaatactgagttaagtgcaatatagctgggtgtttaatctcagtgcagcttggtaacttcaaagtcctgcaggcaaggctgtagagagtgtcttcacggagttctcatgcaatgcagatacccaaggccaatacattccccagacatgaggcccatacatcccctcactctagatggcattgcccttggctttaagggagacccatttgaaaggaaaggggtatgtttgcaataggcttagaatctgttgggcaggctctggaggggagatgctggctaaggacctccatccctggaaccgtaatgcaactccattgaaggctgtgcatttaaaggacaatggggcaggcatggtagctcatgmctgtaattccagcactttgggagggtgaggtgggaggattgcttgaggccaggagtttaagaccagcctgggcaataccacgagaacctgtctctaccaaaaagtaacacatttagttgagtgttg

SEQ ID NO: 847601 - DNA, 708 bp, Homo sapiens
attttaaatagaaaagttgtttcctgccccccgccccccctcacccctagtagcgagagtaagtaataaatggttttagggaagttagtctcaatttgggagatggtttgagagagaccatttttcaaacacattaatgatgaaaagcatcattccatgcaaaaggagcttggaacaagctctcccatcattttcttggtgggaccatttcaaagactcaatactgagttaagtgcaatatagctgggtgtttaatctcagtgcagcttggtaacttcaaagtcctgcaggcaaggctgtagagagtgtcttcacggagttctcatgcaatgcagatacccaaggccaatacattccccagacatgaggcccatacatcccctcactctagatggcattgcccttggctttaagggagacccatttgaaaggaaaggggtatgtttgcaataggcttagaatctgttgggcaggctctggaggggagatgctggctaaggacctccatccctggaaccgtaatgcaactccattgaaggctgtgcatttaaaggacaatggggcaggcatggtagctcatgactgtaattccagcactttgggaggstgaggtgggaggattgcttgaggccaggagtttaagaccagcctgggcaataccacgagaacctgtctctaccaaaaagtaacacatttagttgagtgttg

SEQ ID NO: 847602 - DNA, 520 bp, Homo sapiens
ggtttttgtgtgtgtgtggttttttgtttgtttgtttgttttttgagaccgagtctcactctaccgcccaggctggagtgcagtggcacaatctctgctcactgcaacctccacctcccaggctcaagtgattcktctgcctcaacctcccgagtagctgggactacaggcgcccgccaccacgcctggccaattttttgtatttttagtagagatggggtttcaccatgttggccaggctggtctcaaactcctgacctcaggtgatccacctgccctggcctcccaaagtgctgggattacaggcatgagccactgtgcctggccgtcactggttttatgagaacaacatcacattacaagagtggccaacatgatcagccaaaaactagaacatggacaatgagcatagggagcatgagttctctctgggaatacagaccacagggcttggtctccaggacatcaatacacagagaggaatggatgagaggaaaaccagaaaaactcaacttctcag

SEQ ID NO: 847603 - DNA, 533 bp, Homo sapiens
aagagcttgaatcagatcaacttgaatgtttgctgtaatgactttttccaaattaatgatatttttatctgctaaaattatttttaaaaatattggttattattactttcttagatgtttacatctaagtctttcacatatacatacacatcagaatagaaaactaaaacttgacagagttagcgatttatataaatgtaatttgacctctggataaaagaaaattttaaattatataccaaaaagctatgagtctctttggtatttctttagtattagaggaagagactcttaattatttgcctttatattttttgcctcaaactctgctgctttcttttcagcttgagatacttatgaaaagataattaagacttctgcttcagtgatggtggaccagcttttcactgaagaaaactaaaaacaaaatataaaacacatcctcttaaaataatcaaagtaartaagacagtgaaaattgctgggctaaatcttggaggggagagaagtaaacccagcacttagggctattt

SEQ ID NO: 847604 - DNA, 564 bp, Homo sapiens
ccatcaaaccataactccccagtcccctttcctcccagccccagaaacccccattctactttctgtctctatgaatttgggaccagatgagccacatttttaatctctaggaccattgcctcccagagctgggtcacattttccatttttttatttgacaatttgctttttcataggcaatcgactatgttttagacccagtgtaagttttttcactcctagggatgtgggcctatactaatttcatagtcatactaaagacctttggcattttagacctttggcatttgatctgatgtttccaaggacttgccagaagactctgtgacctatctacctcgtatttccaatccacatttagttatctgttccaggacatctttgatcattggactctaatgaatttgaagagctcaccaaagcatttcattttgttaaatgttcccattgaggcttcatgtgctacgtggagttcyattaatgtgtaactcagtgtcattgcatttagacaaggccagtccacatggcagaagaattctcagaaagaaggaagccagaacaccc

SEQ ID NO: 847605 - DNA, 627 bp, Homo sapiens
tcacaactaggaaggaaattaatagcactaaatgcttacattagaaaagaggaaaaaaacctcaaatcaataatacaagcttccacctcaggaaattagaaaagaacaaaataaaccctaaacaaacagaaagaaggaaaagaagagaaatctatataattgaaaacagaaaaacagtagagaataccaacaaaacagaaaactggttctttgaaaaaatcaataaaattgacaaatcttttattttcttttaattgagacagcctctcgctctgttacccaggctagagtgcgatcacagctcactgcagcctcaacctgccgggctcaagcagttctcctgcctcagcctcctaagtagctgtgactacaggtgcatgccaatatgcctgtctaatttttgtattttttttagagacagggtttcaccatgttgctcagactggtctcgaacttctgggctcaagctgtccacccacctcaacctcccaaagtgctcagattacagacgtgagccattgcytgaggccaaattgacaaatctttagcaaggctgacctaaaaagagagagagaggctgggtgcgatggctcatgcctgtaatcctagcactttgggaggccgagg

SEQ ID NO: 847606 - DNA, 575 bp, Homo sapiens
atacaaaaattacgccaggctcagtggcttatgcctgtaatcccagcactttgggaggctgaggcggatggattacaaggtcaggagtttgagaccagcctgcccaatatggtgaaaccccatctctactaaaaatacaaaaattagctgggcgtgatagggggcgcctgtaatcacagttactcaggaggctgaggcaggagaatcacttgaacccaagaggcagaggttgcagtgagccaagatcacgccactgcactccagcctgggtgacagagcaagagtctgtctcaaaaaaaaataagaataaaaataaataaataaataaattcaaaaattagctgggcttggtggcgcatgcctgtaatcccagctacttgggacgctgaggctcgagaatctctggaacccaggaggcagaggttgcagtgagccgagacctcaccactgcactcccgcctggacgccagagtgagaccctgtctcaaaacaaacaaacaatgctgcaacaaatcttctaaatgcgctttkttgttgttgttgttttgtttttttacaaagatttcttttagctt

SEQ ID NO: 847607 - DNA, 545 bp, Homo sapiens
aattttgccatgttacccaggctggtcttgaactcctgggctcaagcgatcctcctgcctcggcctcccaaattgttggaattacaggtgtgagccaccatgcayagcattaaagaaatagttggccaggtgcggtggctcacgcctgtaatcccagcactttgggaagccgaggtggatggattacctgaggtcaggacttcaagactagcctggccaacaaggtgaaaccccatctctactaaaaatacaaaaattagctgggcatggtggcaggcgcctgtaatcccagctacttgagaggctgaggcaggagaatcacttgaacccaggaggtggaggttgcagtgagccgagatcacaccattgcactccagcctgggtgacagagccagactctgtctcaaaaaaaaaaaaaaatatgtatatatatatatatgtgtgtgtgtatatgtatatttttagagaccgaattttgccatgttgcccaggctggtcgtgaactcctgggctcaagcaatcctctggcctcggcctcccaaagt

SEQ ID NO: 847608 - DNA, 591 bp, Homo sapiens
acctcaaaacctcacccgccctcacatatctggtacagtggtgggtacatggatawacatctaatttagttttgctaaattcaatgaaaatctcgatctatgtcctaaaagttgccgttactacatgtgcatatgaattaatatgtaatgacagatgtgctcaatctatttcccccaaaagtttatcgttctttataacagaagaatgaaatcatggaattataaagttaaaaggggtgtttagagcttattaacttcaccttctacattttacctgtgaaaaactgaggccaagaaaggtgaagtggatacacagtcaagcaatgtaacagagccaggaccagaaatcggtctcttgactctgagcctagtgttctttctaccatacttcatgtctcctgtatcctacctgcattcagagagaaacaaggtcgtaagtctgtcccttaaacaaacatcttaacccctccatatgtgtgcattgtttctaggtaacaatagagtaccctcacttgctttggagaagttgaggtttccaggtgccacttcattaaaaatgtaattttaatgtgtttttatttctacggcttc

SEQ ID NO: 847609 - DNA, 593 bp, Homo sapiens
cccagattcatgtcctacagataataagttagcattttttaagccactaagtttgtggcaatttgttatggagcaatagctaactaatacattgattattgataaaagtggggtcacattcctaaraaaggaaatgtacgaaatggaaacgagtatagacttggataacagagttcctgctatgccatttagtatctggttaagtttcatatcttttctaaaccttggtttctctgtttctaatatgaagataatagttcctgcctcatggtactgtttgcaggggtaaatcagatacagtatttagtagcatgtctggcagatatgaagtatttaatagatgctattcattgctactatatgatgtagatttcatccactggaacaattatagtcttcacccggggaccttagcatgatacagctatccaggttggttttgctagcttttttgtttcctcttgtcaggactttatgtttcagggagactgagtaaccttccattcagccctgaaaggttttactctcatgggtattataaatgttctcctcttggtatgtgacatgattatctaattctttttgtctgaagt

SEQ ID NO: 847610 - DNA, 591 bp, Homo sapiens
aacaacagaaattaatttttttttttcacaattcgtgagtccagaagcctgagattaaggtgtcagcagggttggtttcttgtgaggcctctctccttggcttacagacggctgccttctctctgtgtcttcccatgatctttctcgatgtgtgtccgtgtcctagtctcctcttcctataaggacaccagtcatatggaattagggcccacccaaatgacctcattttaacttcattacctcttagaagaccctatctccaaatacagacatattttatctgttttattgtacttggctttattatgcttcacagaaactgcttttttcacaaattgagggtttgtggcaacccagcattgagcaagtctattggcatcatttttccaaatacatgtgctcacttcatggctttgtgtcacattttggtaattctcataatatttcagacttgttcattattttttctgttatgataatctgtgataagtgatactcgatgttactattatgattgttttggggtgccatggactgtacctatataaaacagcaaacttarttgatgaatttgtgtgttctgattgctcc

SEQ ID NO: 847611 - DNA, 627 bp, Homo sapiens
tatctacccatttctttttttcccctttccagaaaactaagtcagagcagaaggagaattgaaatggtgatgaggtgagtgggcaaaggtaatggcgtrtaggcaaagtgtcaagggcgtacaagatttcaagagctacaatgaggtgtgagacttcaaaaaataattctggcttcactgaagcttagcccaacttatacaaagttactatactatgtatttattgtatgatgtgggcaaattttaatatgttttatattatgccaattatgtgcctagaattttagaagatcttaaaagaacttagtggggatgataaggaaagacctgtttgcatggtaagaccagcatctcaccatgggagaaaatgttcagctggaccaataatcggtgtacgtgtgtgtatgtgtgtgtttgtgtgtgtgtgtgtgtgtgtgtgggtgggggatgaggtgagcacgcatcactcagcagtagctagggggacattttaaaaattcacacatttctgtctctccatgcaggacataaggtaagatgtgggaagtgacattccaggctatgacagttttttctcctcaatgtatttctagctctggcaaaggtcttagcacacattaggctctc

SEQ ID NO: 847612 - DNA, 499 bp, Homo sapiens
tgaatgagatgaggcagcatgggaaattgggtttttggaagggatactaaataataataataatacattaacaatgacattttgagtttaccatctgccaggtgttataataaaaaacttacattcagtatcacattttcttattatatcagctctataacacaggcagtattaccatagccatttatggataaagacatacagaagtcaggttagttacccaaggtcacagaactagtatgtgacagaactgggagttaaacccatgttggtcatacttcaaatctgagcgctcttaatgacaacaatgtaggaatctgtagggcatacaacaagcatacaaatagagctccaattgtagagggtgctggaatagttattataacacaggttattgaagcagaaaactgttttgaagggaaggtgtcggaaamtcattttattaaatagaagataaggaagagacttagttataggagtaagaaaggaaactgatttg

SEQ ID NO: 847613 - DNA, 582 bp, Homo sapiens
gtaataataagtgatttgataaaatttaaaaaactaaaatactgaaaaaagtgataatttgtaaaaatggaggcaatgaccaaagttaaaacattctgaaaaccttataatgtttgggtagaggtagagatttgaaaacttcagatttggttaaatatgctattgtagacatggctagctatccaccaagaatttgttctcagacatagtatagagttgatgctgggagggatgcctgtccaccaaagactattattctatccagtaaaatataaaaggtaatgatgttggtcacccagtggccatggctcttaagaagggactcagtcttcttactctgttaaatgaagagatcacctacatcctggggatgatgaaggtacaagagcgaaaggaccttgattcttattttatcctataaagaaaagccatttgctgattaggaacacttgcattgggctgacaggtgtctaaggaacacatttacattgtattaagcaactgaaacaagaagactagttacaaaagctagttttatactacccawatgcatgtattatataactacctagccattggtgg

SEQ ID NO: 847614 - DNA, 598 bp, Homo sapiens
aatagacaccctctggcaagtctgagtaagaacaacaaagaaaaagagaatccattaaagaatactaacagtgaaaagagtagtgtcataaccccagaaacagaagagcaggtttttttttaagaagatataaaaattttaagccattaaaattgaaaacaagcaaaattttcaattttttggagacatatagctaggtgactcaagaagaaattacaaacctaattcttagtgatgaaaaaaaacaaaatgatggtgaaaaatctcactccccgaacccccattcaaaattggatatctaagccagtaaaataagacaaaatagggcaaaatttcaatcagaatcccaactttttttttcctccttgtaacttgacaagatgattttaaaatatgtgaaagtgcaaatggttaagatagtcaagataatttttaaaaacaaatacaatataaggaggctcctctaatatatacaactacttattataaactataaatgatataaacccataaacaataaagacagtrtgcattgttctaggaaagttaagcttatggaactgaacagggagatgaaatatggcaatgcacaggtgga

SEQ ID NO: 847615 - DNA, 504 bp, Homo sapiens
tggcaagatagcaggcatctgtgaccctaaaagggtctattgtattgtaggggtgggaatagcagctcaactcaaatagcattagggaaaaaaaaaagggtgaagaaatagagacagtgggagcagatatatctygagtaattttgctgtaaatgggagcatagaaatgggggtgtggctagaaagggatgtgggggtctagagaattgttcttaatttgggagacattttggcatagttgagaattggtgggaatggagggagaaattggtgacacaggagagacaaagaatgttggaagaaacaaagttcttggctagaaagcagtgttcagaacccacacttgggctggataggacggccttagatgggatcagtgctatggtttcaacatttgtgtctacttcaaaattcatgttgaaacttaatccccagtgcaatggtattaaaaagtgaggccttttagaaggtgattaagtcatgatggctcttccctcaatggtg

SEQ ID NO: 847616 - DNA, 603 bp, Homo sapiens
ataaaaatcacacgaggcagatactattcattcccctactttacaaaaaagaaaatgggggcatagatggattaacttgcccaaggtcacctgtatcagttagctatagccacataataaaccagccccaaaagttagtgccttaaaataaccatgtattggttctcacaagttgttggctgggtatcagctctgatccaggctgggctcagttaggcggttctcctgttctcatccatgtgcctgtggcccgtaggggcttgactctgctccacatgcctctcctcctcttctgaaaacatcaggccagtccaggcatgtcctttttatagggatggcagaagtacaagagagtgagcagtagattcagagctggtatcctgtcatttcccccctaattccactggttaaagcaaagcaagtggccaaacacaggggcaggcagcaagccctgcccacaggggagggtactgcaaactggcatgttaagggtaagcagagatgagtgaggaaccagggtaatgatgcagccctgcacatyacctgcccggtaggtggtggggccaggtgtgcactggcagtcttgatccagtgtcctgctct

SEQ ID NO: 847617 - DNA, 613 bp, Homo sapiens
tttcctccagtttcctttccagagaattttgttcacagtgctgagacaaagacctaccagactcttgattgagggtcatactctaagagcagggcaaactagaagyagataggcaatttttttttttttaatataaggtctcactctgtcacccaggctggagtgcagtggctcaatcttgactcactgcagccttgacctcctgggttcaagtgatcctcccacctcagcctcagctggagctacaggcatgcaccactgtacccagctctttttatatttttttgtagagatgggggtctcactgtgttgcccaggctggtctcaaactcctgagctcaagcgatccacccaccttggcttcccaaagtgtggggattacaaagtgagccactgtgcctggctggatagactgattcttatccaaactgcatcttaaccttgactcagtttagtccctattgggattaaactgtttaatacttcactctatctgcctagcagagaatagggttaactctacttggggggaaaacgctagagcctttccagtgcttttatacaaaatatttggcattcctttaaatattactcaagagaaaagaccatttaa

SEQ ID NO: 847618 - DNA, 511 bp, Homo sapiens
catcttcagaccccaccaccatttctacagtagccactgtggatctccctactccaggttctgcctcttccatgtaatgagccaaacttggccaaggcagtcaacaagcagcatgcatgttagagccaggaacagctgggtccatatccttcctctgctacccacttcattcaggttgctaagccactcaagcctctgatacttcatctatgaaatgggggtgacggtctctagtttatggagttgttgggaggtgttagtgagataccctatgaaaaatgcctgacatggcataggggctccccacatattaggcaacctttacctccaaccccactgacagccacacacctgcccatcagggagtgaggttgagaatatcaaaatatatatttgcaacagaaaatgatagagataaatagtaattgcattggggttacaagggtaggaatgatggattctgcytgggagagggaactagtctgagaacataactattgaccagggtatt

SEQ ID NO: 847619 - DNA, 605 bp, Homo sapiens
atggatcacattatatgagactgtgatgtcccttgtcttcctggcccactccaytcccaccccaagtgttggttccttggaaaaacactggggatggaggtggaattgctgtgaaaacaagactcagtcctccacagaagctgcccagggagttcttcagaagtggttatcctacctgccatttacactggatcaggactgtccagaaatcattttcacatctccccagaagaatggcatcatctcaatactaatcttcacttgaactagaagaatcatgcttgtggttttcaaaaggaaaaggttcctattcatggtgcatttagaagcagcccagggtgcttatagaacggacctgcttcttgctatgttcttgagcttctgaggcctcttgacaaagtcgagcaagtaagacgaccaggccaagtgggcactctgggccccatggccaaggatgggctggccaggtggccacgtggcctccggtggccttgtttctgtgggctttatctgatcctgagctcagatgctgatagtgcactggcttattttctaaggagagggagcttgatttgtgcaggatgcgccttcaccagatacctcca

SEQ ID NO: 847620 - DNA, 636 bp, Homo sapiens
catgagagagcagcaaaattaaagccccaagcgctttgtccagagttattctctttaaaggaggaacttggcaacttggcatgcacatgttgctctcatggaagacagagaatgacaaagtaagcsatgagtttgaaaggtttttacccttgtacaaaaaacaactaagcaccttctgtttccctagttcagtgctgaggaaagagaaatttactcaggtacattatcagtcaccctgtctgctgtagcataaggaatatagaccttggaatcagacattccagcattggccttgggctctgtcatgcacaaaaagccatgtgaccttcagcaaattgagtcattgatgatactcagttactgtatctttaaactggggctatttatacctatctcaaggactggtgagggagttagggtatgtcaaactgggagcccagtgccaagatctcctttaggaattacagcctgttggggaaataagacacatgctttgaaacttaagcaaccatcttgctggatataaaaccaatatacaaaaaattcaatagtatttctatgtgcaagaaacagaaagtaaaattttaaaagtactattaaaatagcgtattattcatatataaatataacaaaata

SEQ ID NO: 847621 - DNA, 471 bp, Homo sapiens
gccttcaaggtgctcctacagtgattcccttaaactgtwactcagagcataccatttttctgctcaacaacagaagttcgaacccttaaccaagcattctatgcccttcagtatctgcttccaacctcatttccagcttcattgtctgtatcttctattcacacatcttcaagttccagccgaaggagtctatctcctgtccatggcttctgagtgttctaactctttttctttcttcaggctgttacttctgcctagaaagtcttctacctcccccagtatgccctttaaaatcccacccccttttttaggaccagttcaaatgtcaccccttccattaatctaatctccgtttgcctctctccaactaaaagtaatatgctccttttgtacattcgcaaaggattttaatgaaacttcatacagttacagcattttgtctgggcttctggtcaatgccatgcacatctc

SEQ ID NO: 847622 - DNA, 246 bp, Homo sapiens
gcatgcccactgccttctcttacaagtcttggggtatttgagtgtaattcaataatgacaaccccttcactgtccaaaaggggtgaatgaaacatcaagctgtcacaaaggctaggttggagggcatggcttatatccttgggtaagtaggcttactaaacttaaaccctaaagttgaactgacttaactaccccgtcccagcagctggagtkggacaggacactgggtctatatggagaggggtc

SEQ ID NO: 847623 - DNA, 569 bp, Homo sapiens
cggataaatgcaattcatgttatttatgtaacagatacagtacaaggacactatttgtttacttttaaacacatatgatttttttgtaataaaaaytttaacaattccagaaataactctattggttatgatgtggtaatgcaaataatttgtaagataactgaccttattgcatatttaaatgtaaattataagttgtataagagcaaaaagtgattttggaagtgtattagtgtattttgcattgttataaaggaattactgggtaatttataaagaaaagagacttaaggccaggtacagtggctcatgcctgtaatcccagcactttgggaggctgaggcaggtggattacctgaggtcaggagttcaggaccagcctggccaagatggtgaaaccccatctctaccaaaaatacaaaaattagctaggcatagtggtgggcgcctgtaatgccagcatctcgggaggctgagacaggagaattgcttgaacccaggaggtggaggttgcagtgagctgagatcgcaccattggactccagcctgggtgacaagagtgaaactct

SEQ ID NO: 847624 - DNA, 569 bp, Homo sapiens
cggataaatgcaattcatgttatttatgtaacagatacagtacaaggacactatttgtttacttttaaacacatatgatttttttgtaataaaaactttaacaattccagaaataactctattggttatgatgtggtaatgcaaataatttgtaagataactgaccttattgcatatttaaatgtaaattataagttgtataagagcaaaaagtgattttggaagtgtattagtgtattttgcattgttataaaggaattactgggtaatttataaagaaaagagacttaaggccaggtacagtggctcatgcctgtaatcccagcactttgggaggctgaggcaggtggattacctgaggtcaggagttcaggaccagcctggccaagatggtgaaaccccatctctaccaaaaatacaaaaattagctaggcatagtggtgggcgcctgtaatgccagcatctygggaggctgagacaggagaattgcttgaacccaggaggtggaggttgcagtgagctgagatcgcaccattggactccagcctgggtgacaagagtgaaactct

SEQ ID NO: 847625 - DNA, 604 bp, Homo sapiens
gcagtataacttgtgcctgaaggaagcctatctaacatgtatattttctccataagacacagcggagcctttttgtgcttagaaacactagacaggccagatgcrgtggctcacgcctgtaatccagcactttgggaggccaaggtggcagatcacctgaggtcaggagtttaagaccagcctggccaacatggtgaaacctcatctctactaaaaatgcaaaaattagccgggcatagtggcagatgcctgtaatctcagctacttgggaagctgaggcagaagaattgcttgaacccgggaggctcagagggcagagggcagaggttgcagtgagccgaaatcacgccactgcactccagcctgggcagcaagagcgagtctctgcctcaaaaaaaaaaaaaagaaaagaaacactagacagtacttcagcactaaggggccattttaaacagtgaaatcaccaaaaaaaaggggatgaaatctgaaaaacagctttacgtatactgtgaaaaggtcacttgtttacagtatgagagctggaataaggtggaatgtatcgttgttcagcatcaactggaaaaatgcatgttaggtaatttaa

SEQ ID NO: 847626 - DNA, 576 bp, Homo sapiens
tatccaaatgtgaagggaattgaaaaaattctctcggctgttaaaagctctagcctgatatttatatcctatggacaaataygtagttcacacaaaataagtaactcaacctgaaggcttgaaaacaggcagtgagggacagagataggtttcagtttgtccctggctctccccgactgcccagcttttctttctgaccgtcagacctgtgtatcttcagcaactacaggcctatatcaaccttccagagaattcttcacatactctcacaattgtgtaaggattaatccttatgataaatctcttaatctccagcttcacagtggttctgtgtttctcctccaaccatggtacacacagcttgtaattttacttaacaatactataatgtcttaccacaaatgagactgcagagttgttcaactctacatgtcaacttgggaaaacaaagaaaacctccttatcacagtttccatgctgggcaagtatggtggcagttgacaggacaccacttaaaagcccacaactgtgcaatcacgtaactgggcagaaaaaaagcagcacaatggtaatctc

SEQ ID NO: 847627 - DNA, 617 bp, Homo sapiens
aagaaccaggagacaagcaaaaasggaatgtgaacagttaaatacttctcacaatattgggcactgaagtatacatatacttaacttacagaaatccttagtgctaacctcagaattgatttttttatacatagtttatttggtttcccagtattgaggacgagaagaaggataggaaggcagcttattatttagcagcaaaagtaaggaacaacagactgacagttagattggagaagaaaaaaaaagctagacattctgagcagaaacaagactgaaaaaaacactgcattcctgaagtcatttagtatagggacaagcagccctaaacactttaatagctgttggaggatatcatggtattatactgtagcagaaaagtgaaaactcacatggatgaccctaaggtcacaataataacaataataaaaagtatatcttgttaaggcagcataaagcttttaaaaatatgtccgtgaaaaataatttgataaacaaaaaaaattcagttcctgaatcgtaagctttagttatctgcaaaagtcatttacatagactatttgatatcccagataaatgaggtgttaatgacattttcctcttaaagacctaactag

SEQ ID NO: 847628 - DNA, 617 bp, Homo sapiens
aagaaccaggagacaagcaaaaagggaatgtgaacagttaaatacttctcacaatattgggcactgaagtatacatatacttaacttacagaaawccttagtgctaacctcagaattgatttttttatacatagtttatttggtttcccagtattgaggacgagaagaaggataggaaggcagcttattatttagcagcaaaagtaaggaacaacagactgacagttagattggagaagaaaaaaaaagctagacattctgagcagaaacaagactgaaaaaaacactgcattcctgaagtcatttagtatagggacaagcagccctaaacactttaatagctgttggaggatatcatggtattatactgtagcagaaaagtgaaaactcacatggatgaccctaaggtcacaataataacaataataaaaagtatatcttgttaaggcagcataaagcttttaaaaatatgtccgtgaaaaataatttgataaacaaaaaaaattcagttcctgaatcgtaagctttagttatctgcaaaagtcatttacatagactatttgatatcccagataaatgaggtgttaatgacattttcctcttaaagacctaactag

SEQ ID NO: 847629 - DNA, 635 bp, Homo sapiens
cctgggagcttcctctcagtgagaaccaatgctgttacaggagttcccagcgagtcttatcctgtgaggtgccatggaagcaggtcctgcagaccgttgttgctcagcccctttcccaggagtatgtatggaggtctaaccttccactttgctggagttgcagccacttttgctgggaagcccgggtttctaagtttcctggggctccatgtgtgcccgagcagctgctctgacgagactccacagagctctgaacgtcagtcggaaggccctggtggagtgggttcactgggggatcttctgaccccaggcttgcaaagatgcatgggagaagcataggttcccgaggtcactcactcattcactgcttccctgagctggggagggtcccctgcctctgtgtcactcccttatcacatctagtgatttcctacactagatgtacatacactgtatgtacatacacaatttacatacagtgaaatacacaaatcttaatatgcagttcaattaattttgacaaatccacacctctgtgtaaacgatgcccaattaagacattaamttttgccatctcctctgtaattttgttcatgccttttcccatggattacgctcatgtaagttaaggtctg

SEQ ID NO: 847630 - DNA, 617 bp, Homo sapiens
tgctatggtaaatgctgaaagtagtagatgtcttaaaacaccagaaaaaaagttactaaagtgagccaaaaatagcaaattattgagatttgaattcacgtttggaattaggttaacatttgacattaattcttggaatgtgtcactaaagcatcttaaatacccatactttcatttcaggattggtcccaggaaattgttagagtattcacctcacatatgctcacccagcaacttctgtcaactttgctatatacttggtactgaaggatgcagagatgaaataacttggtctctactctttgcagactaacaatcaatacataataaaacattaataagtatatatgttgtacagcaatactttttgcttgtgttttctggttattagtagaaacccctgtggtgagccaagtgttctgtgaggggtctttaaaaagttcatgaaaaaaactatgcatgggcctcttttttttttttttttttgcaccaaaataaactcattctaagttataacatgtctgaacaggatctaatctgaggcactaagaatatagcatctatcraaaagatcttctactagagcaacataaattccgctaaaattaaaacatgaa

SEQ ID NO: 847631 - DNA, 490 bp, Homo sapiens
caccactgtactacagcctaggtgacagaccgagactctgtctcaaaaaataaaaataaataaataaagaagttccagaccaggagccatacacttagtgtttgaaccaaactctctcattactggtcatagggctttgagaatccttaacctttctgaccctgttttttcatctttataaacatgacacccaacttcttcacatggtggtcaagggaaccaaatgagaccatgtatgtgcacgtacctaggcgatgggcaagtgctagaccagcggttctcaaagtgtggtccaaagacacctgagggggtccctgagacccgttgagagggtctgcttggtcctccctttcccaactaatatctgcatctgcatgagcccagaatttctttcaaatatttccttcaaaacagctgatatgagacyccagctgtcctttattaaaccaaagaaattttcaaaaatataaaaaccatgagccaatcttct

SEQ ID NO: 847632 - DNA, 460 bp, Homo sapiens
tgcagcatgccatcatttttgggttataagagccaycctggcgggactcggggcagtagtgaagcacctgccgcatgcatctcacactgggaaggtgcagctcacacacactgtcgcctatgtgcctgctctcctcgctggcacagggaagcggctggtccacgggattgccttcatctgcttattttattcataggccatgacgcgtcttgctcagggaagggtgccagcttctcccacagttccctggcctctctgaagttagaggcttatgatcagtgagggtctatgtggactggcatgtgcccttgtacatccagtgtggccttcctctcctgcgctccactctcatccttccttcccgactgctagccctggtgatttcagctctggcgccaaatatatagaagcaacagccatatataatgtgcttaactagttcctaccatcataggaggtc

SEQ ID NO: 847633 - DNA, 601 bp, Homo sapiens
catgaaaattgtgatgacatatgtgttcatttttggacatatgtaaatacccataaagttatctctacaattatggtaayagacatatacaaaacctcccagagttttcctgtggccctttttgttgatgtagttgattgttgaattttgcttttttttgttttgctctaagaatacttaacataaaatctatcctcttaacaaatttagaagcatataatatagtattgttaactaaagggactgtacagcaggtctttggaacttattcacttagcataactgaaacattatcttttttgaagaattctttatttctcccatttttcaggccctagcagcccccattttctctgttattaagagtttgactattaaagatacctcaaataagtggaatcatgcacaatttgtccttctctggctgacttatttcactttccataatgtcctccagtttcatccacgttgttgcaaatggcagggattttttttttttttttaaggctcaataatatataattgtttatttatactatgttttctagatccaggcacctgtttatatacaacttagattgtttccatatcttagctattg

SEQ ID NO: 847634 - DNA, 549 bp, Homo sapiens
cactcagttcactccctggcccggatcccatgactgccttggctctatgctcagcttgagcctgaatcaggcgtgctgtgagtggcttctgtatagggcgcaggcgtctagaataggcgaaggttggtggtgcccaaaacctcagagatgccagcaatcgcggagccccaagtggtgttacagctcttgcttggggagtcccaaggtttgggccccaagaaaagttgcagctctttactctcgtagctcagccagtgggagcgtgttatagctgtctttctcctgtagtccggtgagcaggaatgtgttatagctctttcattccagccgcccacagctgagtgagttccaagttcttgtcctgtgaccaagaggaataaggtgtgtggacactggagagtaagtaaggcagagaagaattttattgagcgacagaaggaaagccctcaactgtgaaaagggaccctgaaagtgggttgtcatctgtgaggctgagtctggrcttgtctgggtttacaatgggagaatgtgtgctgattggtccatagg

SEQ ID NO: 847635 - DNA, 533 bp, Homo sapiens
tgcaggggcttgggaatgggaaatgttaatttgttggggatgaaattttaggggtgtggaaaatggtcctcatgtgctgcatcarcctctgggcagggtcaacaggattggttgagtcacaggtcataggtctaggtggagtcagccagttgccagaaatgcaaaattctgaaaagacatctcagaagtccaatcttatgttctaaaatagtgatgttatctacaggaataattagagaagttagaaatcttgcgacttcccgaatgggttggctgattattgttttactacgcctacataggcagaatgattttcattacttttacaaaggcagtttagttttgggaaggactattatcatcactgctttaaagttaaactagaaactaaattcctcccaaagtaagcttggcatatgcccaggaatgaccaaagacagcctagaggttaggagcaagatggagtcaactctgtcagatttctcttaatgtcataattttgtaaaggcagtttcattagcacaggctagaaa

SEQ ID NO: 847636 - DNA, 647 bp, Homo sapiens
tctttttggaagtatgcttgtatatctttgtatatgtgtgtatttccctatttgtttattttatatattctacattgttcttaatgatttaggatgtttttcaaattaccattagatayggttaaattttctcttactaacaattcaacatcaggaatgagttgaaatttaatctttatttaggtcttttatttacattgataactttgacctttatcttgattgaataatttaaatgaaatcagtcttttcttaacagcttttcaatctggtagtaaattcttatcattttaaattgcctcaacatccattttgagtacacgtttaactttctcataccagaagcagggcttagccacccttgacacaatttctagttctacaccaaacccaaatggcacaagcctatggcctgagataaaaactagagctctctctcctgcctagcagactgtgctcctactttccctctgcaccagagcaacggtcaggcaggcatgggtcagcaatgggtaagacaagagccataagagtgtttgccaatataaacaagttccccatgtgagtgagccctggtcgtggctgggagagctaggcattaggctgctgccagataaaagaagtatcttgttgaggtaggaggtaga

SEQ ID NO: 847637 - DNA, 563 bp, Homo sapiens
atatttttatccttacaactttattatatgtcattatattttcaactggatggacactcagatagaaaaaataggatgatatttatttagctctttgaacactcaaaatytgttgcattgatctgtctgcctcaagaaataggcaaagaaagtaaaatttatagaataaaatacaaatggagtggttgaggtttttcatgtggctcagtcttgaacctgagtatattattgggaagctgtgatgttggtggcttataaaggcttaaattggatcatatgactgggtttgctttatgttttcaggctacaaattctgaacaactggcacccaatcaacagactgtatactgacaagtctaaagccaagaatgtagattttacatactcacatactactgaatcacacttatatgtaagcaacagcaaatactgggttctagaaacaatttgttttagagtatgtgcaatataggcctaaaatggagtgtttattaaatgttgtgggtattcagtccattgctgaaatgattttgcctgccctattaaatattttctaccttata

SEQ ID NO: 847638 - DNA, 546 bp, Homo sapiens
ttcctaataaagcatctgttaaagtgcctctcccctggtagaaatgtratattttaatattaatattattttaatattaagtaagttaatgaattttaatgctctttgccaatcccttccactttttcagctaaaatgagctgaaactcctaaagttggggatttttgtggagttaatagtgaggtttaagaaaagtcagaatgtacattttattcacgcttgtgacactaaccatataatattgagccaatcctactaccctctagatcagtttattcatggatttaaatagctttatactataattctttccctctgaaatggcatgattataagttttgggacaagcaccatgctatatctttaaaccacatataaaatttttgtagttacagggaaaatttttttccctggaacataactgattctctataccttttactgtttcattccttcttcaaagacatatatctgctgtctttaattttctctttatgcctaaatatctttgggaagtgattctaaattaaatgtactctccatta

SEQ ID NO: 847639 - DNA, 574 bp, Homo sapiens
ttgggaagtgattctaaattaaatgtactctccattagtaggtttgcagtcaggatttaataaaagaaaccactttaggtgttccccacgaaaggaatttaatacagrggacttagaaatattgcaagtatggatgagagaaactcagggttcactgcaactgttactgcacttcagagatgaggatcctactttagtttccacagtccccacagccaagtctgcctacagattcttgcacatatgttgttagagcctgaaatgctgagtctagatgcctttaagcatcctaaagcacccactttttgtggcttctttctagctgaaacaacaaggtggcttttgctttacttctgccttctataactcaaagaagtaaattaatttattcatacctatcatcccagttgcaacagagattacagaatgtagtttgaacttcttatcttctttaaattgcaaaaattggaatggtaaaaccgaatgtgtttactacacagttacagctaacaagactgtaaaataaatacctgtaatgggtagagctgggtttttctcattgcatattgctaat

SEQ ID NO: 847640 - DNA, 614 bp, Homo sapiens
gtcaaacacgtatgtgcttacatattatgcatgtttgtgcattaaaacattacatttttaaaagcagaaggggaaagaagggcaaacagaacaagttgaattctactctttttgcaaagaattctgaggcgcagaaagtggcaggagtgggcacaaagccttgctttttgagtgtggctcttaagagtaggggcatcagcagcacctggaagcttgttagaaatgcagaatctggccaggcgtggtggctcacacctgtaatcccagcactttgggaggccgaggcgggcggatcacctgaggtcaggagttcaagaccagcctgtccaacgtggtgaaaccctgtctctactaaagatacaaaaattagccgggtgtgatggcacgcacctgtagtctctgctacacagtaggctgaggcagaagaattgtttgaacctgggaggtggaggttgcagtgagccgaggttgcagcactgcactccagcctgggcaacagagtgagaccctgtstcaaaaaaaaaaaaaaaaaaaaaagaagaaatgcagactctggccaggtgcagtggcccatgcctgtggtcccagcactttgggaggctgaggtgtcagag

SEQ ID NO: 847641 - DNA, 582 bp, Homo sapiens
agttaaatataaatctagcctacgtgtacatttaggcccagcacttttccttaaacttatttatgacacagattcctttactcacatgtttttctgctgaccctctccccaccttcaccctatagccccaccacattcccctcgccaagataggaaaaatagtgatcaataaatactgagagaactcagagactcagagtaagtgagcaccggtgttggtcctcacttactaagcgccggtcccccagggcccacttttcttcctctgtactttgtctctgtgtcttatttcttttctcagtctctcatctccaccttgcaagaaatacccacaggagtggagaggcaggctcccttcatcaaacacacctaagtttgcatgccagagagaaatgtgatagtgttcccagagagcaaaagttgggtcccatttcacaaagagagcttcagataacttgagctgttgacmcagtattatctacaatatgtggagtgactacctactggctctctttaaaagcctgacaacctcagatttgaggtcatttcaaagaacttaaaggattctcattctccttccca

SEQ ID NO: 847642 - DNA, 597 bp, Homo sapiens
tggagacaatttttgcatttgatgctctcactgggtaacgtagttttaagttcacattttatatttagccatctatccttttattttttatttttatttttatttttttttgagacggagtctcgctctgtcatccaggctggagtgcagtggcacaatctcagctcactgcaagctccgcctcctgggttcacgccattctcctgactcagcctcctgagtagctgggactacaggcgcccgccactaggtccggctaattttttttgtatttttagtagagatgggatttcaccatgttggccaggatggtctcgatctcctgacttcatgatccgcctgccttggcctccttgacctcccaaagtgctgggattacaggcgtgagccacagcgcccggcctgccatctatccttttagatgacatccttaaactctatactctctcctcaaaaacaatgggaaaagcgttataaatggaataggtccagtccaggttcactttggttggkgtcttcagggctaatattgtagctttgatttttacccttcaatatgttgtaacctacataaatgagtggtttcaaggatcattt

SEQ ID NO: 847643 - DNA, 663 bp, Homo sapiens
tcaaaagggaactatgtcacttgaagtttcacaactttcactttgctttggtgaatttcaccatcctgtgcagctggagtttgggctttgtggctgcagcrcttcccaaagctggcttctctctcctaactcaagcacttcactgagccctgatggcggccagggagccgacaggcccaaagccaggtcaaacccccgacctgccaaatgtatcccaaccacaagtgaggccttttatgtttggtgtgctggggcccatgaaccaaactgtctccaagccatggctcacccctgggagtccacttccaccaatcgaggaggtttatacccaagcctcgtggacaaggagctgacccagaatgatgccaatgagaaagacaggcctgagggagctggacaccttcagggtactcagccatcttctccacagaccacgtggagatggttgtagaacacaggagtcagggaagagacatggccaaggcaagtgaatttgaatgtgcctgacacgggaactagacatgggtgaaaccaggatgagctggagagagagataactagacactctggaaatttaaaagcaaggaatttttctgttaagatggggaaagaggccttcttcaaagcacataagcttctggaagagggaaaaaaaaaatactg

SEQ ID NO: 847644 - DNA, 597 bp, Homo sapiens
gatattctcaagtataaaactatacatactttaaaaaattgctttattgagctatgaytgatataactgtacacagttaatatacacaacttgatgtgtttggaggtaagtatatatacctgtgaaaccattaagccatcatgccatcaatcccataaattcatctatcacttccaaaagtttccacccctttgggcttcccccaccttttgtggtaagaacacttaatgtgagatctaccctctttacttatttttaagtatataatacactattgtgaatcataggctctttatggtaagaagacatccagatcttatttattgtgtataaataaatactgaaactttgtactctttgaccaaaacctgcctatttctccctcaccagccccttcaccattttactttctgtttctatgtatttccctatttttgattccacatataagtgagatcatgcaatatttgtctttctgtgcctaacttctttcacttagcataatatcctccagtttcatccatggtgtcataaatgacaggatttcattgttaataaggctgaataatattccattatatgtatataccacatttt

SEQ ID NO: 847645 - DNA, 560 bp, Homo sapiens
aaaacttcattttgacccccatgagtccatcttcaacctgaccaatcacagctccttacttcctgagcccctacccaccaaattatctttaaaaacctcgatcyccaaatgtgaatgctcagggagactgatttgagtaataataaaacaccagtctcctgcacagctgactctgcgtgaactactctctatccattgcaattcccctgtctcgataaatcagctctgtctaggcagcgggcaaggtgaactcactgggctataacatgctctggggatcaacacccaggaggatgagggaagtggcatctgtcagagggaggtgttgacttgtgatgtagttgcaacaaaggcctccacgaatttgggagctgacaggatccttcaatgttgccccaccttgaggccagggggccacgcctttatactccccaccatacaacattgatcagccattaggttcaggctgccctggagagagaggggcatgattttgggctaggcagctctcttctgctgaatccagttcccagagagtgactcagctgagatctttcagc

SEQ ID NO: 847646 - DNA, 593 bp, Homo sapiens
agtagtttggtaagaggatgagacacttataakaagtaatgtttgttgaacatatacaaatgccaggcacggttttacatgcagtagtccttccaatgaattaggtgctctcatcccattttacagagaaaacagaggcagaagaggattggtcattgttctagatcacacagcctgacactgacaaggctgggattccagtgtagggaacttggctccaagcccatgaccttgaccaccatgctagactttttccttcatgttgaagctgaatgaactagaaagagcaaagtttaaaaggacctggctctttggaaactgaaatatataaatccctggtaaagttgattcagatagcaggagagtgaaaatatgattgagaacgagaaaggcaaaccaataacataattagaagagattacaaaatacacaagaacattgggtgtaactcattggcaatgcgaaaacctaaagaatttcacttccctagcaaaacatgagtgtccaagattgacttcatgtacttggcaggacaggctgtgttatattgtaacaaccttgaaatttcagcggcttgacaccacgaagatttc

SEQ ID NO: 847647 - DNA, 593 bp, Homo sapiens
agtagtttggtaagaggatgagacacttataataagtaatgtttgttgaacatatacaaatgccaggcacggttttacatgcagtagtccttccaatgaattaggtgctctcatcccattttacagagaaaacagaggcagaagaggattggtcattgttctagatcacacagcctgacactgacaaggctgggattccagtgtagggaacttggctccaagcccatgaccttgaccaccatgctagactttttccttcatgttgaagctgaatgaactagaaagagcaaagtttaaaaggacctggctctttggaaactgaaatatataaatccctggtaaagttgattcagatagcaggagagtgaaaatatgattgagaacgagaaaggcaaaccaataacataattagaagagattacaaaatacacaagaacattgggtgtaactcattggcaatgcgaaaacctaaagaatttcacttccctagcaaaacatgagtgtccaagattgacttcatgtacttggcrggacaggctgtgttatattgtaacaaccttgaaatttcagcggcttgacaccacgaagatttc

SEQ ID NO: 847648 - DNA, 623 bp, Homo sapiens
catccctttgtatccccaggcaattggtttctggaccactcctccttatccccctactttcctataccaaaatcctcagatgctcaagtccattatataaaatggcatagtrttttcatataacctatgcacattctcctatatactttaaatcatctctagattacatccagtaccctaacgcaatgtaaatgttatataaaccgttgttacactgtcttggttttttatttgttatttttattgttgtattatgttttttttttttaatattttcaatactcaattggttgaatctgtggatttggaacctgcagatacggagggctgactatatatttggcattcaggtgacttttgttttgcagtatattcattcaataggggtagaagactgtaatattagttataggagaggcactaagctttagggtaaattttatattagaaatgtattttattgtctaatcattgaggatctgatctcatcaattcgctgactttcattatatccacctggaaagaatggccatgaatatggaaacttatgttgtccttggccacaaatgtttgaaactctccaatctggactagttgtcttttcttcctaggatcctccttca

SEQ ID NO: 847649 - DNA, 367 bp, Homo sapiens
cgagcgatgcacctcacacactgcctctgggcttgtagatcggaragccatttggccacatgtagaaaaggtaaagatatgatgcacataactttcagcccagcatttctacttctaggtatttaccttaaatcactccagctcacatatataagagaaatgcggaagaagatttcccgaatcattgtttatataaaagagaaaggagaaacatttaaatgacatcaaataaatggataaattggggtatatttatgcaattacactagttagttattaaaatgacttaactaaggctgggtgctgtggctcatgcctggaatcccagcactttgggacaccaaggcaggtggatcacgaggtcagg

SEQ ID NO: 847650 - DNA, 625 bp, Homo sapiens
tacaaaaaaatcagtaaacatatagaaaaattggacattatctatcaattgatctaaatgatattgtcaacttattgacctaaattgacatttatagaacactataacccacagtatcacacatgtatcttctttacacccagaacatttacgaaaatagaacatattcgtgttcataagactcaataaatgtaaaagaattttggataccccatttaccctgatgtgattattacacattgtatgcccatatcaaaatatctcatgtaacccatatatatacatatatatatatatgggatatatatatatatatgggtttatatatatgtatgttttatattatatataatatattatatataataatatataatatatatgggttttgtttctatatattatatattatatatataaacaaaacccatatatagttatatatatgttatacatagttatatatgttatatataacatatataatgtatataacatataaatgttatacacagaacatgtataactgttatgaacaatgttatacacataacatgtataactgttatayatgttatatatatacatgttatatatataacacgtataactacgttgtatatat

SEQ ID NO: 847651 - DNA, 649 bp, Homo sapiens
ccaggagcaaggggaattggtgatgctagaaatttagagctggaaagagcagaaaaaagagcatcctaaatagcgatgcttggtcttctccagcagtcatggagsagtcagggttcactgtgagaagagagacaccatttccacaaattgtctaatgagaatctggagaatgaccctcttattctctgtggatttgaattttctctgtaggcttcaatgagttaaagaaaatactcttcaaactacatactaagaagttcagtctttcttatggcaaataaagaaaacctagtaactttttaaaactctactttattattatgacttgagatgtttgtttctaaaattacaacccagtggactggctgtacatttttctatgtcatttgtatacaatctaaaaggtctaaataacttgattgtgaatactgtgtttgctgtaaaaaaaaaaaaagagagagagaaaaaaaggcacacttagatgagtggcctacgggtaaactatgaaagcagagattctactacacagataataatttttcattaaaaacttgtcaaggtttagttgataaatgtgattatcaataaattttacatcctgttatttaatcagcttatatatgtatctacagtcattgcataaacatgg

SEQ ID NO: 847652 - DNA, 376 bp, Homo sapiens; identical to SEQ ID NO: 846641

SEQ ID NO: 847653 - DNA, 403 bp, Homo sapiens; identical to SEQ ID NO: 846642

SEQ ID NO: 847654 - DNA, 642 bp, Homo sapiens
ctctccctcctgctcaccaccctctcttccccctccctctcagcaccctctcttctcctcccacttgccaccctctttcttgccctccatctacccacaatstttttccccactgcctttcttttcttcccacagtgtttttccccaccatctttgcaaaccttctccccctcctgtttgtctccctgtttttccgcctccatctacccacttttttccaccatcttttccccaccatctttttgcaactccttcttctgctcgccccgccatccacttttccctttggcactcaccaccctctttactcctccatctaccccaaaactatttccttcctcctaccactccagctggctgcagtctccgttgctgccaccaaccacagcgatgtgagccacagtggcacaggctgcagcatccagcgtgtagcaggtggcttctccctctggtcctctaagctgggaacagagcagctggtcaggaagacacagaagagccttaaatgggctgatttcagcatcatttatatacagatgttatgcaaatgaggtttctggactacatgttctgattggatgagagcaagcctgaggacaaccaattagatcatgaaaataaagtccaatcagagtaggtcta

SEQ ID NO: 847655 - DNA, 601 bp, Homo sapiens
agagcaggggccagctttacctcagttggtaggtcacacacattgggtggagatggtcaaaggtcctctgcttggacaagttgctccctgtcttcattcctctggccaaggccagtgttaggtggggactggtgagctgtctggccccacagggctaagctttcctttaggtgggtttatcccacttctcaacagtctaacaaagaacagattccacaagcccacttcgtctcttgctgcaagctatgccttccgattctgccttcattagaaataagggtgatattttggttctccacctgctatttctcgatttgggtggggaagatgggtgctacttactgaactctcccaaagaccttcaagaacactgagcagaataccatctagccataaaaactgatgtagaaaaatacttatgattggaggaaaatcatgggattttaaagcaaaatagcaggttacaaaacagcatgtaataaacagctgaaaaaaaacaggggcatagcwatgtattgtggttattttcatcttgctttaacctgtttgatttcaagctttattttatttgcacgcaaagcatcctaactgctgttggcag

SEQ ID NO: 847656 - DNA, 576 bp, Homo sapiens
tctatggagtagccattcttttattcctttattttcctaatacacttgcgttcactttattctacagactcaccctgaattctttcttgctcgagatccaagaactctctctggggtctggattggtacccctttccttgtaacatctttctggctaccacagaagcaactatagtgcggaaccccccaccgacccaacagctaactttggataagtggtggggtccaataacatccttctgatgaaccacgtaagggatgatactgaggaaaccccccccatccaaaggaaatagactgcagaactgattagacaactttgggtaagtggtggggtacttgggaaaagaatggaattgggttagaggtccaacttaggagagttagagtctctcctaagacagagtgggttagaggcctctcttaataaaaggcaaggatgcttgacygaccttggattagagccaacttaggagggttagaggccccattccataaaacccttctcagtaaaatccctgttggctaagaatgggtttggcactatgggatgttaacctctattctctttggatt

SEQ ID NO: 847657 - DNA, 588 bp, Homo sapiens
ataccacagtggtcccatagcttataacagagctgaaaaattcctattgcctactgatgtcacagctgtcgcaatgttgtggcataatacattatttgtgtgtatgtggtgatactggtgtaaacaaatcttctgtgcagccaggcatataaaagtatagcactcacaatttgtacagtacataatactttgataatgatacacaactatgtactggtttatgtgtttataatactattcatcattgctttagagtatactccttttacttattttttaaaaaaaaagatgttaatgctgggtgcggcggctcaagcctgtaatcccagcactttgggaggccaaggtgggtgaatcacctgaggtcaggagtttgagaccagcctggccaacatggggaaaccccatctctactaaaaatacaaaaattagctggaagtggtggcacgtgcctgtaatcccagctactcgggaggctgaggcaggagaatcacttgaacccaggtggcrgaggttgcagtgagccaagatcgcaccactgcactctagcctgggcgatagagcgagactctgtctcaaacaaacaaa

SEQ ID NO: 847658 - DNA, 584 bp, Homo sapiens
tgcatatatatatataactacccttctcatgctatattacaattacttacttgcacacctaatatttgagaataagaagtatgtctagttcatcatgttttcttagcacacatcataaaatcttgcacagagtagaaactaaaaaccttggttgaactaaactgaattaatgttagtaaagagtttgaaattccttaagagtaagtacaaatacgcttggcttaaaaaaaaaaaagaatcggctgggcgcagtggctcacacttgtaatcccagccgtttgggaggccaagatgggaggatcgcttgaagtcaggagttggagatcagcctggtcaacatagtgagaccccccatctccaaaaaaaaaaaaaaaaaaaaaaaatagaaaaagaaagaaaaaaagaaaataaaaaaaattttaattaaaaaaaagcccatttaatgggtggactcctcaaatcgactttttctgagataatyttaagcacacattctgtcaaggaatttgtaaagttaattgactccctatttggcttttgtataaattcacattttatagattttttaaaataatgtttattga

SEQ ID NO: 847659 - DNA, 601 bp, Homo sapiens
  misc_feature 130: n = A,T,C or G
agggagaattatttaaaatagattaaatgatgtggaataaaacttccaaaagctgtaattgaaagtgtcagaaacattagctttgcaacaagtaacatttaatcacatagattatacagaagcataaatntttgtaggttgctttcttcaatcaaatttacattttaatctgccaagactgttcatcacttttgactgtctggtaccaagcagcttgtcagaacttataaatgcaaactgcctgcattaggaataggacttctcctttaaacactaggttaatgaaagtttaattagaatacttcaagatcgcaagtgtctgagtgcagtgagattaatataaagggcattttgtctatctgcatttctttagttactgaaattataatcatttaaaaattatgatcatttatgctcataaaatgatttaattaaggttcactaaaatgtaaaacttttcaaagttggacacttgccaaatgagagtgtgacaggcaatacaccgttgctgtcagaggaagctgtgagatgcacrtgagttctcttcaaaggccggattgggagaggatgcttatggccactttggtggatctgctaaaat

SEQ ID NO: 847660 - DNA, 566 bp, Homo sapiens
aaatatacgtgctaaagactgggtgaacaatggcaaataaactttgaagaccaaatcctcttttacaactaaaagtaacattactgagctttctgcaggattttctgggtaagtttttctgcatggccagccccagcaaggccccgaatgcctggtttgctactttctaatcctgtaacttctcttcccataataatgtgtagcttgtaaggccttagctcaattttccagatgatttcagagacaaagaattgctgatttgttacactaatcttgacatttcaaattacaactggaaataatcttccttaattagtcatgttctttctgttgaaaatatcagacatttgacatatttgtttagcaaatatgtcgattttctggtctttatggtctttcagtcccatgttgatattcacatattaaatttttagcttgcyccacagcaaagatgcaaatatatatgtgcatatgtatattatatatgtacacatatagtatatgaatctacaaccatgcttggggaatacaaggtataatatgaatattatatatatattcatata

SEQ ID NO: 847661 - DNA, 575 bp, Homo sapiens
taaatgggtagcatgaaggatccttgtgcwgatggaattattgtgtaacttggctagctacacaatctatccttgtgctaaattgcatggagcttgatatggtttgtctgtgtgtccccacacaaatctcatctggaattgttatccccacttgttaaagaaggaacctgtaattcctactttttaaggtagcgaggtgagtgaattatgaggttccttcccccatgctgttctcatgatagtgagtgagttctcatgagatgtggtggttttataaggcagtttcccctgctcttgttggctctctcttgcctgccacaatgtaagccatgcctgcttccccttccaccatgattgtaagtttcctgaggcctcccctgccatgtggaactgtgagtccattaaacctctttcctttataaattacccagtctcaggaagttatttatagcagtgtgagaatgtactaacacagagctcagtacatacacgtatacccacatgggtgcatataagtgggtacaatctgaataatgtcaatatcactgtcactatctcatttgtgatattgcact

SEQ ID NO: 847662 - DNA, 508 bp, Homo sapiens
tgaatatataattctataatgaatctatgatcattttcaacaatatttctgtccagcaacctaggcactataccaaaacaacttttatctgcttaaattgctgctacacactctatgttactttttcattttgttggaatttgagtaactatattgctgtctctgggattaaaagaaaaatttacttttagattatctaaaatcatattccttcagatttacacattgttctctgtcagttgtaatatgccctttgtatcaaactccctgcaaaaagtcagaacctgaagcttttaaatcccttggtttctataattacctcttgtttagagttgctttcataattttgcttgctttcatattttgttgctattactgtttataactgcctcctaccacatatataatagtaacaatactctctcaatsacctttcttctgtaaaaattcaaaataatacatatttaattaggaggtctctaaatagtaccttttctctgaaaactat

SEQ ID NO: 847663 - DNA, 560 bp, Homo sapiens
actgtggtcatcactgtgcaatctacatctagtatgaaatccacacataggagagctggggcacaaggggactggaggcagttgctttgcaagatggctgaggagaaagcacactgggaacacaatccagaatgttctaacaataagttttcagtgaataaaccactggcaagacaattccatgtgcacctttaggttacctatatagtctcctaggaagatcaggatgaaagacctagatgatacccctgaggataaaacctccatcccctaaaatgattttttttaaataccactgtctttagctgtccaggaggtcagagtgttttttctgtctttgggccaagtcctgtctgagacctgtattttcactcttgttaccaaatctatctccctagtgcagtgtctccaggcctgagtttcttctggaacagattccattttagaatggggattcacaggttctgtgcatcaccacagtgctcagagaggattctcctggggtgtcttagaggcaggkgcccaactcaaatgtattcccaaggtttgctgggctctgg

SEQ ID NO: 847664 - DNA, 627 bp, Homo sapiens
ggtttggagtcactcactggaggcggaggacacctcmtgggggcagtgaataggcaatgagagggactggaaggtcacatttgcagccagagcccaggctgccctggcatgtccggcaggaccatggcccgtcctcctattggacggctgcgtatcccctttccctcggtgaccacatttcaggacccttgatttctttgcaaatcccaccctgcctggccagtcccctcactctcatgccgaccgcagaaccaaggctgcgccccttcaaaggcagagttggggtaattttacttgacaagactgctgcctgccctcctcctctttcctcatctgccttcctctctcctgaccctgtttattattatcaggaaaaaacaataggtccacatttaaacttcaaagaaaagcacgggctcaggtttcaaacaactgcagaggcctgggcttgggacagctccatcccgctctctcacctgaactacggggaacctggggatggatttcaactctctgcagcccagcactcagggtcaaggtgaggcccagtctgtgaccacggaggaattctggaatgtggtgatgaccaacaggaattttatgagtgtccctctgtggaggagcctg

SEQ ID NO: 847665 - DNA, 515 bp, Homo sapiens
gttctaaattaatatgaaaccagattgaaattaaaaaaaattttcttagatgattcagaaaatacttyggagcctacagtgcctctgggtcataattaagaacagtaattattattgtattcctgatgtcacagaattctgagttcaattctttcacatctcaatttggcaaactttttttctacgactggtaatcctggatttggttctcagttctcccctacgcccacatagagtgctttttccagaatgagctttgcttagttgccatcagctaccatccctgcactaagggatgctttttctgtgcatcactgggatactgttgaggacctttgttataacccacggagttttgttttttgttgttttttttttgagacggagtctcgctacgtcgcccaggctggagtgcagtggcgcgatcttggctcattgcaagctccgcctcccgggttcacaccattctcctgcctcagcctccggagtagctgggactacaggtgcccaccacc

SEQ ID NO: 847666 - DNA, 486 bp, Homo sapiens
gcttcccctagtggatcccgcaccagggctgtgggtggagctgcctgccactcccrcacctcccgcctgcactcctcagctcttgggcagtccatgggaccgggcgacgtggagcagggggtggcgcccatcagggaggctcaggctgcgtaggagcccactgcgggggtgctcgggcatggcaggctgcaggtcctgaaccctgccccatagggtggcagctgaggccccacaagaattcgagcctggtgtggtcccgccagcagtgctgggggacccggcaccccctctgcagctgctggtccgggtgctaagccctccactgcccggggccagcggcaccggccagccactctgagtgaggggccgcagagcccaggcccacccggaactcgagcgccgaatgcagcccaggttcccgccggcacctcttcctccacacctcccagcaagcagagggagccggctctagcctcagccagccca

SEQ ID NO: 847667 - DNA, 613 bp, Homo sapiens
caagtccacacccaactcaggagcccagctggcttcccctagtggatcccgcaccagggctgtgggtggagctgcctgccactcccgcrcctcccgcctgcactcctcagctcttgggcagtccatgggaccgggcgacgtggagcagggggtggcgcccatcagggaggctcaggctgcgtaggagcccactgcgggggtgctcgggcatggcaggctgcaggtcctgaaccctgccccatagggtggcagctgaggccccacaagaattcgagcctggtgtggtcccgccagcagtgctgggggacccggcaccccctctgcagctgctggtccgggtgctaagccctccactgcccggggccagcggcaccggccagccactctgagtgaggggccgcagagcccaggcccacccggaactcgagcgccgaatgcagcccaggttcccgccggcacctcttcctccacacctcccagcaagcagagggagccggctctagcctcagccagcccagagagaggctcccacagtgcagcggcaggctgaagggctcctcaagcgtggccagagcggacgccgaggccgaggaggtgctgagagtgagcaagg

SEQ ID NO: 847668 - DNA, 624 bp, Homo sapiens
aacgcctacttgttttaacctgaaatgactaaagtccttgaaagtgtagatcctgacttcttttgagctcctacaataagccagtkggctgggcactgcgtgtggctacctgacctctggctggctgaaatgacatgcagcggagctgtagacacacctgagccaggtacacggaccatggacaggagaccccgcttggtcctcccggccacccttccggaagacaccctcgtttgcaccaccgccacacagggacacacacgagcaatttccttttgtcttatgacagctcctaaaagggaccccacagatatcttcaagaaagtttcgcttacttgatcccacaaaacggtgtcctgagcgccttccagaatgcaggtcattccttcaggcatgggtgaggacctggggctgtgcctaccagcgtgacctgttacttcagcttttgttcctagacttcagtgttctttcctgtcttttaaaaaaaatcttcaaattttctcaaactctagactttaaaggaaacatgttatcttcagtatcaaagacagacagaattttcaaatctaaaacagcccaaagaaactgtaaagctaacaagcacacagaaaacacatcaaagaa

SEQ ID NO: 847669 - DNA, 469 bp, Homo sapiens
ttttgcaagtgatacagacgacggcctgcatgaaggccactgcccacaccatcactgccggcagaacagctgacgctctgcacccmaggcggacccctgctatgtggatggcatggccggcccctctgaccacgggcagcctgttccgcacacacacatccctcccctccgcccagttcttactcagaagtgctcctcttcccattactcactctatccattcctaaagcatgaatagagtgacatgagggcttcagacaggagcaatttatattttaccaacaattctctaggtgttggagaatttatcaggcagtcccatgaaaatcaaactttatgatactaaaaatatatttcaactcctttaaatgtaatccacataagtaccttttccaccaaaataagaatcaaggaaaaatccattcaggtcattatttatatttcagggttacctgtgaaatttcctaac

SEQ ID NO: 847670 - DNA, 616 bp, Homo sapiens
gaaggcagtatcaacaataattacatctgggtaaaaagtttattggtggtttttcactctgtcctattctacagcttctggatattttataatgagactaactcttttatgccatcttaactagtgctttctatggaatgccatctaggcttctgccccagtgctaagcaaatcacccgctgcaccttccaggaccacacaaggaccccaggaggacaaggccccagggcactcctcccactttggaagtatcaactacagtggcaaccacagacaaagagatcccttttggggataaaggaatgcttggaaaaagtcatataagctacaaaagaattctaggcatagggtcattctgggggaaaaacaaaaacagaatgaatgcatgcatgcatgagtgtatgtgaaggtggtgacccacacttcctggttcagagtggttccgggagaatgaatgcatgcaggcatgagtgtatgtgaaagtagtgacctacttcctggttcagagtggttctgggagaagacgctgcctacaaccagccgtggatcccagaagcactaactacaaygcctaagcaaaaacagacttgctaagtaacttttataaacacctcca

SEQ ID NO: 847671 - DNA, 643 bp, Homo sapiens
ccaaccccactgggtcacattggagggaaaggaagaatctaagagtttgaagtatgtccatttaaataagtacttaaaataaaacaaatagacactttgtatcagcccttggcaattctgtattagacaatgtttactacctagaagggagatcataaatgaattttaaaattaattgagataatctgttccttcatctttcagatgaaggtctgacataatcctgtgtaatatgtgaaagtagcagaaacagccgttgacttaaagtcttaaaatatttttcttccaatagtattccctcctatatttttattgtggtaaaacatacataacacaaaacttgagattttaattatttttaagcgtacacttcagtggcattaagtacattcacaacattatgcaaccatcaccactatccatttcctgaacttgttcatcatcccaaacagaaactatgtactcattaaaccatcactctcagctcctccctcccccagacccttgtaacttccattctactttttttctctatgaacttgactactctaagtacctcataatagtggaatcatacaatacttgttctttagtgtctggcttgttttacttagcatartgttttcaaggtgcatccctgttg

SEQ ID NO: 847672 - DNA, 467 bp, Homo sapiens
tattcaataaatggtgctgggrtagctggctagtcatatacagaagaatgaaactagaactttacctttatttcttttgttttgttttgttttgttttgttttgtttttttgagaaggagtctcactctgtcacctgggctagcgtgcaatggcatgatctaggctcactgcaacctccgcttcccgggttcaagcaattctccctgcctcagcctcccaagtagctgggattacaggcagctgccaccatacctggctaatttttgtattttcagtaaagacagggttttgccatgttggccagcctggtctcagactcctgacctcaggtgatccacctgcctcagcctcccaaagtgctgggattacaggcatgagccaccatgcctggccctggaactttatctttcaccgtatacaaaaagtaactgaagatggactaaagatttaaatgtaagatctcaaa

SEQ ID NO: 847673 - DNA, 562 bp, Homo sapiens
aaataaataaataacagtccttataaagtatttttgattcawgaatattatacttgtgacaattgtaacaaataaaactataagaaactgagaaaggacagtgctaccaagattggggcacattcagatgctgtctgcctatagaggcaagacagatgggcatagctctgagacagttatctgtctgctaaggtccatttcaggacctgacacagctgacattttgaatggtgtcttggatgatgagaaaacaaataatgtgtattaagtttgtattgacatcaacttgaagggtgtagagggctggacacagtttcaaatgtcccctatgagtcagagttaaaaatagaatgatgttcaatagtaacaaagattggtcttttcaattaggggggaaaagcagtaaggtacaaaaggcaaggaaactcttctgttaagactcccaatagaaggaaggtccagcctccttctgcaccctcccagtctccacatcattttaattactttgatgtcttccctatgcagctgaaaataaacattgaataatcaacgtattttaaat

SEQ ID NO: 847674 - DNA, 408 bp, Homo sapiens
attcactcatttgtatattcatcaaaatttttttttggagtggctgtgtgcaaaggcgctgattgctgtgggttaaagtcttggttatatactcagctaacctagaaatcactttttgtaggtgtgcaatgaagrcaaaccataaagctgtaaaggaatgtaaaagatcaagagttaaataataagaattaaaggagaacctaaagataaatgatgctgcgggtcacagaatttagccaggagtttttgtttgtttttgcgttaaatcacagaaaagaggaaacctgttttgctgttacgtttaacaatttgaggcaagacagcgtcttttctagctatgacttttataagaaatgtgccacatggtactagagcctccgttgaggagatctttgagtggagatttga

SEQ ID NO: 847675 - DNA, 692 bp, Homo sapiens
caaagccaatgactgaagtctttataagaaaaaggaaaggaagatttgaggcacaaagacacgcagggataaaggccatgccacatgaagatggaggcagacattggagttctgcagttatgagccacacaacagcccccagaagccagaaaagaagtgtcatggaaagggatctccctcggagtctccagaaggaaccaaccctgccaacaccttgattttggacttctggcctccagaactgtaagagaatccatttctattcttttaagtcaccaagttcgtggtaacctatttggcagccctaggaacctaatttgccacagtagaatgagcttttgtaaacagaagtaaatcttaaattgtatcaaaaaatgtaattattattttaattgtattataaaaatttttgtagtcagattttaaaaagtttattgctatagtttagagacaataatttctcatttgctgcatttcgcccatggccactgaagtacatattcatgataggaatagacatttactttcagctgaggttaatgtaagagcaagatttctaaggtgcctaattttttccttacaattgtttttatcttyttcaaattctttttacgtgtgtatctaagataacttatcgctgacatacataatttgggagttaaaatcaactttagttggccaagttaatattt

SEQ ID NO: 847676 - DNA, 610 bp, Homo sapiens
atcacaccactgcactccagcgtgggcaacagaggaagaccctgtttctgaagataaaaaaaaagagtgcgatagtgctaagttggaacataaatatatgtagggatgttactttygtgcagccaactacatccagaagttgatgatttggaagttaaatatttttagggtgtttttgagggaaaaattgagactgctatttaacccctagaaaccatcagagaatgtcctttatagtaagtctcatatcccttctgtaacttgggcctcctggcttccgtcctgcagttgacaccctgtggaaggtgggaaggaatcactaggagctccatgtgtcccattcaatttcttacttgtaaatggagaagggcctagagatgtctgcaataaatttccctgtctctctccgtccacgtggagaatggataggtgcatgtgtcagaggcacagagttctcctttccatggcctggagcccctgcctgcctagttggtgggtgccagggcagccagcaggcttggcagcgggtgggtggagaaggacattccagcagctcagatgtcttcaggtatgcagacagagctagattaacacgtcttcatcttctgct

SEQ ID NO: 847677 - DNA, 294 bp, Homo sapiens
ccacgtattaatgtttctgaatactggaaactgtgctygtggctggggaccaggaataagtatagtggagtccttgctggcaaggagtcctttaacagaggaaaaagacagggcagggtatgacataaagaccagattctatttggagctgttgactcaaagagcaaaaggagatggccgttagcgtatcagacatagaagccatattccccatgggcaaaaatgaagaatgttctgtaagggtccttcaagctataccaccctgtggtcctcactagtgttcatggtcctgtt

SEQ ID NO: 847678 - DNA, 569 bp, Homo sapiens
ctggagtgcagtggcgcgatctcggctcactgcaacctccacctcccaggttcaagcgattctcctgcctcaggctcctgagtagctgagattacaggtgtgcgccaccacacccagccaatttttatatacttaatagaaacgacgtttcaccatgttgcccaggctggtctcaaactcctgatctcaagtgacctgcccgcctcagcctcccaaagtgctgggattacaggtgtgtgccaccgcacctggcccataacttgtggtatttaaatggcatcatatggaagggctgcccccaattgttgaatactactgtaaacaggcaagagatgtgcctccctcaccagaaactctgactcactgcattagtttttcccagggtttagctaatggtgtaaactttcagtcatgctcactgtggtatgtgagaggtattcattcaggcagtgaatatctgctttaaaaactttaaaaatctgctttcacawaataagattctttgaaaccaaaaaacaagcatttgcaaactttcaagcttgattttacagttacagaaagttggctgc

SEQ ID NO: 847679 - DNA, 569 bp, Homo sapiens
ctggagtgcagtggcgcgatctcggctcactgcaacctccacctcccaggttcaagcgattctcctgcctcaggctcctgagtagctgagattacaggtgtgcgccaccacacccagccaatttttatatacttaatagaaacgacgtttcaccatgttgcccaggctggtctcaaactcctgatctcaagtgacctgcccgcctcagcctcccaaagtgctgggattacaggtgtgtgccaccgcacctggcccataacttgtggtatttaaatggcatcatatggaagggctgcccccaattgttgaatactactgtaaacaggcaagagatgtgcctccctcaccagaaactctgactcactgcattagtttttcccagggtttagctaatggtgtaaactttcagtcatgctcactgtggtatgtgagaggtattcattcaggcagtgaatatctgctttaaaaactttaaaaatctgctttcacaaartaagattctttgaaaccaaaaaacaagcatttgcaaactttcaagcttgattttacagttacagaaagttggctgc

SEQ ID NO: 847680 - DNA, 518 bp, Homo sapiens
aaatttcatacccctcttccccgccttccaaacacygaaggcattactttttcactttcttaatgttgtctttcaaagagcaactaatctgccacttcaaattagtttgacctgttctagaatttcacatatgtataaaataatgtgatatgtgcttgtgacttatttttgttgcggtggtcctttttaatcattgagtagtatgcgttatctgaatatctcacaacaatttgattttccatacaattgtttttggacattttgattgtttctagtttgaagctattataagtaaagcagccatggacatgcatatacaagtcttgtgtgtgtgtttaatttctcttggcctgggagtgctattgctatcacctggtaagagtacgtttaactccataaaaaacattttccaaagtagtttgtactctcaaatagcaacagatgatggatccagctgctccacatccttgccaaaatgtggttttcaatctttattttttatttttagccatttcagc

SEQ ID NO: 847681 - DNA, 558 bp, Homo sapiens
agagaacataagccaaaacaattttagatgtttacataaaatttttaattgcatggcaatcgcttagtgagtcactgattcatctgataaaattcagaaaatgtttaacattcgccagatctgagagttttactctcagatgacaagcaggattccttttttcatggaacttgtggcctaatgagagagaaaaataataaaataagaaattacaataaaacacaaaacactgcacaatagggaaagtatctcctagtatctgctaacaggacctgtagaaggttcaactaatcaagtctgtaggtccaagggaaaaccctgttcagttaagattatgtttgctgcaagtaacagagatctaaaataatagtaatgtaaacaatgtaaaaacgcattgctggcttatgcaaacatctgtaggcaggcagttgtgcagcaaggctctgaatccactcgggagctgggctgtcttatcttgctgctacacccttcttagcawgctatctcaagagccaagatgactgctaaggttacagcaaacatttccacactccaaac

SEQ ID NO: 847682 - DNA, 484 bp, Homo sapiens
gaaacctggggctgagcccaaagacaatttggatatatggatttatggcaagcatccaactgtatttaactattgattatctcttatcattggtkgttatcctaaattttgcttaatgtctatttccctcagtagactataagctttatcactacattctcagtatttgacacagatttgggtctatggtaaaaacttcattattattgaatatctttaatataaacattgtagaattaattgttgatgtatgtcattagattaatatttaagaccattttttaaggaaaaaaaatcatcactataaatatccattacctgacaagttaatattaatcttgaccaattcttgacttcttatagttgtattttaaattaagattcttgccacaatctgctggttagtaaaatatattttattgtcctttgattttaggcttgaacatatgagttgctttgcccaattcagccttaaaataatgat

SEQ ID NO: 847683 - DNA, 515 bp, Homo sapiens
ctgcacatgaccatgtaggtcaaagatttttccaatactcatgycatattccctttgccctcaggaagcactctagctagtggtgttcccttgcctggtgcagtgatgcaaatattcattcatggatggtctgcatctttagcagtcctcattgaattgggtcactgtgcttttccattgacattaatcacgggatgtgggagtactaagcatcccatggaatattttagacatactcctctttaccccctgtgctgaatagtgtcttccaaaagttcatgtccaccaggaatctgtgaatgtgactttatttataaataggttatttgcagaaagaatccagttaagatgaggtcatactagattaagatgggccttatatccaatataattgttgcccttataagaaggaaatacagacacagagacacaatggagaaggccatttgataatggaggcagaggttaaaatgatgtggctacaaaccaaggaatgacaagcattgccagcagcc

SEQ ID NO: 847684 - DNA, 515 bp, Homo sapiens
ctgcacatgaccatgtaggtcaaagatttttccaatactcatgccatattccctttgccctcaggaagcactctagctagtggtgttmccttgcctggtgcagtgatgcaaatattcattcatggatggtctgcatctttagcagtcctcattgaattgggtcactgtgcttttccattgacattaatcacgggatgtgggagtactaagcatcccatggaatattttagacatactcctctttaccccctgtgctgaatagtgtcttccaaaagttcatgtccaccaggaatctgtgaatgtgactttatttataaataggttatttgcagaaagaatccagttaagatgaggtcatactagattaagatgggccttatatccaatataattgttgcccttataagaaggaaatacagacacagagacacaatggagaaggccatttgataatggaggcagaggttaaaatgatgtggctacaaaccaaggaatgacaagcattgccagcagcc

SEQ ID NO: 847685 - DNA, 596 bp, Homo sapiens
aaagctaggaaaagacaaagatggatcctcttayagagaccccaaagactgagtacactgcttgaagttcttcccactgggaggttatcccttcaccagtgtccctccaggttgttctaatgtggaaatatagtattgtagctgcccactttcaagtaatgcctgcttatcacgcagaaccatctgaaaacgatgctggagccttcttattctcagtcagttgctcataggatgctccccgtgagaacacaggtttgaactgggagaaagaagataatgaagcaagagtaggtgtcaccagaatctgggccacttcttcattcaacttacttatggctccctgccccttttctggtctccccagcttgaacttgatctcacatataccatttctatttgttgatggagtgttgcatgcatactattttgtcttggtggatcagatgacatccagttttttatctataactgaggtgcctggtaacttggtaatccataatcaaatatcaagtctctgccaaagcaatgctgtaaaccagaaattagttctcaaaaggaaattagttatcctccaagcatgcatgactttgtttcaa

SEQ ID NO: 847686 - DNA, 547 bp, Homo sapiens
ggaaaagacaaagatggatcctcttatagagaccccaaagactgagtacactgcttgaagttcttcccactgggaggttatcccttcaccagtgtccctccaggttgttctaatgtggaaatatagtattgtagctgcccactttcaagtaatgcctgcttatcacgcagaaccatctgaaaacgatgctggagccttcttattctcagtcagttgctcataggatgctccccgtgagaacacaggtttgaactgggagaaagaagataatgaagcaagagtaggtgtcaccagaatctgggccacttcttcattcaacttacttatggctccctgccccttttctggtctccccagcttgaacttgatctcacatataccatttctatttgttgatggagtgttgcatgcatactattttgtcttggtggatcagatgacatccagtttttyatctataactgaggtgcctggtaacttggtaatccataatcaaatatcaagtctctgccaaagcaatgctgtaaaccagaaattagttctcaaa

SEQ ID NO: 847687 - DNA, 357 bp, Homo sapiens
gccaatccccatatgcactgcagatggggaactgggaataaaagattattgttttagtctttgaatttaaggatgatttgttacatagcattatcatggcaagaactgaatcactaaggtaattattttcccacattatcactctgtagagatatataaaagaaatgcttatatttaaaaaatgcttcgctatgtctcatgcagaacaaattaaaattataatccatgccttatagagagcyttaactattgaaaacatataagaagtgcatgggcaaataagtagccggtatgaagataatgacataacattaaatatattcctaggtgataggatggtcaaggcacttgctttac

SEQ ID NO: 847688 - DNA, 623 bp, Homo sapiens
ctgtttctcgtaaactagctcctaaattatgccacattttttgaaaaaaataatatacacaggctatgtctgcaagtcaaactgatgagcccattctgaaggccaagttcagtaaaaataagtcaagccgaaagagaaaacttgactattgtaaaggttgaaccagatgtttgtatagagccagtccaatcatacggcataatttagaacttggcttatgtgaaacagatggccaaaggcctgtccttgcgtgctctgtgttctctgcttctattactaaatctgactaagttttatattttctgctttgttttgtttgggatcgttgtttgttgttgttgtttaactgacaatcattttagaagccaaacaagttgtgtttatcaatgtagcctttggaaaagatgacaaataactcggtgtggaagaaattggctttagatttctttttggctttagtttctagaaacctaaagcttataagtgaccggagagaaaataaaatgtttggaaacacctcctgaagcagataagagagttctgtggcaaccccctstaaatatgcccacaattagaaaatatttacctgggaggaaaaaaagagagaccaggaaatcatccta

SEQ ID NO: 847689 - DNA, 573 bp, Homo sapiens
tttctgttcatgaatcttctgctaccacttggttgcaccggaagcctctctgaatctattctagttcgcaggctgcctgactcatgaatagttctttgcttggttaaactctgttaaatttagtttgtctaaggtttttcctgtaacaggtttaggtcaaataattctttattatgaggatctgtttagcagcacccaggggctctaccactagatgccagaatcacaccctctccccgattgtgagcaccaaaaaatgttcgtagacatagtgatcacttttattttaaatctttaatagatatataatagttgtacatatttggggctacatgtgctattttgatacctgtacatgtgtgatgatcatatcagggtaactgggctatccatcatctcgaacgattatcttggtgttgaaaacattacaaattttctcttctggctacttttaaatacacagtaaattactgtgaactatactttccctccagtactaccamatattaaacatattccttctatctaactgtatatttgtacccattaaccaactcctcttcatcccccttc

SEQ ID NO: 847690 - DNA, 527 bp, Homo sapiens
atccagccttgttcacagccatttcaggtttttcttacctttctttataaaggtactgatgaattcaggtgtaattaattcatgaagaggtaaattcttcacaaagtaatagggtccagtgttcatgaccaggtttttcagttcttccgatagtatcccacattcaggaatgagaaatgaaacctattggaatgtgtaatacaaacaaggtcttacttccatgaagatgaacacccaggtttttaggaatgaaacaaaatcatgaaagttgttatttctccacgagtttcactggaacataaaaacacgggcaacaaaacctcttatgttaacttacctatctcaggcaaagagaaatctgactacttaagtttttcatttctgcattcaaacgtacagtacaggaaggggattgaacagaatacttttaatggaaaactcrtgcttgcatttaatcttttgcaaattagcaatgctgtatattttatgtcctgttcctttcactattttattttcaaggaaatata

SEQ ID NO: 847691 - DNA, 632 bp, Homo sapiens
gccctcgctcgctctcggcacctcctctgcctgggctcccactttggtggcacttgaggagcccttcagcccaccgctgcactgtgagagcccctttctgggctggccacggccagagctrgctccctcagcttgcagggaggtgtagagggagaggcgccagcgggaaccggggctgggcgtggcgcttgcgggccagctggagttccgggtaggcgtgggcttggcgggtcccgcactcggagcagccagccggccctgccagcccgggcaatgaggggtttagcacccgggccagcggctgcagagggtgtactgggtcccccagcagtgccagcccaccggcgctgtgctcgatttctcaccgtgccttagctgccttcccgcagggcaggattcgggacctacagcccgccatgcctgagcctcgcaacccctccatgagctcctgtgcggcccagcctcctggatgagcgccgccccctgctctacagcgcccagtcccatccaccacccaagggctgaggagtgcgggcgtacggcccgagactggaaagcagctccacctgcagccccggtgccggatccactgggtgaagccagctgagcttctgagtctggtgggaaggtgg

SEQ ID NO: 847692 - DNA, 578 bp, Homo sapiens
acagctattcttcacaaaggtagtacattgtcaaaactgtcacttattgctaaactgtaattatgtaagttttacttcaagatccttcaatttgcattcctctattgataatttcaggaataatacacagattaaaaaaaaagtggtacaggtgaatttaaaagaaggaactaaaacttcatatatacctgttggattaaattttattctactcaaaaacaagctaaaatcagtaattctttaagctacttaactatagagttaagtaataactgtaagttattattttgaggacaggatgaaaatacttccttttctctactaagtaatcagaaaaaagaaaacttgattgcagcactagaaatttaactcagacacaaggtaaacatgttaacaccagggtaatgaaaaggttgaattagcttccaagagaaaataaaatttcctcrtctgaaaactttttgacagaggaatggtttagatgtgctctcatttagaggacctatttctactagggttctctcattcagtcattgatgactgatatatagtatacattattaaaaatcataaggcat

SEQ ID NO: 847693 - DNA, 462 bp, Homo sapiens
tgtgcaagtttactatcatcaagcaaaaaactgactcagaacggaacgtgacctttggggatgcgyggagaggggtccaaagtagaattctagataaacatacacctctcagagacagagttccaggttaagattcaaaagctacccaacctctccaagcctcagtttcctcactgttaaatgaggatcataggcttgcttcataaagttgttgcaagggttaaatttggtaagacatttaacagtgcctgctacagccattgtccacgtaattcacagagtggtgtcaggccttgaaatacatgaaaggaataacggtgatgagaccggacaagatgcccagctcataagtcgccccagcagtgtcagaatgagaggagctactggtaactagagttcttcatatcttcactggagaggacacacatgggggctaccacaagataagcatgtggccactgt

SEQ ID NO: 847694 - DNA, 648 bp, Homo sapiens
cctggattctctctgtcctccttttctgcctctgagcctcygccagctccatgtgactcagcttcaggcatccctcggggggaacccatgggcacccagtgtccaacctaccccctcctcagaggactcttggctgtgtctgcctccccttgctatgttttgccttctgccttctttattcccctgttatttttcctgttttagccatgcttgattcggttttacagccctgtgtctccccactatttttatatatatataatgcttgaatgcttgctgctttgttttccattttctctttctagtttaatgttctttatattcctttaaggtaaaaatgtcttgcttccaacttgttttccctgatttatcattaactgcttttaattgaaaaagtaataaaagcacatgacgaaaattgaaagagatgaaaagcatacacaatgaaaagcaagcaagacctctgctctcctaatctctgtctccagaggcgacactgctactggcttcttgtgtttccttttagaagtcctctatatggccaggcatggtggctcatgtctgtaatcctagcactttgggaggctgaggccggaggatcccttgagccccggagttcaagactagcatgggcaatattgagagacc

SEQ ID NO: 847695 - DNA, 572 bp, Homo sapiens
ggggctggccccaaggacagtgaggtggggcacagggctgggctctgcagcagcctgttctggcgcccagcctctgctgggaaggagttgtgggccagtctgtggggaggaatgcctagactggttgaagagggctgtggtggagcaggatgtggagggcactcgtggtgagcttccaaaaacctaggatcaatccccaggactcccctcccatgtctcctttatgcccccaaccccagccattggccatccccctgctctagctggggcaacctccttcagtaatgttgaccacaaaattttgtatctatttttagcaaagctactctgtatatgacttgttgagcatcacattacctgccaagtggatatcttctctgggacgagatgctctctttgcccatctgttatggactgaatgtttctgtcccctgaaaatcataatgctgaggcccyaaccccagtgtgatggtcttagcaggcaggcctttgggaggtggctgggcttagataaggtcgtcagggtggagcccccacagtgggattagtgtcctcacaggaaggagatgaga

SEQ ID NO: 847696 - DNA, 532 bp, Homo sapiens
acacagaatacaagttaatgcaatcgtgtttagcttctcttctattggattctttttttactcatatgaaattattgtcttatgatatttaaagcaaaagaaagcaaaaagttcaacacaaagtagagagaggacaatagtaagctctcaactgccaagattaataatgtgctttgggtatgcagaaaatcaaacagcaaggtactgacttaatagggggcagaatcctgtttgtcattcactgtttacccacaggtctctgaaattgtctgctctgttatgaaatgtatagtgaagtagctgatagcagtgtattttctccaataggattctgatccttactttaggtctatctagtgctgtcaaaaaataaattactagtcttgaaagtttgccctaggaaagctccatcttgatataaaaaagtaggagcagacatctggtagatataarctacctagcaagtgacagaagaatgtatataatatgcttatttcattggtttactaagttggaaagtaatatatttcta

SEQ ID NO: 847697 - DNA, 629 bp, Homo sapiens
cttcaaaataatctcctttgattccatgttccacatccaggacacactggtgtgagaggtaggctcccaaggctgtgagcagctctacctctgtggctgctttcatgggctggtgttgagtgcctgtgccttttccaggtgcacggtgcaagctgccagtggatctaccattttggggtttggaggatggtggccctcttctcacagctccattaggcagtgccccagtggggactctgtgtgggggctccaaccccacatttcccttctgcactgctctagaagaggttctccacgagggctccacccttggagcaggcttctgtctggacatccaggcttttccacacatcttctaatatctaggtggaggctcctaagcctcaactcttgcactctgcaaacccatagggttaacactttgtcaaaactgccaaggtttatggcttgcaccttctaaagggcctacagcagcccaagttgtacctgagcccctttgarctatggctggagctggagcagctgggattcagggagcagtgtcttgaggctgtacagggctgcagggccttgggctcagcccctgaaaccatccttccttattaggcctccaggagggtctgccgaga

SEQ ID NO: 847698 - DNA, 655 bp, Homo sapiens
tctcggttgaatgcaattacaaattaagggaaacttctataaaygtctacattaaatatggagcaaaatttaagcctgtttcctataattttctgtatctgtccttttaaaacgtatgatttaagttaaagctggcactagaaagtatttcactttggcatgactgaactttgtatcatttctggctttcaaaaacaatttaggctgtatttcccttacacagcaactttttatcattcattttcaatgcctgggtaatttgaaagccaaacagtttcttgcacagggaatgcattgtcataagctgggttttatttcaaactcaattatacaatgtagcaatagtaaatattaaaatgtaatgctaactcaaaacttgtagaatgccttcactgaattttggtataaagagtaaacaaaacttattctgcaaaaggattaggaacctttttatgcaaaaatgagtattttattttgtcagcactaaaagaaaaaaaaaaacaaaaccactgtatttctacattgaggtgaaaacaatgtttaaactttcttatcaatcaaatacattccaaaagaaagtgtgttctatgaaggttccaaaacacactcaaaacacaatagtacaggaatctaatactgaaaatgactgttctga

SEQ ID NO: 847699 - DNA, 523 bp, Homo sapiens
acacaacttctggttaatcctttctagtgagtgtttttcattagaaatgcctccaaatgattcatcacataattatattttgtacaacaccttcttttttcagaaccgcagatgataattgtgctggccagctttttttttttttttaacctatctcccagttaatttgtagcagcctacgacattacttttctctgtgtcctaattactcagttgctcatgagttgctgcagatgtccctaaccaggctcactgttgtgattctgctcctgcccacactccacaggctctgttttctttggcagccagaactgtgctgttcggacacttgtcccagctccctcattggtctcatggtgctgccacttgcacatactggccattttgctaggctctgaggtgcatagataaagttgcttatagctataagcccttgagaagcttatggtcaaatggggaagaaaaatgaaagcagmtgacttgtagcatccgatcccagggaatggtagagccatttttgcca

SEQ ID NO: 847700 - DNA, 617 bp, Homo sapiens
catgatttgtgtaataaattatagggccattctaattataaggattcaattagatacaagaaatatgaaagtgcttcaaaagtcataaggagctatagaaaattatgattttattcatttttattttatgttctgattggctctttgatttcttcttgtggtcagaaaaagaatgcatattaattgtcatgagattataaaatatgcagaagatataagaagaagatcaatttaaactttgatcctatgaatacacccagagtcaatcatggttaatattgtggtcctattttttcctgtcatttgtctttccacacacattccttgcacagtttccatcatagccttgttgttaatggcccagcttttatggacagcgtatttgactgccaggatcctatgtccaccacttaacatcaggtgactcgggtacattatttctttgtgtcacaattctcccatctgtaaatgggaaataatagtatctacttcataaactatagtgaagattaaatgaaaaagtattcaacatagtgtgattaaatgaaaaagtatkcaacatagtgtgtttataagtatgctataattatgacaattactaattatattctgtttat

SEQ ID NO: 847701 - DNA, 562 bp, Homo sapiens
tctgttaatagtcatcttgtgttaattcaactgtttsactctcaaaggcaatcttagttcttccatttccaagccctataagtatagtttgctttagtgggagacagtagagcatagcctgattctagaatagtgctgccctaccatttaacatctctgagccacagttttgccatctgtgaagtggggattacaaagttacttacctcataatgttatgaggacaaaatgagaaaataaaagctccaaccatagcacctggcacatgaaatgcactcaataaatgttgtctagaattattattatagcagtatatttatttccattcttttctattttgttttattttagtatcagggagaatgcagggtgcaaaggccctaaaacaagatagcagggcataatagagaaactgcaagtaattcagtatggtgagaggatagatgtcaagaaagatgagcagctgtcctaatataaagatgaagagatagacagcagacttgtcatgttaaggaattttgactttatcctgtatatgttacaggggaaaggcactgaagaa

SEQ ID NO: 847702 - DNA, 615 bp, Homo sapiens
tattaggaagccatgtagtagagctaatattttatwaaaaggatgcttctctaaatttgataattcagtaatccacctgaaatagggtccaagacagatttgccttaaaatgaaatttgttgttttgaagactatatcggaagaaatcaaaccattgttaaatgtctatatttgtgctacatccatacttttcttactcatggcagaattgcttggatgtgacctatattgaagcaaaatccatttgaaacactgatttgaggttatgtagatagtgactactagtcaagttgcatttgtaaacattatttcaaagagaaggggagaaaagaaatattactgattttaccgagaatagattaagaacgtcatgtttcttgggttgtaaactaaattgctagtgaggcgtatgtatcttttttccccgcatagtacacaaaaaggaatcatttggactgagactgtatttgactttgtggtataaactttgattgctgttgtttcccaacaggggcttggaagaattctgtggaagagtggacaacagaagactggactgaagatgtaagtgtttgctgtcagatgagacctttctttttttttttttttgaaatg

SEQ ID NO: 847703 - DNA, 622 bp, Homo sapiens
gtggctattaaatggattactaaaagttgtttttaaatatgtttttcatgttgaactatgagggtgatatgaatkgacgtataacaaaattggtaaactctcagaaattctcagggccctaaagaagatcaccctacatcaccaccatctcaagcatatcttccgcgagacacagaagaaacttgagaagccacaatgagcacatatactgagcactgatactgatgcacttggcatgcatcacagacaactgtaatttttggtagactgattgatgtgacagtgttcatgttaaacaatgcagttatacttcacattagtcccagtaggcaggtatgacccatcagtattctctacggcaaaaataaaatgtacctctaacctgtctcacaactgcttcctgattcttccgtgttccaccatgattcacgagggaatgctggtggacccaccaccttgagggtccatgggtgcataagagatgactgtaatgcatctctggggaatgatgtgggaggcttattaggcaaacccattgtgtaaatgtactgacaataattgtttttatattgcaatataaagagtataacagaacataacagattttgtatccttggtttgt

SEQ ID NO: 847704 - DNA, 666 bp, Homo sapiens
ccagacactgataacatctacaggcatcaaggccatccaggaaaacatgacatcattaaacgaactaaataaggtgccaaggatcaatcctggagaaagagagatatgtgagctttcaggcagagatttcaaaagaattgttctgagaaaactcaaagaaatttgagctaacacagagaagaaattaataattctatcagataaatttaacagagattggaataatttaaaggattcaatcagaaattctggagccaaaaatgcaattggcatattgaagaatgcatcagagtcttacaatagcagaatcgattaagtggaagaaagaattaatgagcttaaagacagattatttgaaaatacaaagtcagagcagacaaaagaaaaaaagagtttaaaaaatgaaacatgactacacaatcaagaaaattgcctcaaaagaacaaatctaagagctactggccttggagaggaggtagagaaaaagacaggggaagaaaatttattcaagggaatagtaacagataaattaccaaacctagaggattacatcaaaatccaagtacaaaaaggttatagaataccaaagagatttaaccctaacaagactacctcawggcatttaatgatcaaacttgaaaatgttgagaggatcctaaagcagca

SEQ ID NO: 847705 - DNA, 602 bp, Homo sapiens
taaatcactaaaagattcaaggttcattgataagaatatatagtttttttttcaaaaattctatttcaagtgwttacttttatttttccaaactttaaaatgattttatttgtgtcaatttgtctgactcaccctgccttctgtgttatgaagacattggaaactgttttccaaaagcctagtttctttgtgagggtagcacacatgataccctttcataaaataataaaacctagaagaataatcatattgtccttgtcccttcttagaacgtacatttttaaaacaattatccagttatcagggtgaactgttactagtaattatagtcacttccccaccaaaattaacattgatcctgggcaaatagccaagatataaatactgccaagtccagaatgatctttttttggttcattttgataagactcaattcctgactataatagttatgtgaatagtaaagaaatcctgatcttacacagtgttgattactgaaacagattctgggtttcattctaatggcttcaaatggcatactctctcaaggaggtcatgccttcttgctagaattccagcttggtttatagaaaacttgctag

SEQ ID NO: 847706 - DNA, 615 bp, Homo sapiens
ctgagcctcaactgcccccatttgtcttccttaaaagacagcataaattttaaggtcaaaaaagaaactactcattttagcagaggacaaaacagtggagcccttttgggaataggtcagccttttatggtcatcctaattttgcttcctgctgttttaattcacccaatacatttccttctgggaatcacctagaagtagattcatgggtttgaaggagaggagttaggtatgtttagaagagaagggacacagatctctaagggcacatacaacttggtaaagcaatccaggttgagagtatataataggaatttgagtgctttaaatttgtattttccaggctcactctcagtttcttaaagtactgcttcaaacaatcatttaaagataattatgttaacatttaaagatggttaatttggaggtctgatgatatttttaataacacagaagtttcattaacccaagattcttaatatgtaataaatttgtgaatgaacttaaaagctagtctcttcagatatgtgaattartaggctttttttaatcatttgaagtagataagctagtagaaaatggctttcttcctccttcttatgaaaatatagaaca

SEQ ID NO: 847707 - DNA, 636 bp, Homo sapiens
gattgtattgaagtggccttgttttctggggtgacgctcagaattcttggtctcatagccaaggaaatcaaggacatggatacaccaagggtgaagtttagagcagaaatttaataggagaaagaaaaagaacagctctctgctgcagaaaggggtcccagaaaaagggttgccatcctgtagtgaaatacaggaatttttacagacaagctagtggggaggcagtatctgaacatagggtgtgaaaaaccagttaggatcaggtgtgtcatctgcatagggtgcaaatctctggaagcccctaccccaatcttttatcatacaggcaggtcctcagcctgagctactccatgttgcttatttctttcttactgtgcatgtgctcaaaaaggggaggtagaatccccatggtggacatgcctggccccagctagccctttctgtccatgcaactgctggcatcccccagtgcaagcttccaggttccttatctatgtttgcagtctgatcttccaggctactctttgttagaaaataagtaatttcttgggctgctttytgttagaagggaagttctgcgaaggatgctgtgccctcactatctgcctcaatagttttttctacctcctgtatcat

SEQ ID NO: 847708 - DNA, 640 bp, Homo sapiens
ttctcttgtggaacaaaagccttaagctcctgggggaagggcggcaaactctaggctcaggggacaggtggagacctatttcagctaggggaaaggaacaggaaaattgctgtacstttggaggagggtcaaagaaatattatccactgggactattagagatctcctaacattgtgggaggaggtagatcacttggaacgtcctacccctatacccaggcaaacggatcctgcctaagactgaggttgaaccagaacaagagaatacttcctctctacatacaccaggatgctaagctcagagtaagaaatgctgatggtctactgctaggggagtggggagaacatggagaaagacctccctaaggtacaggcacaaagggaagacctaaagctgagggtgaagcagacattgagaaaaacactgtggcaaaccagccccaactgaagaacagggtgacgccaaggacacatgaaacctgtgatgtgcagaggctaataagcctaaattcagctctcaactcctgactcctgactaaattgaatcaactccccacacttaagattagcaggatgcgagacatgttcatttccaggcacaaatactacatacctcagtctctatagttctgcacaagat

SEQ ID NO: 847709 - DNA, 559 bp, Homo sapiens
ctcaaataaccccagaaggatggcaaggggtgtacgtgctgtgttttgtccctccctcttcctgtgcccaactggtaaggaaattggatgttttactacgatctctggctccccacccctgccccctgctcatatagcttgggaagtgatgatatgcgctgagtccattctaataaaacacacaacatgacttactgcttcatgatatgttttataagatggattgatttatgcacctatataagttgagtctgaatagtcagttttcgaagtgaattaagaataaatttttgttacattgcatcttatcaataagcattttaaaaccccaagcatatttatttaaacatataatttaaaaataaatgttttgaaatggtggttgaagaaccttttctttatttttcacattttctgatgtacttgctgttctcatcttctgatttcatgccctctggccttctagccccgtgcatcgtttttgagcacatttgaacatgtctkatccatgtagtctgaacctgttgctctctgagggttaccctactcatccctgcat

SEQ ID NO: 847710 - DNA, 587 bp, Homo sapiens
tagctttatgaaattgtaaatttgttgaaaattgattttttttttactggagaygagagttccataattgaaaaaatatcctatgccagtgctttgtagattgcaagtaacgtagataatcttgcctgtagttccttgatgaaaatgatctgttgcatttacaatatcacaagtaattaattattaaagtatatgcctgtgattggtatgttttatcttaattctacttattctcttagtcatgcaaagaagaaataactgccagtggtagctgttgaaattatattcagatctattgaggagcatgttttgaacatcttttatgcttatttaaaaagaggcggagcttgtagtgagccgagttagtgccactgcactgcaagcctgggcgacagagtgagactacatctcaaaaaaaaaaaaaaaaacaaaaaaggcttttctatgggattctcatttgtttaaattatacatgtgattacttgacacgttaaagtgtacacaatttaggaaaatgggattaaaaatccagaaacacttaagaagttcttatagtgaagattaaaaaagtgatttcatttaatgac

SEQ ID NO: 847711 - DNA, 587 bp, Homo sapiens
tagctttatgaaattgtaaatttgttgaaaattgattttttttttactggagacgagagttccataattgaaaaaatatcctatgccagtgctttgtagattgcaagtaacgtagataatcttgcctgtagttccttgatgaaaatgatctgttgcatttacaatatcacaagtaattaattattaaagtatatgcctgtgattggtatgttttatcttaattctacttattctcttagtcatgcaaagaagaaataactgccagtggtagctgttgaaattatattcagatctattgaggagcatgttttgaacatcttttatgcttatttaaaaagaggcggagcttgtagtgagccgagttagtgccactgcactgcaagcctgggcgacagagtgagactacatctcaaaaaaaaaaaaaaaaacaaaaaaggcttttctatgggattctcatttgtttaaattatacatgtgattacttgacacgttaaagtgtacacaatttaggaaaatgggattaaaaatccagaaacacttaaraagttcttatagtgaagattaaaaaagtgatttcatttaatgac

SEQ ID NO: 847712 - DNA, 515 bp, Homo sapiens
tgctgtggacataggacttggcaaagatttcatgacgaaaatgccaaaagtaattgcaacaaaaacaaaaattgacaaaatagagatcttctgcacagcaaacagacaatctacagaatgggagaaaatatttgcaaactatgcatgcaacaaaggtctaatatccagaatttataaggaacttaaatttacaaacaaaaaaaaaccccattaaaaaatgcacaaaagacataagcagacacttttcaaaagaaagcatacatgtggccaacaagcatataaaaacatgctcaacatcactgatcattagaaaaatgcagatcaaaatgacaatgagatactatctcacaccagtcagaatgactgttatcaaaaagtcagacaataacagatgttggcragattgcagagaaaagagaatgcttatacactgctgctggaaatgtaaattagtttagccattgtggaaagcagtgtggcaatttcttaaagaacttcaaacggaattaccactc

SEQ ID NO: 847713 - DNA, 552 bp, Homo sapiens
tatagcttagcctagcctaccttaaacatgctcagaacccttacattagcctgtagatgagcaagwtcatctaacacaaagcctattttgtaagaaagtggtgaatatctcatgcagtttattgaatactgtactgaaagtgaaaagaagattggttgtgtgggtgttcaaagtattatttgtactgaatgtgtatcacctttgcactgttgtaaatttgaaaaatcttaagttgaactatcataaattgaggactgtctatgtttgtacgtgtgtatgtatatattctacatctctatttaactttttgaacaaatggaaagtaattataattattttaatatccttgtcaaacaattgtatcatctgtggcattctgagttggacttaattggttgctttttgtcatttggatcttttattttttgcttctttgcaatgcctaataatctttagttgtacgatattgtgaattttacttgacttagggggctggatgttttaatttttctataacagttcttggtctttgttctgggacacagcgaaatt

SEQ ID NO: 847714 - DNA, 623 bp, Homo sapiens
tccagggacatattttattttcctgcctccttagaatgtctggcaaaaagctttatttcatctgaattctgctgggtcatcacattggacttgtggaagaaaatggatttataatagcaattaataaaaaatagtaacaaataatattgcttaatagtaaatgtgtactgtatgtgccagccacagtgctaagcattttaatacaaaagcataaaataacattgtgagatttcctctagcaattttaaacttaaactagatgtttattcgagggcagctttaagctgcatttgcatagcaggctttttgctgtgtatttattgggaggagagctgttagaaattacagagctgttggaaataaaccctagctaattctcagggtttcttccagtattgaacttgtctgaaaagctgttggaaattagtgtgcactgactcccccaagatgcccctggaaatcaccactgcttgctctaccaaggtaccagaaaatctgccctggaaaatgagtcctttggattaaatctttccatcttyaggacctgcttgaagtgcaggtgtccctggagagggagctaattaaatcatttaacacttaaatagggattcagttatgaaatt

SEQ ID NO: 847715 - DNA, 484 bp, Homo sapiens
gagaaatatatgccagttttgcaaagtaattgaaataaaagagaatcctccaagcattttactttaggcaaataccaacagaccttcctctgagtatgaaagtaaggtatmaggattatttctcctaatttatagaaatgtttctgaaacttttatttcaaaatatagatactcctgcagcaaagtaaacatctgattgactgaagaacacactcatggctctttacttgggtttatacctgaataaattgagagatttaggtttcagtgcagtgtggcaattgttttactctttttgattctgtatatcttttgtttctgtctctattgcaaattttgcaccctccactcatgctaaatttacatgaatagtataagatttctgtggtaattgaaaagcacttgctttggatttagactctcaaatcttttctcgcctgttaattgattattcacacaaatgtttgagctcagtgttcccaag

SEQ ID NO: 847716 - DNA, 652 bp, Homo sapiens
aaatgccagttgttgtcaggaaggcattctygctattagtgtatttcaaaaatgcaatatctgctgctgattcagagctagagctgagagcttgttgattagctcccatttatccagattacagcaaattagatttaactgtgactggcatgtgaaagatcttatgtaggacatggaggaggaataccgctccataaaccatagtgcatttaatttctttttctttttttcttttttgagacagagtttcactcttgttgtccaggctggagtgcaatggcacgatctcaacctccacctcctgggttcaagtgattctcctgcctcagcctcctgagtagctgggattataggcatgcaccaccatgccccgctaattttgtatttttagtagagatgggatttctccatgttgatcaggctggtctcaaactcccaacctcaggtgatctgccctccttggcctcccgaagtgctgagattacaggtgtgagccaccgtgcctggacttaatttcttttaaataatgagattttatgtggttgccttaatcattacggactaggcggtatgcactttatggtacattatcttttggttggaatgtgaatgaaccaacacctacctgaggtacttctaggtgaaatcttga

SEQ ID NO: 847717 - DNA, 604 bp, Homo sapiens
aaaagctggaaccataccccttgagaaccgaaacaagaccaagatgaccactcccgccattttaattcaacatggtactggaagtcctagccaaagcaatcaggcaagagaaggaaataaaaggcattaaaattggaaaagaagtagtgatactgtctctctttgctgatgaaataattttatacatagaaaaccctaaagactctgtcagaaggctcctgaaactgataaacaaattcaataaagtttcgggattaaaaaaatgtacacaaattagtaacatttctatgcaccactaacattctagctgagaactaaatcaagaacacaattccatttacactagccacaaagaaaataaaatacctaggaatccatctaaccaagaaggtgaaaattctctacaaggagaactacaaaacacttctgaaagaaataagaaatgatacaaacaaatggaagaatattccatgctcatgaattaggagaacaaatagttaaaatcgccatacttccaaaaacaaattgcagastcaatgctatccatttcaaaatgcaatgtcatttttcacgaaattataaaaatttattctaaaatgtattt

SEQ ID NO: 847718 - DNA, 297 bp, Homo sapiens
tgtggtgacctcaggagggaacgtgaccctccattgtgtctcacaggtggcatttggcagcttcattctgtgtaaggaaggagaagatgaacacccacaatgcctgaactcacagccccgtacccatgggtggtcccgggccatcttctctgtgggccccgtgagcccragtcgcaggtggtcgtacaggtgctatgcttatgactcgaactctccccatgtgtggtctctacccagtgatctcctggagctcctggtcctaggtgagaaattcacagcattgcctggagttccctg

SEQ ID NO: 847719 - DNA, 613 bp, Homo sapiens
gtggagctgggggtcccaaaatttcaatagcaatgggggcaggagcacaggctaggattggtcagggactcagggagaagtggtctgaacccacattgtgggacctcggggacatcrcagcccctccctgcgttgcagtggcactaatgggaacagggcagggaccagcaggaatgagaggtcccagggaaccttcccaggagatgaaccccttgctctactccagcaggtgctgccgtgaagaacacacagcctgaggacggggtggaaatggacactcgggtgagaacccgcccctgtccccagcaccaaaggcctcctggtgccagatctaatcctgcaggacttctctgtcctccttcccccggctctcagcatcgtcacggtggacccctccttgtccagcacgctgcctcctgcctgctgggacctcactctctcctgctgtcctgggacctcatgggcctcctcccgggtccccttcctgctcctcatcctctgtttggccatctggttgttagagagctccccaggcctcaggaggatgacgaataaatgaaccactccagtcccctgggctccccttcattcattcatctagtgagtgttccca

SEQ ID NO: 847720 - DNA, 619 bp, Homo sapiens
ctggaactggtggtgacagatgagaggacactcagggatcccagccccaggcactgcattcaggaaggggttcagctctcagggggtgtctcccttctcacagcccagccctggggkatgatgtggaaggtgtgagccccatttaacatggtgcttccttctgtcctaggattctacagcaaatccaccctctcagctcagcccagccctgtcctgacctcaggaggtaaggtgacaccattatgtccttcacggctgggatttgacaggttcattctgaccgtggaaggtgaacacaagctattctgtctcctggaccccgaaaaacagtccgatggacagttccaagccctgatcctggcagaccccatgacttctagccacaggtggaggtttaccagtctggtttagcagactttagcacctgagaccaagagctccagcagctcactagattctgaccatacctggaggcaacctggtgaaagaagaggcttggaaggaaccagccctctgagtcccagctcctcgcacactccaggtgtgcctagggagccctcccatttgactccacagggtcctgtcatggcccatggagagaggttgaccctcctgtgtt

SEQ ID NO: 847721 - DNA, 472 bp, Homo sapiens
caaggtggagcctaattccccgccccttgaatgtgggttatacttagtggcttccctctaatgtatggaatgtggtagaaggaacagtacatgactgctgagaatcagtcatgaaagtcattggagcttcctccttgctactcctctctcgcatgctctgggggtaatctgctgccatattgtaagaagagatccctgtggaaagtatggaggactcttgacaacacccatgtgagtgcgccatcttggaagcggatcctccagctatagtcaaggctttagatgattgtatctgcaacctatatcttgactgcaaccacatgacagaccctcagacagataagcctygtcccaaattcctgaccacagaaactgtgagatgataaatgtttattgctttgagccactacattttgggctaatatgctacacagtgatagataactaatacaaataatttctgctatccaca

SEQ ID NO: 847722 - DNA, 555 bp, Homo sapiens
aggctgaggctgacaggcctagataactttgggttgcatatacttaaattaagagtcagcacattttaggatgaagcttcaggtaatgatcatgaaaacaattcctagcwtctctacagactccatcattttcgaaatgctttctcacattaatgcaattccattctatgtgttaagcaaagcataggctttgctcccctacagagcttggcatttaatgcagaggctacttttcctaagcagaataaccaaaagaattccatgtccaactacagcaggataaggaaagctgtgaggtattttattaattagaaaatgctggatcctcctgtctagctgaggtaaggatgaactttgacctcagagcctgcatatggtagtgtttatgcagagatgtagtcccatatagacaaataaatatggttgtctttatacatatatgtgtatacacacacacacacacacacacacacacacacacatctcacttagctagacacagccccatcttgagggcagagagtggtcttgtctttccagttcacctcttccttc

SEQ ID NO: 847723 - DNA, 620 bp, Homo sapiens
taatttgaattaataaggtgtttacttttcaatagaatctctactgctctttcatgggctttggagcaaaagttccttctgagtgccaactaagactgaagagacaacagtttcaacagttaaattaaaaacgaatgtacatttagatagtccttgaatcctgctagcaggagtatggataagtattatctttctggaaaataatctgaaatagccatccagagacttaaaatctctatttctttttttttttttttcaagacggagtttcgctcttaagctcagcatagagtgaagtggtgggatctcggctcactgcaacctccccaccgccgctgggttcaagagattctcctgcctcagctgggattgcaggggtgcgccaccatgcccagctaatttttgtattttcagtagagacgaggtttcactatgttggccaggctggtctcgaactggtccaggctggtcctgacctaaggcgatccacccaccttggcctcmcgaagtgctaggattacaggtgtgagccactgcgcccggccttaaatttctatttcttttaacacattaattctacttctagtggcccagaagcttgaaccaatatgtatgaataa

SEQ ID NO: 847724 - DNA, 305 bp, Homo sapiens
ttcgatttttacttccccattyctgaattcagcacacaaacaaaagccgagattagcccaagaagagagatttctcccaactccccatttcactattcctctaacaatttttctgcatttgcaacccagaaagcccagggaaagcctgggtgtacttgcctgttaacagcggaggtccctgtcacactggattcatcaaggaatcagtttaattaagcctgtagtgctaacagacctcctgtttttaaaaggagacactgctgctataagaagttcccttttcctgggcacataatcctatttta

SEQ ID NO: 847725 - DNA, 654 bp, Homo sapiens
aagtaacctaacatatagtataatctaaactacaatwtagtcagagtctaaaactcatccctataacctatattaaaaactaaactctatgcctttaagaatgattctcactaaaacaactacaatgtatgcttgcctaacaacatctacaattttagaaccaaaatgaatgtataaaatcatggtttaacagaaaaccagggtcaagtcttttccagagtcacaaatctagtcctcaaaagtcatacatctttgaaatcatgtcctctggggaccagtataatgtactgtttaaaaaggcaaatgtttagattggtcaggcatagggtcagattctgtctaaagatacttatttcttaaaattataaggcagcattaatgtcagtaggttactgacatgtccagaaagctgaaaatgtgagggcttctgtttttaaacactctagagtattaacctgagtgttacaaccatttttagttcagttttatgcctatgagaagccactgacatagacacaattttcatcatcttggtttactggttttattactggtcctgtccaaacaaatggagtggtgtcattctgtcaattgtcatccagccagtaataatttcattacagatgagttttttatgaacatgtctaagtaaga

SEQ ID NO: 847726 - DNA, 603 bp, Homo sapiens; identical to SEQ ID NO: 838401

SEQ ID NO: 847727 - DNA, 599 bp, Homo sapiens
cctctggccttcttcctagagaacaccaagaggaatgctctcaccagtttggttgaaaccttatttttyagtttgtgcacattcaatgtcactgtgctaagagtgaccggatgcattagtcagttttcatgctgctaataaagacatactggcccagcgcagtgactcacgcctgtaatcccagcactttgggaggctgaggcgagtggatcacctaaggttgggagtttgagaccagcctggccaacagggagaaaccccatctttactaaaaataaaaaattaaccaggcatggtggcgcatgcgtgtaatcccagctactcaggaggctgaggcaggagaatcacttgaacctgggaggcagaagttgcggtgagctgagattgtgccattgcactccagcctgggcagtaagagcgaaactctgtctcaaaaaaaaaaaaaaaaaaaaaaaaaatacccaagatgggtaatttataaaggaaagaggtttaatggactcacagttgcatatggctgggaaggcctcacaattatggcagaagtcaaaggaggagcaaagtcatgtctcacatggaggcaggcaaggagcttatgc

SEQ ID NO: 847728 - DNA, 678 bp, Homo sapiens
aaattacactttgactatttataaaatgtgtgactttgagtgcttcgccgtaactctycaggaaatgaggacaccagtacctgcagcagccacaagccctgactcgcagacgagtggctttgggcttttagagaatggccagagagtgtccctctggggtgagaggattccaagaaggtactggatacataatcattttgtatgaaatctggatgccaaccacctaagactcctggtctttcagaggacagaagtccatacgagcatttccaggcatctgggcccagtgctgcggctttgcttgctgccagagaagaccacctgggtgtggtcacaaccacaccactgggtggacagcacaccctacccttgcccctggcagagcaagccctgatcaggtgttagctacaccttaacacagcacaagccacgggaacacttccacggcactgtcacacagtggtcgtgacggctgaatgagctaagatctgtgatgcactgtgccagtcaggacctgcaggagaaagaactcgccccacgaggtccagaggaaaagtcgctaatcaaattacaactttgttacaagagaaacttgggactgtaacacccttcccctacaccagaaagatgttgagagaccaaagaatgactggggccagtccagtctggtgagcagat

SEQ ID NO: 847729 - DNA, 624 bp, Homo sapiens
taataataaatatccttataaactcatcccaaatgaaatgcatcaatcacgcacaaagctgtatcacttacattgccaaccragtgggattagctcaagttcagaaaaatatgaacagatataggaatacaatgctgaccctgacaacccaactaactaacccagtcacctggatacagggaaccacagctcacaaagtactgccaaaatacatgtcacaagtccatgaactccacttcctacactctgctcactcggagccctttaaattattactccaaatatgctgaattttccttccgacataattctagcccgttaccctttggtgtctgcaagcacagatttagaagcagcacattaggaaacggaggtctgatggagacaaggccattaacagcggcaagtgcactcagcagagaaggaaaatcaactgaagagcaaatacaagcatataaaaaacacagctgtctttggagaccacacagcctccatgggccaagggcatcaccaggctacaggcaagaaccacacatgaagacgcccagagtcaaaaaagggatgaggagtatcattttctcatgaagaacacaggaaatggtaccaaccacaggacagaatgcg

SEQ ID NO: 847730 - DNA, 609 bp, Homo sapiens
cctccacgtttaatggcttttctaccttttttttttttttttgaaacagagttgctctgtcgtccaggctggagtgcagtgggagccatctcaactcactgcaacctctgcctcccgggttcaagcaattcttctgcctcagcctcctgagtagctgggattacaggtgcacacgaccatacccagctaattggtttttttttttttttttcctatttttaatagagacagggtttcgccatgttggccaggctggtctcaaactcctggcctcaagtgatctgcccgcttcagcctcccaaagtgctgggattacagacgtgagccaccatgcccatcctcctttggtttcctcttatcctcggctcctctgggcatttcctcttgagcctctcctaattttctgttccgctttgatgcaccccccggcccacccaagctcgccttcctatccttgttgatatttgcatcttgtccttcgtgggattccaggtacattcttggtggacttggtggtggttatgtgtgcggttggacggacaracttgcttttagcagccacttgtccttgctggcagccactggtatttatatgtctgtccccagtgc

SEQ ID NO: 847731 - DNA, 617 bp, Homo sapiens
atttattcttttgtgtttgttgaaccaaccttgtatcccaggaaygatgcttactttatcatggcaaattaactgtttgatatcttgttggatttggtttgcagtattttgttgaggatttttgtgcctatgttcatcaggtatgttggcctttagttttcttttttcattgtgtctttgccgtgttttggtatcaggctgatgttggctttgtagaatgagttgggaaagagaccctcctccttgtttttttggaatagttttagtagaattggtaccagctcttctttgtgcatcttgtagaatttggctgtgaatccatctggtcaggggcactttttgattggtaggttttttgttattgcttcaatttcagaacttaatactgatctgttcagtgtttcaatttcttcctgattcaatcttgagaaattttatgtttccaggaatttgtgcatgtcctctagattttctactttgtgtcagtagaggtgtttataatagtctctgaagatcttttgtacttctgtgggattggttgtaatgtcacctttgttgtttctgattgtgcttatttgaatcttctctctgtttttcctttgttgacctagctagca

SEQ ID NO: 847732 - DNA, 608 bp, Homo sapiens
agttatcacaaatatgaccagtgggagccacagagggttgactcccatgtcttaggacatgtgctaccattttttgactacttccttacgttttggaataagatattccaggttgttctcataacccacattgaccaagttctggagtcagccatttctctgaggagccctggtgtttttgtagtggagaatggtgttaaaatcaagatctgggtgctaggtgtgctcattgctactggggtgtctttgcttctagtttctagtggacaaatttaaataatatatgcttatatatacacatatacatacacacacctaaatacatgcacatacatacatatatacaccagcatgcatgtacacatatataggcatatacacatacatatgcaaattttagaaatcatagatttataccagtgctgctaatttcaattcctcccctcaggattcttttttgctttttctgatatttttataggccttcttcmcagtgagaaccttggctctcaagcacatcaatatatttattctcttgttcatttctataatgcatctcaggtagtttcagaattgcttactccacactactacaaaaaacaaaccta

SEQ ID NO: 847733 - DNA, 631 bp, Homo sapiens
ccttgtaattcatttgtaaagataacaatagttatcaaaagaaacttagtgtggccattatatgctagttaacaaatatggcaamtggaagttggtttctacatctctattgtaaaataatttgaattctttttggattttaataattgactgctttaattgtcctgagatattaataaaatcaaagtatttttcaaaattaaaatttcatataatacttaatttttagttcttagaactttttatggtaatggtaatgaatacccaggtaataataatagcttaactttattgagcacttttgtacctggcactgtacttagaatttatatcatatactcctcaaaacaatcttaagaagtagtatcattttaatgccatttttaaagatgaagaaactgaagttttataatgttaccttatactcatatcacatagctcataaatggcgatgtcaagatacaaacccaggctctttgtagccaaaggccatgtactttatttcaccctgcctctcaaggttttattcatttggtaatcagggcaataactagactccacatcattcaatgcacatgaattaatgtagtgtgttcttacttgtaaatgattctaacatttgccagttatt

SEQ ID NO: 847734 - DNA, 611 bp, Homo sapiens
agcaaatggaaagcagaaaacacaggggttagcaatcctagtttctgacaaaacagattttaaaccaacaaagatcaaaaaagacaaagaagkgaattacataatggtaaagtgttcaattcaacaagaagagctaactatcttaaatatacatgcacctaatacaggagcacccagattcataaagcaagttcttagagatctacaaagaggctagcctcccacacaataaaagtgagagactttaacaccccactgtcaatattagaccgatcatcaagacataaaattaccaaagatattgaggacctgaactcagctctggatcagatgaacctgataggtatctacagaactctccacccaaaaacaacagaatatacattcttcttggtgccacatgggacttactccaaaatcaatcacacggttgaaagtaaaacaatcctgagcaaatgcaaaaagaactgaaatcataacagtgtctcagactacagtgtaatccaattagaactcaagattaagaaactcactcaaaatcacacaactacatggcaattgaacaacctgctcctgaatgactcctggataagtaatgaaattaaggcaga

SEQ ID NO: 847735 - DNA, 276 bp, Homo sapiens
tttgccaaacacccttgtccttcaaagatggttcaaaatgtgagtgtgaaaaagatatttattatccttctaacatattaatagctraggtattactacatcttttctccatgttttgcaaacatgtgtattatatatgtttaaatctatatttatttctttacatatccataaccagtaaaacaggtgagatcacatcaatattccaattcctgtccaacctcacaaaattgaatttccctctgttccatgtttgcagctccctctactgacagt

SEQ ID NO: 847736 - DNA, 672 bp, Homo sapiens
gccttttcttggatcccttctaaattaaaacaaaggtcacatgctttttaaaggcatgagaaaatgcatactcctctcttctgacagaagaaacagaagcaaattgaccgcagaaaattattcaaaatcagtagtacatttttctatgtacttttttttttttttttttgagacagagtctcactctgttgcccaggctgaagtgcagtggcacgatcttggctcactgcaacctccacctcccgggttcaagggattctcctgtctgagccccctgggtagctgggattacaggtgtgcaccaccacgcctagctaatttttgtattttttatagaaacagggtttctccacgttggccaggctggtctcaaactcctggcctcaagtgatccgcttgtctcagcctcccaaagtgctgggattatagacatgagccactgcacctggcctgtactttgtttcatataattaaaagcttatttatccaaatcctgatttcttaccttgataatactgtgttttgatgtacatatttttgtagctaatatactcacagtttcctmaaatatttgatttcgatttgacagattttaaatactattgactcacaaataccactatcaaaaatagtatattttaaaatataaatgctaggattgttaataatttt

SEQ ID NO: 847737 - DNA, 543 bp, Homo sapiens
ggctttatgacaagcatgtgctatgtagagttaagcacacagagatccaaaacctttgagatcatttctgtgttaagtgaaagtcaatgtataatgagcagatttcaaaagtaaatatgtgtatgtcatgatagtccttaaaaaatgcttttaacattatccactcattttaacataaaaaagtttctaatacataattttataaaagaatcataagaatcctctaaaacaaagaagaatatttaagggttaaataatttttttgtcacaaaaatactatcttggagggaaattagagtgtttggtatgtcttgtgattggtttgaaaggacaagacaaaaagttttggttaaatgcgagtgtacctttctgcaagacctggtatcatctggggtatagaaatggcatcaggcatttctatttatttatataagatggagggtgctgcagtcttggcccttgttgcagaactttatgcaacacctgtgcccgtgtttrcagggcccttctcatcatttaagcctcattaaccacaccagaact

SEQ ID NO: 847738 - DNA, 614 bp, Homo sapiens
tacaaaatgtgtattgttgaaaagtcctattctacattgataaaatgtttttaagaatgwgagatttaataagccctgggcaaactacttttatgaaatgagcaaatattctccatttatctagcctataaatttgaattgtcaggttaatatacacctacacttaatatagtaatgatcatgatgatataaaaccaccaattagctctagatctgtgatcagtcttgtacataacatagtcaaagataaaacactcttggccttaaggagcttgcattataagtcagagataaaatataaagagagtttgtattcataggagaccagatctggaaaggcctagagatgggaatgaaaatgccttctgagttggcatgagaggaaggccatagtattatttagtgatattttccttttgtgtcatgaaaacagactgtcatttagccttcccaactaagatctcaggttttgcgtgatcttcctaggaacactgtgaccttttcaactggcctcttggcgaatcatcctgggcagcaagatggcttccctctctgggatttgatggctacctacagaatctctggtgtccttaggtaaaggcctcatgtgtcca

SEQ ID NO: 847739 - DNA, 630 bp, Homo sapiens
tattcctagttcacactcaaccccacatagatcttccctctctgtattccacaaayaacttgaggttgccgtgctgttttagctgtctgtttgccacctctttttctctgtagactttgtgctttcgtgtacatcttgaacatttcagaagtagctacattgtcaacagtcacttgttaaacagtccattttttcaaattactaatttttcatattaaagagtctagttctgcttcctcaaagaattttaacatgagatatcttttttgaagtttttcatttaaaggcctggcacggtggctcatgccagtaatcccagcactttgggaggccgagatgggcgaatcacccttgtgattggtggatgggccaagagttcgagaccagcctggccaacacggcaaaaccctgtctctactaaaaatacaaaaattagccaggcgtggtggcgcatgcctgtagtccctgttacttgggaggctgaggcataaggagagcttgaccttgggagggggaagttgcagtgagccgagaccgtgccactgcactccagcctgggtgacagagcaagacttcgtcaaaaaaaaaaaaaaaaagaaagaaagaaacagaaagaactttttcatttag

SEQ ID NO: 847740 - DNA, 596 bp, Homo sapiens
tttaacctggtatccaagcagtccagattcccgttcatctggtagctcctctgtgaatcgtctcttctgtgcctggggctgacttgggagtgggggctggggctggggctggggctgggggccagcaggcaaggcagttttgacaggagcagcaggaataaaaggaccacccatcggactctgggaccaaaacaaaccaaggaagaaaaaaagtgtgagaatgcccaaggaataagtaaacaatgattacaatatactttaaggatcaataagtatcatatgaattttgcatcttcaggtccttagtttccttcatgtataatttggtaacattatcacctaagccttctcaccttcatcctagggaaacatgaaattgacaacctatatacagtgctttgaacttttaagaaaactctgttatgcatttgggctactaggagtaaacatgaccattaacaaacagaactccaaccactgacagtcgaygtgattagctttctgtaataagctttctgttatttataaatgctgctaatgcttgtggaagaagcaatttcatcttccactcccttagttatcactaagctactatg

SEQ ID NO: 847741 - DNA, 377 bp, Homo sapiens
aaggaagaattctgggtttatgtacttttaaaatatgttccaaaattttagctcccaggtatataaaatacaaggctgggtgcagtggctcacacctgtaatccyggcactttgggaggctgaggcaggtggatcatttgaggtcaggagttcaagaccagactgaccaacatggtgaaaccccgtctctactaaaaatataaaaaattagctgggcgtggtggcatgtgcctataatcccagctacttgggaggctgatgcaggagaatcgcttgaacctgggaggcagaggttgcagtgagctgagatcgtgccactgcattccagcctgggtgatggagcaagacttcgtctcaaaaaaaaaaaggtattcctc

SEQ ID NO: 847742 - DNA, 568 bp, Homo sapiens
ctggattataccaaggcctaactctgaggccagaaattaacagctttgtaaaagtcagagatagttaccttaccacctcctaaaaccatagtatcttcacatcattaggagctcgagaagtcatcatgttcatgccttatggctcaaggaagagagcacacaaggacactaatggtattcagaaatatagatttcaaagagtccttagtaatctattctgaaatttaacaaccttcactgtgagaagtaggtttgtttttcctttttctaacctcagtccctctggattgaggttaagcttcctctggttctgtcattttgttcaagggaacatgtctgagagatttatgccaagatcctatgttattttcatactcctttcagaaagcaaaatatatgtgataaagttgcaaacatcttggttattgtctctctgggggctgggttacggtggctcacacctgtaatcccagcactttgggaggctgaggtgggargattgcttgagccagggagttcgagagcaacctgagcaacatagtgagaccctgtctctgcaaaaaataaa

SEQ ID NO: 847743 - DNA, 521 bp, Homo sapiens
ccctgtctctactaaaaatataaaaattagttgggcatggtggtaggtgcctrtaatcccagctactcaggaggctgaggctggagaaccacttgaacccaggaggttgcggtgagccaggattgcaccattccactccagcctgggtgacagagcgagactccatctcaaaaaaaaataaaatgtctttccaagaataacatatttcctttaaaacccgcttcattcatgaagtccttttaatacgctgttaaataaaggagggctaaaatatgaaaatggaaaatatccagcataataatccttaaccttttcatttgaactttaagggtacattttgcagttacataactctgggaactatatgcaaaccttggggtctgtatatgtatttttctggtaatgttatagttgcattgtgctatgagtaaaaaagtttatgaatttcagtgtatggatgggttgtggaagaaaacagagaaaccacaagcagaatatttatagatttatttataatgaaa

SEQ ID NO: 847744 - DNA, 648 bp, Homo sapiens
gcatcaccacgcccagctaatttttgtagtagagacagggttttgctatgttggacagtcaagtcttgaactgctgggctcaggcgatctgcctgcctcagcctcccaaagtgctaggattacaggcatgagccactgcacccggcctcttgttggttttttataaggaatctgccatatatcagtgaaatccttgactatggaaatgatgaaaatcattttgcaaagcagtattgcaggtggggctcacatagtcttcagcttgtgcacaattgctattacttttgaataagtattgttagcctgcagttgaggaggagaatcatgggccatgtgcaaaactctagacatgttggttttcttggccccttatagaattaatacaggtaactctgcttttgctcaaatagacaaatactcagaggcatatgaattcccagagaacaatacagtgaaagcaaggactcccttataaaccagcttcttagtttttgcttattaatttcagagaacgtggtggtaagaagggaaaagattattgccgaactagacctgaaaaattgtcaaattattcttggccaaagtggtttggagtgtttgaatgtacrctaataaaaacaagcactattgttcaacttttaggtgtgt

SEQ ID NO: 847745 - DNA, 576 bp, Homo sapiens
ttcccagctttctagaggttgcccatgtaccttggcttatggccccttcctcgctttctcacagccagaaatgttgggccatgtctttccactctgccatctcttgggctttccctcttctgtttccctctccygattttctttctttctttttgagatagagtcttgctctgttgccaagggtggaggacagcggtgtgatcttggctcactgcaacctctgccttccaagctcaaacgattctcctccctcagtctcccaagtagctgggattacaggcaggcaccatcacgcccagctaatttttgtatttttagtagagatggggtttcaccatgttggccaggctggtctcgaactccttccctcagtgatcctgcctgccttggcctcccaaagtgctgggattacaggtgtgagccaccatgcctggccccctctcccacttataaggacccttgtgataggatccaccaaaataacccaagccaccatccctattttaagggcagctgattagcaactttaattctctctgcattccttaattctatctacatcctctttgctatgta

SEQ ID NO: 847746 - DNA, 634 bp, Homo sapiens
ttccttttttttttctgagagggtctcactgtgtcacccagtctgtagtacagtggagcaatcacagctcactgtagccttgatctccccagctctggtgatcctctcacctcagcctccagagtagcygggactacaggcacgcaccactacacccagctaatttttgtattttttgtagagacagggtctcactatgttgcccaagctggtctcaaactcctggtctcaagtgatccttggcctcccaaggtgctgggattacaggtgtgaaccactgtgcctggcccgtttcacccatttctttctttctttctttcttttttttttttttttgagacagagtgtcgccctgtcactcaggctggagtacagtgatgcgatctctgctcactgcaacctctgcctctcaagtttaagcgattcttgtgccttagcctcccaagtagttgggattacaggtgtgcatcaccatgcctggctaatttttgtatttttagtagagatggggttttgccatgttgcccaggctggattcaaactcctgacctcagctgatttgcctgccttggcctcccaaagtgctgggattatttgcatctctaacagataagacatgacctaatcattctca

SEQ ID NO: 847747 - DNA, 588 bp, Homo sapiens
tgattttaattaatttattcaacaaatatytattgggctttactgaattcttgttcttgaggaaagcagatgaggttccctggagtcaaacactttcactgcagccaatcatggagaaacagaaacttcaggtcagttgttttagaatgcaaaaggacaagaagatcaaaattttggataactcaaaattatttttagttaaattaagagttttaagatgacgcttgacagaacacaggatgagtcagtccagaatagttgtccaggactcaaaatgcttattgattaaaatagaatacatcctactagaatcattttaagattgagagcaagatgaaaaggacgttaaagggagagggaaggaggaagagtggagagagtagtagacacacaagaactgttctccacttgggaaaataagccacttgtccacagcctcaaaaccaaaagaaaggctaatcagagataacaggggaatagaacccagagggccaactgacaccaagaaaatagctttaacttacatcaaagagggctttaaaatggagaagcaatccttctccttccaggcccaacaagagctgaaag

SEQ ID NO: 847748 - DNA, 630 bp, Homo sapiens
agttccttggatagaaaataaggttcaaaaaggtcacacagataattagagacagattacaaaaccaagactaaagtctaagtcttctgactcagtttagtgttacttctatcaggctaaattctccaactaaagtaattatacaataaaaaattgttaattatgtactgaagataagcatcaagttaatgttgaaagaagggaattagggaataagactgacaactctatggaacttaaaatttaactgagacagaaaaattacaataaaacacacacaagcatattttagaatcggaattacctgtccaatgtttcccaaaaccgtaagaacactggtctatccaaatgacgtttgtgatagctgagttctaatactgttacatcccatttctgaacatttggatccagacgaacttcatcatacttcagatggaaggctttaactatagagagggtggagagaagttatcatttttactcaaaataaaaaaaaagaaaaaaatttctttattccaccaactgaagccgtattataactaaagtgatcttttaaaatattatctttaaaaacattcagggtttakacacgccagccactggacactaaaatgaggaataaggtaagat

SEQ ID NO: 847749 - DNA, 612 bp, Homo sapiens
agatgaataaagaaaatgtagtatatatacacactgaaatactgtgtggccataaaaaagaatgaaatcctgtcatctgtggcaaggcgacatggacagaactggaaggtcattctattaagtgaaagaaaccaggcacagaaagacaaattttcctatgttctcacttttatgtgggaacgttaaaagttgatctcatggaggtagacagtaaaatgataagatactagagggttggaagggtgtgtgtatgtgtgtggcaggagggaaggagagggatgaaaggtggttgattaatgtgtacaaacatacaggtagaagaaataaattctttttttaatttctaacttttaagttctggggtacatgtgcaggactgttacacagttaaacatatgccatggtgaacagctgcacaaaggaataaattctaatgttcaaaagcagagtaggaggctatacttaacaataatgtattatatatttctaaacagctagaagagatgacttgaaatgttcccaaaacacagaaataataaacactcaaggtgatacataccctaaatactgacttgatcattacacawtctatccatgtaacaaaatatcaca

SEQ ID NO: 847750 - DNA, 536 bp, Homo sapiens
ctgaagatggctacatgaatcaagyatgttcaatgttcccttctttcttcaaaaaagccctttaggaaaaaaaaattctatttacttacttccaacacttgctttcttgttttgtcttttatgagacagtgtctcactctgtcgcccaggctggagtgcagtggcgcgatctcggctcactgcaatttccgcctcccaggtccaagtgattctcgtgcctcagcctcccaggtagctgggattacaggcatgtaccaccacgtctggctgatttttgtatttttagtagagatggggttttgccatgtcagccaggctggtcttgaactcacaatctcaggtgattcgctcatctcggcctcccaaagtgctggaattacaggcatgagctaccatgcttggctcccaacacttgctttctattcgtatctactacagccattaaaataaatactttctgatactaataatttatattagggtaactatgcctctttgcaaagttttagtagaattttaagtttcgatattttaca

SEQ ID NO: 847751 - DNA, 588 bp, Homo sapiens
acagcagtctggacctgttgcagagccttctcctgctctggaccccactcaaaactggcagcyttttgggtcactcgataaatggaccggagtaacacaccaaaataaagaatatgttgcctccaaaatccaaatagacattgtacctttttcttggttgtaggaggggccacatgaagcaagttatccttcaccttggaaggaatatctcaacaggccccacaccactggatccctagaaattttactgaggtagaaggtttctgaattttagtcaaatttatttcccatcctctggcatgcaaatgactcaccaataagaccagtgtgtttgctacttcttgctcactggatccaatcagcataatgtcatcaacgtaatgggccaatgtgatatcttgtggaagtgaaaagcgatcaaggtctctccaaataagattatgacaccaagctacagagttgatataaccctgaggtaggacagtaaaggtgtactgctggccttgccagctgaaggcaaattgcttctggtgggccttatggacagaaatggaaaaaaaggcatttgccaaattaatggctacatac

SEQ ID NO: 847752 - DNA, 630 bp, Homo sapiens
tttggatgggggattggtgcatttccggttgtatgaagaattgttgtattgtgtcaggcataatgatcaccttattattgtctttatttgaagattatgtatgatctcaggagatgtgtatgggtcaaggtgacatggggtggactcgtgatggttaataccgagtgtcaacttgattagattgaagggtgcaaagtattgatcctgggtgtgtctgtgaaggtgttaccaaaggagattaacatttgagtcaatgggctgagaaaggcacacccacctttaatctgaatgggcataatctaatcagctgccagtgtggccagaataaaaagcaggcggaagaacgttaaaagaatagactggcctagcctcccagcctacatctttctccaatactggatgcttcctgccctcgaacatcggactttaagttcttcagctttgggattcagactggctcccttgctccatagcttgtagatggcctattatgggactttgtratcatgtggattaatactctttaatagactctgatatatatattttattagttctgtatctctagagaaccctgacaaatataacacatatttgaaaataattaaacttgattttaaccaatattat

SEQ ID NO: 847753 - DNA, 601 bp, Homo sapiens
agccgggatggtctcgatctcctgatctcgtgatccgcccgcctcggcctcccaaagtgctgggattacaggcgtgagtcaccgcgcccggccataaraatgttttaagcataaaatataatctgtgattttatatttttatccattatacaaggtgatatcacacttagaaatgaaactttttgtctttttggatctttatgtatttaatggtttataaaacattctaatggatttgtggaacatagcacaatagctatgagttcattttatagttgatgagtaacatacttttatattttaaaatatgctcagaagtcatatatacttttatgcatgcagagacttacaagtaaagcatttcaaagccatgttttgattgaacagggacttaagagaaatctcaatatgttagcatcttatttaaaaatatgagcaatcaaatagtttatttttatatataataaatgtcatattttaaaatgctacagatgtaattttctgtgaaacttataagaaaagaatatcttaggttctcttaaattacttagttcctaagcataagaaaagatgggatgtccacacctagtagggtgtggtt

SEQ ID NO: 847754 - DNA, 531 bp, Homo sapiens
ttctacatcatcagtttacccattgtcctggggcatccctatcagcaccaacatgctgtcatatttcctatcatataaaattctctcctgtggccctcatctcactccaatatctaccccattcctcaacaccccttttcagcaaaacatctacagagaagttttctgtatttttggtttcccttttcttgtctctcatcctctctggaacttaaactaatttggcttttctcatcaccactccatgacctccacatggtcaaacacaatgtccagtcctcagtcatcagcttacctgacctctcgtaagcatttgaaacaattgtcactcctcttgaaatattttccacacaatgggacaccatttcatcttgattttcttcttacctcactgtccatcccctctccatctcttttgatagtttcccctcattccttaaactctgctttatttttttccatactgtttatcaccacctgagagactgcgtattttttkttgttgttgttgttctcaattttctctatcta

SEQ ID NO: 847755 - DNA, 627 bp, Homo sapiens
ctcctagcccttgtttctaatcccctgtactctagctcccactcccaatcgagccacccccaaccaaccatgacaattcacagctctcatcctggagagatggtttccctcatgctgggacagttctggggcagttcagaattgccaggactgtggattcccagcagcttggcctggtggacacacggaatgcaagacaacagcaaacccaccttcagccttggtaagtgacaggaccccttttccatgaccagatcctggttaccttgatactatttctattttgtctccattcccgtctgggcaatcctcttcagatgccagagatttccttttttttgacagtttgctcctttcctctcatgcctggtcagccagcctgcatgaggttctctacgtttgagactggcttctccacggaacttggtctgtagccacagagcaaactgcagggccattgacagagaatgaagaggagagtgaagagtggaacacatctaatgtgttctctggagggtaagtcttgtcgatctgccctgcattcaagtgagtrcaacccctgagaatcacacatagggcacaaggtccctgctgtagatagatggggacttaggtttgtttcctttg

SEQ ID NO: 847756 - DNA, 587 bp, Homo sapiens
ttatttaatcttctagaaatatttattgtggagattctgcgaagttttataaaatctattagtataactcttatgacttactactttagaatttattgatatttatttstaaattcacttgtgcgctttctttttattttttattttagccctacttacactaactcttgactcagtaaatgttagtatctgtctccctcctttgaccaaagtaatattagcgtcggtgttggaaaggaaaagattgcagtcatgtaggcccctatatccatcatttatcattgtcagccctggatagcatggttttgtggttcctagcctgtgtagtttgggggattgggtaataataactaataataattattaacagtaataatagctcacatttactgtgcaccataccaagcagtgttttaagttattttatatgtattttttcaggtagcttgcgcaacaattttatggggtagttgctgttattgtcctcattttacagaaaaggaaactgtggggcacagaaaggctaagtattttgcacggtgtcattcagctagtaaatggtagagctggaatttaaaaccaagcac

SEQ ID NO: 847757 - DNA, 590 bp, Homo sapiens
tatctggaggaaaatcagtattgaaggagcaattgttttgcagtgacgcatggggtggctcatagcactggaaacagcagacagtggaagaacagttgggagcctgtcaaaataatcccacatcgaatcsactagtatatccttttagtttatcctctcatatacctccaggttgcaccaacatctctccgtcactactcccaacctagctttgttagtcttctctcacccgcaaactgcaaacatttcctaaccagaccattggcatccacccttgcccttcccccatccatctttcagacactgcagttggaatatcatttgcaaaattaacatctgatcatgtcacccttctgcttctcattgttcttatgataaaaacaaagcagcttgatgttgaatcacgttaccccttgcttttgtagtttcaattgtaatgaccgtctctgagtcttctaaatgtgccacgcttccacccacctcagggcctttgcacacactgttcattctgcgtggcagactctccctccacctcattctttgaaactttcctaacagtcatttcctcagggaaacattcactgacttct

SEQ ID NO: 847758 - DNA, 590 bp, Homo sapiens
tatctggaggaaaatcagtattgaaggagcaattgttttgcagtgacgcatggggtggctcatagcactggaaacagcagacagtggaagaacagttgggagcctgtcaaaataatcccacatcgaatcgactagtatatccttttagtttatcctctcatatacctccaggttgcaccaacatctctccgtcactactcccaacctagctttgttagtcttctctcacccgcaaactgcaaacatttcctaaccagaccattggcatccacccttgcccttcccccatccatctttcagacactgcagttggaatatcatttgcaaaattaacatctgatcatgtcacccttctgcttctcattgttcttatgataaaaacaaagcagcttgatgttgaatcacgttaccccttgcttttgtagtttcaattgtaatgaccgtctctgagtcttctaaatgtgccacgcttccacccacctcagggcctttgcacacactgttcattctgcgtggcagactctccctccacctcattctttgaaactttcctwacagtcatttcctcagggaaacattcactgacttct

SEQ ID NO: 847759 - DNA, 654 bp, Homo sapiens
aaaaatgagggttaattttcacattattaggtttgtatcatttaaaaagaggtcacaatgacttagaggtgtagctgttattagctataaagttcacatgcacaaactggccaagagagtcttaattacactgttcattattctaggtggaacattacttagattcagtatacccattttaattagagagaatgtaattaaagttaacccatgccttctacgtcacaggctgtaaaacacgtttaactaaaataaaaaagtataaacccaaaggcatccatctcagcatttctatcagctactgggagctcagcatcttgtggaaagtacaggacttctgcctatccaatgaagtctccacacacatatgaaagaaagtacagagtataaaatacatctagtacatggtcaaggaaaatttcaatgtgtctagtacgtggtcaaagaaaatctcaaaatctcactggagtagaaagagttaaagagatattcgttgatctgtgggaaaaaaagaaggaaatacagagaraaaaaggaggtaatcatataaaacttaaaaataatattttcatttcaatttgtcctttgtgtagctaaaagtatattaaaagttttcaatatacacttttttttaagtaaaagtggggcactata

SEQ ID NO: 847760 - DNA, 673 bp, Homo sapiens
cttctgtctttggcattccataagtggttgggttattctcaactatagctcctgtcagatgcctctttccagcagttcctgatctcaacttgattctagwaacatcatttcttccctttaccatttcaggtctaaggacagtaatggcttcctactgttgacagtctctgggtttcccagcactctttgttgacttttttaaccctttctacatttctgtaggtagtttcctcaaaattccaattgagcattccatctgcttcctaacaggactctgactaaagcatgcatgtgctgatgactcacaaattcatatttgacctcctctctcagctctagctgaggatatttaattgctaacttaatatctccacttgaatgtcataatcttgctcacaaaatttaggcctcctataatatttgctttttcagtgacgggcagacatcacaaggtattaagttggaaacttgtgcaagttagaaatttggaagttacccttgatatctctctctctccctcatgtctcccaatcaaatatcaagtcctactaaagccacctcctaaatagtacctaaatccatccacttctttccatttacacttcaccagtctagttcaaaccgtgaacacctatagcctggagtactgcaaaagtagtcttattagtcttct

SEQ ID NO: 847761 - DNA, 567 bp, Homo sapiens
ctgttcttgacataaggcctagtgtgtcattgccattcaattaatgcttgcaagtgagtgagtgagtgagtgaacaaatacatgaatggaaccaggctaaggacasagaaccatggcatgtcaccaccctccagttttacaaccatccactgataacacccttcagcctcctttgttcaccacacaatgattctcctaactgtgccctaatcctgggcacatattttcattctttttttccagaacaacactgcgtttgagagacctggggtgtctatggcattgcctagacctaccaggccagaaaccctatcagagagagtgataggttcagtttgccctgtttctttgcgctggcacctagggttatcaccttcttttccaagtgctttctggctatctgtttaaatattttgttctagaattttgggttaatcacaagccagtgtgtagtaacagaaggcacatatcacatagattcagattgtcctgggccccagcccaggtcgaccactttctacctgtgtaaccttagacaagccccataactgttctgatcctccattt

SEQ ID NO: 847762 - DNA, 595 bp, Homo sapiens
aggtaaagcaatgaacaagacagacatggttaccatcttcatggagctcacattctagtgggggagataacagtaagtaaaaatatatacaaggtaatttcacagtgtgagaagtactatgaagataaagtgaacaagaataactaagagggtgatatggtttgtctgtgtccccaaccaaatctcatcttgaattgtagtttccataatccccacatgttgtgagagggacccagtaggaggtaattaaatcatgggggcagttacccccatgctgctgttcttgtgataatgggtgagttctcatgagatctgatggttttataggaggcttttctcactttgctctgcacttctccttcctgccaccatgtaaagaaggatgtgtttgcttccccttccaccatgattgtaagtttcctgaggcctccacagccctgcagaactgtaagtcaattaaacctctttcctttataaattattgcgtatgtctttattagcagcatgagaacagactaatacagagggggagtccaccttaggaaagatagttagggaatggctttcacrgtgcgaaacatgtttgaactgaaac

SEQ ID NO: 847763 - DNA, 623 bp, Homo sapiens
cgaaacaaaacaaaacaaaacaataagccttatttagctcatgagtctacagcacagcaggaggtttctttgctctggacagactcawctcatctcagctggacttgctcttctgtctgtggtcagcgggcaagtcagcttgagctggcagtctcagatggccctactcaaatggatgggtggttagttggctttcatctggggcaatgggggtgattaggcccttgggtctcttgtcctctagcaggctctcccaggcttgtttccacggcagcagtagaattccaagagactgggtggaagaatgcaaggcctcttggagtccaggctctgaaatgacactctgtcatttccatcccattcgattgcacaaagcaagtcacaggctgacccaggtacaaggggtggagaaagagactctgccacgagatgggaggtgctgcaaagtcacattgtgaagggtttgattagtccattttgtgttactataacagaacacctgagaatgagtaatttataaagaaaaatgttttatttggctcatgcttctggtggctgaaaagtccaagattgggcagctgcatctggtgagggccttgggctgcttcaactcatggtggata

SEQ ID NO: 847764 - DNA, 536 bp, Homo sapiens
caggcagcagtctctcttagtactgcttttgctgaatcccacaggttttggcatgttgtgttcccatttcyatttgtttcaagaatttttttgatttccatcttaatttcttcattgacccaatggagcatgttgtttaatttccatgtatttgtatagtttccaaagttcctatttacattgattttgatattctgtagttggatcaaatgttctgtaaatatctgttaggtctatttggtctgaattccagtataaatccagtgattctctgttgatttttttgtttcaatggtctgtctaatgctgagcgtgggatattgaagtcccccactgtgattgtattggagtgtatctctcgctttagatctaggaatatttgctttatgaatcagagtgctttttcatgtttcccatatccttacattaatacacatatctgttcatctggtggaacagttgctttttccaattttttgaatttacttttgtaggggaggactttttcctgaagctgtatatatgttgtatatgtt

SEQ ID NO: 847765 - DNA, 481 bp, Homo sapiens
attacatgcctcctgatggaagaacacgccaccacctatgaagaaatattgccaaaagctggcactacatgccctaaactttcagtgttctcaccakaaaatgacaagtacttggttatgacaaagttcattaaaaatcatgataataggcagggcgcggtggctcatgcctgtaatgccagcactttgggagactgaggtgggcagatcacgaggtcaggagttcgagaccaacctgaccaacatggtgaaacccatctctactaaaaatacaaaaattagccaggtgtgttggtgtgtgtctgtaatcctagctactcaggaggctgaggcaagagaatcacttgaacccgggaggcagaggttgcagtgagccaagatcacgccactgcactccagcctggcaacagagcaagactccgtctcaaaaaaaaaaaaatcttgataataaccatagctgctaacacttactatgccccgg

SEQ ID NO: 847766 - DNA, 591 bp, Homo sapiens
tttttatatctttttgtggcttctctgccctataggatacacttattaattaaacatcaggttattcattacaaaagcattttytaaaaaaagcagtattgtgtagtcgctaaagtcatgtgctctgtttccaaagagcagttcaaacaaagactgagtgatcctgaagaattacccaggttctctgtgcctcattctaaaagtgaagaatgatgaaaaatataaagaaaatgttgagaattgaacaaaaagggaaaagaaacttcatgttattaatttaggaggtcaagtatcttaactaattgcaattccataaagaacacacaaaatgaaggaaacattacagaaagacaaggtagttttccagaactgaaggcctgagcctctatatggtgaaggcccaccatataagtaagtattttatagttattgatgctacagttaatgcagttttaaatttttcagaaatacaattgattattttatattgaacttgcatatttagaatttgtcagtcttaattagttcaggtagttggctttatagattcctttgggttttgtataaaattaattatgtcatctgtgaata

SEQ ID NO: 847767 - DNA, 599 bp, Homo sapiens
ttccttggcttatagcagtgtaactatatataaccaatcaagctagagccaagggagaatattttaatttcttgagtctttaaattttatttayagttaaattgaatttaaatggaaactccctattcccagcactgcagtccatcctaatcttttcttattgcactatgcttttcctatgacccttttcaccatcagacacactggaatttccttatttctgaagtttatatttattgtttatgtacctttactaaactcagagctggatttttgcctgttttgttctctaatggatctgaagatttagaacagtgcctagcacctaataggcaccaagtaaacatattattaaatgaagaaaattataaatggataattcctattatattttcagtggaggtatatgaaatagtttggtattactataatccttaggtttaaactgagtattatgagagaaaattacttcagaaagtaatttgtttgtagaattggccgagcttctctactcagtgaatgtcctattgaaatctctgggttgtgcttttaaatgttgtgttgccaatgtgttctgagtttcttttattgacgtattt

SEQ ID NO: 847768 - DNA, 630 bp, Homo sapiens
tgtgcttcacatgatcactactgcagcagaatggtctatgtcattttccttctttggttttttcctgacttacattcgtgattttcaggtaagaaggcacartattagatttattcagtcagacttccttctcttagtccaggaaggtagactaagagaactttccataggcaactctcccgcctttttgaaaattaactgtttgtgatttggtatcataaacaagtgatgtaacttttcaggtgaattgtttctgtgtttaaagaagtagtgtattgctagcaagatttagccttgaaaatggggctataaaataaatttcagaaattcttacatagaatttgttatcgattctgtgtacttttacataggtcattctcaacatttagttttactgattcttagtagaaaccaaagaaaaacagggaactttatgaattgagaagcttggtttttccagattttaattggtacaaagaggatacctttgacagtaaaacagctgtctcactaccattagaattgatttacattcataatcacaaggtagcctatagaacatattgaaggagtgatctctctttaaggagcaaacttctatatataattttcttttctgttccagaaaat

SEQ ID NO: 847769 - DNA, 505 bp, Homo sapiens
gaagcttccgaggccccagactctaggatgggatccagcagcctttatagctcaagtctagtagtgactctatgtcayacccgcgagcatgctgtggtacaggtagaagagttggaaaggacgctaaaaagaattgagaacaagtaagtttattctgataagtgaggagtggagagaagagtaaggcaaggagaagggagggggaataaaggagacgttggtgcctgtatagataatctactttgttaattatgctcaggacaaactgttcagtccttctcatggattacctagctaggaggctccagattcctgagcctaccagttcttagaccttggtaagacatttgtgttcctttcagcgttagggcaaaaaggaggcttgagtgtaattgacaatcctggccacttgtcttgttaagggcttcctagtttcttcccttattatggagagttttctcagcctccaagaatgccggaccttgagtgtggtgactcaagtcag

SEQ ID NO: 847770 - DNA, 645 bp, Homo sapiens
ttaaaactaattctataatccataaagtgaaaaacattcatgtaaataattcagaattttctgaatattgttcatggcccactttctctcaagccttsagtgtctgggcttgtattaagctccagaagaattccttcaaagaccccaggaaacctaatgctgttcctctgcttatgacaaatctcagatcagttttgccacctggccacagggaaaacctcttaaagcctagtttaatatctcttcttagaaggaggaaaaatgatgatgatcaaaaattacatggggaaatgaacaaaaaataaagatgtagtcttaccctttggaaccaaacaggtaccctccaatggacaagagaattttcagtttgggattcctgaagtagaagaataagatgattatttaatttctggctgccagggaagcctttgtctaaagaacagagttcttaagtgtagagaaaatggacaattagggcctggctgtttgaactaaagtgaagttcagtgaagggatgaagcactggtgagaacagttaggatcagaaatacacccagagaaatatataggaatgaatgaatgaatgagatagtatgtcttagtgtcagcttaagaccagcttccctcctctaaaatccatgcagg

SEQ ID NO: 847771 - DNA, 531 bp, Homo sapiens
ggatcagaactttagagttgaaagggagagtttaaaaaacattaaattcaataaaccattctgcagatgagaaatgtggggctctccaaaagttgtaaaatataaccacagcagagcccaagaaagatgtgactcgcaatacaacgctcatacaccaagagactaagaaagcttggcctctttcctgtcttagctccagttctaatgtggacaagaaggacctctgcacaaactgagaacatcctgccagtgcaaagggttctggctactgctgcatttttgtccattcaggaaagatcaggtggttcccctacaacagttgcattggcttgaaattttttgacactaaggtcaacggaaagactgaagtcccaggaaaggaggaagattacttcttctacagacctgttacctcttccttcctcaccaactttsctgctgaattatcaaccccatgctcacctgcccagagagacttctggtccatggtggttgctcccatatccttggccagcttcttctgggatacac

SEQ ID NO: 847772 - DNA, 618 bp, Homo sapiens
agcattttaattgagttgggaaaatatgggctattttataaatggcgttgggataatgggccagccatagcaacactccttattggggtaagaactctctgactyggtctaataagctcaagccatgaagaccacatggcataaatatgagtgaatattttgatcatcttaaggtggggaagattcttctaagtatgacgtgatatttgaaatcataaaagaaaagattgataaatttgactatatgaaaattaaacatttaagtaccttaaagaacattataagaaaattttaaaagaggggtatatacatatgtatgtgtatatatatatatatatatatatatgacaacagtttaattttatttctaatgtacaaagagctcttacaaatcattaagaaaaagataaatatctcattagaaaaatgggcaaaggacatgaacaggcaattcacaaagaaaataactacaaatgcctgaaaaaacaaaaagacatttatttccccctccctataatcttagcaatgccaatagaaacaagcatcatttgccttctgttgatctggccaaacattaaggctgacaaaacccaggcttgatgagggtctggactaatg

SEQ ID NO: 847773 - DNA, 672 bp, Homo sapiens
atgagataattaaagagagaattgcacagtgccaagtgccttgcacggtcgcccactgtagatccttaatacctgtgagcttccatttctacttgtcatggacaggactggctgtcggagccgaccatagcaatgacagataccacttaatggtgacctgatagtgaagatcgtgtctcttcaatcagaagactgagtttttcctctgccatcctaggtggaagcctgaggctaagcctcttgtgggcaggaactgtctcctcactagcccttatgggagggtcctgtccccatgtttcttagcaggggagtgtcagccacctttcctccccatggctgggcttcccaagacttgcggtgcccagcaggccccagccgctgcctgcccagccctcagcctgtcctgcccgcggtgttctgctttggctcagtatcccagggccaagccactgggcagggatggggtttcagcctgatctttaccaccagctgtgtgtggctgggctgctgggaatttaggaaattggtgccagaaagaggakagatgatccagggaaggagccacgctggaggcagggggattgtatcacatggttgcatccccagggtccatttctaggctggccagggagagtgagggttcctggaaataagttatgtccccatcagcct

SEQ ID NO: 847774 - DNA, 508 bp, Homo sapiens
ccttatcagttatttacacctaagagggacctgtttattggttcctttctgagagaagagctttagacaggtcaagggggagagagcaagggaagctatagtttttatcggcttcataattttacacctttaaactatacacaggccatagtctctgtggagtttcatctgtctgcctcatggatagagaccagcctgtcccattttcatttgatgggaaacctcagggtggtgccataattgcaggaaggggcaggtggtgggaggggcttggctgggaggaggaactaaggctttagaaacagagtgagaggtcagggccccctgtgtgtccagccagaggaccctgcaggtgcagggctgcacttctctcctggccagggaggagcaggaggtgtattccatgttcgtccgcaggatggaggctgatgaggcctgagcctccagcagctcacagctcccctgccctccctacytcgccccaccaggatccgtgtcctgtgtcacc

SEQ ID NO: 847775 - DNA, 528 bp, Homo sapiens
taatgcattagcacacataactgggaaattaatgtgtagaaccagcttcaggcacaatgrgatccaatagagaaatggtatcctgagggctctatcactgtctccatttcttggctcggctttcctctgggaacgtgctttattctcagacaggatcatttcacacagttggaaagatgctgccaatgacctcagccccgcattgttgtggcttatgaacatcaaagaaaaagtgaccctctttatcatagcgtccatgtggccagtctcagggaagactctaattgtctttgcttgcgtcacaagttgatccattaaccgattattgtggccaggttgatgaataactctgattggcagtctccctagggagggtgagataccgtaattaactcatgtcaggcccaattggatgctaagcagggaaaaaacagattgtttgcttgtttttcacaggaatggataaggaaaggacaatgggtaacttgttttttattttacttttccagtaaaatttttctttaatga

SEQ ID NO: 847776 - DNA, 626 bp, Homo sapiens
tagcacacataactgggaaattaatgtgtagaaccagcttcaggcacaatgggatccaatagagaaatggtatcctgagggctctatcactgtctccatttcttggctcggctttcctctgggaacgtgctttattctcagacaggatcatttcacacagttggaaagatgctgccaatgacctcagccccgcattgttgtggcttatgaacatcaaagaaaaagtgaccctctttatcatagcgtccatgtggccagtctcagggaagactctaattgtctttgcttgcgtcacaagttgatccattaaccgattattgtggccaggttgatgaataactctgattggcagtctccctagggagggtgagataccgtaattaactcatgtcaggcccaattggatgctaagcagggaaaaaacagattgtttgcttgtttttcacaggaatggataaggaaaggacaatgggtaacttgttttttattttacttttccagtaaaatttttctttaatgaggacacatcacattttatcactttttaagagaaaattwtatatatatatatatatatatatatattcattatcatgagggtaatatttaggagagataaaagtcca

SEQ ID NO: 847777 - DNA, 550 bp, Homo sapiens
ctgggtgtcattctgaactgccctctctccttctccacccacaaccaaaccatcaccaaaatcaccatctattttgctttcaaacttctctcacatccctcttcttattgtcaattctactgccactgcatcacccaaaccagcttcaactgctccgtctccctcaccccctacaactcaaaagaaaacaggtgcaaggtgagaacaagaaatttgcaatggccgggtgcggtggctgacgcctgtaatcccagcactttgggagactgaggtgggcagatgacttgaggtcaggagttcaagaccagcctggccaatatggtgaaatcccatctctactaaaaatacaaaaaattagccaggtatggtggtgggtgcctgtaatcccagctactcgggaggctgaggcaggagaatcgcttgaacccaggaggcggaggttgcagtgagctgagattgtgccattgcactccagcctargcaacaagagtgaaactctgtctcaaaaaaaaaattgtcaaaagaaatccaaatgaccaaaaaacatgaa

SEQ ID NO: 847778 - DNA, 631 bp, Homo sapiens
tgtgtgtgtgtgtgtgtgtgtgtrtatatatatgcataaatatgtattttttgagacagggtctctgttgcccaggctggagtgtagtggcgtgattactgctcactgcagcctcaacctcctgaactcgagtgatcctcgccctcagactctcaagtagctgggactacaggcatgtgccaccatgcctagctcatttcttaaaattttttgtggcaacagagtctcactgtcttgcccactctggtcttaaactcctggctcaagcaagccatctgactcagcctcccaaagtgctgggattaccagcaccagccactgcacccacccattatttcttctcagtatgtagtttgctctttcattttcttaatagtgtttggaagagcaaaagtttttgatgtttagtaagtctaatttattattttttccctttatggctaatgctttttgaatactaagaaatctttgcctacttgaaggtgataaagaaaaagaaataaaaggcatacatattgaagaagtaaaattactctattctaagataatatggttatttatgtagaaagtcatggggaatctataaaactgctataatcaaaagtgaatctagcaaggatgcaagatacaa

SEQ ID NO: 847779 - DNA, 588 bp, Homo sapiens
ctgggattacaggcgtgagccaccgygcccggccgttttttgatttttttattatggccattcttgcaggagttaggtggtatcacattgtggttttcatttgcatttccctgatcattagtgatgttgagtattttttcataagttttttggctatttgtatatcttcttctgagaattgtctattgtccttagcccactttttgatgggattgtttgtttatttcttgctgatattgtttgagttcattgtagattctggatattggtcctttgtcagatgtctagactgtgaagattttctcccactctgtggattgtctgtttactctgctgactgttccttttgccgtgcaaagctctttagtttaattaagtcccagctatttatctttgtttctattgcatttgcttttgggttcttggtcatgaaatccttgcctaagccaatgtctagaagggttttttcaatgttatcttctagaatttgtaaggtttcaggtcttagatttaagtccttagtccatcttgagtagatttttgtgtaagctgagagatgaggatccagtttcatttgcctacaggtgg

SEQ ID NO: 847780 - DNA, 534 bp, Homo sapiens; identical to SEQ ID NO: 846998

SEQ ID NO: 847781 - DNA, 635 bp, Homo sapiens
ccttgcatgaaggctaagatgtctcctattaaccacatcaactggatgccctgtcaggagttggatgtatatgtatctttacatgtctagtaaactcgtagaaaggtctaacacaaatttttttgcagggccctgagaatcctcttatgaaacgactcattctagaaacagcatgaattgctggacccaggaataaagcctgagttaggaaggagaagcggtgattctgtgctgtgcaaccattgggtgcaagtttaattccaagggagagacagtgctataaaataaaagatggaagacttcttctcctatattctgtaacacactggagcccaggcaacactgctatgacatgccatcataacagatagcaacataaaagggagagagccattcttccacactctgcccatgatggcaccagttgggcctggggtgcacatggtgcccagtggcactgaccagaaacaatgggaggttccctgggacccagaaaaacaaagtagcagcagtcctggccartttagataccactttaatatctttccttgctgggattctcataaatatctgggaggagacttggtagaggtttggacttccgtgtctgatgaagaagtgaaatttgggtattg

SEQ ID NO: 847782 - DNA, 302 bp, Homo sapiens
ttatccctacatcttcccccgcctcctcatatgcataacctgtattaccactacatcctaaaatgcttggagaacagctcacacccccagcactgagctcttcagcagtctccaccatccagaatgcagccaatgagcaggaaatgaaggaaagagtttgagcagtcaacagaaacgccatagaccctgttcatggctctccgagagagggcactacaaattctttcctttcacacattttccaaagtgtaatttccctggggacacarattgtgctctcttggtctgattcttatgttaat

SEQ ID NO: 847783 - DNA, 579 bp, Homo sapiens
ctgcccatttcctctgccttattaagcaagaagaactggtttcagttaaaaaaaaaaaaaaatcctgaaagccactgatggaacagtctctgaagtgcgttcagggagtcacaggacatggaaggaaatggagggcacaggaacatgaattatggtgagcactggggaaatgcctgcttcgtctgggtgagaaacaggcaaagactttgaggtcaacaatggccattcataaacaaacagctttaacttattaagcatcaagggttttacaaatatttctcgaatgattttacatgtgttgtctcagttgattctcctaatccaaccctatagcacaagtactatcactttaaaaaataaactgaggctcagaaaggtttaataatttacctacccccagaagttcaagaacaggtaaaagtaattgaaggtggcaggagtcagaataatagttatgtggggtagacactaacaaggaatggccatgagggtgtctcctaggcaggagtgttttaaatcttgatcttgacctgggtaagttacatagyggcatgtctgggtaaaaattcatcaagctgt

SEQ ID NO: 847784 - DNA, 577 bp, Homo sapiens
aaacaagttgcttcaaaaaggggaatgaggtatgcactaggcaccctgctacctccttcagttcttccaggggcatccagtctcctctcggctagcagcccttctgcttcttgcagtgggcttattcwcctctatggctccaacagctaggccagctacctcatgcgctggcctgtgtgaggccaccaggtcaccctggggcctttctgctccttgaagttttactctgtgctcctgctgctcgccaccctgtcttctgatcctttagatcttgaaaagcagggatctgactggcccaacgcatctttcacaccaggtgatgagatgaatgtcccaggccagcttaaggcctgggacccctggggtcaggtgtggttggagaggaggggaagggacccaacaggctgctgagttgcaggggctgcaagtaggacagttcccccttagcagagaaagggtgtggaagacattctcaggctcagcctgtcaaagaaaatcttgaatattttggtctcctgagctgatctagaagaaagaaccagtatccgttgttttcatctaaaaaaaaaatctacat

SEQ ID NO: 847785 - DNA, 629 bp, Homo sapiens
attctcactgggtgaatgattattatgaaccaaggaagtcatttgaccagaagatcctattctctttgcattccgcttcctcagaattttaacaartgcaccaaagtgacattccatatttctgacttcaatatgggtatggtttttgccaattaaagaaattatttcatatttaaagattacaataaataaaccactaatctgtcaatcttcaaagtctgcctgaaaataagattagtttctcttgcatatgcattgcccaagtttcatgctacagaaatccgctctccacagccctgcaagtgtgagtcagtggagcaccagccacatcttgtggcatgccatgcttattttctggcatctgctgatctgatgagaaagggaacctgacctgagggaaggcaatccactggccagccagcaacctctggtgcattaaaatgaactggggtagtgaagtgctctgtcttgaaaacttggacttagataaggagaaatgtagtcaatttgtgctagtgacaaacacagaaaaggtcacaggacaaacaccgaaaagaatagagtagggacgttaagaagaaatggctgtgttccagccaaagttacaaagaagcggaaactgagtaagt

SEQ ID NO: 847786 - DNA, 629 bp, Homo sapiens
attctcactgggtgaatgattattatgaaccaaggaagtcatttgaccagaagatcctattctctttgcattccgcttcctcagaattttaacaaatgcaccaaagtgacattccatatttctgacttcaatatgggtatggtttttgccaattaaagaaattatttcatatttaaagattacaataaataaaccactaatctgtcaatcttcaaagtctgcctgaaaataagattagtttctcttgcatatgcattgcccaagtttcatgctacagaaatccgctctccacagccctgcaagtgtgagtcagtggagcaccagccacatcttgtggcatgccatgcttattttctggcatctgctgatctgatgagaaagggaacctgacctgagggaaggcaatccactggccagccagcaacctctggtgcattaaaatgaactggggtagtgaagtgctctgtcttgaaaacttggacttagataaggagaaatgtagtcaatttgtgctagtgacaaacacagaaaaggtcacaggacaaacacygaaaagaatagagtagggacgttaagaagaaatggctgtgttccagccaaagttacaaagaagcggaaactgagtaagt

SEQ ID NO: 847787 - DNA, 505 bp, Homo sapiens
gatatgatttccttttcaaacctagcattctgcttwtgcctactgccctattgagtatatgttttattcgtaagtacatgaggctaaaagttgtgtatgggagtaagggcgggacatgtaagagtccattgtattctgtgggttgagtgttggtaaagaatttgtatttcttataccagaactagacaactagaagtgtaactcacatttcagtgtcacatagtttagtatgctgttgacagttctgctacatttctgacaattgcaatctccactttataatatgttgccaaatttataatacgatgccaaattttatcagggtagaattaaagtttcaggatatttctctctccaccctgccccaggtagcagaaaatttcttcatttcctttgccaggttttccaggtgaggtaatccctaaccaaggaaaagaatatagtgtctagctctattcagaaggcatggggaagacagtttgtggggctttattcttctccccac

SEQ ID NO: 847788 - DNA, 648 bp, Homo sapiens
atatattgtacatatatgcagcctagtaatccatctgagtttaattttgctatayggtatgaggtattgagtcaactattttctctaaatattcaaatgattatcacagcatcatttattgtccaatccatactttccctactgatttgaaatatgacctttaccatgtataaattcttaaatttatgtaaatatgttttggggctttacattttataccatttgtgaactaattttgtgtgcagtttaattattcttgcctcagaacacactttaaaatgtgatatatatttccattatttctttttaaaaagtacttttaaaaatattgactattctgtatgtttttccttccagttgttctatagaattattttcagttaaaaaatatgctggcatttgattagatagaaacatatcatattatttgatgaaaactgaaaaaatgtatacttcattccctcccagaaacatggtgtttcatttcacatgtcagtgaagttctatagttttcttcgtatacattctgcactgttcttatttaaaatattccaagtcattatatatttttggttgctattgtgaatgacatcttttcttgctttttttgtttctcaacaattctagtccttttcagtatacatcttt

SEQ ID NO: 847789 - DNA, 558 bp, Homo sapiens
cagcagggcacaccggctgccgtggggtaggcggctccaggcttcctgtgaggctgcgactggacaggcatactgaaagcagcttccactgctggcaccggggaatgcagtggtgtccggaagcttggagatgccaggaactgcagagccccaaacaggtgtcagagcccttgctcagggagctcctaggtctgggctccccaaagggctgcagcaattctctccttgttgcaatgtggcgagtgaggggcatgtttcagctctttttgtgttacagctctttcagtcccaccattaagcaggtcccaagttctcatcctgtgtccaggaagaatgaagtacacagacaaccggagcatgaataagacaaagaggtgcttccctgagcagcagtacagctctcaagagatctggaatgggtagctcctaactgcaggcaggccatcccactgtctgctcagctcttggctgagaggagacccacagtgggtagattctctctgcaggcaggttrtctctacatctgctcagctctcagctgagaggagacccacagtt

SEQ ID NO: 847790 - DNA, 567 bp, Homo sapiens; identical to SEQ ID NO: 847189

SEQ ID NO: 847791 - DNA, 567 bp, Homo sapiens; identical to SEQ ID NO: 847190

SEQ ID NO: 847792 - DNA, 612 bp, Homo sapiens
cttacatgtcagtttctccaatgtaacaaattctctgtgacatgacacgagcttttactagcaagcatttattaaatatcattacacttgacacacaagtatcaatactatgtgttggttatattttatcatctctatcttcagttcttcctatcttatatttcatatcttaggtgagttgaagttaccaccttaatggtggccactataggatcattatctcaggcagccagagattgcttattgggcagagatctgaggtcagaatgcagggctgaggcatgaacaaatccaaagggattatttctgagtcattgaaggacaaagtttttattttcttaccactttaacagcctcctttatgggaatttatcatctgtatattagtcaccaactctagctgtcttaagccaaaggaatttgttggagaaacataagggctcagaaaatcaacaggaggctggagtaacaggcattaagcaactaaaaycagctggaactaatggcactggaggaccaggcagtaagaacacagctacagccacacagcagaatggactggtcaaacactgccccatccctgatacaaatggcctgtttcttccatccttt

SEQ ID NO: 847793 - DNA, 623 bp, Homo sapiens
tccagaaccacaaaactgttgtattcattcatacaacaaatgcttagctcattagggctcaattttctcaagaaataccagtaaagaaaggccacaagtcacaactatacagtgggtaggttatattatcrtcaccatttgacagatgaggaaactgttgacagatgaggaaactgtgcccctacagtggcaggggttgagttgcttgactaagcttacatagctagtcagtggtggatccaagattcaaatccaggctagcttcaaaatctaaccatgttattctgaatcaacttagctcttcctccatgtacagactacaccttatgacctaatctttaatgatctgcttttttaaaatctgtatatttcacatgcatacatttgtatacacaataaaactgcaaactatttaaagtaagaaccacaataaacttccctcatatttccacagtgctagctcacaaaaggtattcaaaatttgtttgattgttgcaataatagccataagaaatcaagaaacaaagaaaagtgaattcaaataggtgtgactagcttacatgatataagcctctcgagccaaactatagtcatcagttgttagagacatgctaatatgtgta

SEQ ID NO: 847794 - DNA, 633 bp, Homo sapiens
accccattattttacccttcccccccagattttgagcttcctatttattttattctttgtagagacaataaagcatatacactctggcatcagactgccaggttccaagcctgacaaaaaattattaatttatgcctatgaacttgggcatgttatttagtctttctgtgtctcagtttttctgcctataaaatggtaaaacaaagttagagttatcatgaggattacatgaggtaatatacgtataaagtacttagtgtgtggagttcaatattagtaatattattctacatgtattttttctgtataaaacatacagaaatgtaagtaaattttaaatgtgagtaaattttaatatttcttgtaacttaaggcttgcagaattttctggcatctctaagagaatgttgtgatttaactgtttaagtaatttaaaaatagttctgcttttaaattttctcctagttttcccaaggaatctatagacattattttacttattattattattatacttattattttactatttgctttttatataaggacttkactttaaaatagtgttaatacttctgtgttcttcatggtctcttcttctgtctcttaaggaatggtatttaaatctattag

SEQ ID NO: 847795 - DNA, 511 bp, Homo sapiens
aggatttaaggcaaaccttaaaaattgaaacaaggtatggggatgtgaatgtctgggttgaatggatcaaattttcggtacaagctctcaacaagagtaactgctacatgtgtgctgcgggacaacctcaggcagaggcggttccatttcccctaggatggaatcccaatcctaaaggaacacactgcatgttggctctataccagaacaaggatgaatggggaaatgagacttgtaagagtctgtcattgttctttctgcattgcaaagtctggatcccagaacaatccttttgttctctatagggactatgaaccactcctcttgcctctctaggcagggggcagagttcaataagcccatgggagaaatctcaacttgtacccacattcgaaaygtcactggtgagtcaagcaatggcaattacaagctctccatataccccaggctgatgtctggtggtactgtgggaaagggagctgctgtaacctgttactgtccaattggacca

SEQ ID NO: 847796 - DNA, 639 bp, Homo sapiens
acagagggcatgagagtttcctttccagaaagccaataattaattctaaaatttagtgctttatttgtctttccccaacttaagcaaattcagcaggcagaggataaaatgtacaagaactcagatatcatggaaccagtggcagttctccattttgaatcttcataatgctttatatatctggaataaaatggggaaagttaaatttcttctcccattggaccagattgtcttactttcttcctgtattcgtctgaccaaaaccaaagagagaagattcctgtgttcttgttagcccacaattcctgagatagtgggaagagactatacaacctgtaagaaccagatgatgcaggataactagtggtaggagattcataggaacaagagctctataagcatgatgaaaaaaaggggcaggtaagattgaaggccaatttcaggtaggactgagagaaagtcagcttggcaaggcttctcttccttaaataccattgtctaaaccaarcttgtccaacacacagcctctgggccacatgcagcccaggatggctttgaatgtggcccaacacaaatttataaactttcttaaaacatgagattttttttttgcagtatatatatttttacctcatcagc

SEQ ID NO: 847797 - DNA, 605 bp, Homo sapiens
gtgtaaactgatgaaattctctagtcaaaagacatatactagctgaatgaaaaacaaaatgcaactagcatatgttgcttacaagagattcacttcagttttaagggcacagatagattaaaagtgaggagacagaaaaagatattcaaagtcaatggaaaccaaaagagagcagggtaactataatcatttcaaacaaaatagactttaaacaaaaaacttaacaaattgtgattttttcttttagattttacatattcaaaattattgttttcaaataaagtttgctcttcctttaatgtttatcttggctatattttatttttataattacattaaacataacaaaataaaaaaccaatttggataatagtgattataatatacctctgactcctttcttattttaatagagaaatgagttagactttcacagtttattccaatgcttgttattatttatagttaaaaatagctaatttaattaagtggaaagatttttctctgagaactggaaaaggrcaaggatgctcactctcatcacttttatttaacatagtatgagaaatcctaatcagagaatctaggcaagagaaagaaatatg

SEQ ID NO: 847798 - DNA, 637 bp, Homo sapiens
agcaaatccatgctgtgaaatcactaaaaggtatatataggttcgactaragcattcgtttgtttttcttttgcactgtaagaaaaaaaaagtctgtttcaaatcctatttgtcccttatctctgtttgttcagttgtttttaatatcacatactgaaagaatttcaatagcagtttcaccatgaagtcatttgttatccttcagcaggcttttgcctactgaattgtaaagcagttctgactatttgcatcctccagatggagcggcatataaacactcccagatatttctggtaagtatgaaaaaatatcttatttgtcctttctgtgaataaataagagaatgtcaaattttatagactaataaatttgtatgccggcactgacattgaatctcttgtggcctgcattgtcacagaccctgagaaacacattttttgttgttgttgttacagatgaatactaagtcaaatagaagctcaataaaaggcacggtttgattgcattgtttatgtctgtccaatattctaattcagttgcaatatgccatgaggaaatgcaatttacatgtttcccaggtttattgcacaacaatcactcactcatatatacttctatctgtcagagaaaaccccac

SEQ ID NO: 847799 - DNA, 605 bp, Homo sapiens
tttttggtgagaacacttaaaatctactctttctcaattttcaartatgaaatatattgtcattaattatagtcaccatattgtacaatagagctcttgggttaatttcttctaacagaaattttgtatcctttgtccagcatctccccaatcccattcacaccccaacccccagcccctggtaacttccattttactctatgcttctatgagttcaactttttagattccacctacatacattccacaagtgagatcatgtggtattcgtgtttctgtaacttcattaacttaaaaactatattcagtgcctcctttattccaggccttatgctagaccctaaaaacacaagtttatgtaatacatagccatttcatacaggacctcatgatcaattgaaagtgctaatgatgttaatacataaatcaaatatactatttcatatgctataagagtgtttttggttaaatatatctttagcaattttgtcaaatataatggccaaaagtgtgtatcaatgattttttaaaatcttataagaagaaaatgtgatattttttcttattcattgtcccacatgaattatatacacagatttgaaaga

SEQ ID NO: 847800 - DNA, 610 bp, Homo sapiens
cattttatagagttgattcaatgctgaagctaaacaaaatattcagagatttgctgcctccgagacttttggggcccaccataatggtggactgtgattaaatccagagtgctgtccgtcctgtactttacaaaacaaaggctttgctcctccaaattaacacccattagcttcttagacattctgtccaaaataaaagttgtgttcttaattgataaattgcagccctgaatagtgggtatatttccaggcagctattctgtaatagtccctgttcatcatactttttgatgccatgcagagaatctgtaccaacctaagattatttgtactttttattgatttaccctggtccttgggctcagtgggcaggaatgagctggctagtgatgcttgtagagaccccaatactgagaccacacttagaatcaggctggtctcttggtgaaccagaaatcaattttcagtgcagaaaaatagcagtaacttcttcatttgaagttgtctttgactgaactgaatgtgtgttcccctttgtccctcctcatttttaatttagagaatctgcacrtaacatttttccatatttgtatgtcatcgcagagggtgg

SEQ ID NO: 847801 - DNA, 516 bp, Homo sapiens
gaaaaattattaacctatccaagctttagtttcctatctcttgagactaattcctcatccacagagaacttactaactctcctccttcacctcccacatcctgattttcagctttcatggtatcggcattcccagatgaaggtacaagttgaccatccctaatccaaaactccaaaatctgaaatgctccagtgagcatttcctttgagcatcatgttggcattcaaaatctttcagattttgaagcattttggataatgcaaatattaaaaaaaaaaaaaaaagagccggaatctgaaacacttctggttccaagcatttcaggtaagggatactcaacctctattcccatccaaataagtgcccaagttagagacctggaagccatatactcccttactctcatctcactcttagccrttggttcctgctttccacctttaaaccagtgcttaaataccttacaggtgccagacctgggcttaacaggtaaacgaagctgacatagttccaagg

SEQ ID NO: 847802 - DNA, 566 bp, Homo sapiens
ggggctttctggcagatttaayaggtagtttggtggtgtctggattgtgctaatagaagccattataccaaagataatttttaaaacctagaatttagtaaacaagggttttttttgtttcattttgttttgctattttgagattgttaatctcaaatactctcaatttgctgatttcattattgtgttaggacataagtgagataatgaagtggataattaatgacatactctttaggatgtaaataaaagccacactccacagaaaaaagaagtaccataaagcttaaaagagatcacgaaccttagtacctgcattatacaatgaggatagttttcgtaccgaggaaaaggaaggaagtctcttagaatcatcatctttgctgcttttagtcaactgtggaatgttttaaaactgtatttatggtcttaaagggcatgtaagaaaatatttggaaatttcaagcaaaagattaaccactggaattatgatagaaatcgcactgtttctttacgagaggagagttctgttcgctactaaaagactctgttgagaatgtgaatga

SEQ ID NO: 847803 - DNA, 516 bp, Homo sapiens
agatttaataacatcttagtgtagtaacttatttgtgaaaaaatctgaaaatatctcaacagaatatcattataatatattgtatttaaatgatgtatttatttmtttatgttgcagccaagatcatagttcatgatgcggctatattcattgtttatagttgcagtgtgacttatgttaaccactgtaggttttttgcaagaaaatatttactgcctgtgttagtaataaggcctaagactgggcaagcaatggtaattttgttttctggattggtaaagttatcaagaaatacattcttgtttttataagagtattgtatacaacatttaggctactatttagagctttggactaaaattatactttatctattacattgaaaactttaagagagaaattgacagtgtgagaataatggcaaagcaattttgtgattcaaaacattttagttgataaaacggtcaaagaaaagccccgtatctttaacaactgtaatgtaaaaattgtagcaga

SEQ ID NO: 847804 - DNA, 629 bp, Homo sapiens
ttaacacatgaagtgcacatacatgcaggagagactcagtgacgggtaactctaaggaatggttagaacttgggcttatatgtaaccgcccaacgtgttcaccttgcccactgtctggacagagctgatttatcaaggcataagaattgcaatagtgacagagttggccgggcgcggtggctcacgcctgtaatcccagcactttgggaggccgaggcgggcggatcacgaggtcaggagatcgagaccatcctggctaacacggtgaaaccccgtctctactaaaaatacaaaaaattagccgggcgtggtggtgggcgcctgtaatcccagctactcgggaggctgaggcaggagaatggcatgaacccaagaggcggagcttgcagtgagccgggatagcgccactgcagtccagcttgggcgaaagagtgagactccgtctcaaaaaaaaaaaaaaaaatagtgacagagttattcacgcagagccggctgtgyaggagactggagttttattattactcaaatcagtctccccaagcgtttggggatcagagttcttaaggataatttggtgggctgattggttgggtaggagatgaaattatagggagttaaagctgtcctct

SEQ ID NO: 847805 - DNA, 627 bp, Homo sapiens
caacaaaatgaaaaatgttttctttgaaaggataaacaaaatcaataaaccattagctaggttaaccaagaaaaagggagagaacaytcaaataagcacaatcagaaataataaatgtgacataactgataccacaaaaaggcaaaagattatttgagattcatctctatgtgcacaaactagaaaacctagaggaaatggataaatttctagaaacataccacatcccaagattgaaataggaagaaagagaaattcaaaacagaccaataacgagtaatgaaattgaatcaataataaaaatattaaaacaaaaaagccccaaatcggatggattcacagctgatcttaccaagtttacaaagaagagctggtgccaatcttactgaaactatttcaaaaaattaaggagaaagtatttctccctaattcattctacaaaattagcatcagcttgacaccaaaatcaggtgaggatacaacaaaaacaaaaaactacagggcaatatccctgcgaacagaaaagcaaaaatcctcaatgaaatactagcaaaccaaatccaacagcgtatcaaaatgattattcatctcaatcaagtgggttttattctaaggatgcagagagga

SEQ ID NO: 847806 - DNA, 520 bp, Homo sapiens
gctaaaagactagcgttttgaactatcccagaccaaaaaaaaaaaaaaaaaaaaaagattttttaaaaatgaacaaagccttgaagaaatacaggattatgtaaagccaaccaaactgaagacttatyggcattcctgagggagaaaaagaaaaagtaaaaagattagaagtatatttgagggaataattaggggaaattttttcagacttactagagatgtagacaactaatacaataaaataaattcagagaatacatgtaagatattatacaagactaacaccaccaatgcatacagccagcagactatccaagttcaatgtaaaagaacaaatcttaaagtcagctagagtgaagcataaaattatctatacaggaaataacttcaaagtaacagcagacatctcaaaataaatcttccaagctggaagagaatggggacctattttttgcccccttaaagaaaaaataaatgtcatccaagaaacgcataccctgcccagctaagcttcataaat

SEQ ID NO: 847807 - DNA, 627 bp, Homo sapiens
caacaaaatgaaaaatgttttctttgaaaggataaacaaaatcaataaaccattagctaggttaaccaagaaaaagggagagaacattcaaataagcacaatcagaaataataaatgtgacataactgataccacaaaaaggcaaaagattatttgagattcatctctatgtgcacaaactagaaaacctagaggaaatggataaatttctagaaacataccacatcccaagattgaaataggaagaaagagaaattcaaaacagaccaataacgagtaatgaaattgaatcaataataaaaatattaaaacaaaaaagccccaaatcggatggattcacagctgatcttaccaagtttacaaagaagagctggtgccaatcttactgaaactatttcaaaaaattaaggagaaagtatttctccctaattcattctacaaaattagcatcagcttgacaccaaaatcaggtgaggatacaacaaaaacaaaaaactacagggcaatatccctgcgaacagaaaagcaaaaatcctcaatgaaatactagcaaaccaaatccaacagcrtatcaaaatgattattcatctcaatcaagtgggttttattctaaggatgcagagagga

SEQ ID NO: 847808 - DNA, 520 bp, Homo sapiens
gctaaaagactagcgttttgaactatcccagaccaaaaaaaaaaaaaaaaaaaaaagattttttaaaaatgaacaaagccttgaagaaatacaggattatgtaaagccaaccaaactgaagacttatcggcattcctgagggagaaaaagaaaaagtaaaaagattagaagtatatttgagggaataattaggggaaattttttcagacttactagagatgtagacaactaatacaataaaataaattcagagaatacatgtaagatattatacaagactaacaccaccaatgcatacagccagcagactatccaagttcaatgtaaaagaacaaatcttaaagtcagctagagtgaagcataaaattatctatacaggaaataacttcaaagtaacagcagacatctcaaaataaatcttccaagcyggaagagaatggggacctattttttgcccccttaaagaaaaaataaatgtcatccaagaaacgcataccctgcccagctaagcttcataaat

SEQ ID NO: 847809 - DNA, 602 bp, Homo sapiens
actggaagtcagcagattaggagtcagtaaactttttcttaaagggccaggtagtaaatattttggawttcgcaagccatgtggtctgtgttgcaactactcagctctgctgtcgtagcacaaaagtggtcgtagatagtacacaggcaaatgagctgtgttcctataaactttatttacaaaagtgggtgggagccccatgaaccagagtttgctgatcccttatcaaatgcttcttagcatctcagatggactctaagatggcataatcctatttcctttggctgcctgaaatggaccagcaatggtggcagagtagaagctgtcctcaacaattggcatgaaaatcaaggaagctgaaccaacctcccactctgttagaagccagtagtatcttctaatttatacttacactaagttcctacattcctcaatgaacaatcctgtcttagtctattcaggctgctataacagaatgccatagctgggtggcttaaacaacagacatttatttctcacagtttgggaggctggaagtccaagagcaaggtgctgggtgattcagtttctcagtgaggatcctctttctgctcctatgtcct

SEQ ID NO: 847810 - DNA, 640 bp, Homo sapiens
ctgagatgatgcataccagaggacttcaaaaagtttttggccaaaggaattaaaatacaagaataaaaaatataaactttatttctccacataagttccatcaagttcaagacacttttgtaagtgatgataccagccacttagttcatcctgaaagaactgagaatcctgggaatttaaccattccaatgtagtcgtttttacattcttacctgcagactaatgagcgcccactattttttttaaagattacaaaacaaaaggaagtcagaaacagccaaattgggtctatgaggggaatgcctagtgattttccatccaaacttttgcagaattttccttatgttatgtgagtaatcagcaggaggattgtcatagtgggaaaggactctggcgcagttttcttgggcatttttctgctaaaattttggctttctcaaaaacacgctcataataagcagattttattatctttggccctcccgaaagtcaataagcaaaatgccttgagcatcccaaaactgttgccatgacctttgcttgtgactggtctgcttttgcttggactgggcmacttccgcctcttggtagccattgcttcgattgtgctttgtcttcaggattgtactggagaagccaa

SEQ ID NO: 847811 - DNA, 527 bp, Homo sapiens
tcagagcagaacagtgattgtggtgattgaacacctctccacggcaaggagagcagagcagctgaagtgtggctgcatccrgcaacatgagccctgatgtaggtagcaggagcatctcagccactgctccctttgaaaactgcagactttggatttctccttccaagaagttgtgttcaaataaatggaaacaagaaggggacacacaatcacctagcttataactcagcagcgattccgcaacagacacagtgggtgccccggccctggaaggactctcaagacagctggggctcatttcaaaccttctacatacaaggcatgtcttccccttcataatatcattctttgtggcacaaacctccaaaatccttcctgggctttcctgaagagacaaggtggagcaaaattagatacatgtgtgtccgaccctgttatctttataatgttactgtaaggaagtaggggtcttgttgccaggagaaatgggagaggagtttacgcagcacgggagggagagctgcact

SEQ ID NO: 847812 - DNA, 567 bp, Homo sapiens
ggtgggcccactggaggaattctggcacatctagtagagaatgctgggcagttaggaaaagggcacattataagtaactgtgataaagagagccctttattatatctcttggataatcacaacattgatgggggcagagacaatcaatcaacagtgcttaagacaatcttttgccaaactgtgaaaaacgttcttccagtcccctctgaaagcctgactcccggaaatgtagagggcgtgcctcctgggaccgtcttcacatccttcccatgggaaaggcaggcactctcggttagcgtctggggttgcatgaaccgaccacactatggaggtagtgagccgccatctttgcagctgttgctcttatcacagagagacttctttgtataaccttccttgtagtgggctcctgtgctcctgggagtcctataggcaaaaattcttsaaaatggggatgaaatatccttgacacacttcttcttgtaggcagtagccggccagcaactccttctttagctgtctattgataccctacttttcctaaacccagaggcggacgctgtggga

SEQ ID NO: 847813 - DNA, 600 bp, Homo sapiens
ctgtcgccaattaaacagcagaagcattaatattgttttccatgttttctatgtctgtaattaggtaggtttggggagtctgctcttaargctttctgccttttcttcccttagtaatctgatgttctagattcacaagtacttagactttgataaagtaaatattcctacagatgaagagtcagtttacaggctgagggaggaggacacttaaagcggacatcaaaggaggtgatgcccttgttccctcgtcgagacctatataagtaactgccaaaaataaataaattgaaacaaagcaagtgctcagtggtaagtctacataaatatcatggagctgttaaaatgaatatattaattaaatctctacctgtgaactggaattttttttttttttttgacagagtctcactgctatcactgaggctgaactgcagtggctcagtctcagctcactgcaacctcgacttcccaggctcaggtgactctcccacctcagcctcccaagtagctgtgactacaggtgcatgccaccacacctagctaatttttttgtattttttgtagagatgggggattcaccatgttgtccaggctgat

SEQ ID NO: 847814 - DNA, 583 bp, Homo sapiens
aattacaaggaaactcattttagatcaatcctttctaataaccaaagaggaatcgaacaatatatattacccatcaattgctgtgctagctacattatagccattatcttattgagcttcctaacagtctctgaggtaggagctcagagtagccaagtatatttctcaaagtctcacagctaggaaagggcagagccagaatttgaacacagatctccctgactccagggctgaattttttttactgtacaatgggtacttccctatataagggtcaaggatcatctgccagagttattatttcatacaaaggagatttttacattagaaagcagattattaatgccaccaataacaatagtaacatgcacttcttgcagtaacatacattatctctttaatcatcacaataacattccaaggtagatcttattattatctatgttttccatataaggggacaggttcagcgaggtaatggaatctkttcaagttcatattcagcatgtaaagtagcagaactgagattatcacacaggtctgatgttaaactatgaggcattgttgagacggcaatgtcatc

SEQ ID NO: 847815 - DNA, 574 bp, Homo sapiens
atctgaaccggtttctatgatgtactacaccaaactcttcttctcaattgtagctttatacatgaggaaacmcaggcttagaaataacagggaacatgcccatgatcacacagcccacagcagaagagctgggatttgaactcaggccctatctgatgccagtgctaaggaaaggtgaagatgatccctgtcgtgcagaagcctgcagtcaaactggaaaatgtgactacctcctatgacgcaaaacaaaggcatcccagggacaggagagcagcctgggaaggctcccagcggcacaggccagctgaagtctctgaacctagacacatctggctgcaaagaatgggatgggatcccactgggagtgggtgacaaaggggtagcagagaatttatgctgaggcgtctgagcttcacagcagaaacaggactcagaagaaagatggtgtcggggaaaaagactaacattgataagatggcgacaacacagaagacgctctgaccagaagtcaaccctctgaagtcagttctttcatcgcacagcacctcatttatttggctttcccagtcagagt

SEQ ID NO: 847816 - DNA, 482 bp, Homo sapiens
atgtaacagacaagtatctggcaagactattcaagaaaagaaataaggtgcattaaacaatattagaattgaaamaaacttaaccaacaaatgccacatgaaaaataaacattatgaattatcttatgccaataaaatttaaaatttagatgaaatggacaaatccttacatataatataattacagcttatacattatacatagcttaataaaaaaaaagaaatagaagacctgaatagactataattatttttaaaaagcatcagaaatcttcccacagagaaaaaccccccccagccccacatggttttacagatgcattctaccaaaacttaatattctcagaacaaataattccaaaacatgcaaaaagaaaaagtactactccaactcactttatgaggctgggctgaccttgatgccaaaatctggcaagaacagaaggagaaaggaaaagaataggcctattttgcaaatgtac

SEQ ID NO: 847817 - DNA, 482 bp, Homo sapiens
atgtaacagacaagtatctggcaagactattcaagaaaagaaataaggtgcattaaacaatattagaattgaaacaaacttaaccaacaaatgccayatgaaaaataaacattatgaattatcttatgccaataaaatttaaaatttagatgaaatggacaaatccttacatataatataattacagcttatacattatacatagcttaataaaaaaaaagaaatagaagacctgaatagactataattatttttaaaaagcatcagaaatcttcccacagagaaaaaccccccccagccccacatggttttacagatgcattctaccaaaacttaatattctcagaacaaataattccaaaacatgcaaaaagaaaaagtactactccaactcactttatgaggctgggctgaccttgatgccaaaatctggcaagaacagaaggagaaaggaaaagaataggcctattttgcaaatgtac

SEQ ID NO: 847818 - DNA, 474 bp, Homo sapiens
ttatagactggcatgagctacccagttgagaagacactcccaaggtttgtaagccatgcaaagaaatgacatccatctgctttgcaaatattatttaaggcttccccctaaaaaggagcyacggaatgcttatttactttctcactgaatctgaggggtagagactatcaagtcccagttactaagaagtcaggaagagaattaaaaatagaaccatggaaacagggatgcactgaagaattctatcaactattctatatgtttgaggaatttcataagaaaatattgggaaaaaagaaaatccatctgatcatcgcatactatacagactgagagaactttctactgctccatattcttattatagttaatgtagtggaaaatagaagttgagagatttttgctcattggctaattaaaactaaccaactgaagggggaaaaacatttggaggattcttgggagaatctgcat

SEQ ID NO: 847819 - DNA, 262 bp, Homo sapiens
cattgtgctggctgctgggtagatagactacttctgcccccacagaaggattccacttgcctttcctgctgttgaagtttatacctatgtctcctttgaattgctagagggcaggaactgactcatggtcatctttgtatcycccagcttctggcgaaagtagatgcctaataaatgtgtattgaacaaatggaaacaaacacaagtgtttctgtttacattaacacaacaataaaacttaacaagtataaaagttactcat

SEQ ID NO: 847820 - DNA, 262 bp, Homo sapiens
cattgtgctggctgctgggtagatagactacttctgcccccacagaaggattccacttgcctttcctgctgttgaagtttatacctatgtctcctttgaattgctagagggcaggaactgactcatggtcatctttgtatctcccagcttctggcgaaagtagatgcytaataaatgtgtattgaacaaatggaaacaaacacaagtgtttctgtttacattaacacaacaataaaacttaacaagtataaaagttactcat

SEQ ID NO: 847821 - DNA, 608 bp, Homo sapiens
cggaatcaaatttaaaatcagtaacagaaagacatctaataaattcctaaatatttggaaactaaataacatatttctaaatcacgtttgggccaraacaaatcaaaagcaacattaaaaggatttgaactgaataaaaataaaacacaacatacaaaaattctggggatgcagctaaagtagtatttacagggaaatttgtaagacaaaacacccgcattagattaggaaagaagaaagttctcaaatcaatgacctcagcttccaccttagaaaactaaaaaaacagggggtttggggtgaggggtggggataaaacccaagtaagcagaataacagaagtaataaagagtagaaattgatgaatacaaaacagaaaaacaacagggaaaaattaatgaaaccaaaagctggttcttcggggggaaataaatcagtaaaatgaataaatctctagccagattgatcagaaaaaaaaataacacaaattactaatattaggaaagtggtgacatcactgtacgcattctacagctattaaaaggataagaaaatatcatgaatataattttattccaacaaattcaacaacttatgtgaactacaca

SEQ ID NO: 847822 - DNA, 558 bp, Homo sapiens
tggtggactgaggtaataatacctgcaatggtcaggcatccccaagacctgataaaaagtgaagtcaaaagrgcagctgagataatgaccatggacacttgtgcaggccatgaaaacagcaaagaaactgaccatggccaagacgtctgcagaagctctgcctgtgagaattctgtggccttttcttgatcaagaaattcggaccttccccatctgtcagcacgctggtctcccgagctactcgccatggtttgtttcccctctttgttattactgcttgtgtgtatgttgaatatatttgcatgattgatggtttaggaaagtctcatagtgaacagtgaatttgaaagcatttaattggccactgattccttttgaaacctcctgaccaccttgtcagagttagcacaactaggctgattcgaacctcacatattagaagttcccctgccttcttctctgtcttactccatttgtgttgctataaaggaatagcagaagtaggtaatttgtaaagaaaagaggcttatttggctcatagttctgtaggctgtataa

SEQ ID NO: 847823 - DNA, 578 bp, Homo sapiens
tttggggttcacattttggtaaccacgaagggattctgaacgtggatgcccctgacctttgacaaatttcctatcagtgcttgttaacagcatgagctaactttatggctcaaaccaataggaccatttgctgaggtctgagagcacccccttcagagaatccctgatctcccaaaatttgctagggatctaaagtttattttgctgtacaactcccttttttttggagttttacttgcttccaacacaagaatggcaagtttttcctgcttccgtgacgatggaaggcaggtaactcctttatggagtttgagcttgcttccaacagggaaaatgagggttttttggtttgtttgttttttctttcctgcttctaagatggtagaaagcagtcttcagcctgagacccatccctaggtaagtaactgacttggggttttccttggctcaagttaagattaacaaccagctggtcttaatttctcctcacaattagagygctcagtgatgatgttgttggggatttttgttgttgtttgttctggtttgaagttgctgtttaaggatcctaattctag

SEQ ID NO: 847824 - DNA, 616 bp, Homo sapiens; identical to SEQ ID NO: 846684

SEQ ID NO: 847825 - DNA, 611 bp, Homo sapiens; identical to SEQ ID NO: 846685

SEQ ID NO: 847826 - DNA, 496 bp, Homo sapiens; identical to SEQ ID NO: 846686

SEQ ID NO: 847827 - DNA, 394 bp, Homo sapiens
gagcttatttggaaatatggtctttgcagatgtaaccaagtgaaaatgaagtcatactggattaaggagaaggttcctaatacagcgattggtatcctcataagaayagggaaatttagacatggataggaagaatgtcatgtgacatcggaggcagaggttggagtgatacaccttcaagccaagtattgccaacaaccaccagaagctaggatgaggcaaagaaagatcctcccctagagccttcagagagaacacggtcctgccaatgtgttaattttttatttctagcctccagacctgtaggagaataaatttctgttcttttaagccactcagttggtggcactttgtaatggtgtctctaggagttaatacaactctcagccaattt

SEQ ID NO: 847828 - DNA, 483 bp, Homo sapiens
tcctgagttacttcatttagaataatagtctccaatctcatccaggtcactgyaaatgccattaattaattcctttttatggctgagtagtattccattgtatgtatataccacagtttctttatccactcattgattgatgggcatttgggttggttccatgattttgcaattacgaactgtgttgctataaacatatgtgtacaagtatctttttcgtataatgacttccttgcctctgggtagatacccagtagtgggattgctggattgaatggtagttctacttttagttctttaaggaatctccacactgttttccatagtggctgtactagtttatattcccaccagcagtgtagaagtgttccctgatcaccgcatccacaccaacgtctaccgtttttatttattttttgattatggccattcttgcaggagtaaggtggtatcacattgtggttttgatttgtatttccctga

SEQ ID NO: 847829 - DNA, 645 bp, Homo sapiens
taaccaccccccttccccatccctgtttaccctccagatattctgtagttcatcatcgcctgtaccagtggttgtcaaactccggctggacccgaatcactgggagggcttgataaagccttcatttctgagtctcatctcaaagtgtcagattcagtaaatctagggtaggacccaagactctgcatttaaaacaggttcccaggtgatgccagtcttgctggtccagagaccctactttaagaaccactggactcttaatccagcccgaaatccttttctgttgctcttcatttttttttttttcctgaactgactcctgcttattcactaggtttgagtttaggggagcctcctgggggagccttttcttactcccaaaattgatgtaaatgtttttatttgttttgtttcattagcacttggttagtgttttgctttattaaaaatgtcctgcataaactcctttggagctagatgtttcgttcacattttaagtctcagcacttagaaagtgcttggcagagaggagccagagatatctggcaatgaagatttgcaggcatagtgtgatgataaagtaattctrtcacttttcgtgttttctggagaatttagccccatggctttaggaccatgtttttc

SEQ ID NO: 847830 - DNA, 598 bp, Homo sapiens
gccttgtccctgttgttgtaaaccctaaaagcaacgtctaagggttggctcatgggggccccattgctaccttttgtagcttcctcctgatgtcaggggcagattgagtgataaaatgcacacccaggaaaacccacccttctggggagtctgggtctgcattagcatatttcctgagtgccccaagaaaacggccctgaaatagagcagggttttcatctttgtcctgagttatttctctcaccttgtcataactgactggcttaagcacacactttttcatgttaaacaaattagcctgtgatttctgcatttaagatcttgagaacctgtctagtaatccaattgagagcctagatctggaattgcatctcctcccacacgatatggcatggcctgggttgggtggctactccatctgcatgttcacggacagtatctagaattctttgtttttcctctacagtacaacaagtggatagtaatatttgcatgtcatgccaagttaaatcaaagaatacgstcaacttaacaaactcctctgtaaacttcccaggatcctctaaaacacaaccaaatttttccttgcataaagcca

SEQ ID NO: 847831 - DNA, 584 bp, Homo sapiens
gaatgtcaatgccgaaaaccccagagcattttcagcaataccaatgctgaaaaacctggagtacctgagtttcagccaacaagggtcccctcaccaaatgctgaaaaccccagggcaccagggggttggccaacagcaaacctcaggccaagttggaggtcacagaacaacacaacaggaggccttgcatggccaagtgtcctgccttaaatcattccccaaatttagtcaacagaaaatcaaaatgaaaacaaagactgccaacaaaacatacatcttaggactgaaaataaaacgactggtggagcaatacaatggagtcagaggggaaacaatcagggaaaagggtgacaaggacaaggaagtgtttaagggtatccaaatgatgagggacttttaactgacctcttagccaaaggctttaattcctgagcttacctgatgttattgggktgggggtgggcaaaacactcacccatccacaggagtcaaaatggtgctggccaatcttccacgtggcacccaggtgaaggtctcttcaggatcccccagcttggatgtgctcagctgccatggtgggaggg

SEQ ID NO: 847832 - DNA, 613 bp, Homo sapiens
gctctctgtttccacaactcttccacccaccttgtgtggccttgcatttgtggctgcatccacctcctccacagtggcatatgtgacaaacccaaagcccccggagcacttggtgtttggatctctcaggaccacacagtccgtgagcgttccctattgctcaaaatggcttctcaggttctcatcagtggtgtcaaagctcagccctccagtgaagagcttcctaagctgttcgggctctttaggagactctgacttagacaggatggcagggagaagagagactttaacgatgcttcttcggcggcatccacgggcagaaaggagcaagctgacgaatgtatcttaacctgaactatttttgcacttctttccgataataattatgctcagagtcattcagcaaccacattgaaaggttctatggggccttctgcatcattgcagaaggaattgattgtgtctggtaaattataattctttccaaattagaaccaagtatatgacataggttgtgacytgctggtaagtagaatatttgattagctggagaaaattattttggaatagaagaaagagcatggattttggatccagacttagatttgactct

SEQ ID NO: 847833 - DNA, 381 bp, Homo sapiens
ataaatattgtttgtttgttttcgtttgtttgtttgtttgtttgtttttgagacagagtctcgttctgtggccaggctggagtgcagtagcgtgatctcrgctcactgcactctccacctcccaggttcaagcgattctcctgcctcagcctcccgagtagctaggattacaggcacatgccaccacgcccagctaatgtttgtgtttttagtagagacgggtttcaccatgttggccaggaataaatattgtttttaacaactgtgagactacccctatatacatacactcaaagcaagcgagctcatttttcttctccttactgctctgaagggtgacatggagatcatcagcacaggaaggatctgaacgacctgctg

SEQ ID NO: 847834 - DNA, 600 bp, Homo sapiens
taaaaaaaatatcattcgacttatggcagttgatactcacccagtatctacacacactcttatgtttcccagtatctcttgtggttgggttggggtaacattactagttcaggccaatagactttgagaggagccaaatattcaagacagagggggccagcctgactcacatctgactttttctaagaagtaaacctttattgtgttaagcctctgagatttcatggtttagtttttcctgcagcctagtgtagcctgtcctgactaattcatggccccagtgaatgtcatcagcactaggaaaatgactatgttagatttgcactcagagacactctgggcaaagctaatgtcagacagagaaactttcttcctcaacttactgttttcatctgcaccttggagatatcagttctggatcaacacgtggttgtgtctggagccattgggacagtctgccagcttgggtcatgtgcccatgccttggccaatcactctgagtccagtaccattggggtattttgattggccaacttgggctggggaggtagggccatatgatcgacartccccaccagtggggatggatttgctttggaa

SEQ ID NO: 847835 - DNA, 633 bp, Homo sapiens
agaggaaagttgataagaatttatattatctatgatataaaagtatattcaatttaaaaataatttaataagcagttagacctaactgaatttcatttagaaaaaatatatataaaattataatcatttgtgtaactagcatatgctagaatcctttactttcatttttagtggtttaccctttgatctcaaaaatatacatttgacataatggctacaacctttgatggcaaagtagcttgcaatgattagctaatactttcttattaaggtaatgaattaacttattcattaacttcattaattttaatgaatttgtttataaaaattcaaaaaaaggatctctccataacaaaactttaaaatatctagaagagcatgagttcaaccattgtagaagacagtgtggtgtttcctcaaggatctagaaccagaaataccatttgatccagcaatcccattactgggtatatacccaaaggattataaatcattctactacaaagacacatgcacacgtatggcactattcacaatagcaaagacttggaaccaacccaaatgtccatcagtgatagwctggataaagaaaatatggcaatatataccatggaatactgtgcagctatataa

SEQ ID NO: 847836 - DNA, 373 bp, Homo sapiens
tactaaaaagcatcaaggttgagttagttgaataaattctcttgataaaagaggcacctttttagaggatgaattccccccaaataagtgattattgtcttatgaatgtatacattgttagctatttgaaaaatgtattatactgactgttcatagctcttgcgtttgaaatgttactgtcctagtcatttccttagcatttactaaacataatcctattttctgattgtttatctggcacttcccagggatactcattraaatgcaagctgcttcatctggaagataatacttcatggtctatcaaatgaatgcaagtggtaacagactcgaactcagcctctgctatggaaatactacacttaagctaaca

SEQ ID NO: 847837 - DNA, 648 bp, Homo sapiens
aaacttggggtaagtctccaggacattggactgggcaaagatttctttaataataccacacaaggacacgcaactaaagcaaaaccggacaaatagaataacatcaagtgaaaaagcttctgcaaagcaaaggacacaatcaagaaagtgaagaaacaacccgcagaatgggagaaaatatttgaaaattacccatctgacaagggacaaaaaaccagaatatataaggagctcaaacaactctatgggaaaaatatctaataatctgatttaaaactggacagaacatcttaaccggtatttctcagaagaagagatacaaatggcaaacagacatatgaaaaggtgcttaacataattgaccatcagcgaaatgcaaatcaaaactgcaataagatatcatcacattccagttaaactggcatttatacaaaattcaagcaataacaaatgttggagaggatgtagagaaaaggaaattcttgtatactgttggtgggaatgtaaattagtacaaccactatgaagaatagtttagagkttcctcacaagactgaaaatagacctaccacatgattcagtaattccactactaggcatataaccccccaaaaaggaaaacggtatatcaaagagatgtctgcactc

SEQ ID NO: 847838 - DNA, 648 bp, Homo sapiens
aaacttggggtaagtctccaggacattggactgggcaaagatttctttaataataccacacaaggacacgcaactaaagcaaaaccggacaaatagaataacatcaagtgaaaaagcttctgcaaagcaaaggacacaatcaagaaagtgaagaaacaacccgcagaatgggagaaaatatttgaaaattacccatctgacaagggacaaaaaaccagaatatataaggagctcaaacaactctatgggaaaaatatctaataatctgatttaaaactggacagaacatcttaaccggtatttctcagaagaagagatacaaatggcaaacagacatatgaaaaggtgcttaacataattgaccatcagcgaaatgcaaatcaaaactgcaataagatatcatcacattccagttaaactggcatttatacaaaattcaagcaataacaaatgttggagaggatgtagagaaaaggaaattcttgtatactgttggtgggaatgtaaattagtacaaccactatgaagaatagtttagaggttcctcacaagactraaaatagacctaccacatgattcagtaattccactactaggcatataaccccccaaaaaggaaaacggtatatcaaagagatgtctgcactc

SEQ ID NO: 847839 - DNA, 516 bp, Homo sapiens
gtgcagttccgagcacaaggcacacgaacggtgctattagcgtttctaaccccgcagagaactcctcgcaccccagtcctcaaaatcccgccccggacagcggaggccsgggcagtagcttccagacccaattgcccgcgcaagggggcgtggcagcatcgttgggcggggccgcctgtaagagaacgcggctaaaggtggggccaagcgtgcggtttgctgcgcctgcgtgaggaaaaagaggggggcgtggctccaggccggaagagggagtctgtaggggcgggccggctggcgtcccctttccggccggtccccatggaggcgctggggaagctgaagcagttcgatgcctaccccaagactttggaggacttccgggtcaagacctgcgggggcgccaccggtaggccgcagcggggccggggtcgcgtggaggggggcgtcctagagcttagcccgggctcctggactctgactggcctgccggtgtctgagggagcggattcgaggcca

SEQ ID NO: 847840 - DNA, 579 bp, Homo sapiens
tccttgccatggccagagcctcatcctggccactcattgaaggcaattgtgactgacagatcggggcccagagccctcgggagccccacatgggcatcccctagttaaccggggtttattcaaaccagrttcatgtccagcccacagccctgtcctgggtccctcctccactgtggtcctcaggcctctcgggttcagccccagggctcagatggaccttttcagcgtgagcttcctggagccaccatggcccccaggctcatgagtgatcaaccccaggccactaattcagggccctgagtgcatattggggcttgccacttcttcattgatgggtaaagctggggccgctctccgccaccctgggctcaatacacctgatcctgtcacactcactgatcccactctgtgccaaaccccacgctggctctcactgcagagaggaatccctccaggtcctctgcagtctagatggaagcaaaactgaacactgaggtgcgaaagtagcagtcagtggccattctggagcagggccagcaccagacccctggcttggagcctaatcagggtttcccatta

SEQ ID NO: 847841 - DNA, 465 bp, Homo sapiens
gggaggcccaggtggggacactgctggccacagaggcccctataggcaaagtgagaaaaatcctgtgtcagttgtcctaagttgtctaaaccacagcttattttccccagttcaacattttcctgagggtgtcttcatctggggtgatagttcaaatatggggtaattattaagtctaccaatgtcacagctgggtttcacagtgtctctttttttttccacttttttttttttttttgagacagggtctcactctgtggcccaggctggcatatgccagtggcacaatctctgctcactgcaacctctgcttccctggctcaagcaattctccaggctcagtctgccaagtagctgggactacaggtgtgarccaccatgccagctaatttttgtattttttttagagacagggtttcaccatgttgcccaagctggtctcaaactcctgagctcaaaggaatc

SEQ ID NO: 847842 - DNA, 385 bp, Homo sapiens
gcaaatgtaaaagaacagaaattacaacaaactgtctctcagaccacagtgcaatcaaattagaactcaggattaagaatctcactcaaaaccgcacaactacatggaaactgaacaacctgctcctgaatgactactgggtaaataacgaaatgaaagcagagataaagatgttctttgaaaccaatgagaacaaaggcacaacataccagaatctcctggacacatttaaagcagggtttagagggaaatttatagcactaaatgyccacaagagaaagcaggagagatctaaaatcgacaccctaacatcacaatttaaagaactagaaaaggaagagcaaacaaattcaaaagctagcagaagacaagaagtaactaagat

SEQ ID NO: 847843 - DNA, 498 bp, Homo sapiens
taaggttcagcatccttacatttccattcttggaacttttaatttccttttctgagaagtatttttcaatatgacttacacaatttcctactgcgtggttttatctttttcttataggttaaagttcttrcaaattctggattccaatctgctatctccttgtttgttactgatcatataactcccaaacagttactgctatgtaaacactttaaattttcataaaatcaaatatgtcagtgtcttcttctgattgttcttgcatttctgtgtcttaataaatctctcttcaagaaataagaatactcttcttgttttcttttaatggttttaatattttgtttgtttacactgaggactttgatccatctagcatgtattactaagcaggatgaatataagcaatctttgcccttttgggatggctaattgatccaacactatctcctgagtgactggcacccgttgacacacagatttacatgcttcctttatcac

SEQ ID NO: 847844 - DNA, 613 bp, Homo sapiens
gagacgattccgtagcttttagaacattcgtaatgttgtgcaagcrtcacctctatctagttccagaacactttcatcactgtgttgtacttttaaatttatttatggagtttatttgtgctgtgcttctttctaaaaaaagcttgggagtggcttctcattaaggctattaataaaatagaaatggaagatcagaaccaaggaaaggagaaagaagctaacatgaaatcaacatgtgttaacgtagtttttattcaacattaggtttgacacttaagctttccagcaacagagcataaaggtacatctgataaattatccaaaagcagagaataattccagcacctcagtggaaacagtttttcttgacactgaattctaaatgaaatttctcaattgggacttgatgtgacattgaacaaccgcagtttcacagtgtatactgaagcatttgtaatatggctttttctgtaataaccttcaataaaagcagattttagaggtagcaaaactataaatatttgacctctactactaggttgatctcaaattagtccatataatttttttttttaacaaacaggtgaagtaagagattgcaaggaagccctta

SEQ ID NO: 847845 - DNA, 605 bp, Homo sapiens
cattgatgcagaatagaataaaattatacttaagttctttttaatccttgtggtagaaatgtggttgaatgcaacaatattgggccagcgtctcaaggggaattttaaaaggcagcaataaaatatattasagacatgacacacatgcgcctttggactaggtgtgttaacagagcttgagagagggaaccttgacagctatttttactcttagccaaaaacaaagacattaggaaagagagtgaaagtatagtgtctagttccacagcataaagttattatttggtgctttggaatgggttgaattttaattctttagtccatctaaatcagctggaaaaatgaggaacattctgccttgaatggttcttcccctggttggctgctttctccacaactggtggttcagcaggaagccctcttaggttcttgcatgtgggcaacttattttctcttcctgctgctttgtgcaactgtcaaatactttcacagattcagatcagcaaagggtatcaaggatagtcattgtgagcttttcgtgaggaaactgttgaatgcataggtagctactgtataagctaactaggatttttcagtcttagtac

SEQ ID NO: 847846 - DNA, 513 bp, Homo sapiens
gctgaatttcaattatttctccaactccccatcattcttaagatattctcatttcttgcacgcgcgcgcacatacacacacacacacacacacacacacacacacacactgtcctggttgagttataggacatcctggtaagagtgtctgcataaagcaagaaactgcttactacttgtttattattatcgctttacttctttatgaaagaagattgttttgggaccagctcctaaaagtcatagggaaaccaccagaattatttgcacatttctttgcaaaagaattgcagaaagtataaagcttattctaaagatccagtattggtcacaggcaaatcatgaagagggtctcatttgtctttgaggcccccattccctacttccactgctgcttttccagmatcctcatcttcccttctcactaccaacgctttattttattattattattattattatttttttttttttttttttgagacggagtctcgctctgccgcccagactggag

SEQ ID NO: 847847 - DNA, 626 bp, Homo sapiens
tttcattgaatgaatgcaaagatggatgatcataaagacaaatggacagacagatgcgggagacagagacaggataatgttcttagcatcattaaaaagcctggarcctctcaaagtgatcgctgtgaagaggataacactcaggaaattacatatacaggggtccctgtatccatgggggattggttctaggacctcctgcaggtatccaaatctgcagagactcaagtctctgatataaaatggcatagtacttgcacataaactatacatatcctgctgtatactttaaatcatctctagatttgtgaacctatgatacctaatacaatgtaactgctattacatagttttatactgtattgtttagagaataatgggaaaaaggtttgcacatgttcagtaaagacctaattttttaaaaacacttttatctacagttggttgaatccacagatgtggaatgcaagagctgatcatatttatttgataaatatattgaaaacacttaacattttatgttaaaaaataaccactttttgaaagacataaaagaaaaaaaagtcccatagaaaaaacaaatttccctaacaaactcattttaatttcattagtctaattgttct

SEQ ID NO: 847848 - DNA, 621 bp, Homo sapiens
agtatattcttttattctgttttatatattcaattgtgtggatataccaccatcaagaaaaatcattctaatgtttatcrgcatttgaattgtttccatttgagggctgatgtaattaatgatgccaatggcatccttgtatatgccttttcaggatatttgtacacatttctattagtatatatttatgagtagaattgcagcattatggggtatttgtatctccaacttcaataaatactgtcatttttctaaatagttgtaccaattcaaactctcatcattattacaaacagtatatgaaagtgtgtgaattccagttactgcacatcctcatctacagttggtactgccagtcatttaatatttattctgatatgtgatagtatctgattatggtgttaatttacatttccttaataactaatcatgttgagtgtcttttcacatacttattgcagatcaagtacatatatatttttaatagtaaagacagggtctcgctctgtcacccaggctgaagtgcagtgacacattcatagttctctgtaacctcaaatacctgagttcaaaagattgttccacctcagcctcccaagtggataggactgcaggtgcatg

SEQ ID NO: 847849 - DNA, 650 bp, Homo sapiens
tgtaacgtcatggtttcacatattagttttatactaagattgcctgagattaaaccgtgacaacatcatttaccgctgtgtgacttgaggtaaattataacacctttctgtgcctcaggtttataatctataaaatggaaagaaataattatgtcatgctgaagatgtaaaaagttaatgcatgtaaaacactgccgacaatacacactaaatagtgctcactaagtgtttatatatgggtgttataatatcatctgtctccagcagtcatttctatactataacttttaatgttgtctaaactggaaatccatattttgtctgttagcctggatattaatgtatagcttttatgacactggtttatgtgactagagggatattttcctatttctgttattcttgttctttttctcatagtgtctgaataactgaaaatgacagatgtgtgggttctaggtgagtaaagtaattgtatattgtaatttttgtctttaaaaaataccattttatggccaggcgcggtggctcacacctgtaatcccagcactttgggaggccgaggcgggtggatgacgaggtctggaratcgagaccatcctggcttacatggtgaaaccccgtctctactaaaaatacaaaaaattagc

SEQ ID NO: 847850 - DNA, 615 bp, Homo sapiens
ttagattatatattgtgtttggacttgtttgtattataataaattctaatatggtgcacacttggtgtttggtatttgcatctatgttcaagcaattgcagtatgctgatttttattactatkatttttaattgataaatcataattgtatacatttatgggatacaatgtgatgttttgatatatgtatacaatgtggaataattaaatcaagctaaattaacacatctgtcacttcacttatcatttttttgtggtgagaaatttgaaatttattatctgttattttgaaacatacattgttaccgactccactcaccctgctatgcaatagatctcaaaattttatttcttccatctaacaaactttgtgccctttgacaaacatctcccattccctgcttctcacctacttccagcctctggtaaccatcattttactctctacttctatgagtttgactcttttggattccacatataagtgaaatcatatagtatttgtctttctgtgcctggctcatttcactaagcatgatatcttccaaattgcagaatcctggtttaaacatttaacatttaagtggacatctttcttatacattgtgctgggtg

SEQ ID NO: 847851 - DNA, 609 bp, Homo sapiens
agttcatgtcccagctcccccatttactagatgaatggccttgagcaagtccttggagatttcctaaggactttcctcatctagaaaacrgtgcataatttaaattttttccagttgtcttcaaggtatgtagaaactcttatagtcaggaacccaagatttggagtcagttattacaggctataactttcctggctatgtgaacttgagcaatgttctcaatctctctctctctgagtctcaattttctctccataaaatggagctaattataattccagtaggtaacttataaagtgattattagtagcagagttttttaaaaagcctccaattgtacatcattttataggtgaggatgctaggcccaaagaggtcaatgatctgggcctgaatggaacccaggtcactcaacactccatccttttcacttcacctcattatcttctttgcaaaattctaagtcattcccccaaaacatcacattgtttttatgcccattttagagttgggtgcattgaataattttgcaactcttcaaacccagatcattcaggcatgatatatattataacagcctcataattaaaactctcagcttgacctttc

SEQ ID NO: 847852 - DNA, 609 bp, Homo sapiens
agttcatgtcccagctcccccatttactagatgaatggccttgagcaagtccttggagatttcctaaggactttcctcatctagaaaacggtgcataatttaaattttttccagttgtcttcaaggtatgtagaaactcttatagtcaggaacccaagatttggagtcagttattacaggctataactttcctggctatgtgaacttgagcaatgttctcaatctctctctctctgagtctcaattttctctccataaaatggagctaattataattccagtaggtaacttataaagtgattattagtagcagagttttttaaaaagcctccaattgtacatcattttataggtgaggatgctaggcccaaagaggtcaatgatctgggcctgaatggaacccaggtcactcaacactccatccttttcacttcacctcattatcttctttgcaaaattctaagtcattcccccaaaacatcacattgtttttatgcccattttagagttgggtgcattgmataattttgcaactcttcaaacccagatcattcaggcatgatatatattataacagcctcataattaaaactctcagcttgacctttc

SEQ ID NO: 847853 - DNA, 491 bp, Homo sapiens
catgtttgtgttgggttttctgtcccttgtaagttacaagttacagctgagatagtcccaacagttacaagattcttcaagttttgtattatagattaaattccaagcaaaccatgcaagaaaatytaatagagagcttggtagagttgagaggaaaaagagcttctgtctacaattcgaccttagcttaatgaaacataccatggtttttttttttttagcccccttctcctccacacctacacaaacaccaatatttgttcaaatacaagttttagcatttttttttttttagctgtgccgacttggaaaattcctaaacctctctgaacctcatctccttcatctgaaaagcaaatatattaatatctgactcttatggctgatatgaatataaaaggacacaattcctaaaaatgcacagttttttttacagagtagataatatattactataactactggttaaataaatgtgtatggggtagtct

SEQ ID NO: 847854 - DNA, 565 bp, Homo sapiens
tctgtggctccagttccttgtgggaaggcattgacattcttcttcaggcgccagaaacttccacagagaatgtaagtggtacgcttatagagcaccaacctggaaaccacacatcctgaattttaagctctttagaataaggcaacatacaaaagacatatgattgtgtgggataagcatttgctggtttaacatgtaaaaattatcaagcatgtccattatgggtacacattcccgtagacgctaaaactgtgtgttacaggtcttatatatttactcatattataatttccaacatatactcagaacaaagaagttctagatttaccataacactaagaataatgacttgcttttttgtttttgttttttaaatgatttctatatttattaattaaattaatgcttgcatattatttttaaagtctgttactattattcattsagccaataaaatgtatcatcttttaagtctcaggtatgattctgaaattccaagaaaatagtagtgaacaaaatcatcaaggatctgactctgtcatggaattaattagcttgcagtaat

SEQ ID NO: 847855 - DNA, 559 bp, Homo sapiens
atgtcttctacgaggttttgtggaatccatcacatcttcatggactattatgccatctgtgagtaaaaataactttaattcttcctttcmactctcagtgacttttttctctttcttgcctaattgccctgacaggaacacccagtatctgttgactagaaaaggtaaagacagacaccttgttctgtttctgatcataatgggaaggattcggtctgtcagcctgaagtaggaacattagctacagagttttttcctaactgccttctgtcagatcaggaaaactttttctctattcctagttttctgagagtttttatcaggaatacgttttttgttttgtcaaatactttttctgtgtttgttgagatgataggtggggttttttttttcgttttcaatttcctaatgtgtttttttgcggtggctgattttcaaatgttaaatcatcattgaatccctgcaatacaactactcggtggtgattcattttttatattattgacttcggtttgctaaaaaaatgtttttaagagtgtttccctctacgatggattga

SEQ ID NO: 847856 - DNA, 486 bp, Homo sapiens
aggatatccttaaaagttagggatgacttgagagattcttttgtggaggaaatttatgaattcctctattaacaatgagaggactttagaaggggtaaatgggaagagaagcacctgaagcattttctccttagtaagagccgaccagtacataagtcttcctttccccagtggatatggctaaatagcttaactttgctctcctgtccacccttgtgccaaaaaaattcagtctctaatttatgtcatgtagaaaaaaatcaagaaatgtcttttttattcctatttctattttgggtaaccttcctttaggatgcccaactaatcaagaggcttaaaatatgtgctgatttactacactgtctttccccagtttattgactgggacagactgtaatgagygatgtgaaaccatgaacagaaatctgtgagtgtggaggggcttatgttttgaccacttcagggagtcatgtagcttatctacat

SEQ ID NO: 847857 - DNA, 585 bp, Homo sapiens
tatctgggtacagttggaactggactaggtggaggagctgcccgaccaggggtgcttctctcaaaagcagtcagcttctctgctgtgrgggcagaagaggctggaagtaccacccatccaaatacccttctctctagcgtggtgactgacgctccctctcctctataagaagttacaagagcctctgctgaagacctctttaagtatgacacagagcccaaaaaagaaaagagtgataaatccaagtccataaaaaggaaaattttccacattacaacatccaccaagagcaaagacaaaaaaaaaaatgacaaacaagggaaaagtttttaaacttgtcctatagacaaagggctaattccctaatttataaagagctgttacaactcaataaggaaaagaccaataatcaatacaaaaataggcagaggctatgagcagataagaaattcaaatatataaaaatattctcagtctccttcattttaacaaaagtgaaaattaaaactgcacttagatataatttttccccatcagattagcaaatactgtaaaaatagatgaaatatttgttgggagtgtcgg

SEQ ID NO: 847858 - DNA, 604 bp, Homo sapiens
caggaaagaccaagtgctcagtcatgtttgctgatgatgacgaagaccataactccatttctcaatgcatgtttctaggaaaagaagaagacagggagtcaggaattcccataaactgtcaaagaagggattcaggtgacagatggaggctgtgttaatcaggattctttggttgcaagtgaactagttgagaaatgtattggcttaaatgtccaaactgcaggaacagcaaaagtgcagctaggcttctggatgactggaaccaggatgtggtcagcacttccttttccttctttctcattcttttctctgcctatggacctcattctctcacatgatcctccttcccaagacttcaactatggcagcattcccagactcacatctcagcttcaggaccagaggggagattgtgttctctcctcagtttgcatgtaaaaaaccccagaaaagagctctgattggctcagggtgggtcacctgtccatctccagaggcaagagctgggagcctgtggttggyagctttcaactagtagcaaggccagtgaaagtggcatcttgggatccacctatatgcaggaagagaagtgccaggaaggata

SEQ ID NO: 847859 - DNA, 603 bp, Homo sapiens
tgccttatgccaggcactggggagagatctgtgaacataccaggcaaaaatctcagcctttatggggtgcattgttgggcaagacagataaacaaatgaataaaataagtactatattatatggygataattgctttggagaacagtaaaataaggagaaacaattctaaaagccattttaagtagggggtatcatgaaggccttattgaagggacatttgaataaagacttagaggaggtgggccaggcacggtggctcacgcctgtaatcccagcactttgggaggctggggcaggcagatcacgagatcaggagatcgagaacatcctggccaacatggtgaaatcccatctctactaaaaatagaaaaaaaattatctgggtgtggtggcacgtgcctgtaatcccagctactcagtaggctgaggcaggagaatcgcttgaacccgggagatggagattgcagtgagcagagatcacaccactgcactccagcctagcgacagagtgagactctgtctcaaaaaaaaaacaaaaacaaaaacaaaaaacaaaacaaaaaaaaacttagaggagttgaggaggcagacatttggggcaa

SEQ ID NO: 847860 - DNA, 641 bp, Homo sapiens
caatgcaatatatcttgcataagtattgcttacaagactgtggcactgggactatttaactacatgctgtggtagcactrtgtgtactggggttaataaaaatggaaaaaaactcacatgaagtttagagactaaatcccatttcttctctgttttggtaaagcaaagtattctgtgttctgttgtatagttcaacaggtcaggctttttttttttttttttttaactgttgtcacctttgagggaagtccaatattttatgtaaatacgtactagaaaaataaatatcaatcacatttctctaatctgcatgaacttgaaatacttatacaaatagatttatgatatgtagtccagaaagtaccatgggatggaggtgaggcaacaacttttgagcaggagactggcagttggcgttttaaaatttacagtggtaaactagttattaaatctacaagaattatatatctgtgctcagaagatactgagaattacagaagattcattctcaaagagtgaggagaaagaaagaacttttttcccataatttcatgtcccaaatcaaaatgagttttaccacctaagggattttattttcgttcttatctattattatgtttattagtaaagttaggcattaa

SEQ ID NO: 847861 - DNA, 551 bp, Homo sapiens
gtagcttttcaggtttgaatttgccagaaaataaactcttttctgttagagggatggggtagtcttttgattgcttggggtaaagaccgaaatctggcagttgatctcgctctatgaagatcagtccccatcttttttgtgacccctacttctggtgcttctcatgacttttatggcgcgacataaggtcccccttcagtaagcacttagactgtagctgccttgactctaccatgtattctgttctccaaaaatttgtagaaattgttcattcattcctcttttctctatcctcatttgtattcatttgtcattgcttgagttttgacgtgaaagagacaataaaagcatgcgatcaatctgccgtgtttcagatatggatttctcatgacagatttcaggcatggcagatgatactggaaggatgccgtatgaattaagactgtagcccaaggttgaaaatgggagctgaagatctttgtaaaagtgagatgctgtcctcctttgttatccatatcctccaatstattttgcactagtgtcattttaag

SEQ ID NO: 847862 - DNA, 623 bp, Homo sapiens
gaagagaagacatttttagtaagtgattttccttataggagcttatatgctataagttacaataaagaatatgggcttttgatcacactgagtaaggtttagtacttgagtgactttaaacaatttactctgtgggttttaacgttcttatctataaaatggggatacaaatatcatccacctgcctcaaactttgttatatgatcctaagagataatgtatatatatataaagtggttcatattagtgagttcttaaagatattattacctccccttcctatctgttcttcaatgttctttctaagggttatactatggttttggggaagtaggttgaaaaatgtgtgggtggctatttcctaagattgttttttttacagtaaataagctttcttataaattttctaatactttgcaccaattctataaaactctgcatgaatctagaacataacttgattctttatcagtaatgttaaatattctccctctcatctgcttatctgccaatgrggaatttgttttgtaatgaagctgtcctttcttattaaggattaagctagaatgcatcaactatttagaaacaaagatacatattagaatatgcacacaactgctgaa

SEQ ID NO: 847863 - DNA, 475 bp, Homo sapiens
ttattttccagttaactctgaaaaagagaggctcatccagttgttatttacctcattgccatgaaaattcatccagttactactgtctcattcccaagaatcattgaggaaatgtcttgtccttaagctttgtatagttaactttggaacaccatttttccattcaaagacttaccattacactttaaacatagaatataaacataaggtaagatgctggcaaaataaaaattatgaactacttcatttctgtgaatttagctcatgataactaaatttggataaattttgcaaagatggattttgatccagatttaagatttaatcagtggctttacaatttaagttagtttacaatgaattaaaggaactcctttttatgcagagggttttaaaaaatcaggttttcaatttttcaaatgrtcttttaaaaacatttctatcataacaaatgtgggttaccaaattataagga

SEQ ID NO: 847864 - DNA, 659 bp, Homo sapiens
aaatgaatctgacttactttataagaagaagggcttggcattctgatggagtcctggaaatagattcttggagacacagctatgtattggtcttcctacatttgtctctgtgattgtggattatgatgcaggtggactttgctcctttcccctgtgctatgcagcaaagtgaccttgaacaagctgccagccctactggatcatgattactcatattttgaggagaggactgaagtaacatgatctctgaagttcattttagccttaagatccagtgaaaagttagcattaatcctaggaaaatagttagagataaggatggtggagtgcagttattttaagtgctggaaaaattgtagctctctggaggaattgaatcttctgaaattattcactttgtaatacaggggagcttaaaaggtccaccctcccatctttctacatatacttaaaggcagttaaattgctgctaaaaatgtgaaatggaggtgtgaacatttctagaggcaattaagtagttctgcmttttactggtaaattctatcattcttaaaaaaagagagaggtttatataaaaatggagaaaaaggaaattgcatgtgcagatgtaaaataccatctgtgcttctggattctttccatgctccacaccttcgttg

SEQ ID NO: 847865 - DNA, 634 bp, Homo sapiens
catcctcaaattgtggtatccaaggaaagtcttggaaccaattctccagggatactaagggtcaactgcatttgcaaataagaaatcaagaaatgtccttctcctgcacaggcgcttcacttaaaagagattcaacacaaacacagcacagaggcacttgtgtgtgatataataacataaaaaattatacttggacagcagagaaatggcttcatattttaaaaactataaaatctgctaatgaaccacaactgattctgctgtagttttcttaatgcatccttccgtaaatgcacttgcactagttattataatacaatgatatatttcacacttgaaaacacaaaataattcctgtatctgcttggagattcatttttacttctattcaaaccaggttatacaaaatatatattacaatttaaaagaataagacaataatttctaaaattaaagtctatagtgaaagaaattactctataggtcttctctttaacatatctgractaaagagaaataagcttttaacccaggtagacactcactgagagaccttacatagatagaccttactaaaaggcatgcaagaaacagaatcactagtaaaaagcagaatgagaagtcaaacagttct

SEQ ID NO: 847866 - DNA, 385 bp, Homo sapiens
caaaggatcctctaatcagacgaagggcatgaacttgagcttcagtcgtccagtttcttcagatctaataaaaataacaattaattagttaaatgacattgggcaaatcacctaacttccctgtgcctaattttcctcatctgtaaaatgggatacaaatagcaactaactcataaggctgtagtaagaactacatgaaaaaatgtaagcgaagtgctcagaacagagcctggtgcatcagacagatctgttggctgtgggggagttgttgttgyactttgccattcacaaggattttaggtgttagttttacctccattttacagaatagggacctaatgtttgggaaagtgtaagtaacttgcttaaggagtacagagctaga

SEQ ID NO: 847867 - DNA, 631 bp, Homo sapiens
acaagcagcaggggaagcgcaaggagggcgagtgccatgaggggcaacaccaagtgtctgccagggcctggggcctgtctcagcagagaggtggttaagatggaggaggggcttgtgggccgtggtgagggggrtgggttgtaacctgaaggatgtgggctgtcaattagcagcagtaccagcagcagcagaatgcaggagccgcgctcgctgcagtgctaacagctggtatttcctaggcacttaatacgtgcagagccctgtgctaggtccctacattctcccgcatgttcaccacagaaggtagggccgggtattgtctgtatttggcagatgaggtgactttgtactgagcctgaggccacccagtgaatctgaagcagagtcagccgcagtcccatactcctctctgggaccctggataaagtgcagcctccctgctaggttcccccagatccccaggggccccagtgcaggcttctccactgacatctgcggtactcctccctctgggcctgcctgtcttcctcacccagagccagcaccacctggcctgcatttaccctccctccccagggcctagcctggagcctgccaggaagccctgtccccagatagtgcactttgaaat

SEQ ID NO: 847868 - DNA, 457 bp, Homo sapiens
ggaagacttttcccagtagtagcagcacgaagtgactgctgcttgattcctgtggatatgtgtatgatttgggggatggaagtggaagggaggcttcctttctctggaatcccaaggagtggagcatagctcaaaggaacaaccatgtgtgagagacacctctatcacctggagccatctagctgccccccagcatccagaggaaaaggagcctcagagcctctgggccactcccaaaggagtccagagaaagtcttggatctggtagcctgctgccccccaactgcatggggaggtggagatggactgtcagccaggtggacgtcctccaagcactgagggaactgctggtgatggacgcacctgccggagccagagccttagaccagggtttgtcytgctggtctggagggtggaaaggcaggatcctcagagattggccgagcaccaacctcct

SEQ ID NO: 847869 - DNA, 386 bp, Homo sapiens
aggacaatattgagtggatttacagacctcagatatggccaagttccagccgtagtgggctgggatccatgaggtcagcagatggctgaccacaggagtggccatttcccagccaaaagaagtaacacagcaacgggtcagctgctccagctttggggtacttggccctctcacagcaaaagtttcagcctgtggcttatgtattagtttcctagaaccacaataacaaattattacactctgtgtggcttaaaacagaaatctattctctcagagtatggaggccagaggtccaaaatyaaggtgtcagcagagccaagctccctctgaaggctctagggggaaagcccttcctagcttcttccagcttctggtggccttagaat

SEQ ID NO: 847870 - DNA, 513 bp, Homo sapiens
ttcatcattagcttggaaagtgacagaactggcccatcaccctgactgtcactccaaattataacagagctacagtcacaatatcctatagccagtaccacctccttcactcaagacagctacctagagacgcatgagaatcactcactcactcactcactcactcactcactcaattaacagaatatcaatggggccactgctctgtgccagggactaagacgtggtagtgaacaatggttcattcaatgttcttttcagtttaacagctgcccttcacccattttacaggtggcaaagctgagtccagggaaaggcagcaacttctcaaagccatacagggagccaatggtcaagagcggagccccacgctgccgctgttggtgctgacagtgggccagccctgggaagaaggagagaaggccgcatgttcaccgtccccacccccagccgtgtctaggacaccaaggtattkattaccaccctcgccttagagtggttttcttttctttt

SEQ ID NO: 847871 - DNA, 632 bp, Homo sapiens
tcagtctgcattggttgagcacccagtccatgcagtccctgggaactctgagatgagtccctagtctggagtcaggcagctagagggagaaaggtgcttccacagaggttctgcggaagtcctgcccggggcttcctgaatgttgccccagggagtaaggagtgactgagctgggtctaagatgacgccattcagtacagtagccactggccacatgtggctgtttgtgaatttcaattaattaaagggatgagttaagcttatccttggcactaaccacattcaagcactcagtagccaccgaaggctggtagccgccttgttgggcagctcagactctagaacatgtccaccacaacaggaagctccatggacgacagacagcgctgtccaggaggatagacttaagacagaggtgcagtgaggacactagctcagagcccacaagtgtaacagtgcaggcgagtctgttagataaagagacctcctgtttctctagcatttgttttgtggcagcctgctgcggggaaggagtagaccagcsaggcattcccatttaacacaggagaaaactgaggttcacttttgcccaaggtcatccagcaagagggtggcatgagtcccaggtctcc

SEQ ID NO: 847872 - DNA, 254 bp, Homo sapiens
ctcgcagccctcgctcctcctgggggctggcctgccatgcagggggyggaggcaccacaggggaatcagggctttcctccaatgtcacgggccaccccctgctcagccaaggacagcccttgtcctcctgcccctagtggagtggtttccataaagggaataaaggcaggctggctgcgtgacagggccttgctgtacagtctggcatgccgcaaacaggcgtgatatgtggatcagccagccacaaaggccac

SEQ ID NO: 847873 - DNA, 521 bp, Homo sapiens
ggtcaggcgagctcctcacaggtgctctggaccacgctagcagccgctaagcccgtgcaggtggacaaccactgtggctgtagagcgacaatcgcccagaattggtgtcatctcagsgcctccactgtgtcccaagtcatctcggatgccctaccctccgcactgctgctctttagacctgccgtctcctccctgcccgcacaggcctgtgattgagctctgcatcccttcctcgctggaccccaccctggctccccctggctgccatgtagtctccctcttcactcagtacatgccctatacgctggctggaggcaaggcctgggacgagcaggagagagacgcttatgcagacagaggtaaagacagctgcacgttctgcctccagagccacagccgggcatgcgacccaactgggcctgctcctcctcactgccccattcaggattgacaactgcaggtgccattccaaagggaggaaatagtcaagggaacctcaagtcaacatagttgactgcagg

SEQ ID NO: 847874 - DNA, 521 bp, Homo sapiens
ggtcaggcgagctcctcacaggtgctctggaccacgctagcagccgctaagcccgtgcaggtggacaaccactgtggctgtagagcgacaatcgcccagaattggtgtcatctcagggcctccactgtgtcccaagtcatctcggatgccctaccctccgcactgctgctctttagacctgccgtctcctccctgcccgcacaggcctgtgattgagctctgcatcccttcctcgctggaccccaccctggctccccctggctgccatgtagtctccctcttcactcagtacatgccctatacgctggctggaggcaaggcctgggacgagcaggagagagacgcttatgcagacagaggtaaagacagctgcacgttctgcctccagagccacagccgggcatgcgacccaactgggcctgctcctcctcactgccccattcaggattgacaactgcaggtgccrttccaaagggaggaaatagtcaagggaacctcaagtcaacatagttgactgcagg

SEQ ID NO: 847875 - DNA, 661 bp, Homo sapiens
agttgactgcaggggtcaggaactgggctaagaaagtcaagaagacacagttcctgccctccagttgctcacagtctagcaagggatggaggagactaattaagaaaccttttattacagcacagctgactgcacgaaccaaaggagacgcatgagccagagagacaaggaaggctttcaaaggaagggatggtcaagctgggtttccaaggatgactaggagctggccaggcagcaaagggcattccaagcaagagaaacagcttgatcaggccaggcgtgggggctcatgcctgtaattccagcacttcgggaggccgaggcaggcggatcacccgaggtcaggagttcaagaccagcctgaccaacatggtgaaaccccgtagctactaaaaacataaaaaaattagcagggtgtggtggcacatgcctgtaatcttagctgctcaggaggctgaggcaggagaatcgtttgaacccagaggcggaggttgcagtgagctgagattgcgccactgcactccagcctgggtgacagagygagactccgtctcaaaaaaaaaaaaaaaaaaaaaaaaaacagcttgagaaaagtgaagaggtgaaaaaagctgcatatgcaaaaggagatcagcagcttcgtgtttaaggttggggtagg

SEQ ID NO: 847876 - DNA, 384 bp, Homo sapiens
caaaggatcctctaatcagacgaagggcatgaacttgagcttcagtcgtccagtttcttcagatctaataaaaataacaattaattagttaaatgacattgggcaaatcacctaacttccctgtgcctaattttcctcatctgtaaaatgggatacaaatagcaactaactcataaggctgtagtaagaactacatgaaaaaatgtaagcgaagtgctcagaacagagcctggtgcatcagacagatctgttggctgtgggggagttgttgttgyactttgccattcacaaggattttaggtgttagttttacctccattttacagaatagggacctaatgtttgggaaagtgtaagtaacttgcttaaggagtacagagctag

SEQ ID NO: 847877 - DNA, 624 bp, Homo sapiens
gcaggggaagcgcaaggagggcgagtgccatgaggggcaacaccaagtgtctgccagggcctggggcctgtctcagcagagaggtggttaagatggaggaggggcttgtgggccgtgctgagggggrtgggttgtaacctgaaggatgtgggctgtcaattagcagcagtagcagcagcagcagaatgcaggagccgcgctcgctgcagtgctaacagctggtatttcctaggcacttaatacgtgcagagccctgtgctaggtccctacattctcccgcatgttcaccacagaaggtagggccgggtattgtctgtatttggcagatgaggtgactttgtactgagcctgaggccacccagtgaatctgaagcagagtcagccgcagtcccatactcctctctgggaccctggataaagtgcagcctccctgctaggttcccccagatccccaggggccccagtgcaggcttctccactgacatctgcggtactcctccctctgggcctgcctgtcttcctcacccagagccagcaccacctggcctgcatttaccctccctccccagggcctagcctggagcctgccaggaagccctgtccccagatagtgcactttgaaat

SEQ ID NO: 847878 - DNA, 571 bp, Homo sapiens
tttacttgaacattttacgtgcggcattttgtaactcaatggatcagtaatttaaaacatttattttattttattttattttaattttttttgagrcggagttttgctcttgtcacccaggctggagtgcaatggcatgatctcggctcgctgcaacctctacttcccgggttcaagcaattctcctgcctcaatctcctgagtagctgggattgcaggcagccgccatcatgcctggctaacttttgtatttttagtagagacggggtttcgccatgttggccaggctgatctcgaactcctgatctcaggtgacccgcctgcctcagcctctgaaagtgctgagattacaggcgtgaaccaccacgcccggcctgattttatattaatataaacaaagattcatctcccagctctgccactttgtgaaggttaaggtgtcacttagcctctccgagtcacggtaaaatggaacaatggcacctgccctcacagagctgctgtgaaggtaatagatcatttgctgctaggacctggcacatgcagccttgcccaaatggtggctgttatt

SEQ ID NO: 847879 - DNA, 595 bp, Homo sapiens
ggtatgcctcctgcccaacccctagctgactgtgctgggatacttccatcctgccaaccycctaccccccagcccagcagcctccgcattccccatgcctctgcccagctctccttttctccataacattcattgccgtctgatgtgccatatgctttgtttattcatcttctttcttgttcatctcctccacaaggacatatcctccattactcgggcatttttgtctgttattcacagctataacttcagcacctagaacggtgcctggcacataatagatgctcaataaaatatttttaaacaattgaatgaattgtgagaggggctctgaaaggggcagaaagtctagaagtggccttttttcaggacagtcaggcccaacccaggtctgggccatgtggcaggctcaggaggcccaagaagaccagtccagcaggtgaggcacacttgcatctgcaggacttggagatggccagtggggaagactagacaaaccggtggacgtgagtgcgacacagggagtgtggacaatgctgcttgatggacacaatgtggaggaggtgggggatccatccaggcccagacatgcagg

SEQ ID NO: 847880 - DNA, 530 bp, Homo sapiens
ggcagaattctcctttcccaagctctgccaacacccaaacccctccccagaagacagctggttcacacaacagaggaacagacccctcacgactctgcagggggaattcctttctgggagagaacacatgtccaatagggccagtccccactcaggctgctgctgtcactcagccagaaggcaggacaggcttttgaagctgtgatatttctgagtttggttttggacaaaaacaccattcttcctcatagcctttcacaccctgattcaagcaattttaactgaattctatttcccttcaatagaaggctatttgaagatacaaaaaccatatttgtgaatgaattctaggattgtatttgcagagtcactcctgttggatttcgtgctctataccaagtgtatttctacctctgggcctcagaaccattyctcacaccccccaacaatatctcatgccctcatatcccaaatatgcaattacctatcagttgtgaaaggtaaaaataaaattcatatgggtttcatag

SEQ ID NO: 847881 - DNA, 597 bp, Homo sapiens
caaggaaggaacatgtttttyttggacaaagacaaatgacctctatccctcccaaagccgagtagtttttggaaaggcacttcctctttttaaatctaatatatgcatgctttctacctgggaggcagaagccacagaggggtccaatgagagccttgcgggcttgccagtcttctctgtgggtcactggctggttttgcagaacatctgcccctctgaagcaggctgagaaccagtctgcctgggggtctgatcatttccactaatttgtaatggcagtgctggaaacacttgcagctcaggggcctgtcacctaggcttggcttggaaaaggaggtggtagactttgaggagagacagaaaggagggagagagagagagagaaaaaaaaaaaaaaggaaagggggaaagaaagaacaaggaacaaaaaacaaaggaagcagaacgtatgtaactctcaccgttagcttcagagcatagcacagttcacttttgactgcatgacatcaagtctcttgttaaaatattttctaaattgagtataatttacatgtaataaaattcaccttttgaagtgtacaatttaatgagtttgac

SEQ ID NO: 847882 - DNA, 224 bp, Homo sapiens
tttgttgggttgttttgggccttcctttaaaggacgctgcgctgtgttctgcgtggagttcagctccttgctcttcactttggtcttcgtgtggctggttctgaagcctcttagagcaggtccagcccagcctttcctgcaggaagagtccagccccactcccaggacgggccctgctgggtggctgccracagcccaggatcctccaggactctccccctggc

SEQ ID NO: 847883 - DNA, 602 bp, Homo sapiens
acgccatccccgaggcagaaagacggccaggggaggggaggaggtggggaaagcagacrgacggggaggcggggggagcccagggccaggagtgtcaggggcaggcacttgagacagaggcaccctgaggtttcccagcaggcaattgataccctggcctgcagcggggaggaaccggggctgggctggaggcctggggacgcctggggctgccccaattcccagcagacacctcaccctctgggaagccccagctgccccagatccctcccacaatgctctgaccacccccaacccccaagtcctctcccttctgtccccaagcccgaggccttggagctgcccccgccctgggccatgagagctggacacagagccctccaagttccacgggcctcctgcaccgccgcctgctccgccctcctgccctccccctcggcctcccctgtgagggctgcccacctaggtgaccccggagccgcctcctcacgcctccatctgctctgcacaccgtccactagcctgacagctgcccaaagcctccagagcacagaacgggcctggtgtctgcgcctccgtctcggggtgggccacggccggtt

SEQ ID NO: 847884 - DNA, 598 bp, Homo sapiens
tgaggccctccacacagccccgacctgggtctccatggatccccacagggtcagccccacaccccaacctcccggcagggccgtctccaggggactgtccagaaacccccaaagatgcttcccttttctgttgatgggagcccctgggcacagaggatgggacagcggctgtgggtacccgagggctggagccacaccctaagggatggagggcagggtccggggcccagttaagggctccccctccactcctgcgccttcaaggtcggcctgcacctcccctgctctgtgccagtgcaggccaggcagggggctgaggccgaggcctggccattgccctcctggtcacgatctggtgaaggatttgagtccagaagccaaacgtctacagtcgtgtggtgcggacactcaggatggactgcccaggccatggggggctctgaatgaagaggaacctgcgggggcraggtgggctgcgcgtctgcaagaaagtgcatgagttgagtgctgctgcagagggaagctggggtccaccgctggtgagcggggaggggacgggacacagaaccggccgtggcccaccccgagacggaggcgc

SEQ ID NO: 847885 - DNA, 551 bp, Homo sapiens
gtgagccaggctgggaaccctggggactggaggagacccccatctgctctggctggggcagggcccactggggcactgggagcagggaggacacggggcactgggagcagggaggacacggggcactgggagcagggaggacactgggcccagaccgggaccctggcctgggagctgcgccggaccttgcgcctggagaagcttcccacgacgaggcggccattgcgtctgctggccccggcatcctccccagactccacgtcctcttcagccttgctctgagtccaggggagagacagggacaaggtgagtctagccttgaaccaggcagggaggccgggacagcccctggtggtcccagaaggccttcctggaagaggtgggcttgagccaggtctggagtaaggcagacgggaggggaggkcagggcggggacaggttggggagcccccgtggcagccgttcccagtccaccctggggcagaggcagctgccgaggagaagcggcctgaaagtcaggccccggtggaaacattcgctcacacctgcct

SEQ ID NO: 847886 - DNA, 590 bp, Homo sapiens
atcctggatacaactgcagcgattctcaatggtagggtagggaatggatcccagtgcctcctctatgggccttcttagacccatcccaaggagagggggtggggcatgctgccacaacctaraatttagcagctagccagatgtaaggtcaccaggaaagaggtgaggtgggtaaggatgagggccagatctagtttagggacctgaatttctgtatctcaagcaaaagagactctcaactctgctcataagccaccaggcccaactccttcctgggctaccccatggcaggccaggtcatctagctggcccgggaactttagaaaatttctaaagagcagggggtgcatcgtggggaaggaggaaggggagagagtggcatatctaagagctgtctttagggtgacatccacatggcatcaagacctcagcctttaggtctatcagaaagggcagtgggacctagcttctccaatcatgattcactagcctggcatcttacagcatttttacaaaacctcctttgctttcttggatttttgttacgaatgttaaaatgaaagcctagggacattgaacaatttacctga

SEQ ID NO: 847887 - DNA, 633 bp, Homo sapiens
gtaagtaataaacaatgaagagaaaaacaggttcagatgttaaataacttgcccaaattaattgaatcttctcacttggctttcctcagccttttatggaagggcagtgatcaccctcccttgggagccctctggaagggttcaaggactcacaggctgacacccataacacaggtgtggtagtggggaaacagaaaacggtggtagggtgtttcagccaattctatgggaggctaaagggaagcacacatactgggaatggcacagtaggagttgccagttaattcccatctaggaggccatgctagggatacccattagtccccttcaactctttaaagtcttgaacagtttaattgttagcaccacagtcccctgcagccctgaggactccattctgggcctaaagactcttaagggatcctgactggctttctgtgggtaaatctgacagatcaagtagagtgaaagaaaactgctgatctcctctcctgggtttctctgtgttcagcaaatgccctcaggccagcctttatacagcaggtagctctccaggtttcaggagtcctctgatagctgcaaagacacaaggtagaaaattaagaaagmtccctattagggggcttcccagcc

SEQ ID NO: 847888 - DNA, 625 bp, Homo sapiens
aagctgggaattacgtctcaaagtaggaactattggcaaaaggatgggatgaagatttcaatggaggaaggctatgtttactgtaggaaaatgttgtactcttataataaaagtcttaatagacttttattaaggccttaagtgctagattcaagatggctgcccctcttgttctgtgggtccagtgttctatttggtggactaagggtgaccttgcagccccttacagcccagccaagagagcttcactgtgaaggggcagacatcttcattactattttctcttccaaaaactcatataactctttgtgagtactgcctcttctcctcattccacagtgaatttctccccacctggtgacacaaacagccttttcccaggtacttggtacctggagcgagtggacgagcagcatcgccgaaagtatgcccggcgtcccgtctaaaggtggtgagtgagagtttgcagagttggtggcataaaaccctaatgtcttcctctgrgtaacaacacagagagagaaggtggggacaggtgcagggagaagaaagtttaatggaagaggattggggtgacaggagaaatgggagaattatctgtggaatttttaaaaggaaaagcaag

SEQ ID NO: 847889 - DNA, 535 bp, Homo sapiens
gaacactgacgccactaaatgctggggtggatgtggagcaacaagaactctcattccttgctagtggggatgcaaatgggacacacaytttggaaggcagtttgggagtttcttacaaaactaaaattttttttgtaagaaaaaaattcattcggtcaccatagagatgtcaaaaattgccaatgctggccgggtgcggtggctcacacctgtaatcccagcactttgggaggccaaggtgggcagatcacttgaggccaggagttcaagaccagcctggccaacagggtgaaaccctgtctctactaaaaaaaaaaatacaaaaattaggccaggcgtggatggctcatgcctgtaatcccaggactttgggaggccgaggcaggtggatcacctgaggtcaggagttcaagatcagcctggccaacatggtgaaaccccgtctctactaaaaatacaaaaaaaatagctggacgcagtggcacgcacccgtagtcccagctactcgggaggctgaggctggagaatcgcttga

SEQ ID NO: 847890 - DNA, 488 bp, Homo sapiens
tgtctctacaaaaactacaaaaactagccaggcatggtggcgcatgcctgtaagtctcagctactcagggggctgaggtgagaggactgcttgagcccaggaggtcaaggctgccctactgcactccagcctgggtgacagagcaagcccctgtctcaggaaaaaagaaaagaaaaaaaaaaaaaggaatgaagtactgatacctgctacaatatagatgaactttgaaaatattatgctaagtgtaagaagccaggcacaggaggacatatattgtatgattccttttatatgaaatagctacaataggtaaatacatagagacagaaagcaaactttggttgccaggagctggcaggaggaagtaaagtagatagactgcttaatgaatattggttttcttttaggtgatgaaatggtttggraactagatggaggtagtggttgcacagcattatgaatgtactaaacaccactgaattgtaaac

SEQ ID NO: 847891 - DNA, 474 bp, Homo sapiens
tgccccatccacgctttgctcatctattgacgaaagagctggctgagcactttctgtgttaggcgaggcctggggactgttacctgctctgtrccactgagcaatccctacgggcctgattctcagcgagcaccctgtcccacccagaccagacctgtggattagcctcaggcctcagggacaagcctcagctctcagccaagcagtgcccaactgcactttccccacctccactcccacccgacagggccattgcaagcagacagggttggcaggaattggggactttcaaataaccaatcagtgggacctaaggaaatatatgcaaatgaaaatgcaaatcaccactcagtctttttgcatctgctgccagccggaccacctgccctaggtgagcacttccttccttttgacagggaggatgcgagctcccgtccagcaggaagcgggctggaggtctgaggttcttgcagt

SEQ ID NO: 847892 - DNA, 659 bp, Homo sapiens
cataacaatacaacacttgactctcatacacctccaagtacttgccacctccatctgttcattkcgcccagcaccatcccttccagggagaaaagaattgttcttcccattttacagagcaagaaactgaggctcagggcccgcccaaagtcacaaccagcagatggtggcacgagggcccaaaccccggcctcctcattccaaggggagggctctctcttggacactttgggtttccggggcttcttagaccaagagagcaaatgcatgttcccccgccagagaggcatccccccttccagccctctcccgacttcccagttgcaatcttaggcactaacagccaggaaacataaattttgcctggcagttgagtaagagctctgaaaggagttacacgtcagggggatggggctttatttctcaatgaaatggcctttttatggttggaataaaagtgccagggggagcgtcatgccaggcagtagcaaattatttgataaactcctccagctaggggtggggctgcgtgggaggtggcggccagagagaagatccccccatttccagatgcatgtttctcttcaggttaaccctgtggaagaccccggggggcctcgtgggccacccagctggagaagggctggccctgggaccat

SEQ ID NO: 847893 - DNA, 628 bp, Homo sapiens
taccatgtcagcttcagcctgggggctcctccaatttttcccattaggagcccttagcacatcgctgcaatgtttctggcttattgggaattcctattatagtccattgtcctccctcaaatctgaaaagggatgattgattttgaggaaacaaggcaagttgctgaaggatttctaaatgagccttatgtttgattttggggtcagtctgtgtgggttccaagacaagatggtggctggtaatgattttcaaataaatatattttgtgatcacgaattgcctccgggagaaatctgaaatgtggcaagcagctcaggagagacactgctgcaggtgccgtcagtgccttgctgcagccccttggcgtgtttcaggtcagtgcacttgggcctgactcccatctgccagcacctgcatctctttctttttaaaaaagccaaaaaaatcagtttcatggttcatcttgctaatttcaaaccaaatgtactaaaaaaaatrtgggttaccctttgtaatttaggctttctctattcaataatgatacatcctggtcatttattattacagaggtcttggaatagtagatagcatatctggaactttaaaatctgcaaagatactgtacgc

SEQ ID NO: 847894 - DNA, 600 bp, Homo sapiens
caggtggtaacggccaaagggtcaccgcctccgcggggcgctgcgtccacaacacgggtggggaaacggtcaaggtttgcggcgtttgggttcatgactgcaaaaacaccgtccactacgggccaagccgagtgccatgccctgcacctacgtctaagctcacagcagcccgcactggggcgaggaatcctgaggaggctcgccccggtctctgggactgggctctcgccgcgctgcctcagggcgcaagttccacgcgcttcgccgggcgcagaaaagcaccccccgctccgcggcgcccaggccgcctcccccgacaacgcacctccgcagcgacgcctgcgcctggaaggggctcggcatctagaccgcagccccgcgcgggccacactccccagcaagtgcctcggcagcgtcccaggagactcgccgcgctcgccggagctggacgtggcgccgaggtccgcgtcgccscccgcaccccggtgctcacctgtaccacgcagcagcccagggcatccttctgagcgtcaggagggacgatgttccggggcgtgtggcccgggtgcaagaaatgaaccatggcaaccccggcggcgg

SEQ ID NO: 847895 - DNA, 534 bp, Homo sapiens
agcattgcaattctttttcccagttttttttttttttgagacttttcctgagaaagttttataaacacttcaaataatatgatataggaagtaattcctccttgcctggaagtggggctgagactggagtgctagggctggtgtggaaccaaggccagtgacaaagcagacactgttgcttctatgtggctgtattaaaatgcacccgcccctctgcactgccccacagaccaggatttcaacacagccctgtcgacttgaaagcccaagttcctaaccctgactttgtttcactctgctggggtaaaaccttaccgcagaggctggcatttgctgaaatgaggtcgaggaagtgggaaaggtggttgggagtccaatccaagtctcaccaatgattggataaacacagccaagtgcttcacctccctgcactgcaatctcacagctgtaaaatcacagctgggtsatcagtgatgacaccagcctagaagtgtgggtagcaccattagatgagtctgtgggggaggaaagcac

SEQ ID NO: 847896 - DNA, 644 bp, Homo sapiens
tgcaaagctcagttttgcacagctaacttctttagtagcttagagagatcagaccataagtgccctgagaaaaggagctggttccatttatctctgtcttcttggtaccaactcaggcaagtgcaagggatcacagagatgtttggaaaataatgccttctcctgtaccagggtctttctgagtagtagctcatcttactcttacaccaaatcaatggggtaggtgatgtcatctccatgtttgagatggggaaactgagacccttgaagggattgattttcttcagtatgttgtttgattgccttttaaaaataaaggtattttctgagcatgatgtagttaagatattttatgatgcttttgtgcaaaagtgtcaggtttatgtgtttttctaaatcaaataaatctggcttgccacctccacccccaatttggtaggaaattctatctgttatatggggtaggggttgccccaaatcctggggacttacgaggaatggagtttaagataagggtctgtctttagtcttcagcataaagatgtcccaactataagggtgacattaacaagcttatacttctgaatccttcattgcacaggcttcttcygagggggatcctagcaatgtgtccatgctgtcag

SEQ ID NO: 847897 - DNA, 680 bp, Homo sapiens
taggcagattcctgcttgatcaggatccaaacctcaaaagtaaggagggggtaagaggcagtattctaagtgctttgtatgtcattagtctctactyatttagtctctacaactaccctatgtagtagattatgttattatacaagttttacacatgaggaaacaaaggcaccaagaagttaagatctgcctaaatttcatagatagtaagctgggagatggaacttgtgattgagctggggtttgaagacaagcaaactgcctccagagaccctgtgtgcttgacatcccactccactgcctcatacatgtattaagtgcttactatgtaccaggcacaatgcagatgttctacatgcaatacatatttaatcctcctaacaaacttgagatgtactattaatcacccccgctttagagaccagcacagccacatctgggttaaggcttcacacttataagaaggagtctcctgactgaagtgcaagagttggctttgacctccattcaaggctcaactgagtgaatggtttgtggggaatatcttccctgagaacaatgcaggttttcagcagtaaagtgtccctatgccattgccccagaccagacctagagagcctggagggtggtcaagaaacagtatggacagctcagaattaaagctggtagccagaggccag

SEQ ID NO: 847898 - DNA, 612 bp, Homo sapiens
gaacattcttgcctgtccctttgccagatgcctaacaattccttcattcttgcacaggtgtcaggatttcagtcccccgactctgacacaagtttcccttctcagcaaaccataaataattgctgagactagtggtactactactgctattaataaaattaagaggggtattagacataagatagccgcctggggtttaagcaaaacagaagtgtgttctttctcataaaacagactggaggttggggactatttgggaggtcatttctccttttttcccagtttcaccatccttgggagtggccttgccactacggtcccagatggctcactatcacatctaacattccagccatccatcccgtatgatggaataaacagaagtaaagagagcaagccctttttccttgctcctggagataaagcaatctatgattataacagagaagggtaacaggacaacttgccaatattcatagagcactggctaagtgccttttctaattcaaccctctcaattaccctatggggrtagacactgttattatccccactccctttcaagcagatgatgttttatcaacaagccgactttgcagatctgagaaataa

SEQ ID NO: 847899 - DNA, 521 bp, Homo sapiens
catggcgagcctgagtgcgttgaggtcatgagttaagtcatggaygtgagtaagccaaagccatgagggagagaaaggatacctggggtgagggagagaaactacttcatgaaggaaagagaagcagatcaaggggaggccaacacttggagagtggtattaatagtcacatgggtggtgagcactagagtaaagatccacacattcctgccctggggcccagttccagtctctgaaaggcccccatgccctgctccgcagaatggttcctactctcagctttcatgggatgcctaaccctcatgaggcctcatcaaaacctcattaccagagtgagcctaaaagagtctctgctccatgggaccccagggacagtgttcccatgtccagataaagaaacagattcagagagggaaagtaacttgcccaaattgccacagctaattggcagagcagaaacttgaactaaaattagtgtgattctttttttgagacaggctcttgctctgttgctcaggctg

SEQ ID NO: 847900 - DNA, 356 bp, Homo sapiens
gtaatcagcaggtcgttcagatccttcctgtgctgatgatctccatgtcacccttcagagcagtaaggagaagaaaaatgagctcgcttgctttgagtgtatgtatataggggtagtctcacagttgttaaaaacaatatttattcctggccaacatggtgaaacccgtctctactaaaaacacaaacattagctgggcgtggtggcatgtgcctgtaatcctagctactcgggaggctgaggcaggagaatcgcttgaacctgggaggtggagagtgcagtgagcygagatcacgctactgcactccagcctggccacagaacgagactctgtctcaaaaacaaacaaacaaaca

SEQ ID NO: 847901 - DNA, 610 bp, Homo sapiens
cccaaagatgaataacacccaggtcctgccctatagaagagaacaaaccaaggtaggggacaggagatgttagtaattaactataaaacaaggtagaatatgcatgttaaatagagattctaggaacttggttcacctgcaatttaagcattgcctttgcttgttgctttcacattctaggcctggcatcaattaacactccaaaataatgctaacaagtccaccagggtcatggagtttggctctgcccaagcagtgatcactaactgaagttcaaaattagtactcatacatatttggctgcttatcaaattattctaaaaatctagggaaagatagatacttttcctgattgttgcttagtcatttccacaggacacagaaacctgtggttaaaattaagatgttctttgactgtttaaaatctatatgtctttattaggtgtaggtgggcagagctatgcattggcttaacatttatatactgtaaaggaraccaataagtgtctctatgttattataaaacagtttataatttgaaaaaatatgtaacctggagtgctcagtcagcctagataattaccacagataaagtaacaacatcttggca

SEQ ID NO: 847902 - DNA, 627 bp, Homo sapiens
tatattatgaattttgtattatgcatatggcactatgtattatttgcgaatatgagatacaaaatgtcttcccagtttgtagccttttatttgattttctatggggttttgttgaacagaagtttttaattctattgtatctgcagttattattatcttccattatgatgtgtattttctgtcttaagaaaaccttctttgccctaaggtcttaagatgttctcctatgttttcatcctaaagtttgttgttgttgttttatttttttctttgtaacggagttttgctcttgttgcccaggctggagtgcaatggcatgatctcggctcaccgcaacctccgcctcccgggttcaagcgattctcctgcctcagcttcccgagtggctgggattacaggcatgcaccaccacacccagctagtttttgtattttagtagagacgaggtttctccatgttggtcaggctggtcttgaacccccgacctcaagtgatccgcccacctcagcctcccaaagtrctagggttacaggcatgagccaccacacccagcctcatcctaaagttttaaagtattgcttttcacattcagttacttgtccatataggatatagttttgttatatg

SEQ ID NO: 847903 - DNA, 610 bp, Homo sapiens
ctataacaaaatcacactgtcttaatttctatagctttgggataagtcttgctatctgattagggcagataatcttccaaattcaaaaacctggctcttcaaaattgatttggccttttgwatgatttttagaatcaacatgtcaaattctgtaaataatcctatggagaatttcattggcattgctttgactttttaaatatggctcatattgtcatctttaacttgtcttccactatctatgtatgtggtatttccatttatgcacccttccttttattctttaaataaagttttatacttttttttgaaaagatcttataaatactttgttagattcattcctaggtacttcacgagttttgttactgtgaatgttatctttttaaaaattatagtttctaactgcttttttaaaaaaatagaattgcagttgattttgtgtatggatcttatatctaactactatactgaattctcttgaagttcttacgtgtgcattgtctgcaatggtgacatttttattttatctttctggttcttactgcttttatttctttttcagattgtgctgattagccctacagttttgaatagaagcagtgatagg

SEQ ID NO: 847904 - DNA, 615 bp, Homo sapiens
ggcttttgacaaaggttcaatgataatttagtggagaagagatacagctttcaacaaatggttctgtaacaaattacaaaatatgatactaacataaaaactgacatatagmccagtgaaacaaaatagagcccagaaatacatccattcatggtcataaagctacaacttccttcttttgcatgtggatatctaccttttccaacagaatgtgcaaaaaaaattccatccataccttgtaccatatacaaaaattaactcaaaatatattgcagatctaggctgggcagagtggctcacacctgtaatcccagctttttgggaggctgaggtgggcaggtcaattgaggccagaagtttgagaccagcctggccaacatggtgaaaccccatctctactaaaaaatacaaaaattagctgggcaaggtggtgcatacttgttgtcccagctactcaggaggctgtggtatgagaagcacttgaacccgggaggcagaggttgcagtaagcaaagatcgaaccagaagcactccagcctgggtgacagaaaaaaaaaaagtatatatacgtatataattttgatctgctatatatatgtgtgtgtgtgtttatat

SEQ ID NO: 847905 - DNA, 518 bp, Homo sapiens
aaatatgcactatctggttctttacagaaaatgtttgctgacctctgatagaaaaacctgtcatctacagctgatataagtggataaatctatgtagagttcttagaacagtgcctgatatatatgcatgtagagatatatagatggatagagatatatgtgcatatcagcaacatgcactgttgttacttaatatctgcctcccctttaccgcccacccgctagcacattctaggatgatggaaaggctctctatctgtacggtccagtgcactagccacttgtgcctatcaagccctcgaaatgtgattaacgtgaccgaggaactgcatttgtaattatagttattataattaattttaattgaatttaaaatgccacatgtggctagtggctatcatattggacagggccctgagaacatycatgcttggcatatggtaagagctcaattaatggcagctacactcatttcctccctcttccccttctcccagcctctgttctccctctcctct

SEQ ID NO: 847906 - DNA, 616 bp, Homo sapiens
agggtggtaatacacaggggacactgaacagaagttgtcccgttgccttagcttttacaaggtgcagctggctgtgtgacaggtgaccttgtctagccactgtgagctgagtgaaggtrctgggagtagtcagctcctctcctcaaccccctcctcccagctcttgccctgtttgattctcttacgttccccacagcagaggacagctcacctgaagtgtttccccagctccaaccctctgtgtcccgccatcaaacacacagacgcacgcccacatcttcaaaaagaagagaagcccgcttcacaccaaaaggtgtttcagaatagagcctcatcattgattcaagccccgcccaacctaagagactcctgagctgctgctgccaccggtgctgaaaagaacagaagcggcttccccacacctgcacgggctgatttgcaccaaaccgctctaattagcacattccatgctctgattaggcttccaggggaagcatgccaaatgccattaattatggatgtgatcttaaattattcacttgaaatgtttttttccttgatatgcccctttcatttcccactaactttttgtcacatccaagaatagatccaatta

SEQ ID NO: 847907 - DNA, 614 bp, Homo sapiens
gtcccaaaatggtgggacatcttacagcaaagggcttacaggtyataggtggattcagacattctttaatttgcaactggttaaggaagcaaggttttgcctaaaaccttggggtcatcagaaaggaatgttatggtttggcctgtgagcgtgactgtctctaggctactcaggaagaaatttgtaaaaagattggcagtcgaaattcagtcctcacttcccccttatctgaaatctacaagacagtggtcagtatgttccaactggtgggggtccaggtttctgaagaacaactcagggacacaggtcaagaagttatctttagtttctatagggaaccaaatatcttgtggctctaacttacttgggtgacaattgttttaagctaccattgccttcttgcttttcaagttgttcatttacttctcaagtctagctaggtgcctgggattttccttgaaggaactcaagattttatttccatgcttggtggggtgggcagcaggcctctaagagggaaccctgctctgtctcaaaatgagagatgtcctcggggagcttacgctggtatagagacatcaggaaggtctgggccttgagggatagatgacatt

SEQ ID NO: 847908 - DNA, 657 bp, Homo sapiens
tgtgtggctctcctcaccttcaggtgccctcatacttgtccttacaggggcctctaatatgcatatatcccaaacacttctagctcctccacatttctcaggctctatcccacccaagtccatcaatctgtctatctgtccattcatccatccatccacctcttcctccctccacccaccgactctactgcactctcttaacaaacattcagtgcttttcttctgagccaggaatagggttataaagataactgggaattggtgcctgccttccaacagcctttgcatgtagtaatggagaagatttaccaataggtaccttcaagaggtgttagaacagctaaaggagtagtcagtacaaggttcagaggaggaggtgagagcatgggctttgggcccaggctacctgagtttcaaattctgactctaccactaacagctgtgtgaccttgggtaaactacttaacatctctgtgtctaagtcttctcattggtaacatggtgccctgttgtgcctacctcagaaggtggttattctgcttatctattgctgcataaagccagccattttattatatttcacgctgtcctgggtcagtcgctcaggctaggtctrccactcagtgcatctgctccacattctgtcagctgttgtca

SEQ ID NO: 847909 - DNA, 625 bp, Homo sapiens
agacagtgccccagtgggtaccttctgtgagggatccagccccatatgtctgctcagcattgtcttactagagtctttccatgagggctctgcccctgcagcagggttccttctgggcacccaagctttctgatacatcctcttaaacctaggtggaggataccaagcctccaccactcttgcattctggacacctgcagacttaacaccatgtggaagccaccaaagcttactgcttgcactctccggagcaatggcccacgtcatacctgggatcattagaatcacagctggagctggagtggcctggatgcagggagcagcattccaaggcatcccagggaagatgtgccccaggcctgtacccccaaaccattctgtcttcttcggcttctgggactgtgatgggagggcaaatttaaagatttctgaaatgcctttgatggcagcagcggcctttctggagcagccactgtgggcatgccaggtgcagtgggggaggtgcagtgggggaggtgcagctggggctgggtgctccacaggtgggagccctgccccctttcaagttggcaggatgggagtcctgcactcctgggcrcagctgcccaggcgaagctgcagaccc

SEQ ID NO: 847910 - DNA, 510 bp, Homo sapiens
gaataatctttttttttattattatactttaagttctggggtacatgtgtagaacatccagttttgttacataggtttatatgtgccattgtggtttgctgcacgcatcaacccaccatctacattaagtatttctcctaatgctatctctcccctagcagcccacccccccgacacgccccagtgtgtgatgttcccctccctgtgtccatgtgtcattattcacctcccacttatgagtgagaatatgtggtgtttggtttcctgttcttgagttagtttgctgagaatgacagtttccagtttcatccatgtccctgcaaaggacatgaactcatcctttttgatggctgcatagtattccatggtgtatatgagccaaattttctttatccagtttattattgattggcatttggattggttccaagtctttgctattgtgaatagtgctgcaataaacatacgtgtgyatgtgtttttatagtagaatgatttataatcatttgg

SEQ ID NO: 847911 - DNA, 634 bp, Homo sapiens
acattttaacctgttaactacttaacactgtttgcacaaacaaaggaaaactaataaaaactctaygccttaactttgttcccccattttcaactttttgatatttctgtttatacctttgtgtactgactatgtcttgaaaagttgttgtaattattattcatgattagttaattagtcattctacttaggaaaagtgtagttttaaggccagagttacagtgttgtaatattctgtttttctgtgtacttactattaccattgagttttgtaccttaaagtgattacttatttttcattaatgttattttctttctgatcgaagtattctctttaacattttttgtaggacaggtcttctgttgattaaataccttacttttgttattctggtaagactttatttctccatgtttgaaagatatttttactggatatactattctagggtaaaagtttttatttattttttccttcaagattttaaataagccattccacttctcttttcagtgaaaaccttacagacctaatttccacagaaaagtctgctgccaaatgtattggagctccattgtgtgttgtttcttttcttttgctgcttttaggatcccttcttaaatccttgatctt

SEQ ID NO: 847912 - DNA, 627 bp, Homo sapiens
tccagtgcctccttgattagcttaataatcaaccatctgaattctttttcaggcaaatcgggaatgcctttttggtttggatccaytgctggtgacctagtgtaatttttgggggttgttaaagaaccttcttttgtcatattaccagaattgtttttctagttccttctcatatggaggctatgtcagaggaaagatctggggttgaaggctgctgttcagattcttttgtcctacaaggtgctcccttgatttagtattctcccccttctcctagggatgtggcttcctgagagccaaactatagtaattgtcatttctcttctggatctagccactcagtagggctaccagtctcctggctggtactgggggttgtctgcacagaatcctgtgatgtgaaccatcttcaggtctctcagttgtggataccagcacctgctgtggtggaggcagcacaggagtgaaatggactctgtgagggtccttagttgtgattgtttaatgcactagtttttgctggttgtcctgccaggaggtggcgctttcaagagagcatcagctgtggtagtgtagggaggattaggtggtgggcagggccctggaactcccaagagactatgccct

SEQ ID NO: 847913 - DNA, 627 bp, Homo sapiens
tccagtgcctccttgattagcttaataatcaaccatctgaattctttttcaggcaaatcgggaatgcctttttggtttggatccactgctggtgacctagtgtaatttttgggggttgttaaagaaccttcttttgtcatattaccagaattgtttttctagttccttctcatatggaggctatgtcagaggaaagatctggggttgaaggctgctgttcagattcttttgtcctacaaggtgctcccttgatttagtattctcccccttctcctagggatgtggcttcctgagagccaaactatagtaattgtcatttctcttctggatctagccactcagtagggctaccagtctcctggctggtactgggggttgtctgcacagaatcctgtgatgtgaaccatcttcaggtctctcagttgtggataccagcacctgctgtggtggaggcagcacaggagtgaaatggactctgtgagggtccttagttgtgattgtttaatgcactagtttttgctggttgtcctgccaggaggtggcrctttcaagagagcatcagctgtggtagtgtagggaggattaggtggtgggcagggccctggaactcccaagagactatgccct

SEQ ID NO: 847914 - DNA, 619 bp, Homo sapiens
tgcctggctaatgtttttgtatttttagtagtgatggggtttcaccatattggccaggctggtctcaaactcctggcctcaagttatctgcttgcctcaagttatctccctgccgaaaatgctaggattacaagtgtgagccacggcacccagcctgaagcatttttctaatggcttcttaaaaatctttgttagataaatctaagtcaacatctcagtgttggcatatctatgttgtctctactcattcaagttgtgattttcttgggttttgatactacaagtgatatctgattacatcctaaacttttgtgtattatataagtagtcccagggtctcatttaaatcttttattttagaaggcagttgccctgtttaggtttagcatgtaggtcctggcttacttttgttggctgaggttacaatgacaatttaagtgcagagcctttttggtgatattttgagtgatttcgtactgtctgggcttccattggtttcrgctgctgctgcttgggatggtagactggtttccccaggccaagtccctgaatatctctagttttctggaaatctgcaggtggagaaggagtctcatattgcatggtccaagatgcttcc

SEQ ID NO: 847915 - DNA, 619 bp, Homo sapiens
tgcctggctaatgtttttgtatttttagtagtgatggggtttcaccatattggccaggctggtctcaaactcctggcctcaagttatctgcttgcctcaagttatctccctgccgaaaatgctaggattacaagtgtgagccacggcacccagcctgaagcatttttctaatggcttcttaaaaatctttgttagataaatctaagtcaacatctcagtgttggcatatctatgttgtctctactcattcaagttgtgattttcttgggttttgatactacaagtgatatctgattacatcctaaacttttgtgtattatataagtagtcccagggtctcatttaaatcttttattttagaaggcagttgccctgtttaggtttagcatgtaggtcctggcttacttttgttggctgaggttacaatgacaatttaagtgcagagcctttttggtgatattttgagtgatttcgtactgtctgggcttccattggtttcagctgctgctgcttgggatggtagactggtttccccaggccargtccctgaatatctctagttttctggaaatctgcaggtggagaaggagtctcatattgcatggtccaagatgcttcc

SEQ ID NO: 847916 - DNA, 593 bp, Homo sapiens
ccctctccctctttccacggtctccctctccctctctttccacggtctccccctgatgccgagccgaagctggactgtactgctgccatctcggctcactgcaacctccctgcctgattctcctgcctcagcctgccgagtgcctgccattgcaggcgggcgccgccacacctgactggttttcgtatttttttggtggagacagggtttcgctgtgttggcggggctggtctccagctcctaaccccgagtgatccgccagcctcggcctccggaggtgccgggattgcagagggagtctcgttcactcaatgctcaatggtgcccaggctggagtgcagtggcgtgatctcggcttgctacaacctccacctcctagctgcctgccttggcctcccaaagagccgagattgcagcctctgcctgcccgccaccccgtctgggaagtgaggagcgtctctgcctggccacctatcctctgggatgtgaggrgcccctctgcctggctgcccagtctggaaagtgaggagcgtctctgcccggccgccatcccatctaggaagtgaggagtgcctcttcccggccgccatccc

SEQ ID NO: 847917 - DNA, 563 bp, Homo sapiens
tgaagtaacaattttaaaatgtcaacatttatagcacacccaaaattatatcttttgcaagtatttaaaattatcttaaacatttttagatgtcgacctaaaaatatatgagggcctatatagtttgcaaactttttttgtaatggttctcctccttggcttcacattggagtttcctggggagcttcgaaacatgaatgactgggtcccacttccagagtttctgacggaattggtatgtggtacagcctgagcaccagaagtttttatagctccccaggtaaatctaatagctaaagtagagagctctggttttagggtaggtatgtgagcaaaaatttgtaaagaccatattttacagaaatgcctttttgtcacttctcatcccaaccccattcctggaggcagtcactcaatgtcaagatcctggcctcattagtccactgcagtttccgtctccaggtgcttcaggtactcccgaacrtaattcttgagcccttgaactagggttttctcatagtactgccttttgttctgaagagaagcatcaaagaaggtcatca

SEQ ID NO: 847918 - DNA, 597 bp, Homo sapiens
actttgaaatgagtaattcttggttgtggatggctgcatggtgcattcctcttgcgtcactcttcacaagaggccagtagtacatcctttccttatttgtgacaacgaaaaaggtctccgtacattgtcaaacgtcctctggcaggacaaaatcacctctatttgtgaacacttacctagaatgatcttctaagagtcttatactctcccattttccatgcttttggctatttatactgctttatgagatatttcttcaaatttatctctacttttgaactgttaggtctgctcttcagtgttaatagacttgatttttaaagcaattttacatttatagcaaaatcgaggggaaagtacagagatttcccgtatactctctggcccccttcctcattacacacagcctaccccgctatcaacatcccacaccagagtggtacatttgttataactgacttacatacattgatatatcattaacacycgaagtccatagtttacattagagtttgcttgtgatgttgtatcttctatgggtttggacaaatatataatgaaaggtatccaccattatagtatcacacagagtagttt

SEQ ID NO: 847919 - DNA, 597 bp, Homo sapiens
actttgaaatgagtaattcttggttgtggatggctgcatggtgcattcctcttgcgtcactcttcacaagaggccagtagtacatcctttccttatttgtgacaacgaaaaaggtctccgtacattgtcaaacgtcctctggcaggacaaaatcacctctatttgtgaacacttacctagaatgatcttctaagagtcttatactctcccattttccatgcttttggctatttatactgctttatgagatatttcttcaaatttatctctacttttgaactgttaggtctgctcttcagtgttaatagacttgatttttaaagcaattttacatttatagcaaaatcgaggggaaagtacagagatttcccgtatactctctggcccccttcctcattacacacagcctaccccgctatcaacatcccacaccagagtggtacatttgttataactgacttacatacattgatatatcattaacactcgaagtccatagtttacattagagtttgcttgtgatgttgtatcttctatggrtttggacaaatatataatgaaaggtatccaccattatagtatcacacagagtagttt

SEQ ID NO: 847920 - DNA, 625 bp, Homo sapiens
gcttaagacaattatttattctaaaactcaaaattattcrtctctaaaattaaggttctcttgagaatgaaatgatatatgtaaggctctgaacccatgcctggcacataggtgtgcctaaaaataagctcttttatcttatgcaaggtccatcttacgtgtccagaaaaagtaatgtcttgaaatttcagtacattgtcataatatcagctttaaacttaggtccttgttttatagtggttagtcagtgaattagtaagcaaaacttgctaattaaatttaggtaacttatataacttaggatgcaactttagtaaaatttaggaaagcattagccctctaagtaggagcgctatgacaaccaaattctccatttctcacatttcctaagcagtagcttaaatctaagtcagacaaaagttgatgaatgagaaattactttgagaatatggagaaacagaagagtaggtacctagggaaatgatgaaaacttctactcttatattggcagaatttagtaagccagagtaagatgcgggctgaatcagagttcataaaattaggaaagaaaaaaaaagggaagggttaactaaagacaaagttgccctttttacactcttcttag

SEQ ID NO: 847921 - DNA, 623 bp, Homo sapiens
tgagtagactcgcaaaacatcgcatacatgcacagtttttgtaatgaatagggtatacttctagaacaccagcaaatcaggtttgcccctaaaaagcaaaagtaggttgacatmcaggtaaccctgttgaatcatcaatccagctggaaaggtaaagctccaggcagcgtcggaaaagtcactgaagctgtgtgcgtgtgggtaggtgagccagcagcatcagacttacagagtttgttcttggggcagcttcatggttaaaatgcattttggaaaagagatgttcagaggttctagggaagtggtaggaacccagtgctactaactaggcatgtaatctgacatgtcaagagccattttttatggagtgactccccttcagagggcacaagaagaaagtgttgcttttttcatgaaagtgtcagtgcttgcaacttatgaaagacactgctaaaagcagaggctctatttttattctccacagcctggccactgtggtgccggggctttgctgccaaagaggaaacatgcacaagtctggtcagtaaatatcaccagctagacagtcccagctgttgttccaggatgtgttttctcattgctatctgacaggttatccttcc

SEQ ID NO: 847922 - DNA, 572 bp, Homo sapiens
ctccagcctgggtgacagagcaagactctgtctcaaaacaaaacaaaacaaacaaacaaaacgaatatctgtcgtgagaattaaggggcctatctagaggctcagggaatatttgtctccctaagaagtactgacctacgtaactctttcaacagcgagcttcatgcctgcctgtgtgtacgtatgggtttctacacatcaggccgtgaatccacatgtgtgtcattcatggactaaagcagtgattgaacacctactctgttccaggtaccgtggtagacaaggccaggagggcctctgttcctgtgggcttccgttctagtggcgagccacgtgcagcgtggttgctggagacgcgggacgctttcctgacttgcataagaaatgggcacgaggtagaaacacagtgttaagaaggcctatggggatgaggtcttgttgtcctcccacaggtgttctgtctgttcagagttctgtctcagycagatgtgggaccccaaccaaagtgtgcccccatcacgggggaggcacctgggataagagtaggttcacttttaaagacatatttggtt

SEQ ID NO: 847923 - DNA, 608 bp, Homo sapiens
atccgaacccaactgcctggctcyagagtccctgtgctgaaccccaggtccacactgccagcctggggtggccctaatgactgagtttaaggctgccctgaaagtgcatggcacggcgtcgggcaggcaggcagggaagaaattgttgttgctgctgccctcaaatggggcaagaaaggacgtgggaagagccccctgggtgacttccaaacacctgggacacagcacagttatagcggggaggggacagcccctgctgagccttccttgtcccgcccccagtcggaagccgagaggggaatttggctgagaaggcatcttcctcatagcttagatgcagagggctctggaggcgggtgattcagggtctgaagtgcctggggctcctggctctggggcagtggggtaggctgacaggggtggccctggcgagaaaggtgggtgggccaggagccagatgggggtgcctcatctaggtcccaccgccagcatcttagagggcggaggatgaaagcaacctgggggaggggctcacctgggggccatcgcagtagccaggtcttggcaggaggaggagctcggccaccactaactcaaaatcagactca

SEQ ID NO: 847924 - DNA, 477 bp, Homo sapiens
cccctcaccccctgcccctgccccataaagaatgtgggtaggattctgcggccttggacaaagactctggccacatggaaaacggggactcatcttggagcctgggatttctttctatggaatgaggctgggtgtcccgcaccccttgctcagttggccccaccggaatttctagattcctaagtcactggtggagtagatacctctcctcgccccttgagtttcctgggatgggtttggtctctgtttgggtgccttgttgtggggtttccatggggctgtctgagcttggtgattgcactgatctcgggggcaacacccctgctaccaaagccatctttgaggaggctgcagccttccttcccgggagaggtggagggaggaggaggaggaggaggtaggcactccctgagsggtgtagcagtaacggatcctgacctgtagccttgggctcaggatgagcaagaggggagcccc

SEQ ID NO: 847925 - DNA, 299 bp, Homo sapiens
cagcctcgcagtgctgggattacaggtatgagccaccgtgcccggccaataaagctgctttaaaaagagaggagagaaaaaaaataagaaaaaataaataaawaaataaaaagaaaggagatagtgatgcccatctttcaaggttgttggggggattaagtgagaaatcatgtggatggtgcctgagtgcctggaacacagtaggagcttgtagcaggtgcagtgggtgcctccactgtccctcaccctcattggcaacagcacacaccccatttccagctgccagccccttccacctt

SEQ ID NO: 847926 - DNA, 299 bp, Homo sapiens
cagcctcgcagtgctgggattacaggtatgagccaccgtgcccggccaataaagctgctttaaaaagagaggagagaaaaaaaataagaaaaaataaataaataaataaaaagaaaggagatagtgatgccyatctttcaaggttgttggggggattaagtgagaaatcatgtggatggtgcctgagtgcctggaacacagtaggagcttgtagcaggtgcagtgggtgcctccactgtccctcaccctcattggcaacagcacacaccccatttccagctgccagccccttccacctt

SEQ ID NO: 847927 - DNA, 299 bp, Homo sapiens
cagcctcgcagtgctgggattacaggtatgagccaccgtgcccggccaataaagctgctttaaaaagagaggagagaaaaaaaataagaaaaaataaataaataaataaaaagaaaggagatagtgatgcccatctttcaaggttgttggggggattaagtgagaaatcatgtggatggtgcctgagtgcctggaacacagtaggagcttgtagcaggtgcagtgggtgcctccactgtccctcaccctcattggcmacagcacacaccccatttccagctgccagccccttccacctt

SEQ ID NO: 847928 - DNA, 607 bp, Homo sapiens
tggagttttgtgttactgattgcttgccttagggtgcacatgtttggtccttgctactacttcttgacattctctaggtcctcgtattagtcagcagggctgccataacaaaataccatagaytgcatggctaaagcaacagaaatttattttctcacatttctggagtctagaagtccaagataaaggtgactttatatatacatatatatatatgtaaataactacgatacagtgtggtaagtgggtttaatagatgtatctaaaagtgctataggaaaacaaaaaaagaaaaaagtaattatatagggaaattaggaaataccatagaaagtagatgttttttagttagaatgcaaggaggtgtatacctctctaaggagaatatgttgataaaggttatttagaaaaagaagtaaaaggtgagaagtcctaagaatagttgagattatgaaatgatcatttaatgttagcaaaagccattcaagtggtttatggcataatgcaaatattctcatccatatccagtattatagtcttattaatatttacaactctgtttctatttccctttctaaaatttaaattttactttaggaaaaaaccc

SEQ ID NO: 847929 - DNA, 546 bp, Homo sapiens
gcgtgtagatgcaattttcttattgcatttgaacttccagagagctcctggtgctgtaragttctctgacaggacagtctgattctcatcatgtgtattaattagtaatttgtggttaaagacatcatcttggaggtccctgttttgtttgacatcctggaatacttctacactgcgctactgcaagaaaaatgattttaacatattttagattttctgtaatttaaaagaagattatttatactccaaagataaaatcagtagcaattacaagagaagttcaaaagtaacttttttataaatgtcaagtcaaggcgggaaagcaattatataaagtgattcaatatcatattggactcactcaagattaagaaatagtggcatttttcttgttttgaccatgaagcaaaatagttaagggtaaaggaacattatgtaatttattataaaataaatataatatagcccatatgcactaaaaaaatccagtggcaatctcctaatactgaaatgactcatttacaagccaaatgtaaaatgggcatc

SEQ ID NO: 847930 - DNA, 600 bp, Homo sapiens
ttaaatgttaaagaaaaaaagagctgcagagtgtttataaaactgtcttttagaaaaaaacaggcaagaagacgatttaaccatmtaaatggaaaagggaagaaagtataatagaaactttgctagttaaaaaaaaagaaaaacaatcccaaaaaagtccctttcttgtaaacttacagaaaattctttgtggctgttggagtttagtttgtacatacacagagttatcagacattatttataaaacttagtttaaaaaagacaaaaaaaaaaaaaaaaaagccaagctgtgagccaaccagaaggccatgctcttggatatcttttgcaactgtaccaaaactgacttactcctctgcccttcctgcgtctgtctgttgccagtgctgtggtgtcgtctgtgcctgttgaggttttgtgcagtggtaaagtgctggtgcttctggtgacctttgacctgtgggtgtcacttcttgtgcctgtttcccatgtccaattttttgagtttagttgtgcttttgcttctgctgccttgctggacataagctggggtgctgggtggcacctgctgcatcagagcttgaggagtctgtgcccacc

SEQ ID NO: 847931 - DNA, 521 bp, Homo sapiens
atcattagaatgcctggtgtcagccatgagtctctaccattacaatgcctggggcyggccaggtgtgtctatctttagaatgcctggaatcagccaagagtctctatcattagaatgcctggggtcagccaggagtctctcctgttagaatgtctgaggtcaaccaggtgtctctattcttagaatgcctgaggtcacgaagcatctctatcagtagaatgcctgaggtcagcctggagtctctctcttcagaatgcctggggttggccaggtgtctctacccttagaatgcctgaggttgcacagatgtctctatcattagaatgcctgaggttggactgaagtcttcatcattagaatgcccagggttggccagctgtctatacccttagaatgcctgatgttgcccagatgtcattaccatgacatcttagccatagaatggctaaggtcagccgggagtttctctcatttgaatgcctggggttggccaggtatctctatccttaaaatgcctgagg
